(19) United States
(12) Patent Application Publication
(10) Pub. No.: US 2006/0003958 A1
(43) Pub. Date: Jan. 5, 2006

(54) Novel polynucleotides related to oligonucleotide arrays to monitor gene expression

(76) Inventors: Mark W. Melville, Melrose, MA (US); Timothy S. Charlebois, Andover, MA (US); William M. Mounts, Andover, MA (US); Louane E. Hann, Boston, MA (US); Martin S. Sinacore, Andover, MA (US); Mark W. Leonard, Manchester, MA (US); Eugene L. Brown, Newton Highlands, MA (US); Christopher P. Miller, Arlington, MA (US); Gene W. Lee, Chelmsford, MA (US)

Correspondence Address: FITZPATRICK CELLA (WYETH), 30 ROCKEFELLER PLAZA, NEW YORK, NY, 10112-3800, US

(21) Appl. No.: 11/128,061

(22) Filed: May 11, 2005

Related U.S. Application Data
(60) Provisional application No. 60/570,425, filed on May 11, 2004.

(51) Int. Cl. A61K 48/00; C07K 14/47; C12Q 1/68; C07H 21/04; C12N 5/06

(52) U.S. Cl. 514/44; 435/6; 435/69.1; 435/358; 530/350; 536/23.5

(57) ABSTRACT

The present invention provides an oligonucleotide array capable of identifying genes and related pathways involved with the induction of a particular phenotype by a cell line, e.g., the genes and related pathways involved with the induction of transgene expression by the cell line. The invention is particularly useful when there is little or no information about the genome of the cell line being studied, because it provides methods for identifying consensus sequences for known and previously undiscovered genes, and for designing oligonucleotide probes to the identified consensus sequences. Additionally, when the array is to be used to determine optimal conditions for expression of a transgene by the cell line, the invention teaches methods of including oligonucleotide probes to transgene sequences in the array. The invention also provides methods of using the array to identify genes and related pathways involved with the induction of a particular cell line phenotype. The invention also provides novel polynucleotides of undiscovered genes (i.e., a gene that had not been sequenced and/or shown to be expressed by CHO cells) and novel polynucleotides involved with the induction of a particular cell phenotype, e.g., increased survival when grown under stressful culture conditions, increased transgene expression, decreased production of an antigen, etc. These novel polynucleotides are termed novel CHO sequences and differential CHO sequences, respectively. The invention also provides genetically engineered expression vectors, host cells, and transgenic animals comprising the novel nucleic acid molecules of the invention. The invention additionally provides antisense and RNAi molecules to the nucleic acid molecules of the invention. The invention further provides methods of using the polynucleotides of the invention.

[0001] This application claims the benefit of U.S. Provisional Application Ser. No. 60/570,425, filed May 11, 2004, incorporated herein by reference in its entirety.

[0002] This application incorporates by reference all materials on the compact discs labeled “Copy 1” and “Copy 2.” Each of the compact discs includes the following files: Table 2.txt (3,230 KB, created 11 May 2005), Table 2v2.txt (429 KB, created 11 May 2005), Table 3.txt (77.1 KB, created on 11 May 2005), Table 3v2.txt (7.82 KB, created on 11 May 2005), Table 4.txt (90.6 KB, created on 11 May 2005), Table 4v2.txt (3.93 KB, created on 11 May 2005), Table 5.txt (2,260 KB, created on 11 May 2005), Table 5v2.txt (425 KB, created on 11 May 2005), and “Sequence Listing” 01997027701.ST25.txt (7,150 KB, created on 11 May 2005). This application also incorporates by reference all materials on the compact disc labeled “CRF”; the compact disc includes “Sequence Listing” 01997027701.ST25.txt (7,150 KB, created on 11 May 2005).

### BACKGROUND OF THE INVENTION

[0003] 1. Field of the Invention

[0004] The present invention is directed toward 1) methods of forming an oligonucleotide array for monitoring (e.g., detecting the absence, presence, or quantity of) the expression levels of genes, including previously undiscovered genes, of a cell, 2) methods of using the array to verify expression by a cell of previously undiscovered genes and to discover genes and related pathways that are involved in conferring a particular cell phenotype, e.g., that can be used in the optimization of cell line culture conditions and transgene expression, and 3) sequences involved in conferring a cell phenotype optimal for transgene expression.

[0005] 2. Related Background Art

[0006] Fundamental to the present-day study of biology is the ability to optimally culture and maintain cell lines. Cell lines not only provide an in vitro model for the study of biological systems and diseases, but are also used to produce organic reagents. Of particular importance is the use of genetically engineered prokaryotic or eukaryotic cell lines to generate mass quantities of recombinant proteins. A recombinant protein may be used in a biological study, or as a therapeutic compound for treating a particular ailment or disease.

[0007] The production of recombinant proteins for biopharmaceutical application typically requires vast numbers of cells and/or particular cell culture conditions that influence cell growth and/or expression. In some cases, production of recombinant proteins benefits from the introduction of chemical inducing agents (such as sodium butyrate or valeric acid) to the cell culture medium. Identifying the genes and related genetic pathways that respond to the culture conditions (or particular agents) that increase transgene expression may elucidate potential targets that can be manipulated to increase recombinant protein production and/or influence cell growth.

[0008] Research into optimizing recombinant protein production has been primarily devoted to examining gene regulation, cellular responses, cellular metabolism, and pathways activated in response to unfolded proteins. Currently, there is no available method that allows for the simultaneous monitoring of transgene expression and identification of the genetic pathways involved in transgene expression. For example, currently available methods for detecting transgene expression include those that measure only the presence and amount of known proteins (e.g., Western blot analysis, enzyme-linked immunosorbent assay, and fluorescence-activated cell sorting), or the presence and amount of known messenger RNA (mRNA) transcripts (e.g., Northern blot analysis and reverse transcription-polymerase chain reaction). These and similar methods are not only limited in the number of known proteins and/or mRNA transcripts that can be detected at one time, but they also require that the investigator know or “guess” what genes are involved in transgene expression prior to experimentation (so that the appropriate antibodies or oligonucleotide probes are used). Another limitation inherent in blot analyses and similar protocols is that proteins or mRNA that are the same size cannot be distinguished. Considering the vast number of genes contained within a single genome, identification of even a minority of genes involved in a genetic pathway using the methods described above is costly and time-consuming. Additionally, the requirement that the investigator have some idea regarding which genes are involved does not allow for the identification of genes and related pathways that were either previously undiscovered or unknown to be involved in the regulation of transgene expression.

[0009] To overcome the limited number of transcripts that can be detected with hybridization protocols similar to Northern blot analysis, U.S. Pat. No. 6,040,138 provides a method of monitoring the expression of a multiplicity of genes using hybridization to oligonucleotide arrays, e.g., high-density oligonucleotide arrays (or microarrays). Hybridization to high-density oligonucleotide arrays provides a fast and reliable method to determine the presence and amount of known mRNA transcripts and can be readily applied in detecting diseases, identifying differential gene expression between two samples, and screening for compositions that upregulate or downregulate the expression of particular genes. Additionally, U.S. Pat. No. 6,040,138 teaches methods of optimizing oligonucleotide probesets to be included in the array.

[0010] However, the method described in U.S. Pat. No. 6,040,138 requires that oligonucleotide probes be made to the polynucleotide sequences of known genes. Consequently, the methods of making and using an array directed toward an organism as described in U.S. Pat. No. 6,040,138 cannot be used to detect the expression of previously undiscovered genes of a cell or cell line, i.e., genes that have not been previously sequenced and/or previously shown to be expressed by the particular cell line derived from an organism to which the array is directed. In other words, high density oligonucleotide arrays have not been directed toward, and thus have not been useful for, monitoring gene expression levels in cells or cell lines derived from an organism for which little genomic information is available (i.e., an unsequenced organism, e.g., monkeys, pigs, hamsters, etc.) (see, e.g., Korke et al. (2002) J. Biotech. 94:73-92). Monitoring the gene expression levels of such cells or cell lines has been performed using high-density oligonucleotide arrays directed toward other organisms for which the whole genome is available (or the sequencing effort is near completion) and that are phylogenetically close, e.g., use of human arrays to monitor gene expression levels in monkey cells (Gagneux and Varki (2001) Mol. Phylogenet. Evol. 18:2-13) and use of rodent arrays to monitor gene expression levels in cells derived from hamsters (Korke et al., supra). Additionally, the method described in U.S. Pat. No. 6,040,138 does not disclose a protocol with which sequences or subsequences (i.e., consecutive nucleotides identical to, but less than, the full sequence) of unknown genes can be determined. Consequently, whereas U.S. Pat. No. 6,040,138 allows for simultaneous monitoring of a multiplicity of genes, it does not solve the problem of identifying previously undiscovered genes and related genetic pathways, e.g., those that may be regulated in a cell in response to a particular culture condition. Additionally, U.S. Pat. No. 6,040,138 does not teach the use of microarray technology to either confirm or improve transgene expression by genetically engineered cells.

[0011] The present invention solves these problems by providing methods that will generate the sequences and subsequences of previously undiscovered genes in a cell or cell line, e.g., cells or cell lines derived from unsequenced organisms. The invention also provides a method by which these sequences are used to generate an oligonucleotide array that may be used to 1) verify expression of previously undiscovered genes, 2) verify expression of a transgene, and 3) determine genes (including previously undiscovered genes) and related genetic pathways that are involved (directly or indirectly) with a particular cell phenotype, e.g., increased and efficient transgene expression. Discovery of these genes and/or related pathways will provide new targets that can be manipulated to improve the yield and quality of recombinant proteins and influence cell growth.

### SUMMARY OF THE INVENTION

[0012] The present invention utilizes oligonucleotide microarray technology to identify genes and related pathways regulated in response to specific culture conditions, especially those conditions that result in optimal expression of transferred genes (transgenes) by genetically engineered cells or genetically engineered cell lines. In particular, the invention provides methods for forming an oligonucleotide array directed toward unsequenced organisms, which methods generally comprise determining the sequences or subsequences of genes expressed by the cell line, and designing an oligonucleotide array for these sequences. The sequences or subsequences of genes expressed by the cell line are determined by collecting a plurality of nucleic acid sequences, clustering and aligning said plurality of nucleic acid sequences, and identifying consensus sequences from the clustered and aligned plurality of nucleic acid sequences. Oligonucleotide probes are then designed based on identified consensus sequences, as well as transgene and control sequences. The oligonucleotide probes may then be immobilized in a random but known location on a surface to form the oligonucleotide array.

[0013] Thus the invention provides a method of forming an oligonucleotide array directed toward an unsequenced organism, wherein the method comprises the steps of (1) identifying a plurality of template sequences, wherein the plurality comprises at least one consensus sequence for a gene expressed by the unsequenced organism, and (2) selecting a plurality of oligonucleotide probes, wherein the plurality of oligonucleotide probes comprises a first set of oligonucleotide probes, each of which is specific for one of the plurality of template sequences, and wherein at least one oligonucleotide probe is specific for the at least one consensus sequence for a gene expressed by a cell derived from the unsequenced organism; wherein the step of selecting the plurality of oligonucleotide probes forms the oligonucleotide array. In one embodiment of the invention, the at least one consensus sequence for the unsequenced organism may be generated from at least two nucleic acid sequences of different genera of the unsequenced organism, and/or from at least two nucleic acid sequences of different species of the unsequenced organism. For example, the unsequenced organism may be hamster, and the consensus sequence may be generated from a nucleic acid sequence of a cell derived from, e.g., Mesocrecetus auratus (Golden Hamster) and a nucleic acid sequence of a cell derived from, e.g., Cricetulus migratorius (Armenian Hamster). Alternatively, the consensus sequence may be generated from a nucleic acid sequence of a cell derived from, e.g., Cricetulus migratorius (Armenian Hamster) and a nucleic acid sequence of a cell derived from, e.g., Cricetulus griseus (Chinese Hamster). In some embodiments, the plurality of template sequences comprises at least one template sequence selected from the group consisting of the polynucleotide sequences of SEQ ID NOs:19-3572 and SEQ ID NOs:3661-7214, complements thereof, and subsequences thereof. In other embodiments, the plurality of template sequences may further comprise at least one other hamster sequence (e.g., a hamster sequence selected from the group consisting of the polynucleotide sequences of SEQ ID NOs:3573-3575 and SEQ ID NOs:7215-7217, complements thereof, and subsequences thereof), at least one transgene sequence (e.g., a transgene sequence selected from the group consisting of the polynucleotide sequences of SEQ ID NOs:1-18 and SEQ ID NOs:3643-3660, complements thereof, and subsequences thereof) and/or at least one control sequence (e.g., a control sequence selected from the group consisting of the polynucleotide sequences of SEQ ID NOs:3576-3642 and SEQ ID NOs:7218-7284, complements thereof, and subsequences thereof). Also, the plurality of oligonucleotide probes may further comprise a second set of oligonucleotide probes, each of which is a mismatch probe for a different oligonucleotide probe. The method of forming an oligonucleotide array may also include a last step of immobilizing the plurality of oligonucleotide probes to a solid phase support.

[0014] The invention also provides oligonucleotide arrays (that may or may not be immobilized to a solid phase support) directed toward an unsequenced organism. Generally, such arrays comprise a first plurality of oligonucleotide probes, each of which is specific to one of a plurality of template sequences, wherein the plurality of template sequences comprises at least one consensus sequence for a gene expressed by a cell derived from the unsequenced organism. In one embodiment of the invention, the consensus sequence may be generated from at least two nucleic acid sequences of different genera of the unsequenced organism, and/or from at least two nucleic acid sequences of different species of the unsequenced organism. In some embodiments, the plurality of template sequences comprises a template sequence selected from the group consisting of the polynucleotide sequences of SEQ ID NOs:19-3572 and SEQ ID NOs:3661-7214, complements thereof, and subsequences thereof. In other embodiments, the plurality of template sequences may further comprise at least one other hamster sequence (e.g., a hamster sequence selected from the group consisting of the polynucleotide sequences of SEQ ID NOs:3573-3575 and SEQ ID NOs:7215-7217, complements thereof, and subsequences thereof), at least one transgene sequence (e.g., a transgene sequence selected from the group consisting of the polynucleotide sequences of SEQ ID NOs:1-18 and SEQ ID NOs:3643-3660, complements thereof, and subsequences thereof) and/or at least one control sequence (e.g., a control sequence selected from the group consisting of the polynucleotide sequences of SEQ ID NOs:3576-3642 and SEQ ID NOs:7218-7284, complements thereof, and subsequences thereof). Also, the array may further comprise a second plurality of oligonucleotide probes, each of which is a mismatch probe for a different oligonucleotide probe.

[0015] It will be clear to one of skill in the art that the present invention is particularly useful for a cell line when both known genes and previously undiscovered genes (i.e., genes that, at the time of experimentation, have not been sequenced, or were sequenced but not shown to be expressed by the cell line) are included in said plurality of nucleic acid sequences. Generally, the nucleic acid sequences of known genes will be available from public databases. In contrast, the nucleic acid sequences of previously undiscovered genes must be obtained using other methods, such as generating a complementary DNA (cDNA) library for the cell line and identifying expressed sequence tags from the library. It is part of the present invention to provide nucleic acid sequences of previously undiscovered genes such that the oligonucleotide probes specific for the sequences (or subsequences thereof) of previously undiscovered genes may be included on an oligonucleotide array, and such that, via methods of using the oligonucleotide array, expression of such previously undiscovered genes by the cell line may be determined and/or verified to be involved in conferring a particular cell phenotype.

[0016] The invention is also related to methods of using the array, generally comprising the steps of providing a pool of target nucleic acids comprising, or derived from, mRNA transcripts isolated from a sample of the cell line; incubating the pool of target nucleic acids with the oligonucleotide array to allow target nucleic acids to hybridize to complementary oligonucleotide probes; and detecting the hybridization profile resulting from the target nucleic acids hybridizing with the corresponding complementary oligonucleotide probes. The invention comprises analyzing the resulting hybridization profile for useful information; for example, the analysis of the hybridization profile will yield information regarding the genes and related pathways activated during a particular culture condition that influences the expression of a particular cell phenotype.

[0017] Thus, the invention provides methods for detecting the absence, presence, and/or quantity of expression levels of a plurality of genes in a cell derived from an unsequenced organism. These methods generally comprise forming a hybridization profile by incubating target nucleic acids prepared from a cell with an array of the invention, and detecting the hybridization profile, wherein the hybridization profile is indicative of the absence, presence, and/or quantity of expression levels of a plurality of genes in the cell. As described above, the method may be particularly useful for detecting the absence, presence, and/or quantity of expression level of a previously undiscovered gene of the cell and/or a transgene. In some embodiments, the unsequenced organism is a hamster. In other embodiments, the cell is a CHO cell.

[0018] The invention also provides a method for comparing expression levels of a plurality of genes in a first cell derived from an unsequenced organism to expression levels of the plurality of genes in a second cell derived from the unsequenced organism, the method comprising the steps of (a) forming a first and second hybridization profile, wherein the first hybridization profile is formed by incubating target nucleic acids prepared from the first cell with a first array of the invention, and wherein the second hybridization profile is formed by incubating target nucleic acids prepared from the second cell with a second array identical to the first array; (b) detecting the first and second hybridization profiles; and (c) comparing the first and second hybridization profiles. In one embodiment of the invention, the first cell and the second cell are from the same cell line, wherein the first cell is modified with a transgene, and wherein the second cell is not modified with the transgene. In another embodiment, the first cell differs from the second cell with respect to a culture condition, e.g., duration of culture, temperature, serum concentration, nutrient concentration, metabolite concentration, pH, lactate concentration, ammonia concentration, oxidation level, sodium butyrate concentration, valeric acid concentration, hexamethylene bisacetamide concentration, cell concentration, cell viability, and recombinant protein concentration.

[0019] In another preferred embodiment of the invention, information related to gene expression levels aids in the diagnosis and remedy of suboptimal culture conditions, and/or in determining whether a cell line has been successfully engineered to express a transgene. One of skill in the art will recognize that such information can be particularly useful in optimizing transgene expression by various cell lines.

[0020] As such, the invention also provides isolated polynucleotides that are of previously undiscovered genes and/or are involved with the survival of cells when grown under stressful conditions, transgene expression, and/or the production of potential antigens, and methods of using polynucleotides of the invention to identify compounds capable of increasing transgene expression by a cell population. An isolated polynucleotide of the invention may have a polynucleotide sequence selected from the group consisting of the polynucleotide sequences of SEQ ID NOs:3421-3574, complements thereof, and subsequences thereof (e.g., a polynucleotide sequence selected from the group consisting of the polynucleotide sequences of SEQ ID NOs:7063-7216, complements thereof, and subsequences thereof). The invention also provides genetically engineered expression vectors, host cells, and transgenic animals comprising the nucleic acid molecules of the invention. The invention additionally provides inhibitory polynucleotides, e.g., antisense and RNA interference (RNAi) molecules, to the nucleic acid molecules of the invention. The invention further provides methods of using inhibitory polynucleotides of the invention to increase transgene expression by a population of cells, e.g., CHO cells.

### BRIEF DESCRIPTION OF THE DRAWINGS

[0021] FIG. 1: Generation of a Consensus Sequence and Complementary Oligonucleotide Probes for a Multi-Sequence Cluster

[0022] The GenBank sequence designated Accession No. AB014876, subject to clustering and alignment analysis, formed a multi-sequence cluster with two expressed sequence tag (EST) sequences obtained from a Chinese Hamster Ovary (CHO) cDNA library. Regions of low-complexity sequence and vector sequence were replaced with X's (boxed regions), and the unambiguous and consecutive homologous regions were used as templates to generate perfect match oligonucleotide probes 25 nucleotides in length. Examples of such probes are shown in the figure, which presents nucleotides 1-300 of the full-length GenBank sequence (i.e., 709 nucleotides).

### DETAILED DESCRIPTION OF THE INVENTION

[0023] The invention disclosed herein is directed toward an oligonucleotide array that can be used to verify the expression of a plurality of genes (including previously undiscovered genes) by a cell (or cell line) derived from an unsequenced organism, and to identify genes (including previously undiscovered genes) and related pathways that may be involved with the induction of a particular cell phenotype, e.g., increased and efficient transgene expression. Thus the invention provides the arrays, methods of making such arrays, and methods of using such arrays to 1) monitor (e.g., detect the absence, presence, and/or quantity of) expression levels of a plurality of genes, including previously undiscovered genes and/or transgenes, by a cell or cell line, and/or 2) determine genes and related pathways involved with conferring a particular cell phenotype, e.g., increased transgene expression, the methods comprising the steps of using an array of the invention. Accordingly, the present invention also provides sequences that are shown to be involved in transgene regulation, some of which are previously undiscovered genes, i.e., genes that, at the time of experimentation, had not been sequenced, or were sequenced but not verified to be expressed by the cell line.

### METHOD OF MAKING AN ARRAY OF THE INVENTION

[0024] An object of the present invention is to provide a method of forming an oligonucleotide array that can be used to verify the expression of previously undiscovered genes by a cell (e.g., a cell line) and to identify genes (including previously undiscovered genes) and related pathways that may be involved with the induction of a particular cell phenotype, e.g., increased and/or efficient transgene expression. As taught herein, the method of forming an oligonucleotide array directed toward an unsequenced organism comprises the steps of (1) identifying a plurality of template sequences, wherein the plurality comprises at least one consensus sequence for a gene expressed by a cell derived from the unsequenced organism, and (2) selecting a plurality of oligonucleotide probes, wherein the plurality of oligonucleotide probes comprises a first set of oligonucleotide probes, each of which is specific for one of the plurality of template sequences, and wherein at least one oligonucleotide probe is specific for the at least one consensus sequence for a gene expressed by the unsequenced organism; wherein the step of selecting the plurality of oligonucleotide probes forms the array of nucleic acids.

I) Identification of Template Sequences

[0025] Template sequences are those sequences to which oligonucleotide probes of the invention will hybridize under oligonucleotide array hybridization conditions. Additionally, a template sequence may be a consensus sequence to a gene of a cell (including a previously unidentified gene), a transgene sequence, or a control sequence. The identification of consensus sequences to known or previously undiscovered genes of a cell derived from an unsequenced organism is described.

[0026] The consensus sequences are identified by the well-known method of clustering and aligning a plurality of nucleic acid sequences. Nucleic acid sequences may be gene coding sequences and/or expressed sequence tag (EST) sequences.

[0027] Whether gene coding sequences are open reading frame (ORF) sequences or exon sequences, which may include 5′ or 3′ untranslated regions (UTRs) in addition to the ORF sequence, depends on the source organism from which the gene coding sequences are obtained. For example, if the source organism is prokaryotic, gene coding sequences are single-exon ORF sequences that do not contain 5′ or 3′ UTRs. However, if the source organism is eukaryotic, the gene coding sequences are comprised of multiple exon sequences, which may include 5′ or 3′ UTRs. As protocols used in the invention, such as the in vitro transcription protocol, are 3′-biased (based on the utilization of the oligo-dT primer), exon sequences, specifically those containing 3′ UTR sequence, as opposed to simply the ORF sequences, should be used whenever possible. However, if these transcription protocols are replaced with unbiased protocols, the inclusion of 3′ UTRs becomes less important. For the sake of clarity, use of the phrase “gene coding sequence” includes ORF and/or exon sequences, whichever is appropriate according to source organism and transcription protocols of the invention.

[0028] Preferred gene coding sequences of the invention may be obtained from incomplete and complete genomic sequences that are publicly available, or may be generated by prediction algorithms that are well known in the art. For example, gene coding sequences that are generated by prediction algorithms may include previously undiscovered genes. In a preferred embodiment, when both incomplete and complete genomic sequences are used, the incomplete genomes are oriented based on alignment to complete genomes. Additionally, gene coding sequences are separated based on whether they are oriented 5′ to 3′ on the sense (plus) strand or the antisense (minus) strand of their respective genome prior to clustering and alignment, such that plus and minus gene coding sequences are analyzed separately. Separately analyzing of the plus or minus gene coding sequences prevents the clustering and alignment of gene coding sequences that overlap each other on opposite strands of the genomic sequence. Although the strand assignment is arbitrary, it may be performed such that the genomic sequences that provided the gene coding sequences are highly conserved in primary and secondary structure. For example, upon orienting the genomic sequences, sequence fragments for each incomplete genome can be bridged with six-frame stop sequences, an example of which is 5′-CTAACTAATTAG-3′ (set forth as SEQ ID NO:7285). The plus or minus assignment then proceeds such that gene coding sequences obtained from incomplete genomes are assigned the same designation as highly homologous or identical regions on complete genomes. In another preferred embodiment, the genomic sequences are also screened for low-complexity sequence regions (repeats, etc.) and contaminating vector sequences. Any stretch of a genomic sequence meeting these criteria may be masked by replacing the nucleotides with a poly-X sequence of similar length prior to clustering and aligning. Three examples of such poly-X sequences are shown in FIG. 1.

[0029] One of skill in the art will recognize that it will be easier to assign gene coding sequences to the plus or minus strand when differences among the genomic sequences are small. In other words, the orientation of incomplete genomic sequences to complete genomic sequences will be easier when, e.g., the genomic sequences are obtained from different strains of a bacterial species as compared to when, e.g., the genomic sequences are obtained from different species and/or genera of an animal. Although strand assignment of the gene coding sequences may not be possible, e.g., when they are obtained from different species and/or genera of an animal, the lack of gene coding sequence separation will not affect the invention, as separation of gene coding sequences prior to alignment and clustering is just one embodiment of the invention.

[0030] Preferred EST sequences of the invention may be obtained from cDNA libraries generated from cells or cell lines using methods well known in the art; such methods are exemplified in Example 1.1. One of skill in the art will recognize that including EST sequences obtained from cells or cell lines grown in different culture conditions will increase the potential of including sequences of genes involved in, e.g., cell growth and maintenance and/or transgene production. A skilled artisan will also recognize that EST sequences generated from a cDNA library are generally submitted in a 3′ to 5′ direction. In one embodiment of the invention, an internal 3′ read, e.g., a poly-T tail, is included in all EST sequences. This internal 3′ read provides quality assurance regarding the directionality of the EST sequence (e.g., whether the sequence is disclosed 3′ to 5′, or vice versa). Additionally, the 3′ read provides a means by which to orient a consensus sequence identified from the EST sequence. When necessary, suspicious EST sequences, e.g., those for which orientation is unknown and/or may not be inferred from other sequences in the sequence collection, may be excluded from the cluster and alignment analysis. Alternatively, it may be beneficial to include the reverse complement of the suspicious sequence in the initial cluster and alignment analysis.

[0031] It also will be apparent to one of skill in the art that, whereas any gene coding sequence and/or EST sequence may be used, the most useful nucleic acid sequences are isolated from either the cells or cell line(s) to be monitored or the unsequenced organism (e.g., unsequenced animal) from which the cell line was derived. Gene coding sequences and EST sequences of the animal from which the cell line was derived can be isolated from any genus, species or strain that has the same animal classification. As a nonlimiting example, when culturing and monitoring the Chinese Hamster Ovary (CHO) cell line derived from the hamster (an unsequenced organism), gene coding sequences and EST sequences isolated from CHO cells, Cricetulus griseus (Chinese hamster), as well as other hamsters, such as Cricetulus migratorius (Armenian hamster) and Mesocricetus auratus (Golden hamster), can be clustered and aligned to identify consensus sequences. A skilled artisan will recognize that inclusion of gene coding sequences and/or EST sequences from animals other than the genus and/or species from which the cell was derived increases the likelihood that a consensus sequence to a previously undiscovered gene of the cell will be identified.

[0032] Gene coding sequences and EST sequences are clustered such that homologous sequences (defined by parameters such as sequence identity over a certain number of base pairs), and single transcripts that were included in the plurality of nucleic acid sequences multiple times, may be aligned. Suitable clustering and alignment methods include, but are not limited to, manually curating the sequences, utilizing well-defined computer software packages, or a combination of both. In a preferred embodiment, clustering and alignment methods are repeated and the parameters that define homologous sequences become more stringent with each repetition of clustering and alignment. For example, one of skill in the art may begin the clustering and alignment method by defining homologous sequences as those that demonstrate a minimum threshold of 85% sequence identity over a 300 base pair region. In subsequent repetitions of clustering and alignment, the definition of homologous sequences may become more stringent, e.g., it may be defined as sequences that demonstrate 90% sequence identity over a 100 base pair region. Such parameters are well known to one of skill in the art. In a more preferred embodiment of the invention, all clusters are manually curated to verify cluster membership. Upon manual curation, and prior to the identification of consensus sequences, some clusters are joined or separated based on homologies well known in the art.

[0033] One of skill in the art will recognize that some of the methods by which the plurality of nucleic acid sequences is obtained may cause the gene coding sequences or EST sequences to contain regions that are not truly contained within the genomic sequences or cDNA sequences from which the gene coding sequences or EST sequences are derived. These regions may include, e.g., portions of the expression vectors used to sequence the gene coding sequences or EST sequences. As such, screening the plurality of nucleic acid sequences for these regions, and similar regions, e.g., low-complexity regions, prior to the clustering and alignment analysis will aid in clustering and aligning homologous gene coding sequences and/or EST sequences. One of skill in the art will recognize that masking vector regions or low-complexity regions will increase the likelihood that homologous sequences will cluster because they represent single transcripts included in the plurality of nucleic acid sequences multiple times, and not because they contain similar vector regions or low-complexity regions.

[0034] Consensus sequences are generated for singleton clusters containing an exemplar sequence (i.e., only one gene coding sequence or EST sequence), and multi-sequence clusters containing more than one gene coding sequence and/or EST sequence. The consensus sequence for a singleton cluster is simply the sequence of the exemplar sequence. However, a consensus sequence for a multi-sequence cluster is derived after aligning each of the sequences within a multi-sequence cluster, and identifying a consensus nucleotide for each position of the consensus sequence.

[0035] The consensus nucleotide at a particular position of the consensus sequence depends on the nucleotides present at the same position in the clustered and aligned sequences. If the nucleotides at a given position of the alignment are identical for each of the clustered and aligned sequences, then the resulting consensus nucleotide at that position is the nucleotide in common. However, if the nucleotides at a given position of the alignment are different among the clustered and aligned sequences, then the resulting consensus nucleotide at that position is designated with an ambiguous nucleotide code according to International Union of Pure and Applied Chemistry (IUPAC) base representation, which is consistent with the WIPO standard ST.25 (IUPAC-IUB Symbols For Nucleotide Nomenclature: Cornish-Bowden (1985) Nucl. Acids Res. 13:3021-30). These nucleotide differences may be due to variations in the sequences clustered in the multi-sequence clusters and/or the inability to distinguish the correct nucleotide for a particular position, i.e., areas of low homology. Regardless of the cause, nucleotide differences among clustered and aligned gene coding and/or EST sequences are not resolved in the consensus sequence; this prevents biasing probes towards one particular gene coding sequence and/or EST sequence. In other words, consensus sequences containing ambiguous nucleotides may still be used to generate oligonucleotide probes. During probe selection, as described in greater detail below, these areas of low homology are taken into account and oligonucleotides to these regions are excluded.

[0036] In addition to gene coding sequences and EST sequences (e.g., from cells or cell line(s) to be monitored, animals from which the cell line was derived, etc.), it will be clear to one of skill in the art that inclusion of transgene sequences in the alignment and clustering analysis will prove beneficial, especially when the array is used to determine the optimal conditions for expression of the transgene by a cell line. Transgene sequences can include product sequences that code for the recombinant protein of interest and product-related sequences that are often transferred with the product sequence, such as the gene for the resistance marker neomycin. When transgene sequences are included in the clustering and alignment analysis, it may be the case that they will cluster with consensus sequences of the cell line, even if the transgene sequence and cell line are from different animals. However, due to the disparity between gene sequences of different animals, a transgene sequence, or portions thereof, should align by itself. Again, manual curation of all multi-sequence clusters ensures proper sequence membership for all clustering and alignment results. Nonlimiting examples of exemplary transgene sequences are shown in Table 1.

TABLE 1
Exemplary transgenes

| | SEQ |
|---|---|
| Name | ID NO |
| Neomycin phosphotransferase II | 1 |
| Internal ribosomal entry site (IRES) | 2 |
| Human bone morphogenetic protein 2A | 3 |
| Hamster dihydrofolate reductase | 4 |
| Human beta-1,6-N-acetylglucosaminyltransferase | 5 |
| Human alpha(1,3)fucosyltransferase | 6 |
| Human antibody against A-beta protein (light chain) | 7 |
| Human antibody against A-beta protein (heavy chain) | 8 |
| Mouse dihydrofolate reductase | 9 |
| Human paired basic amino acid cleaving enzyme (PACE) | 10 |
| Human p-selectin glycoprotein ligand-1 | 11 |
| Human recombinant coagulation factor IX | 12 |
| Human recombinant coagulation factor VIII | 13 |
| (B-domain deleted) | |
| Human soluble interleukin-13 receptor, alpha 2 | 14 |
| Human blood platelet membrane glycoprotein IB- | 15 |
| alpha (N-terminus) fused to mutated Fc IgG1 | |
| Human soluble TNF receptor-2 p75 | 16 |
| Human antibody against myostatin (light chain) | 17 |
| Human antibody against myostatin (heavy chain) | 18 |

[0037] In one embodiment of the invention, publicly available and predicted gene coding sequences and EST sequences from hamsters (e.g., gene coding sequences and/or EST sequences from Mesocricetus auratus (Golden Hamster), Cricetulus migratorius (Armenian hamster), Cricetulus griseus (Chinese Hamster), the CHO cell line, etc.) are aligned to identify consensus sequences. Exemplary consensus sequences identified by clustering and aligning publicly available and predicted gene coding sequences and EST sequences from hamsters are listed in Table 2 and set forth as SEQ ID NOs: 19-3572. Table 2 provides the SEQ ID NO of each listed sequence, an accession number for each listed sequence, the one or more species from which the consensus sequence was obtained, a header for each consensus sequence, wherein each header includes a qualifier as well as other information for the corresponding sequence, and the nucleotide sequence of each sequence. As demonstrated in Example 3 below, a plurality of the consensus sequences listed in Table 2 were previously undiscovered genes of CHO cells (i.e., have not been sequenced before or shown to be expressed in CHO cells) but the expression of which in CHO cells is now verified, and/or were not previously known to be involved in the survival of cells grown under stressful conditions, transgene expression, and/or production of possible antigens, but of which the downregulation is correlated with survival, increased transgene expression, and/or decreased production of possible antigens. Listed in Tables 2 and 3 and set forth as SEQ ID NOs: 3439-3573 are nonlimiting and exemplary gene sequences that were previously undiscovered but are verifiably expressed by CHO cells. Listed in Tables 2 and 4 and set forth as SEQ ID NOs: 3421-3572 are nonlimiting and exemplary gene sequences demonstrated to be involved in cell survival when cells are cultured under stressful conditions, with increased transgene expression, and/or a lower production of the sialic acid N-glycolylneuraminic acid (NGNA); thus, these sequences may serve as exemplary targets to increase the survival of cells grown under stressful culture conditions, increase transgene expression by gene modified cells, and/or decrease the production of possible human antigens by cells. Also listed in Table 2 are other hamster sequences, i.e., hamster caspase 8, hamster caspase 9, and hamster BCLXL, which are set forth as SEQ ID NOs:3573-3575, respectively. Table 2 also provides a list of control sequences set forth as SEQ ID NOs:3576-3642.

II) Selecting Oligonucleotide Probes

[0038] Oligonucleotide probes used in this invention comprise nucleotide polymers or analogs and modified forms thereof such that hybridizing to a pool of target nucleic acids occurs in a sequence specific manner under oligonucleotide array hybridization conditions. As used herein, the term “oligonucleotide array hybridization conditions” refers to the temperature and ionic conditions that are normally used in oligonucleotide array hybridization. In many examples, these conditions include 16-hour hybridization at 45° C., followed by at least three 10-minute washes at room temperature. The hybridization buffer comprises 100 mM MES, 1 M [Na+], 20 mM EDTA, and 0.01% Tween 20. The pH of the hybridization buffer can range between 6.5 and 6.7. The wash buffer is 6×SSPET, which contains 0.9 M NaCl, 60 mM NaH2PO4, 6 mM EDTA, and 0.005% Triton X-100. Under more stringent oligonucleotide array hybridization conditions, the wash buffer can contain 100 mM MES, 0.1 M [Na+], and 0.01% Tween 20. See also GENECHIP® EXPRESSION ANALYSIS TECHNICAL MANUAL (701021 rev. 3, Affymetrix, Inc. 2002), which is incorporated herein by reference in its entirety.

[0039] As is known by one of skill in the art, oligonucleotide probes can be of any length. Preferably, oligonucleotide probes of the invention are 20 to 70 nucleotides in length. Most preferably, oligonucleotide probes of the invention are 25 nucleotides in length. In one embodiment, the nucleic acid probes of the present invention have relatively high sequence complexity. In many examples, the probes do not contain long stretches of the same nucleotide. In addition, the probes may be designed such that they do not have a high proportion of G or C residues at the 3′ ends. In another embodiment, the probes do not have a 3′ terminal T residue. Depending on the type of assay or detection to be performed, sequences that are predicted to form hairpins or interstrand structures, such as “primer dimers,” can be either included in or excluded from the probe sequences. In many embodiments, each probe employed in the present invention does not contain any ambiguous base.

[0040] Oligonucleotide probes are made to be specific for (e.g., complementary to (i.e., capable of hybridizing to)) a template sequence. Any part of a template sequence can be used to prepare probes. Multiple probes, e.g., 5, 10, 15, 20, 25, 30, or more, can be prepared for each template sequence. These multiple probes may or may not overlap each other. Overlap among different probes may be desirable in some assays. In many embodiments, the probes for a template sequence have low sequence identities with other template sequences, or the complements thereof. For instance, each probe for a template sequence can have no more than 70%, 60%, 50% or less sequence identity with other template sequences, or the complements thereof. This reduces the risk of undesired cross-hybridization. Sequence identity can be determined using methods known in the art. These methods include, but are not limited to, BLASTN, FASTA, and FASTDB. The Genetics Computer Group (GCG) program, which is a suite of programs including BLASTN and FASTA, can also be used. Preferable sequences for template sequences include, but are not limited to, consensus sequences, transgene sequences, and control sequences (i.e., sequences used to control or normalize for variation between experiments, samples, stringency requirements, and target nucleic acid preparations). Additionally, any subsequence of consensus, transgene and control sequences can be used as a template sequence. In one embodiment of the invention, at least one consensus sequence listed in Table 2 is used as a template sequence. In a preferred embodiment of the invention, at least one consensus sequence listed in Table 3 is used as a template sequence. In another preferred embodiment of the invention, at least one consensus sequence listed in Table 4 is used as a template sequence.

[0041] In one embodiment of the invention, only certain regions (i.e., tiling regions) of consensus, transgene and control sequences are used as template sequences for the oligonucleotide probes used in this invention. One of skill in the art will recognize that protocols that may be used in practicing the invention, i.e., in vitro transcription protocols, often result in a bias toward the 3′-ends of target nucleic acids. Consequently, in one embodiment of the invention, the region of the consensus sequence or transgene sequence closest to the 3′-end of a consensus sequence is most often used as a template for oligonucleotide probes. Generally, if a poly-A signal could be identified, the 1400 nucleotides immediately prior to the end of the consensus or transgene sequences are designated as a tiling region. Alternatively, if a poly-A signal could not be identified, only the last 600 nucleotides of the consensus or transgene sequence are designated as a tiling region. However, it should be noted that the invention is not limited to using only these tiling regions within the consensus, transgene and control sequences as templates for the oligonucleotide probes. Indeed, a tiling region may occur anywhere within the consensus, transgene or control sequences. For example, as described in greater detail below, the tiling region of a control sequence may comprise regions from both the 5′ and 3′-ends of the control sequence. In fact, the entire consensus, transgene or control sequence may be used as a template for oligonucleotide probes. Tiling sequences that may be used for each of the transgene sequences set forth in Table 1; and the consensus sequences, other hamster sequences, and control sequences set forth in Table 2; are listed in Table 5 and are set forth as SEQ ID NOs:3643-7284, where SEQ ID NO:3642+n is an exemplary tiling sequence for SEQ ID NO:n (e.g., SEQ ID NO:3643 may be used as the tiling sequence for SEQ ID NO: 1; SEQ ID NO:3661 may be used as the tiling sequence for SEQ ID NO:19; SEQ ID NO:7213 maybe used as the tiling sequence for SEQ ID NO:3571; etc.).

[0042] In one embodiment of the invention, an oligonucleotide array is designed to comprise perfect match probes to a plurality of consensus sequences (i.e., consensus sequences for multi-sequence clusters, and consensus sequences for exemplar sequences) identified as described above. In another embodiment, the oligonucleotide array is designed to comprise perfect match probes to both consensus and transgene sequences. It will be apparent to one of skill in the art that inclusion of oligonucleotide probes to transgene sequences will be useful when a cell line is genetically engineered to express a recombinant protein encoded by a transgene sequence, and the purpose of the analysis is to confirm expression of the transgene and determine the level of such expression. In those cases where the transgene is linked in a bicistronic mRNA to a downstream ORF, such as dihydrofolate reductase (DHFR), the level of transgene expression may also be determined from the level of expression of the downstream sequence. In another embodiment of the invention, the oligonucleotide array further comprises control probes that normalize the inherent variation between experiments, samples, stringency requirements, and preparations of target nucleic acids. The composition of each of these types of control probes is described in U.S. Pat. No. 6,040,138, incorporated herein in its entirety by reference. For a more detailed description, the purposes of the control probes are briefly described below.

[0043] It is well known to one of skill in the art that two pools of target nucleic acids individually processed from the same sample can hybridize to two separate but identical oligonucleotide arrays with varying results. The varying results between these arrays are attributed to several factors, such as the intensity of the labeled pool of target nucleic acids and incubation conditions. To control for these variations, normalization control probes can be added to the array. Normalization control probes are oligonucleotides exactly complementary to known nucleic acid sequences spiked into the pool of target nucleic acids. Any oligonucleotide sequence may serve as a normalization control probe; in a preferred embodiment, the normalization control probes are created from a template obtained from an organism other than that from which the cell line being analyzed is derived. In another preferred embodiment, an oligonucleotide array to mammalian sequences will contain normalization oligonucleotide probes to the following genes: bioB, bioC, and bioD from the organism Escherichia coli, cre from the organism Bacteriophage P1, and dap from the organism Bacillus subtilis, or subsequences thereof. The signal intensity received from the normalization control probes are then used to normalize the signal intensities from all other probes in the array. Additionally, when the known nucleic acid sequences are spiked into the pool of target nucleic acids at known and different concentrations for each transcript, a standard curve correlating signal intensity with transcript concentration can be generated, and expression levels for all transcripts represented on the array can be quantified (see, e.g., Hill et al. (2001) Genome Biol. 2(12):research0055.1-0055.13).

[0044] Due to the naturally differing metabolic states between cells, expression of specific target nucleic acids vary from sample to sample. In addition, target nucleic acids may be more prone to degradation in one pool compared to another pool. Consequently, in another embodiment of the invention, the oligonucleotide array further comprises oligonucleotide probes that are exactly complementary to constitutively expressed genes, or subsequences thereof, that reflect the metabolic state of a cell. Nonlimiting examples of these types of genes are beta-actin, transferrin receptor and glyceraldehyde-3-phosphate dehydrogenase (GAPDH).

[0045] In one embodiment of the invention, the pool of target nucleic acids is derived by converting total RNA isolated from the sample into double-stranded cDNA and transcribing the resulting cDNA into complementary RNA (cRNA) using methods described in more detail in the Examples. The RNA conversion protocol is started at the 3′-end of the RNA transcript, and if the process is not allowed to go to completion (if, for example, the RNA is nicked, etc.) the amount of the 3′-end message compared to the 5′-end message will be greater, resulting in a 3′-bias. Additionally, RNA degradation may start at the 5′-end (Jacobs Anderson et al. (1998) EMBO J. 17:1497-506). The use of these methods suggests that control probes that measure the quality of the processing and the amount of degradation of the sample preferably should be included in the oligonucleotide array. Examples of such control probes are oligonucleotides exactly complementary to 3′- and 5′-ends of constitutively expressed genes, such as beta-actin, transferrin receptor and GAPDH, as mentioned above. The resulting 3′ to 5′ expression ratio of a constitutively expressed gene is then indicative of the quality of processing and the amount of degradation of the sample; i.e., a 3′ to 5′ ratio greater than three (3) indicates either incomplete processing or high RNA degradation (Auer et al. (2003) Nat. Genet. 35:292-93). Consequently, in a preferred embodiment of the invention, the oligonucleotide array includes control probes that are complementary to the 3′- and 5′-ends of constitutively expressed genes.

[0046] The quality of the pool of target nucleic acids is not only reflected in the processing and degradation of the target nucleic acids, but also in the origin of the target nucleic acids. Contaminating sequences, such as genomic DNA, may interfere with well-known quantification protocols. Consequently, in a preferred embodiment of the invention, the array further comprises oligonucleotide probes exactly complementary to bacterial genes, ribosomal RNAs, and/or genomic intergenic regions to provide a means to control for the quality of the sample preparation. These probes control for the possibility that the pool of target nucleic acids is contaminated with bacterial DNA, non-mRNA species, and genomic DNA. Exemplary control sequences are set forth as SEQ ID NOs:3576-3642, and are listed in Table 2. As noted above, exemplary tiling sequences for these control sequences are set forth as SEQ ID NOs:7218-7284, and are listed in Table 5.

[0047] In a preferred embodiment of the invention, the oligonucleotide array further comprises control mismatch oligonucleotide probes for each perfect match probe. The mismatch probes control for hybridization specificity. Preferably, mismatch control probes are identical to their corresponding perfect match probes with the exception of one or more substituted bases. More preferably, the substitution(s) occurs at a central location on the probe. For example, where a perfect match probe is 25 oligonucleotides in length, a corresponding mismatch probe will have the identical length and sequence except for a single-base substitution at position 13 (e.g., substitution of a thymine for an adenine, an adenine for a thymine, a cytosine for a guanine, or a guanine for a cytosine). The presence of one or more mismatch bases in the mismatch oligonucleotide probe disallows target nucleic acids that bind to complementary perfect match probes to bind to corresponding mismatch control probes under appropriate conditions. Therefore, mismatch oligonucleotide probes indicate whether the incubation conditions are optimal, i.e., whether the stringency being utilized provides for target nucleic acids binding to only exactly complementary probes present in the array.

[0048] For each template, a set of perfect match probes exactly complementary to subsequences of consensus, transgene, and/or control sequences (or tiling regions thereof) may be chosen using a variety of strategies. It is known to one of skill in the art that each template can provide for a potentially large number of probes. Also known to one of skill in the art, apparent probes are sometimes not suitable for inclusion in the array. This can be due to the existence of similar subsequences in other regions of the genome, which causes probes directed to these subsequences to cross-hybridize and give false signals. Another reason some apparent probes may not be suitable for inclusion in the array is because they may form secondary structures that prevent efficient hybridization. Finally, hybridization of target nucleic acids with (or to) an array comprising a large number of probes requires that each of the probes hybridizes to its specific target nucleic acid sequence under the same incubation conditions.

[0049] An oligonucleotide array may comprise one perfect match probe for a consensus, transgene, or control sequence, or may comprise a probeset (i.e., more than one perfect match probe) for a consensus, transgene, or control sequence. For example, an oligonucleotide array may comprise 1, 5, 10, 25, 50, 100, or more than 100 different perfect match probes for a consensus, transgene or control sequence. In a preferred embodiment of the invention, the array comprises at least 11-150 different perfect match oligonucleotide probes exactly complementary to subsequences of each consensus and transgene sequence. In an even more preferred embodiment, only the most optimal probeset for each template is included. The suitability of the probes for hybridization can be evaluated using various computer programs. Suitable programs for this purpose include, but are not limited to, LaserGene (DNAStar), Oligo (National Biosciences, Inc.), MacVector (Kodak/IBI), and the standard programs provided by the GCG. Any method or software program known in the art may be used to prepare probes for the template sequences of the present invention. For example, oligonucleotide probes may be generated by using Array Designer, a software package provided by TeleChem International, Inc (Sunnyvale, Calif. 94089). Another exemplary algorithm for choosing optimal probesets is described in U.S. Pat. No. 6,040,138.

[0050] As disclosed in U.S. Pat. No. 6,040,138, probeset optimization can involve two rounds of selection. In the first round, only perfect match probes that have high stringency requirements (e.g., perfect match probes that will hybridize only with target nucleic acids that are exactly complementary) are selected. These perfect match probes are selected by hybridizing the oligonucleotide array to a sample containing target nucleic acids having subsequences complementary to the oligonucleotide probes, determining the hybridization intensity between each perfect match probe and its corresponding mismatch probe, and selecting perfect match probes that demonstrate a threshold difference in hybridization intensity compared to their corresponding mismatch probe. One of skill in the art will appreciate that this round of selection will ensure that a target nucleic acid sequence will bind only to a complementary perfect match probe and not the corresponding mismatch probe.

[0051] In the second round, perfect match oligonucleotide probes and corresponding mismatch probes that demonstrate minimal nonspecific binding are selected. Perfect match probes and corresponding mismatch probes are selected for their specificity by hybridizing the oligonucleotide array with a pool of target nucleic acids that does not contain sequences complementary to the probes, and selecting only those probes in which both the probe and its mismatch control show hybridization intensities below a threshold value. One of skill in the art will appreciate that this second round of selection will ensure that each perfect match probe selected (and corresponding mismatch probe) is unique within the array. Thus, for example, even if the transgene sequences were not included in the initial clustering and alignment analysis, the second round of selection will ensure that oligonucleotide probes to the transgene sequences are complementary only to the transgene sequences.

[0052] One of skill in the art will recognize that although the algorithm for oligonucleotide probe selection described in U.S. Pat. No. 6,040,138 will yield a model array of oligonucleotides, it may prove to be extremely costly and time-consuming, especially when a set of perfect match probes must be chosen for a large number of consensus, transgene, and/or control sequences, or tiling regions thereof. Other suitable means to optimize probesets, which will result in a comparable oligonucleotide array, are well known in the art and may be found in, e.g., Lockhart et al. (1996) Nat. Biotechnol. 14:1675-80 and Mei et al. (2003) Proc. Natl. Acad. Sci. USA 100:11237-42.

[0053] The oligonucleotide probes of the present invention can be synthesized using a variety of methods. Examples of these methods include, but are not limited to, the use of automated or high throughput DNA synthesizers, such as those provided by Millipore, GeneMachines, and BioAutomation. In many embodiments, the synthesized probes are substantially free of impurities. In many other embodiments, the probes are substantially free of other contaminants that may hinder the desired functions of the probes. The probes can be purified or concentrated using numerous methods, such as reverse phase chromatography, ethanol precipitation, gel filtration, electrophoresis, or any combination thereof.

[0054] Oligonucleotide probes of the present invention may be used in methods of 1) verifying expression of genes, including previously undiscovered genes and/or transgenes, by a cell or cell line and/or 2) determining genes and related pathways involved with conferring a particular cell phenotype, e.g., increased transgene expression, in a sample of interest. Suitable methods for this purpose include, but are not limited to, oligonucleotide arrays (including bead arrays), Southern blot, Northern blot, PCR, and RT-PCR. A sample of interest can be, without limitation, a food sample, an environmental sample, a pharmaceutical sample, a bacterial culture, a clinical sample, a chemical sample, or a biological sample. Examples of biological samples include, but are not limited to, any body fluid, including blood or any of its components (plasma, serum, etc.), menses, mucous, sweat, tears, urine, feces, saliva, sputum, semen, urogenital secretions, gastric washes, pericardial or peritoneal fluids or washes, a throat swab, pleural washes, ear wax, hair, skin cells, nails, mucous membranes, amniotic fluid, vaginal secretions or any other secretions from the body, spinal fluid, human breath, gas samples containing body odors, flatulence or other gases, any biological tissue or matter, or an extractive or suspension of any of these.

III) Forming an Oligonucleotide Array

[0055] The methods described above enable an investigator to identify consensus sequences for undiscovered genes in a cell derived from an unsequenced organism, and select probes for that consensus sequence. Thus it is part of the invention that oligonucleotide probes of the present invention can be used to make oligonucleotide arrays that may be used to 1) verify expression of sequences or subsequences of previously undiscovered genes expressed by the cell line and/or 2) determine the involvement in conferring a particular cell phenotype of previously undiscovered genes and/or previously known genes that were not expected to be involved in conferring the particular cell phenotype.

[0056] Generally, an array of the invention directed toward an unsequenced organism comprises a first plurality of oligonucleotide probes, each of which is specific to one of a plurality of template sequences, wherein the plurality of template sequences comprises at least one consensus sequence for a gene expressed by a cell derived from the unsequenced organism. As described above, the at least one consensus sequence may be derived from nucleic acid sequences obtained from two different genera and/or species of the organism. In a preferred embodiment, the unsequenced organism is a hamster. In another embodiment, the at least one consensus sequence is selected from the group consisting of the polynucleotide sequences of SEQ ID NOs:19-3572, SEQ ID NOs:3661-7214, complements thereof, and subsequences thereof.

[0057] In still another embodiment, an oligonucleotide array of the present invention includes at least 2, 3, 4, 5, 10, 20, 50, 100, 200 or more different probes or probesets, each of which is capable of hybridizing to a template sequence selected from the same Table, e.g., a table in this disclosure, e.g., Table 2. These probes or probesets can be positioned in the same or different discrete regions on the oligonucleotide array. As used herein, two polynucleotides, probes, probesets, etc. are “different” if they have different nucleic acid sequences.

[0058] In yet another embodiment, an oligonucleotide array of the present invention includes polynucleotide includes at least 1, 2, 5, 10, 20, 30, 40, 50, 100, 200, 500, 1,000, 2,000, 3,000, or more different probes or probesets, each of which can hybridize under stringent or oligonucleotide array hybridization conditions to a different respective consensus sequence selected from the group consisting of the polynucleotide sequences of SEQ ID NOs: 19-3572, SEQ ID NOs:3661-7214, complements thereof, and subsequences thereof.

[0059] The length of each probe employed in the present invention can be selected to achieve the desired hybridization effect. For instance, a probe can include or consist of about 15, 20, 25, 30, 35, 40, 45, 50, 60, 70, 80, 90, 100, 200, 300, 400 or more consecutive nucleotides.

[0060] Multiple probes for the same template sequence can be included in an oligonucleotide array of the present invention. For instance, at least 2, 5, 10, 15, 20, 25, 30 or more different probes can be used for detecting the same sequence. Each of these different probes can be attached to a different respective region on the oligonucleotide array. Alternatively, two or more different probes can be attached to the same discrete region. The concentration of one probe with respect to the other probe or probes in the same discrete region may vary according to the objectives and requirements of the particular experiment. In one embodiment, different probes in the same region are present in approximately equimolar ratio.

[0061] The oligonucleotide arrays of the present invention can also include control probes that can hybridize under stringent or oligonucleotide array hybridization conditions to respective control sequences, or the complements thereof.

[0062] The oligonucleotide arrays of the present invention can further include mismatch probes as controls. In many instances, the mismatch residue in each mismatch probe is located near the center of the probe such that the mismatch is more likely to destabilize the duplex with the target sequence under the hybridization conditions. In one embodiment, each mismatch probe on an oligonucleotide array of the present invention is a perfect mismatch probe, and is stably attached to a discrete region different from that of the corresponding perfect match probe.

[0063] In many embodiments, the oligonucleotide arrays of the present invention include at least one substrate support that has a plurality of discrete regions. The location of each of these discrete regions is either known or determinable. The discrete regions can be organized in various forms or patterns. For instance, the discrete regions can be arranged as an array of regularly spaced areas on a surface of the substrate. Other regular or irregular patterns, such as linear, concentric or spiral patterns, may also be used.

[0064] Oligonucleotide probes may be stably attached to respective discrete regions through covalent or noncovalent interactions. As used herein, an oligonucleotide probe is “stably” attached to a discrete region if the oligonucleotide probe retains its position relative to the discrete region during oligonucleotide array hybridization.

[0065] The oligonucleotide array may be immobilized on a solid-phase support, where each oligonucleotide probe is immobilized to a predefined location on the solid-phase support with methods well known in the art such as, but not limited to, very large-scale immobilized polymer synthesis (VLSIP™) technology. VLSIP™ technology immobilizes each oligonucleotide probe in an array of oligonucleotide probes to a predefined location on a solid-phase support using methods including, but not limited to, light-directed coupling, mechanically directed flow paths, spotting on predefined regions, or any combination thereof. These methods are disclosed in U.S. Pat. Nos. 5,143,854; 5,677,195; 5,384,261; 6,040,138; and Fodor et al. (1991) Science 251: 767-77, all of which are incorporated herein in their entirety by reference. Any method may be used to attach oligonucleotide probes to an oligonucleotide array of the present invention. In one embodiment, oligonucleotide probes are covalently attached to a substrate support by first depositing the oligonucleotide probes to respective discrete regions on a surface of the substrate support and then exposing the surface to a solution of a cross-linking agent, such as glutaraldehyde, borohydride, or other bifunctional agents. In another embodiment, oligonucleotide probes are covalently bound to a substrate via an alkylamino-linker group or by coating a substrate (e.g., a glass slide) with polyethylenimine followed by activation with cyanuric chloride for coupling the polynucleotides. In yet another embodiment, oligonucleotide probes are covalently attached to an oligonucleotide array through polymer linkers. The polymer linkers may improve the accessibility of the probes to their purported targets. In many cases, the polymer linkers do not significantly interfere with the interactions between the probes and their purported targets.

[0066] Oligonucleotide probes may also be stably attached to an oligonucleotide array through noncovalent interactions. In one embodiment, oligonucleotide probes are attached to a substrate support through electrostatic interactions between positively charged surface groups and the negatively charged probes. In another embodiment, a substrate employed in the present invention is a glass slide having a coating of a polycationic polymer on its surface, such as a cationic polypeptide. The oligonucleotide probes are bound to these polycationic polymers. In yet another embodiment, the methods described in U.S. Pat. No. 6,440,723, which is incorporated herein by reference, are used to stably attach oligonucleotide probes to an oligonucleotide array of the present invention.

[0067] Numerous materials may be used to make the substrate support(s) of an oligonucleotide array. Suitable materials include, but are not limited to, glass, silica, ceramics, nylon, quartz wafers, gels, metals, and paper. The substrate supports can be flexible or rigid. In one embodiment, they are in the form of a tape that is wound up on a reel or cassette. An oligonucleotide array can include two or more substrate supports. In many embodiments, the substrate supports are nonreactive with reagents that are used in oligonucleotide array hybridization.

[0068] The surface(s) of a substrate support may be smooth and substantially planar. The surface(s) of a substrate support can also have a variety of configurations, such as raised or depressed regions, trenches, v-grooves, mesa structures, or other regular or irregular configurations. The surface(s) of the substrate may be coated with one or more modification layers. Suitable modification layers include inorganic or organic layers, such as metals, metal oxides, polymers, or small organic molecules. In one embodiment, the surface(s) of the substrate is chemically treated to include groups such as hydroxyl, carboxyl, amine, aldehyde, or sulfhydryl groups.

[0069] The discrete regions on an oligonucleotide array of the present invention may be of any size, shape and density. For instance, they can be squares, ellipsoids, rectangles, triangles, circles, or other regular or irregular geometric shapes, or any portion or combination thereof. In one embodiment, each of the discrete regions has a surface area of less than 10⁻¹ cm², such as less than 10², 10⁻³, 10⁻⁴, 10⁻⁵, 10⁻⁶, or 10⁻⁷ cm². In another embodiment, the spacing between each discrete region and its closest neighbor, measured from center-to-center, is in the range of from about 10 to about 400 μm. The density of the discrete regions may range, for example, between 50 and 50,000 regions/cm².

[0070] A variety of methods may be used to make the oligonucleotide arrays of the present invention. For instance, the probes can be synthesized in a step-by-step manner on a substrate, or can be attached to a substrate in presynthesized forms. Algorithms for reducing the number of synthesis cycles can be used. In one embodiment, an oligonucleotide array of the present invention is synthesized in a combinational fashion by delivering monomers to the discrete regions through mechanically constrained flowpaths. In another embodiment, an oligonucleotide array of the present invention is synthesized by spotting monomer reagents onto a substrate support using an ink jet printer (such as the DeskWriter C manufactured by Hewlett-Packard). In yet another embodiment, oligonucleotide probes are immobilized on an oligonucleotide array by using photolithography techniques.

[0071] Bead arrays and any other type of biochips are also contemplated by the present invention. A bead array comprises a plurality of beads, with each bead stably associated with one or more oligonucleotide probes of the present invention.

[0072] Probes for different genes are typically attached to different respective regions on an oligonucleotide array. In certain applications, probes for different genes are attached to the same discrete region.

### METHODS OF USING AN ARRAY OF THE INVENTION

[0073] The nucleic acids arrays of the present invention may be used to 1) verify expression of genes, including previously undiscovered genes and/or transgenes, by a cell or cell line and/or 2) determine genes and related pathways involved with conferring a particular cell phenotype, e.g., increased transgene expression, in a sample of interest. Numerous protocols are available for performing oligonucleotide array analysis. Exemplary protocols include, but are not limited to, those described in GENECHIP® EXPRESSION ANALYSIS TECHNICAL MANUAL (701021 rev. 3, Affymetrix, Inc. 2002). Briefly, such methods comprises the steps of preparing target nucleic acids (which may be RNA or DNA (e.g., genomic DNA, cDNA, etc.)) from a sample of interest, forming a hybridization profile by incubating target nucleic acids with an array, and detecting the hybridization profile (which may or may not include evaluating the hybridization profile). Each of these steps is discussed below. A skilled artisan will recognize that target nucleic acids may not need to be prepared before being used to form a hybridization profile, e.g., already prepared target nucleic acids may be received by an investigator.

I) Preparation of Pool of Target Nucleic Acids

[0074] One of skill in the art will recognize that because the above-identified consensus and transgene sequences are derived from known and predicted gene coding sequences, the pool of target nucleic acids (i.e., mRNA or nucleic acids derived therefrom) should reflect the transcription of these regions. Consequently, any biological sample may be used as a source of target nucleic acids. The pool of target nucleic acids can be total RNA, or any nucleic acid derived therefrom, including each of the single strands of cDNA made by reverse transcription of the mRNA, or RNA transcribed from the double-stranded cDNA intermediate. Methods of isolating target nucleic acids for analysis with an oligonucleotide array, such as phenol-chloroform extraction, ethanol precipitation, magnetic bead separation, or silica-gel affinity purification, are well known to one of skill in the art.

[0075] For example, various methods are available for isolating or enriching RNA. These methods include, but are not limited to, RNeasy kits (provided by Qiagen), MasterPure kits (provided by Epicentre Technologies), charge-switch technology (see, e.g., U.S. Published patent application Nos. 2003/0054395 and 2003/0130499), and TRIZOL (provided by Gibco BRL). The RNA isolation protocols provided by Affymetrix can also be employed in the present invention. See, e.g., GENECHIP® EXPRESSION ANALYSIS TECHNICAL MANUAL (701021 rev. 3, Affymetrix, Inc. 2002).

[0076] In one example, mRNA is enriched by removing rRNA. Different methods are available for eliminating or reducing the amount of rRNA in a sample. For instance, rRNA can be removed by enzyme digestions. According to the latter method, rRNAs are first amplified using reverse transcriptase and specific primers to produce cDNA. The rRNA is allowed to anneal with the cDNA. The sample is then treated with RNAase H, which specifically digests RNA within an RNA:DNA hybrid.

[0077] Target nucleic acids may be amplified before incubation with an oligonucleotide array. Suitable amplification methods, including, but not limited to, reverse transcription-polymerase chain reaction, ligase chain reaction, self-sustained sequence replication, and in vitro transcription, are well known in the art. It should be noted that oligonucleotide probes are chosen to be complementary to target nucleic acids. Therefore, if an antisense pool of target nucleic acids is provided (as is often the case when target nucleic acids are amplified by in vitro transcription), the oligonucleotide probes should correspond with subsequences of the sense complement. Conversely, if the pool of target nucleic acids is sense, the oligonucleotide array should be complementary (i.e., antisense) to them. Finally, if target nucleic acids are double-stranded, oligonucleotide probes can be sense or antisense.

[0078] The present invention involves detecting the hybridization intensity between target nucleic acids and complementary oligonucleotide probes. To accomplish this, target nucleic acids may be attached directly or indirectly with appropriate and detectable labels. Direct labels are detectable labels that are directly attached to or incorporated into target nucleic acids. Indirect labels are attached to polynucleotides after hybridization, often by attaching to a binding moiety that was attached to the target nucleic acids prior to hybridization. Such direct and indirect labels are well known in the art. In a preferred embodiment of the invention, target nucleic acids are detected using the biotin-streptavidin-PE coupling system, where biotin is incorporated into target nucleic acids and hybridization is detected by the binding of streptavidin-PE to biotin.

[0079] Target nucleic acids may be labeled before, during or after incubation with an oligonucleotide array. Preferably, the target nucleic acids are labeled before incubation. Labels may be incorporated during the amplification step by using nucleotides that are already labeled (e.g., biotin-coupled dUTP or dCTP) in the reaction. Alternatively, a label may be added directly to the original nucleic acid sample (e.g., mRNA, cDNA) or to the amplification product after the amplification is completed. Means of attaching labels to nucleic acids are well known to those of skill in the art and include, but are not limited to, nick translation, end-labeling, and ligation of target nucleic acids to a nucleic acid linker to join it to a label. Alternatively, several kits specifically designed for isolating and preparing target nucleic acids for microarray analysis are commercially available, including, but not limited to, the GeneChip® IVT Labeling Kit (Affymetrix, Santa Clara, Calif.) and the Bioarray™ High Yield™ RNA Transcript Labeling Kit with Fluorescein-UTP for Nucleic Acid Arrays (Enzo Life Sciences, Inc., Farmingdale, N.Y.).

[0080] Polynucleotides can be fragmented before being labeled with detectable moieties. Exemplary methods for fragmentation include, but are not limited to, heat or ion-mediated hydrolysis.

II) Incubation of Target Nucleic Acids with an Array to Form a Hybridization Profile

[0081] Incubation reactions can be performed in absolute or differential hybridization formats. In the absolute hybridization format, polynucleotides derived from one sample are hybridized to the probes in an oligonucleotide array. Signals detected after the formation of hybridization complexes correlate to the polynucleotide levels in the sample. In the differential hybridization format, polynucleotides derived from two samples are labeled with different labeling moieties. A mixture of these differently labeled polynucleotides is added to an oligonucleotide array. The oligonucleotide array is then examined under conditions in which the emissions from the two different labels are individually detectable. In one embodiment, the fluorophores Cy3 and Cy5 (Amersham Pharmacia Biotech, Piscataway, N.J.) are used as the labeling moieties for the differential hybridization format.

[0082] In the present invention, the incubation conditions should be such that target nucleic acids hybridize only to oligonucleotide probes that have a high degree of complementarity. In a preferred embodiment, this is accomplished by incubating the pool of target nucleic acids with an oligonucleotide array under a low stringency condition to ensure hybridization, and then performing washes at successively higher stringencies until the desired level of hybridization specificity is reached. In other embodiments, target nucleic acids are incubated with an array of the invention under stringent or well-known oligonucleotide array hybridization conditions. In many examples, these oligonucleotide array hybridization conditions include 16-hour hybridization at 45° C., followed by at least three 10-minute washes at room temperature. The hybridization buffer comprises 100 mM MES, 1 M [Na⁺], 20 mM EDTA, and 0.01% Tween 20. The pH of the hybridization buffer can range between 6.5 and 6.7. The wash buffer is 6×SSPET, which contains 0.9 M NaCl, 60 mM NaH₂PO₄, 6 mM EDTA, and 0.005% Triton X-100. Under more stringent oligonucleotide array hybridization conditions, the wash buffer can contain 100 mM MES, 0.1 M [Na⁺], and 0.01% Tween 20. See also GENECHIP® EXPRESSION ANALYSIS TECHNICAL MANUAL (701021 rev. 3, Affymetrix, Inc. 2002), which is incorporated herein by reference in its entirety.

III) Detecting Methods

[0083] Methods used to detect the hybridization profile of target nucleic acids with oligonucleotide probes are well known in the art. In particular, means of detecting and recording fluorescence of each individual target nucleic acid-oligonucleotide probe hybrid have been well established and are well known in the art, described in, e.g., U.S. Pat. No. 5,631,734, incorporated herein in its entirety by reference. For example, a confocal microscope can be controlled by a computer to automatically detect the hybridization profile of the entire array. Additionally, as a further nonlimiting example, the microscope can be equipped with a phototransducer attached to a data acquisition system to automatically record the fluorescence signal produced by each individual hybrid.

[0084] It will be appreciated by one of skill in the art that evaluation of the hybridization profile is dependent on the composition of the array, i.e., which oligonucleotide probes were included for analysis. For example, where the array includes oligonucleotide probes to consensus sequences only, or consensus sequences and transgene sequences only, (i.e., the array does not include control probes to normalize for variation between experiments, samples, stringency requirements, and preparations of target nucleic acids), the hybridization profile is evaluated by measuring the absolute signal intensity of each location on the array. Alternatively, the mean, trimmed mean (i.e., the mean signal intensity of all probes after 2-5% of the probesets with the lowest and highest signal intensities are removed), or median signal intensity of the array may be scaled to a preset target value to generate a scaling factor, which will subsequently be applied to each probeset on the array to generate a normalized expression value for each gene (see, e.g., Affymetrix (2000) Expression Analysis Technical Manual, pp. A5-14). Conversely, where the array further comprises control oligonucleotide probes, the resulting hybridization profile is evaluated by normalizing the absolute signal intensity of each location occupied by a test oligonucleotide probe by means of mathematical manipulations with the absolute signal intensity of each location occupied by a control oligonucleotide probe. Typical normalization strategies are well known in the art, and are included, for example, in U.S. Pat. No. 6,040,138 and Hill et al. (2001) Genome Biol. 2(12): research0055.1-0055.13.

[0085] Signals gathered from oligonucleotide arrays can be analyzed using commercially available software, such as those provide by Affymetrix or Agilent Technologies. Controls, such as for scan sensitivity, probe labeling and cDNA or cRNA quantitation, may be included in the hybridization experiments. The array hybridization signals can be scaled or normalized before being subjected to further analysis. For instance, the hybridization signal for each probe can be normalized to take into account variations in hybridization intensities when more than one array is used under similar test conditions. Signals for individual target nucleic acids hybridized with complementary probes can also be normalized using the intensities derived from internal normalization controls contained on each array. In addition, genes with relatively consistent expression levels across the samples can be used to normalize the expression levels of other genes.

Applications

[0086] The invention also involves using the above-described oligonucleotide array and related methods to optimize culture conditions for a particular cell line, identify genes (including previously undiscovered genes) and/or gene pathways that confer a particular cell-line phenotype, and determine overall cellular productivity for either intrinsic proteins or extrinsic proteins (e.g., those encoded by transgenes). The oligonucleotide array described above can be used to optimize culture conditions by first establishing a database of hybridization profiles, each of which correlates to a different set of culture conditions. For example, a first sample obtained from cells grown in normal culture conditions can be analyzed using the oligonucleotide array and methods described herein. The resulting hybridization profile will reflect the baseline expression of genes when the particular cell line is grown in normal conditions. A second sample obtained from cells grown under conditions that induce, e.g., a stress response, such as cells grown at a high temperature, can be analyzed using the oligonucleotide array and methods described herein. The resulting hybridization profile from the second sample likely will be different than that obtained from the first sample. A third sample obtained from cells cultured in yet another condition that induces a stress response, such as cells grown in the absence of serum, will result in yet another hybridization profile distinct from those obtained from the first and second samples. The process of obtaining the hybridization profiles of samples from cells grown in different culture conditions can be continued such that a particular hybridization profile will reflect that the cells were grown in a particular culture condition. With such a database, one of skill in the art can readily determine in what culture conditions (e.g., stress-inducing conditions) the cells used in an experiment were grown. Other factors, in addition to temperature, that contribute to stress-inducing culture conditions include, but are not limited to, serum concentration, nutrient concentration, metabolite concentration, pH, lactate concentration, ammonia concentration, oxidation level, sodium butyrate concentration, valeric acid concentration, hexamethylene bisacetamide concentration, cell concentration, cell viability, and recombinant protein concentration in actively growing or stationary cultures.

[0087] In establishing this database, the different genes and genetic pathways that are regulated during different conditions will be elucidated. The array described herein will be particularly useful in identifying previously undiscovered genes or genetic pathways. For example, whereas it is established that changes in the temperature of the culture will generally result in the overexpression of certain known genes (e.g., an increased temperature results in overexpression of certain heat-shock proteins), it is likely that temperature-related stresses will induce/reduce the expression of other genes, including previously undiscovered genes and even perhaps previously known genes not obviously related to stress responses. Analysis of a cell line grown in varying temperatures using the array of oligonucleotides and related methods of this invention will identify these previously known and unknown genes because the oligonucleotide array is designed to include known and previously undiscovered gene coding sequences.

[0088] Similarly, the above methods can be used to identify genes that confer or correlate with a desired phenotype or characteristic. As nonlimiting examples, desired phenotypes or characteristics may be conferred to cells by growing the cells in different temperatures, to a high cell density, to produce a high titer of transgene products with the use of agents such as sodium butyrate, to be in different kinetic phases of growth (e.g., lag phase, exponential growth phase, stationary phase or death phase), and/or to become serum-independent, etc. During the period in which these phenotypes are induced, and/or after these phenotypes are achieved, a pool of target nucleic acid samples can be prepared from the cells and analyzed with the oligonucleotide array to determine and identify which genes demonstrate altered expression in response to a particular stimulus (e.g., temperature, sodium butyrate), and therefore are potentially involved in conferring the desired phenotype or characteristic.

[0089] One of skill in the art will appreciate that the methods and associated oligonucleotide arrays described above can be used not only to measure the success or failure of modifying cell lines with a transgene, but also to increase expression of the transgene. For example, to determine whether a cell line has been successfully engineered to express a transgene, target nucleic acids can be prepared from nontransfected and transfected cells. The target nucleic acids can then be hybridized to (e.g., incubated with) an oligonucleotide array that includes probes to transgene sequences. If the resulting hybridization profile demonstrates high signal intensities at the locations of the probes to transgene sequences, the cells have been successfully engineered. If the signal intensities at these locations are low, the cells were either unsuccessfully engineered, or they were successfully engineered but were grown in culture conditions unfavorable to transgene expression. By comparing the resulting hybridization profile with established hybridization profiles that reflect the nature of the culture conditions, it can be determined whether the cells were successfully engineered but grown in suboptimal culture conditions, and the culture conditions can be subsequently changed to increase the expression of the transgene. In another embodiment of the invention, target nucleic acid samples are prepared from transfected cells expressing different levels of the transgene, or grown in different conditions that increase gene expression, and analyzed with the oligonucleotide array to identify specific genes and related genetic pathways that correlate to or confer high transgene expression. The identified genes and related pathways can then be manipulated to induce cell lines to express higher levels of the transgene.

[0090] The oligonucleotide arrays of the present invention may also be used to identify or evaluate agents capable of conferring a particular cell phenotype. Any compound-screening method may be used in the present invention. These methods typically include the steps of (1) contacting a molecule of interest with a culture comprising the cell of interest, or administrating the molecule of interest to an animal comprising the cell of interest; and (2) hybridizing nucleic acid molecules prepared from the culture or animal model to an oligonucleotide array of the present invention. Changes in the hybridization signals in the presence of the molecule of interest compared to that in the absence of the molecule can be used to determine the effect of the molecule on the cell of interest. Any type of agent can be evaluated according to the present invention, such as, but not limited to, small molecules, antibodies, peptides, or peptide mimetics.

[0091] The methods disclosed herein of making and using oligonucleotide arrays in the optimization of cell line culture conditions and transgene expression may be used for cells from a variety of organisms, including, but not limited to, bacteria, plants, fungi, and animals (the latter including, but not limited to, insects and mammals). As such, embodiments of the invention include methods of making oligonucleotide arrays comprising identifying consensus sequences for known and previously undiscovered genes of, for example, Escherichia coli, Spodoptera frugiperda, Nicotiana sp., Zea maize, Lemna sp., Saccharomyces sp., Pichia sp., Schizosaccharomyces sp., Chinese Hamster Ovary (CHO) cells, and baby hamster kidney (BHK) cells. Other embodiments of the invention include oligonucleotide arrays comprising oligonucleotide probes complementary to consensus sequences for known and previously undiscovered genes of, for example, Escherichia coli, Spodoptera frugiperda, Nicotiana sp., Zea maize, Lemna sp., Saccharomyces sp., Pichia sp., Schizosaccharomyces sp., CHO cells, and BHK cells. Embodiments of the invention also include methods of using oligonucleotide arrays complementary to consensus sequences for known and previously undiscovered genes of, for example, Escherichia coli, Spodoptera frugiperda, Nicotiana sp., Zea maize, Lemna sp., Saccharomyces sp., Pichia sp., Schizosaccharomyces sp., CHO cells, and BHK cells. The above list of organisms and cell lines are meant only to provide nonlimiting examples. As such, oligonucleotide arrays comprising oligonucleotide probes to consensus sequences for known and previously undiscovered genes of any organism, and methods of making and using these arrays, are within the scope of the invention.

Isolated Polynucleotides

[0092] In one embodiment of the invention, the inventors aligned gene coding sequences and EST sequences obtained from hamsters, e.g., Cricetulus griseus, Cricetulus migratorius, Mesocricetus auratus, etc., and hamster cell lines, e.g., the CHO cell line, to identify consensus sequences for known and previously undiscovered genes of the CHO cell line (see Example 1.2 and Table 2). Also, the inventors generated perfect match and mismatch probesets for each consensus sequence and, in addition to control probesets, generated an array of all oligonucleotide probes (See Example 1.3). Use of the oligonucleotide array then verified expression of a subset of previously undiscovered gene sequences by CHO cells and identified a second subset of gene sequences that may be used as novel targets to confer a particular cell phenotype, both of which are subsets of the consensus sequences (Table 2). Additionally, use of the oligonucleotide array confirmed the expression of another hamster gene, caspase 8, which was previously undiscovered. Accordingly, the present invention provides polynucleotide sequences (or subsequences) of genes that are newly discovered to be expressed by CHO cells. The invention also provides sequences (or subsequences) of genes that may be used as targets to effect a cell phenotype, particularly a phenotype characterized by increased and efficient production of a recombinant transgene.

[0093] Accordingly, the present invention provides novel isolated and purified polynucleotides that are either or both 1) previously undiscovered gene sequences verifiably expressed by CHO cells and 2) sequences involved in regulating a cell phenotype, e.g., transgene expression (and thus may be used as novel targets to increase transgene productivity). It is part of the invention to provide inhibitory polynucleotides to the novel isolated and purified polynucleotides of the invention, particularly to polynucleotides involved in regulating a cell phenotype (e.g., may be used as targets to increase transgene productivity); such inhibitory polynucleotides may be used as antagonists to such previously undiscovered genes.

[0094] Thus, the invention provides each purified and isolated polynucleotide sequence selected from Table 2 that is, or is part of, a previously undiscovered gene (i.e., a gene that had not been sequenced and/or shown to be expressed by CHO cells) and is verifiably expressed by CHO cells, herein designated a “novel CHO sequence.” Exemplary, but nonlimiting, novel CHO sequences are listed in Table 3. Preferred DNA sequences of the invention include genomic and cDNA sequences and chemically synthesized DNA sequences. The polynucleotide sequences of cDNAs encoding novel CHO sequences may have and/or consist essentially of a sequence selected from the gene sequences listed in Table 3 and set forth as SEQ ID NOs:3439-3573, and the gene sequences set forth as SEQ ID NOs:7081-7215, SEQ ID NO:3574, and SEQ ID NO:7216.

[0095] The invention also provides each purified and isolated polynucleotide sequence selected from Table 2 that is shown to be a suitable target for regulating a CHO cell phenotype, i.e., is differentially expressed by a first population of CHO cells cultured under a first set of conditions compared to a second population of CHO cells cultured under a second set of conditions, herein designated as “differential CHO sequences.” Differential CHO sequences are preferably suitable targets for regulating cell survival under stressful culture conditions, transgene expression by transgene-modified CHO cells, and/or production of potential antigens, e.g., N-glycolylneuraminic acid (NGNA). For example, in a nonlimiting preferred embodiment, a differential CHO sequence may have and/or consist essentially of a sequence selected from the gene sequences listed in Table 4 and set forth as SEQ ID NOs:3421-3572 and the gene sequences set forth as SEQ ID NOs:7063-7214. A skilled artisan will recognize that the differential CHO sequences of the invention may include novel CHO sequences, known gene sequences that are attributed with a function that is, or was, not obviously involved in transgene expression, and known sequences that previously had no known function but may now be known to function as targets in regulating a CHO cell phenotype.

[0096] Polynucleotides of the present invention also include polynucleotides that hybridize under stringent conditions to novel and/or differential CHO sequences, or complements thereof, and/or encode polypeptides that retain substantial biological activity of polypeptides encoded by novel and/or differential CHO sequences of the invention. Polynucleotides of the present invention also include continuous portions of novel and/or differential CHO sequences comprising at least 21 consecutive nucleotides.

[0097] Polynucleotides of the present invention also include polynucleotides that encode any of the amino acid sequences encoded by the polynucleotides as described above, or continuous portions thereof, and that differ from the polynucleotides described above only due to the well-known degeneracy of the genetic code.

[0098] The isolated polynucleotides of the present invention may be used as hybridization probes (e.g., as an oligonucleotide array, as described above) and primers to identify and isolate nucleic acids having sequences identical to, or similar to, those encoding the disclosed polynucleotides. Hybridization methods for identifying and isolating nucleic acids include polymerase chain reaction (PCR), Southern hybridization, and Northern hybridization, and are well known to those skilled in the art.

[0099] Hybridization reactions can be performed under conditions of different stringencies. The stringency of a hybridization reaction includes the difficulty with which any two nucleic acid molecules will hybridize to one another. Preferably, each hybridizing polynucleotide hybridizes to its corresponding polynucleotide under reduced stringency conditions, more preferably stringent conditions, and most preferably highly stringent conditions. Examples of stringency conditions are shown in Table A below: highly stringent conditions are those that are at least as stringent as, for example, conditions A-F; stringent conditions are at least as stringent as, for example, conditions G-L; and reduced stringency conditions are at least as stringent as, for example, conditions M-R.

TABLE A

| | Poly- | Hybrid | Hybridization | Wash |
|---|---|---|---|---|
| Stringency | nucleotide | Length | Temperature and | Temperature |
| Condition | Hybrid | (bp)¹ | Buffer² | and Buffer² |
| A | DNA:DNA | >50 | 65° C.; 1 × SSC -or- | 65° C.; 0.3 × SSC |
| | | | 42° C.; 1 × SSC, 50% | |
| | | | formamide | |
| B | DNA:DNA | <50 | T_{B}*; 1 × SSC | T_{B}*; 1 × SSC |
| C | DNA:RNA | >50 | 67° C.; 1 × SSC -or- | 67° C.; 0.3 × SSC |
| | | | 45° C.; 1 × SSC, 50% | |
| | | | formamide | |
| D | DNA:RNA | <50 | T_{D}*; 1 × SSC | T_{D}*; 1 × SSC |
| E | RNA:RNA | >50 | 70° C.; 1 × SSC -or- | 70° C.; 0.3 × SSC |
| | | | 50° C.; 1 × SSC, 50% | |
| | | | formamide | |
| F | RNA:RNA | <50 | T_{F}*; 1 × SSC | T_{f}*; 1 × SSC |
| G | DNA:DNA | >50 | 65° C.; 4 × SSC -or- | 65° C.; 1 × SSC |
| | | | 42° C.; 4 × SSC, 50% | |
| | | | formamide | |
| H | DNA:DNA | <50 | T_{H}*; 4 × SSC | T_{H}*; 4 × SSC |
| I | DNA:RNA | >50 | 67° C.; 4 × SSC -or- | 67° C.; 1 × SSC |
| | | | 45° C.; 4 × SSC, 50% | |
| | | | formamide | |
| J | DNA:RNA | <50 | T_{J}*; 4 × SSC | T_{J}*; 4 × SSC |
| K | RNA:RNA | >50 | 70° C.; 4 × SSC -or- | 67° C.; 1 × SSC |
| | | | 50° C.; 4 × SSC, 50% | |
| | | | formamide | |
| L | RNA:RNA | <50 | T_{L}*; 2 × SSC | T_{L}*; 2 × SSC |
| M | DNA:DNA | >50 | 50° C.; 4 × SSC -or- | 50° C.; 2 × SSC |
| | | | 40° C.; 6 × SSC, 50% | |
| | | | formamide | |
| N | DNA:DNA | <50 | T_{N}*; 6 × SSC | T_{N}*; 6 × SSC |
| O | DNA:RNA | >50 | 55° C.; 4 × SSC -or- | 55° C.; 2 × SSC |
| | | | 42° C.; 6 × SSC, 50% | |
| | | | formamide | |
| P | DNA:RNA | <50 | T_{P}*; 6 × SSC | T_{P}*; 6 × SSC |
| Q | RNA:RNA | >50 | 60° C.; 4 × SSC -or- | 60° C.; 2 × SSC |
| | | | 45° C.; 6 × SSC, 50% | |
| | | | formamide | |
| R | RNA:RNA | <50 | T_{R}*; 4 × SSC | T_{R}*; 4 × SSC |
| ¹The hybrid length is that anticipated for the hybridized region(s) of the hybridizing polynucleotides. When hybridizing a polynucleotide to a target polynucleotide of unknown sequence, the hybrid length is assumed to be that of the hybridizing polynucleotide. When polynucleotides of known sequence are hybridized, the hybrid length can be determined by aligning the sequences of the polynucleotides and | | | | |
| # identifying the region or regions of optimal sequence complementarity. | | | | |
| ²SSPE (1 × SSPE is 0.15 M NaCl, 10 mM NaH₂PO₄, and 1.25 mM EDTA, pH 7.4) can be substituted for SSC (1 × SSC is 0.15 M NaCl and 15 mM sodium citrate) in the hybridization and wash buffers; washes are performed for 15 minutes after hybridization is complete. | | | | |
| T_{B}*-T_{R}*: The hybridization temperature for hybrids anticipated to be less than 50 base pairs in length should be 5-10° C. less than the melting temperature (Tₘ) of the hybrid, where Tₘ is determined according to the following equations. For hybrids less than 18 base pairs in length, Tₘ(° C.) = 2(# of A + T bases) + 4(# of G + C bases). | | | | |
| # For hybrids between 18 and 49 base pairs in length, Tₘ(° C.) = 81.5 + 16.6(log₁₀Na⁺) + 0.41(% G + C) − (600/N), where N is the number of bases in the hybrid, and Na⁺is the concentration of sodium ions in the hybridization buffer (Na⁺for 1 × SSC = 0.165 M). | | | | |

Additional examples of stringency conditions for polynucleotide hybridization are provided in Sambrook et al. (1989) Molecular Cloning: A Laboratory Manual, Chs. 9 & 11, Cold Spring Harbor Laboratory Press, Cold Spring Harbor, NY, and Ausubel et al., eds. (1995) Current Protocols in Molecular Biology, Sects. 2.10 & 6.3-6.4, John Wiley & Sons, Inc., herein incorporated by reference.

[0100] Generally, and as stated above, the isolated polynucleotides of the present invention may also be used as hybridization probes and primers to identify and isolate DNAs homologous to the disclosed polynucleotides. These homologs are polynucleotides isolated from different species than those of the disclosed polynucleotides, or within the same species, but with significant sequence similarity to the disclosed polynucleotides. Preferably, polynucleotide homologs have at least 60% sequence identity (more preferably, at least 75% identity; most preferably, at least 90% identity) with the disclosed polynucleotides. Preferably, homologs of the disclosed polynucleotides are those isolated from mammalian species.

[0101] The isolated polynucleotides of the present invention may also be used as hybridization probes and primers to identify cells and tissues that express the polynucleotides of the present invention and the conditions under which they are expressed.

[0102] Additionally, the polynucleotides of the present invention may be used to alter (i.e., regulate (e.g., enhance, reduce, or modify)) the expression of the genes corresponding to the novel and/or differential CHO sequences of the present invention in a cell or organism. These corresponding genes are the genomic DNA sequences of the present invention that are transcribed to produce the mRNAs from which the novel and/or differential CHO polynucleotide sequences of the present invention are derived.

[0103] Altered expression of the novel and/or differential CHO sequences encompassed by the present invention in a cell or organism may be achieved through the use of various inhibitory polynucleotides, such as antisense polynucleotides, ribozymes that bind and/or cleave the mRNA transcribed from the genes of the invention, triplex-forming oligonucleotides that target regulatory regions of the genes, and short interfering RNA that causes sequence-specific degradation of target mRNA (e.g., Galderisi et al. (1999) J. Cell. Physiol. 181:251-57; Sioud (2001) Curr. Mol. Med. 1:575-88; Knauert and Glazer (2001) Hum. Mol. Genet. 10:2243-51; Bass (2001) Nature411:428-29).

[0104] The inhibitory antisense or ribozyme polynucleotides of the invention can be complementary to an entire coding strand of a gene of the invention, or to only a portion thereof. Alternatively, inhibitory polynucleotides can be complementary to a noncoding region of the coding strand of a gene of the invention. The inhibitory polynucleotides of the invention can be constructed using chemical synthesis and/or enzymatic ligation reactions using procedures well known in the art. The nucleoside linkages of chemically synthesized polynucleotides can be modified to enhance their ability to resist nuclease-mediated degradation, as well as to increase their sequence specificity. Such linkage modifications include, but are not limited to, phosphorothioate, methylphosphonate, phosphoroamidate, boranophosphate, morpholino, and peptide nucleic acid (PNA) linkages (Galderisi et al., supra; Heasman (2002) Dev. Biol. 243:209-14; Mickelfield (2001) Curr. Med. Chem. 8:1157-79). Alternatively, antisense molecules can be produced biologically using an expression vector into which a polynucleotide of the present invention has been subcloned in an antisense (i.e., reverse) orientation.

[0105] In yet another embodiment, the antisense polynucleotide molecule of the invention is an α-anomeric polynucleotide molecule. An α-anomeric polynucleotide molecule forms specific double-stranded hybrids with complementary RNA in which, contrary to the usual β-units, the strands run parallel to each other. The antisense polynucleotide molecule can also comprise a 2′-o-methylribonucleotide or a chimeric RNA-DNA analogue, according to techniques that are known in the art.

[0106] The inhibitory triplex-forming oligonucleotides (TFOs) encompassed by the present invention bind in the major groove of duplex DNA with high specificity and affinity (Knauert and Glazer, supra). Expression of the genes of the present invention can be inhibited by targeting TFOs complementary to the regulatory regions of the genes (i.e., the promoter and/or enhancer sequences) to form triple helical structures that prevent transcription of the genes.

[0107] In one embodiment of the invention, the inhibitory polynucleotides of the present invention are short interfering RNA (siRNA) molecules. These siRNA molecules are short (preferably 19-25 nucleotides; most preferably 19 or 21 nucleotides), double-stranded RNA molecules that cause sequence-specific degradation of target mRNA. This degradation is known as RNA interference (RNAi) (e.g., Bass (2001) Nature 411:428-29). Originally identified in lower organisms, RNAi has been effectively applied to mammalian cells and has recently been shown to prevent fulminant hepatitis in mice treated with siRNA molecules targeted to Fas mRNA (Song et al. (2003) Nat. Med. 9:347-51). In addition, intrathecally delivered siRNA has recently been reported to block pain responses in two models (agonist-induced pain model and neuropathic pain model) in the rat (Dorn et al. (2004) Nucleic Acids Res. 32(5):e49).

[0108] The siRNA molecules of the present invention can be generated by annealing two complementary single-stranded RNA molecules together (one of which matches a portion of the target mRNA) (Fire et al., U.S. Pat. No. 6,506,559) or through the use of a single hairpin RNA molecule that folds back on itself to produce the requisite double-stranded portion (Yu et al. (2002) Proc. Natl. Acad. Sci. USA 99:6047-52). The siRNA molecules can be chemically synthesized (Elbashir et al. (2001) Nature 411:494-98) or produced by in vitro transcription using single-stranded DNA templates (Yu et al., supra). Alternatively, the siRNA molecules can be produced biologically, either transiently (Yu et al., supra; Sui et al. (2002) Proc. Natl. Acad. Sci. USA 99:5515-20) or stably (Paddison et al. (2002) Proc. Natl. Acad. Sci. USA 99:1443-48), using an expression vector(s) containing the sense and antisense siRNA sequences. Recently, reduction of levels of target mRNA in primary human cells, in an efficient and sequence-specific manner, was demonstrated using adenoviral vectors that express hairpin RNAs, which are further processed into siRNAs (Arts et al. (2003) Genome Res. 13:2325-32).

[0109] The siRNA molecules targeted to the polynucleotides of the present invention can be designed based on criteria well known in the art (e.g., Elbashir et al. (2001) EMBO J. 20:6877-88). For example, the target segment of the target mRNA should begin with AA (preferred), TA, GA, or CA; the GC ratio of the siRNA molecule should be 45-55%; the siRNA molecule should not contain three of the same nucleotides in a row; the siRNA molecule should not contain seven mixed G/Cs in a row; and the target segment should be in the ORF region of the target mRNA and should be at least 75 bp after the initiation ATG and at least 75 bp before the stop codon. siRNA molecules targeted to the polynucleotides of the present invention can be designed by one of ordinary skill in the art using the aforementioned criteria or other known criteria.

[0110] Altered expression of the novel and/or differential CHO genes sequences of the present invention in a cell or organism may also be achieved through the creation of nonhuman transgenic animals into whose genomes polynucleotides of the present invention have been introduced. Such transgenic animals include animals that have multiple copies of a gene (i.e., the transgene) of the present invention. A tissue-specific regulatory sequence(s) may be operably linked to a polynucleotide of present invention to direct its expression to particular cells or a particular developmental stage. In another embodiment, transgenic nonhuman animals can be produced that contain selected systems that allow for regulated expression of the transgene. One example of such a system known in the art is the cre/loxP recombinase system of bacteriophage P1. Methods for generating transgenic animals via embryo manipulation and microinjection, particularly animals such as mice, have become conventional and are well known in the art (e.g., Bockamp et al. (2002) Physiol. Genomics 11:115-32). In preferred embodiments of the invention, the nonhuman transgenic animal comprises at least one novel and/or differential CHO sequence.

[0111] Altered expression of the genes of the present invention in a cell or organism may also be achieved through the creation of animals whose endogenous genes corresponding to the polynucleotides of the present invention have been disrupted through insertion of extraneous polynucleotides sequences (i.e., a knockout animal). The coding region of the endogenous gene may be disrupted, thereby generating a nonfunctional protein. Alternatively, the upstream regulatory region of the endogenous gene may be disrupted or replaced with different regulatory elements, resulting in the altered expression of the still-functional protein. Methods for generating knockout animals include homologous recombination and are well known in the art (e.g., Wolfer et al. (2002) Trends Neurosci. 25:336-40).

[0112] The isolated polynucleotides of the present invention may be operably linked to an expression control sequence such as the pMT2 and pED expression vectors for recombinant production of the polypeptides encoded by the polynucleotides of the invention. General methods of expressing recombinant proteins are well known in the art.

[0113] A number of cell types may act as suitable host cells for recombinant expression of the polypeptides encoded by the polynucleotides of the invention. Mammalian host cells include, but are not limited to, e.g., COS cells, CHO cells, 293 cells, A431 cells, 3T3 cells, CV-1 cells, HeLa cells, L cells, BHK21 cells, HL-60 cells, U937 cells, HaK cells, Jurkat cells, normal diploid cells, cell strains derived from in vitro culture of primary tissue, and primary explants.

[0114] Alternatively, it may be possible to recombinantly produce the polypeptides encoded by polynucleotides of the present invention in lower eukaryotes such as yeast or in prokaryotes. Potentially suitable yeast strains include Saccharomyces cerevisiae, Schizosaccharomyces pombe, Kluyveromyces strains, and Candida strains. Potentially suitable bacterial strains include Escherichia coli, Bacillus subtilis, and Salmonella typhimurium. If the polypeptides are made in yeast or bacteria, it may be necessary to modify them by, e.g., phosphorylation or glycosylation of appropriate sites, in order to obtain functionality. Such covalent attachments may be accomplished using well-known chemical or enzymatic methods.

[0115] The polypeptides encoded by polynucleotides of the present invention may also be recombinantly produced by operably linking the isolated polynucleotides of the present invention to suitable control sequences in one or more insect expression vectors, such as baculovirus vectors, and employing an insect cell expression system. Materials and methods for baculovirus/Sf9 expression systems are commercially available in kit form (e.g., the MaxBac™ kit, Invitrogen, Carlsbad, Calif.).

[0116] Following recombinant expression in the appropriate host cells, the polypeptides encoded by polynucleotides of the present invention may then be purified from culture medium or cell extracts using known purification processes, such as gel filtration and ion exchange chromatography. Purification may also include affinity chromatography with agents known to bind the polypeptides encoded by the polynucleotides of t he present invention. These purification processes may also be used to purify the polypeptides from natural sources.

[0117] Alternatively, the polypeptides encoded by polynucleotides of the present invention may also be recombinantly expressed in a form that facilitates purification. For example, the polypeptides may be expressed as fusions with proteins such as maltose-binding protein (MBP), glutathione-S-transferase (GST), or thioredoxin (TRX). Kits for expression and purification of such fusion proteins are commercially available from New England BioLabs (Beverly, Mass.), Pharmacia (Piscataway, N.J.), and Invitrogen (Carlsbad, Calif.), respectively. The polypeptides encoded by polynucleotides of the present invention can also be tagged with a small epitope and subsequently identified or purified using a specific antibody to the epitope. A preferred epitope is the FLAG epitope, which is commercially available from Eastman Kodak (New Haven, Conn.).

[0118] The polypeptides encoded by polynucleotides of the present invention may also be produced by known conventional chemical synthesis. Methods for chemically synthesizing the polypeptides encoded by polynucleotides of the present invention are well known to those skilled in the art. Such chemically synthetic polypeptides may possess biological properties in common with the natural, purified polypeptides, and thus may be employed as biologically active or immunological substitutes for the natural polypeptides.

Screening Assays and Sources of Test Compounds

[0119] The polynucleotides of the present invention, particularly those of differential CHO sequences, may also be used in screening assays to identify pharmacological agents or lead compounds that may be used to regulate the phenotype of CHO cells, e.g., which may be used to increase transgene expression by a transgene-modified CHO cell. For example, different populations of CHO cells can be contacted with one of a plurality of test compounds (e.g., small organic molecules or biological agents), and the expression of at least one differential CHO gene sequence may be compared in untreated samples or in samples contacted with different test compounds to determine whether any of the test compounds provides a substantially modulated (e.g., increased or decreased) level of expression. In a preferred embodiment, the identification of test compounds capable of modulating the activity of at least one differential CHO gene sequence is performed using high-throughput screening assays, such as provided by BIACORE® (Biacore International AB, Uppsala, Sweden), BRET (bioluminescence resonance energy transfer), and FRET (fluorescence resonance energy transfer) assays, as well as ELISA. One of skill in the art will recognize that test compounds capable of decreasing levels of a differential CHO gene sequence(s), particularly a differential CHO gene sequence listed in Table 2, may be an exemplary candidate for increasing transgene expression by CHO cells.

[0120] The test compounds of the present invention may be obtained from a number of sources. For example, combinatorial libraries of molecules are available for screening. Using such libraries, thousands of molecules can be performed for inhibitory activity. Preparation and screening of compounds can be performed as described above or by other methods well known to those of skill in the art. The compounds thus identified can serve as conventional “lead compounds” or can be used as the actual therapeutics.

### EXAMPLES

[0121] The Examples which follow are set forth to aid in the understanding of the invention but are not intended to, and should not be construed to, limit its scope in any way. The Examples do not include detailed descriptions of conventional methods, such as probe selection, real-time polymerase chain reaction (PCR), photolithography, cell culture, RNA quantification or those methods employed in the construction of vectors, the insertion of genes encoding the polypeptides into such vectors and plasmids, the introduction of such vectors and plasmids into host cells, and the expression of polypeptides from such vectors and plasmids in host cells. Such methods are well known to those of ordinary skill in the art.

### Example 1

### Generation of an Oligonucleotide Array Useful for Monitoring Gene Expression by Chinese Hamster Ovary Cells

[0122] Chinese Hamster Ovary (CHO) cells are commonly used for the recombinant production of proteins. Despite the widespread use of CHO cells in the art, only limited sequence analysis of the cell line has been performed, and methods to monitor CHO cell gene expression are not readily available. Consequently, publicly available gene coding sequences from all hamsters, in addition to gene coding sequences from the Chinese hamster, were clustered and aligned to generate consensus sequences. Chinese hamster gene coding sequences and EST sequences were obtained either from publicly available sources or through use of CHO cDNA libraries made by well-known methods in the art.

### Example 1.1

### Generation of CHO cDNA Library

[0123] Generation of a cDNA library is a well-known method in the art. Briefly, a cDNA library is constructed from a source of a pool of mRNA, which is subsequently reverse transcribed into cDNA. The resulting pool of cDNA is then ligated into a population of an appropriate expression vector to form the cDNA library. Well-known methods for efficient cDNA—expression vector ligation, such as tailing, linker/adaptor insertion, and vector priming, are described in the art, e.g., Kriegler, M. P. (1990) Gene Transfer and Expression: A Laboratory Manual, W.H. Freeman and Company, NY, pp. 117-31. Additionally, methods for cDNA library amplification, isolation, and sequencing are also well known in the art.

[0124] One of skill in the art will recognize that the source of mRNA depends on the cell line to be monitored, as described above. It is preferred that the mRNA is isolated from either the cells or cell line(s) to be monitored, or the animal from which the cell line was derived. Additionally, if the mRNA is to be isolated from the cell line to be monitored, it is preferable that that mRNA be isolated from the cell line grown in various culture conditions to increase the possibility of including EST sequences that are involved in cell growth, cell maintenance, and/or transgene production.

[0125] To generate CHO cDNA libraries, mRNA was isolated from cultured CHO cells in both log phase and stationary phase. The libraries containing cDNA inserts within the pBluescriptII vector were normalized to reduce the amount of redundant transcripts (see, e.g., Soares et al. (1994) Proc. Natl. Acad. Sci. USA 91:9228-32; Tanaka et al. (1996) Genomics 35:231-35; Bondaldo et al. (1996) Genome Res. 6:791-806). Aliquots of the libraries were plated to obtain individual cDNA clones. Plasmid DNA from each clone was isolated and sequenced.

### Example 1.2

### Identification of Consensus Sequences

[0126] All hamster sequences, either gene coding sequences publicly available from GenBank or generated with prediction algorithms (1,358 sequences) or EST sequences derived from a CHO cDNA library (4,120 sequences) as generated in Example 1.1, were included in a sequence set to be analyzed by clustering and alignment. In a first step, each sequence (i.e., gene coding or EST sequence) of the sequence set was screened for vector and low-complexity sequences. The vector and low-complexity sequences were masked from each gene coding sequence or EST sequence with a poly-X sequence of the same length, and the remaining sequence was either included for clustering and alignment analysis, or excluded because it did not meet the base pair requirement inherent in the preset definition of homologous sequences, e.g., the remaining sequence was 50 base pairs in length whereas the definition of homologous sequences required at least 100 base pairs. The base pair requirement may be preset by one of skill in the art to remove sequences containing, for example, less than 1-150 bases (after screening).

[0127] The sequence set was analyzed with the clustering and alignment tool CAT (DoubleTwist, Oakland, Calif.), which first masked low-complexity regions and then reduced the redundancy of the sequence set based on user-defined parameters that required the sequences to be 100 or more base pairs in length. The resulting sequence set derived from CAT contained two distinct groups of consensus sequences. The first group was a set of consensus sequences for CAT subclusters containing more than one sequence. Hypothetically, the multi-sequence subclusters represented single transcripts included in the input sequence set numerous times. The second group was a set of exemplar (i.e., singleton) sequences that did not cluster with other CAT subclusters.

[0128] Of an original 5,478 input sequences, 601 sequences were removed as a result of screening. The remaining 4,877 sequences were processed through CAT. Initial clustering was performed at a minimum threshold of ninety percent sequence identity over a 100 base pair region. Sequence alignment was performed with Phrap (University of Washington, Seattle, Wash.) using default alignment criteria. The above cluster and alignment analysis produced 3,553 consensus sequences (601 of the consensus sequences were derived from multi-sequence clusters and 2,952 of the consensus sequences were derived from singleton clusters). The consensus sequences are set forth as SEQ ID NOs: 19-3572.

[0129] An example of a multi-sequence subcluster and its corresponding consensus sequence is provided in FIG. 1. The sequence of ribosomal protein L13 from Chinese Hamster Ovary cells (available from GenBank; Accession no. AB014876) clustered with two expressed sequence tags obtained from the CHO cDNA library. As shown in FIG. 1, alignment analysis of the three sequences revealed two areas of low complexity and one area of low homology. The two areas of low complexity, as well as an area containing contaminating vector sequence, were masked with a series of X's. The area of low homology is spanned by what is designated in the consensus sequence by a K (position 137) and an R (position 158) (letter designation following traditional IUPAC notation). The resulting consensus sequence was oriented 5′ to 3′ as determined from the original GenBank records of the known genes and/or through the presence of an internal 3′ read generated with the CHO library for the previously undiscovered genes, and used as a template for the selection of oligonucleotide probes.

### Example 1.3

### Probe Selection

[0130] Tiling regions of (1) consensus sequences identified in Example 1.2 and set forth as SEQ ID NOs: 19-3572, (2) transgene sequences including those listed in Table 1 and set forth as SEQ ID NOs:1-18, (3) other hamster sequences set forth as SEQ ID NOs: 3573-3575, and (4) control sequences (set forth as SEQ ID NOs:3576-3642) as described above, were subject to a first stage of probe selection analysis during which every potential 25-mer perfect match oligonucleotide probe was identified for each consensus, transgene and control sequence. The sequences for the tiling regions of the sequences are set forth as SEQ ID NOs:3643-7284, wherein the sequence of SEQ ID NO:3642+n corresponds to the tiling sequence for the sequence set forth in SEQ ID NO:n. In addition, a 25-mer oligonucleotide probe with a single mutation in the 13^{th} position (mismatch) was generated for each perfect match oligonucleotide probe.

[0131] The perfect match and mismatch probes were analyzed for, and scored based on, their stringency requirements and inherent structures. In a second stage of probe selection, probe sequences were determined to be either unique or multiply represented with respect to all other probe sequences identified in the first stage. Finally, probesets for each consensus, transgene and control sequence were created such that each probe in a probeset had a similar characteristic with regard to its score (derived in the first stage of probe selection) and uniqueness (determined in the second stage of probe selection). Four distinct classes of probesets of at least 25-55 perfect match 25-mer oligonucleotide probes were designed for each consensus, transgene and control sequence. Following is a description of the four classes of probesets in the order of suitability for inclusion in the array: 1) probesets consisting of high-scoring, unique probes; 2) probesets consisting of lower-scoring, unique probes; 3) probesets consisting of high-scoring, nonunique probes where every probe can be used for detection of a small set of highly homologous sequences; and 4) probesets consisting of high-scoring, unique and nonunique probes where at least one probe is specific for the identified sequence and the remaining probes in the probeset are common to a small set of highly homologous sequences. If a probeset fell within the first class of probesets, i.e., the probes within the probeset were high-scoring and unique, no probeset within the other three classes of probesets were incorporated into the array design. Finally, if none of the four classes of probesets could be designed for a particular sequence, the array would not contain a probeset for that sequence, and thus, the sequence would not be detectable with the array. As demonstrated in FIG. 1, probes were not generated for areas of low homology, low complexity, or areas containing contaminating vector sequences. All oligonucleotide probes were then arrayed onto a solid phase substrate in a random but known location by photolithography.

### Example 2

### Hybridization of a Pool of Target Nucleic Acids to the Oligonucleotide Array and Detection of the Hybridization Profile

[0132] The following example is applicable to any sample obtained from any cell line cultured in a particular condition. In other words, the protocols described in this example can be used to obtain a hybridization profile for nontransfected cells, cells transfected with a transgene, and nontransfected or transfected cells grown in differing culture conditions.

### Example 2.1

### Preparing a Pool of Target Nucleic Acids

[0133] Using well-known methods in the art, total RNA was isolated from the sample and converted to biotinylated cRNA for hybridization to the oligonucleotide array made in Example 1. Briefly, total RNA was isolated using the RNeasy Kit (Qiagen, Valencia, Calif.) according to the manufacturer's protocol. The isolated total RNA (5 μg) was then annealed to an oligo-dT primer (50 pMoles) in a reaction containing the BAC pool control reagent by incubation at 70° C. for 10 min. The primed RNA was subsequently reverse transcribed into complementary DNA (cDNA) by incubation with 200 units of Superscript RT II™ (Invitrogen, Carlsbad, Calif.) and 0.5 mM each dNTP (Invitrogen) in 1× first-strand buffer at 50° C. for 1 hr. Second-strand synthesis was performed by the addition of 40 units DNA Pol I, 10 units E. coli DNA ligase, 2 units RNase H, 30 μl second-strand buffer (Invitrogen), 3 μl of 10 mM dNTP (2.5 mM each) and dH₂O to a 150 μl final volume and incubation at 15° C. for 2 hours. T4 DNA polymerase (10 units) was then added for an additional 5 min. The reaction was stopped by the addition of 10 μl of 500 mM EDTA. The resulting double-stranded cDNA was purified using a cDNA Sample Cleanup Module (Affymetrix). The cDNA (3 μl) was transcribed in vitro into cRNA by incubation with 1750 units of T7 RNA polymerase and biotinylated rNTPs at 37° C. for 16-20 hrs. Biotinylated rNTPs were used to incorporate biotin into the resulting cRNA. The biotinylated cRNA was then purified using the cRNA Sample Cleanup Module (Affymetrix) according to the manufacturer's protocol, and quantified using a spectrophotometer.

### Example 2.2

### Hybridization of a Pool of Target Nucleic Acids to Oligonucleotide Array

[0134] Biotin-labeled cRNA (2.5 μg) was fragmented for 35 min at 95° C. in 40 μl of 1× Fragmentation Buffer (Affymetrix). The fragmented cRNA was diluted in hybridization fluid [260 μl 1× MES buffer containing 300 ng herring sperm DNA, 300 ng BSA, 6.25 μl of a control oligonucleotide used to align the oligonucleotide array (e.g., Oligo B2, commercially available from Affymetrix, used to align Affymetrix arrays of oligonucleotide probes), and 2.5 μl standard curve reagent (as described in Hill et al. (2000) Science 290:809-12)] and denatured for 5 min at 95° C., followed immediately by incubation for 5 min at 45° C. Insoluble material was removed by a brief centrifugation, and the hybridization mix was added to the oligonucleotide array described in Example 1. Target nucleic acids were allowed to hybridize to complementary oligonucleotide probes by incubation at 45° C. for 16 hrs under continuous rotation at 60 rpm. After incubation, the hybridization fluid was removed and the oligonucleotide array was extensively washed with 6×SSPET and 1×SSPET using protocols known in the art.

### Example 2.3

### Detection and Analysis of the Hybridization Profile Resulting from Hybridizing the Pool of Target Nucleic Acids to the Oligonucleotide Array

[0135] The raw fluorescent intensity value of each gene was measured at a resolution of 3 μm with an Agilent GeneArray Scanner. Microarray Suite (Affymetrix, Santa Clara, Calif.), which uses an algorithm to determine whether a gene is “present” or “absent,” as well as the specific hybridization intensity values of each gene on the array, was used to evaluate the fluorescent data. The expression value for each gene was normalized to frequency values by referral to the expression value of 11 control transcripts of known abundance that were spiked into each hybridization mix according to the procedure of Hill et al. (2001) Genome Biol. 2(12):research0055.1-0055.13 and Hill et al. (2000), Science 290:809-12, both of which are incorporated herein in their entirety by reference. The frequency of each gene was calculated and represents a value equal to the total number of individual gene transcripts per 10⁶ total transcripts.

[0136] Each condition and time point was represented by at least three biological replicates. Programs known in the art, e.g., GeneExpress 2000 (Gene Logic, Gaithersburg, Md.), were used to analyze the presence or absence of a target sequence and to determine its relative expression level in one cohort of samples (e.g., condition or time point) compared to another sample cohort. A probeset called present in all replicate samples was considered for further analysis. Generally, fold-change values of 2-fold or greater were considered statistically significant if the p-values were less than or equal to 0.05.

### Example 3

### Use of the Oligonucleotide Array to Identify Genes and Related Pathways Involved with a Particular Cell Phenotype

[0137] The identification of genes and related pathways that are involved with one or more particular cell phenotypes (e.g., during a stress response, transgene expression, etc.) can lead to the discovery of genes that were previously undiscovered, e.g., as indicators of a stress-inducing culture condition, involvement with expression of a transgene, etc., respectively. One of skill in the art may identify the genes and related pathways involved in particular cell phenotypes by performing the following:
[0138] 1) creating a plurality of identical oligonucleotide arrays for the cells (as described in Example 1);
[0139] 2) growing a first sample of cells in a first condition that mimics the physiological condition and growing a second sample of cells in a second condition that induces a particular cell phenotype;
[0140] 3) isolating, processing, and hybridizing total RNA from the first sample to a first oligonucleotide array created in step 1 (as described in Example 2);
[0141] 4) isolating, processing, and hybridizing total RNA from the second sample to a second oligonucleotide array created in step 1 (as described in Example 2); and
[0142] 5) comparing the resulting hybridization profiles to identify the sequences that are differentially expressed between the first and second samples.
   The subsequently identified genes and related pathways may then be further manipulated in different ways, including, but not limited to, the following: 1) they may be used as markers for the particular phenotype induced by the second condition; and 2) they may be manipulated to induce the particular phenotype by the cells in the absence of the correlating second condition. In addition, the regulatory elements of the identified genes and related pathways may be used to generate an expression system, e.g., a ‘stress-inducible’ expression system.

[0143] To determine the genes and related pathways involved when CHO cells are grown at a temperature other than the physiological temperature and/or under conditions that promote transgene expression, identical ‘stress’—oligonucleotide arrays were created using the tiling sequences set forth as SEQ ID NOs:3643-7284, i.e., the tiling regions of 1) consensus sequences set forth as SEQ ID NOs:19-3572 generated (see above) from all publicly available hamster sequences and EST sequences isolated from a cDNA library generated with mRNA isolated from CHO cells grown at 37° C. and CHO cells grown at 31° C., 2) transgene sequences set forth as SEQ ID NOs: 1-18, 3) other hamster sequences set forth as SEQ ID NOs:3573-3575, and 4) control sequences set forth as SEQ ID NOs:3576-3642 as template sequences for the selection of oligonucleotide probes. The expression of known and previously undiscovered genes by a CHO cell line modified with soluble IL-13 receptor (cell line A), BDD-FVIII-transfected CHO cells (cell line B) and nontransfected control CHO cells (control cell line), each cell line having a first sample of cells grown at 37° C., and a second sample of cells grown at 31° C., was determined. Each culture was run in triplicate or quadruplicate and, as described in Example 2, the total RNA from the first and second samples of each cell line were separately isolated, processed, and hybridized to a created oligonucleotide array. The resulting hybridization profiles were compared, and 31° C.-inducible genes, i.e., the genes present in each second sample that demonstrate at least a two-fold increase in expression level compared to genes in the first sample (for each of the cell lines) were analyzed further and compared for similarities.

[0144] Most of the differentially expressed sequences were unique for each cell line (cell line A=59 sequences; cell line B=149 sequences, control cell line=60 sequences), although several expressed sequences (10 sequences) were shared among all three cell lines. Of interest were the sequences that were expressed differentially in both sIL-13r-transfected CHO cells and BDD-FVII-transfected CHO cells cultured at 31° C., when respectively compared to sIL-13r-transfected and BDD-FVII-transfected CHO cells cultured at 37° C. (49 sequences). The 10 genes identified as differentially expressed in all three cell lines when cultured at 31° C. compared to when cultured at 37° C. and the 49 genes identified as differentially expressed in both transfected cell lines when cultured at 31° C. compared to when cultured at 37° C. may be involved in and/or contribute to the increased cellular productivity observed at 31° C., and therefore, could be targets for cell line engineering or as a tool to screen and predict cell lines that will respond favorably to lower temperature culture conditions.

[0145] Using the above-described methods and culturing cells under a variety of different culture conditions, the downregulation of expression of 152 individual sequences listed in Table 2 was determined to correlate with growth of the cells in at least one culture condition that promotes cell survival under stressful conditions and/or transgene expression (e.g., culture at a low temperature, culture in the presence of ammonia, culture in highly enriched media, culture with decreased frequency of passaging the cells, etc.). The downregulation of one or more of these genes also correlated with decreased expression of the sialic acid N-glycolylneuraminic acid (NGNA), a potential human antigen. Listed in Table 4 and set forth as SEQ ID NOs:3421-3572 are the genes that are downregulated by transgene-modified cells (and the fold difference of such downregulation) when they are grown at 31° C. compared to when they are grown at 37° C. (Low Temp Data Set), when they are grown in the presence of an additional 40 mM ammonia (NH₄) compared to when they are grown in no additional ammonia (Ammonia Adapted Data Set), when they are grown in highly enriched media for fed batch culture compared to when the cells are grown in media for maintenance cell culture (Fed Batch Adapted Data Set), when they are passaged every 7 days rather than every 3 to 4 days (Extended Culture Adapted Data Set), or when the cells produce less N-glycolylneuraminic acid (NGNA) compared to similar cells that produce more NGNA (NGNA Data Levels Set). Of these sequences, 134 were determined to be previously undiscovered, i.e., novel, in that they have no homology to any known sequences (i.e., have not been sequenced) and/or in that they have not, until now, been shown to be expressed in CHO cells. These sequences are set forth as SEQ ID NOs:3439-3572. In addition, the expression by CHO cells of other novel genes (e.g., Caspase 8 set forth as SEQ ID NO:3573) was also verified.

[0146] The above examples demonstrate the use of an oligonucleotide array created according to the methods set forth in Example 1 to verify expression of transgenes by CHO cells to and identify genes potentially involved in transgene expression. The identified genes represent previously undiscovered genes and/or known genes, predicted genes, or novel ESTs, that were previously unknown to be involved in the induction of transgene expression. Thus they provide novel targets that may be manipulated to increase the production of a transgene.

[0147] Whereas the above examples demonstrate the present invention utilizing the CHO cell line, it should be apparent to one of skill in the art that the present invention is not limited to use with the CHO cell line. One of skill in the art will know that the examples mentioned above will need only slight modifications to make and use an oligonucleotide array to monitor the expression of genes by bacterial, plant, fungal, and animal cell lines. For example, if it is desired to monitor the known and previously undiscovered genes of a bacterial cell line derived from Staphylococcus aureus, one of skill in the art will know that all publicly available coding sequences from all Staphylococcus aureus strains may be clustered and aligned to identify consensus sequences and, subsequently, to make an oligonucleotide array to known and previously undiscovered genes of Staphylococcus aureus, (in a manner similar to Example 1). Furthermore, without undue experimentation, one of skill in the art will be able to modify the protocols described in Example 2 to make them more appropriate for the cell line that is being analyzed. For example, different protocols are required to isolate RNA from bacterial, plant, fungal, and animal cell lines, and the differences in these protocols are well known in the art. It should also be apparent to one of skill in the art that transgene sequences are not limited to those listed in Table 1. Finally, one of skill in the art will also be able, without undue experimentation, to use an oligonucleotide array created as described herein not only to detect and improve the expression of a transgene, but also to quantify, and enhance the quality of, transgene expression. Consequently, the present invention is not limited to the Examples described above, and can be used to make an oligonucleotide array that can be used to optimize the culture conditions of, and/or transgene expression by, any cell line.

What is claimed:

1. An isolated nucleic acid molecule having a polynucleotide sequence selected from the group consisting of the polynucleotide sequences of SEQ ID NOs:3421-3574, complements thereof, and subsequences thereof.

2. The isolated nucleic acid molecule as in claim 1, wherein said nucleic acid molecule is operably linked to at least one expression control sequence.

3. A host cell transformed or transfected with the nucleic acid molecule of claim 2.

4. An isolated nucleic acid molecule that specifically hybridizes under highly stringent conditions to the polynucleotide sequence of claim 1.

5. An antisense oligonucleotide complementary to an mRNA corresponding to the isolated nucleic acid molecule of claim 1.

6. An isolated gene having the isolated nucleic acid molecule of claim 1.

7. An isolated allele of the isolated nucleic acid molecule of claim 1.

8. A nonhuman transgenic animal in which all of the somatic and germ cells contain DNA having the isolated nucleic acid molecule of claim 1.

9. An siRNA molecule for inhibiting expression of a gene having, the polynucleotide sequence of claim 1.

10. A method of increasing transgene expression by a cell population comprising targeting the cell population with an inhibitory polynucleotide.

11. The method of claim 10, wherein the inhibitory polynucleotide is an antisense oligonucleotide as in claim 5.

12. The method of claim 11, wherein the cell population is a population of CHO cells.

13. The method of claim 10, wherein the inhibitory polynucleotide is an siRNA molecule as in claim 9.

14. The method of claim 13, wherein the cell population is a population of CHO cells.

15. A method of identifying a compound capable of increasing survival of a cell population grown under stressful conditions, increasing transgene expression by a cell population, or decreasing the production of an antigen comprising the steps of:
(a) contacting a first cell population expressing a gene having a polynucleotide sequence selected from the group consisting of the polynucleotide sequences of SEQ ID NOs:3421-3572, complements thereof, and subsequences thereof with one of a plurality of test compounds; and
(b) comparing the expression of the gene having a polynucleotide sequence selected from the group consisting of the polynucleotide sequences of SEQ ID NOs:3421-3572, complements thereof, and subsequences thereof in the first population of cells with the expression of the gene in a second population of cells not contacted with the test compound, wherein a decrease in the expression of the gene having a polynucleotide sequence selected from the group consisting of the polynucleotide sequences of SEQ ID NOs:3421-3572, complements thereof, and subsequences thereof in the first sample, as compared with that in the second sample, identifies the compound as capable of increasing transgene expression.

16. The method of claim 15, wherein the step of comparing is performed with an oligonucleotide array comprising a plurality of oligonucleotide probes, wherein the plurality of oligonucleotide probes comprises a first set of oligonucleotide probes, wherein each oligonucleotide probe in the first set of oligonucleotide probes is specific for one of a plurality of template sequences, wherein the plurality of template sequences comprises at least one consensus sequence for a gene expressed by a cell derived from hamster, and wherein at least one oligonucleotide probe is specific for the at least one consensus sequence for a gene expressed by hamster.

17. A novel CHO polynucleotide having a polynucleotide sequence selected from the group consisting of the polynucleotide sequences of SEQ ID NOs: 19-3573, wherein the polynucleotide sequence was previously undiscovered.

18. A differential CHO polynucleotide having a polynucleotide sequence selected from the group consisting of the polynucleotide sequences of SEQ ID NOs: 19-3574, wherein expression of the differential CHO polynucleotide is correlated with increased survival of a cell grown under stressful culture conditions, increased transgene expression, or decreased production of an antigen.

19. The differential CHO polynucleotide of claim 18, wherein the polynucleotide sequence was previously undiscovered.

The application's sequence listing, which the Patent Office published only in electronic form, follows.

SEQUENCE LISTING (7285 sequences)

SEQ ID NO: 1 - DNA, 856 bp, Unknown
  neomycin phosphotransferase II
gattgccgcgtgtggcctcgaacaccgagcgaccctgcagccaatatgggatcggccattgaacaagatggattgcacgcaggttctccggccgcttgggtggagaggctattcggctatgactgggcacaacagacaatcggctgctctgatgccgccgtgttccggctgtcagcgcaggggcgcccggttctttttgtcaagaccgacctgtccggtgccctgaatgaactgcaggacgaggcagcgcggctatcgtggctggccacgacgggcgttccttgcgcagctgtgctcgacgttgtcactgaagcgggaagggactggctgctattgggcgaagtgccggggcaggatctcctgtcatctcaccttgctcctgccgagaaagtatccatcatggctgatgcaatgcggcggctgcatacgcttgatccggctacctgcccattcgaccaccaagcgaaacatcgcatcgagcgagcacgtactcggatggaagccggtcttgtcgatcaggatgatctggacgaagagcatcaggggctcgcgccagccgaactgttcgccaggctcaaggcgcgcatgcccgacggcgaggatctcgtcgtgacccatggcgatgcctgcttgccgaatatcatggtggaaaatggccgcttttctggattcatcgactgtggccggctgggtgtggcggaccgctatcaggacatagcgttggctacccgtgatattgctgaagagcttggcggcgaatgggctgaccgcttcctcgtgctttacggtatcgccgctcccgattcgcagcgcatcgccttctatcgccttcttgacgagttcttctgaggggatc

SEQ ID NO: 2 - DNA, 554 bp, Unknown
  internal ribosomal entry site (IRES)
gaattctaacgttactggccgaagccgcttggaataaggccggtgtgcgtttgtctatatgttattttccaccatattgccgtcttttggcaatgtgagggcccggaaacctggccctgtcttcttgacgagcattcctaggggtctttcccctctcgccaaaggaatgcaaggtctgttgaatgtcgtgaaggaagcagttcctctggaagcttcttgaagacaaacaacgtctgtagcgaccctttgcaggcagcggaaccccccacctggcgacaggtgcctctgcggccaaaagccacgtgtataagatacacctgcaaaggcggcacaaccccagtgccacgttgtgagttggatagttgtggaaagagtcaaatggctctcctcaagcgtattcaacaaggggctgaaggatgcccagaaggtaccccattgtatgggatctgatctggggcctcggtgcacatgctttacatgtgtttagtcgaggttaaaaaacgtctaggccccccgaaccacggggacgtggttttcctttgaaaaacacgatt

SEQ ID NO: 3 - DNA, 1216 bp, Homo sapiens
aattccgtcgaccatggtggccgggacccgctgtcttctagcgttgctgcttccccaggtcctcctgggcggcgcggctggcctcgttccggagctgggccgcaggaagttcgcggcggcgtcgtcgggccgcccctcatcccagccctctgacgaggtcctgagcgagttcgagttgcggctgctcagcatgttcggcctgaaacagagacccacccccagcagggacgccgtggtgcccccctacatgctagacctgtatcgcaggcactcaggtcagccgggctcacccgccccagaccaccggttggagagggcagccagccgagccaacactgtgcgcagcttccaccatgaagaatctttggaagaactaccagaaacgagtgggaaaacaacccggagattcttctttaatttaagttctatccccacggaggagtttatcacctcagcagagcttcaggttttccgagaacagatgcaagatgctttaggaaacaatagcagtttccatcaccgaattaatatttatgaaatcataaaacctgcaacagccaactcgaaattccccgtgaccagacttttggacaccaggttggtgaatcagaatgcaagcaggtgggaaagttttgatgtcacccccgctgtgatgcggtggactgcacagggacacgccaaccatggattcgtggtggaagtggcccacttggaggagaaacaaggtgtctccaagagacatgttaggataagcaggtctttgcaccaagatgaacacagctggtcacagataaggccattgctagtaacttttggccatgatggaaaagggcatcctctccacaaaagagaaaaacgtcaagccaaacacaaacagcggaaacgccttaagtccagctgtaagagacaccctttgtacgtggacttcagtgacgtggggtggaatgactggattgtggctcccccggggtatcacgccttttactgccacggagaatgcccttttcctctggctgatcatctgaactccactaatcatgccattgttcagacgttggtcaactctgttaactctaagattcctaaggcatgctgtgtcccgacagaactcagtgctatctcgatgctgtaccttgacgagaatgaaaaggttgtattaaagaactatcaggacatggttgtggagggttgtgggtgtcgctagtgagtcgacgga

SEQ ID NO: 4 - DNA, 564 bp, Cricetulus griseus
atggttcgaccgctgaactgcatcgtcgccgtgtcccagaatatgggcatcggcaagaacggagaccttccctggccaatgctcaggaacgaattcaagtacttccaaagaatgaccaccacctcctcagtggaaggtaaacagaacctggtgattatgggccggaaaacctggttctccattcctgagaagaatcgacctttaaaggacagaattaatatagttctcagtagagagctcaaggaaccaccacaaggagctcattttcttgccaaaagtctggacgatgccttaaaacttattgaacaaccagagttggcagataaagtggacatggtttggatagttggaggcagttccgtttacaaggaagccatgaatcagccaggccatctcagactctttgtgagaaggatcatgcaggaatttgaaagtgacacgttcttcccagaaattgatttggagaaatataaacttctcccagagtacccaggggtcctttctgaagtccaggaggaaaaaggcatcaagtataaatttgaagtctatgagaagaaaggctaa

SEQ ID NO: 5 - DNA, 1287 bp, Homo sapiens
atgctgaggacgttgctgcgaaggagacttttttcttatcccaccaaatactactttatggttcttgttttatccctaatcaccttctccgttttaaggattcatcaaaagcctgaatttgtaagtgtcagacacttggagcttgctggggagaatcctagtagtgatattaattgcaccaaagttttacagggtgatgtaaatgaaatccaaaaggtaaagcttgagatcctaacagtgaaatttaaaaagcgccctcggtggacacctgacgactatataaacatgaccagtgactgttcttctttcatcaagagacgcaaatatattgtagaaccccttagtaaagaagaggcggagtttccaatagcatattctatagtggttcatcacaagattgaaatgcttgacaggctgctgagggccatctatatgcctcagaatttctattgcgttcatgtggacacaaaatccgaggattcctatttagctgcagtgatgggcatcgcttcctgttttagtaatgtctttgtggccagccgattggagagtgtggtttatgcatcgtggagccgggttcaggctgacctcaactgcatgaaggatctctatgcaatgagtgcaaactggaagtacttgataaatctttgtggtatggattttcccattaaaaccaacctagaaattgtcaggaagctcaagttgttaatgggagaaaacaacctggaaacggagaggatgccatcccataaagaagaaaggtggaagaagcggtatgaggtcgttaatggaaagctgacaaacacagggactgtcaaaatgcttcctccactcgaaacacctctcttttctggcagtgcctacttcgtggtcagtagggagtatgtggggtatgtactacagaatgaaaaaatccaaaagttgatggagtgggcacaagacacatacagccctgatgagtatctctgggccaccatccaaaggattcctgaagtcccgggctcactccctgccagccataagtatgatctatctgacatgcaagcagttgccaggtttgtcaagtggcagtactttgagggtgatgtttccaagggtgctccctacccgccctgcgatggagtccatgtgcgctcagtgtgcattttcggagctggtgacttgaactggatgctgcgcaaacaccacttgtttgccaataagtttgacgtggatgttgacctctttgccatccagtgtttggatgagcatttgagacacaaagctttggagacattaaaacactga

SEQ ID NO: 6 - DNA, 1029 bp, Homo sapiens
atgaataatgctgggcacggccccacccggaggctgcgaggcttgggggtcctggccggggtggctctgctcgctgccctctggctcctgtggctgctggggtcagcccctcggggtaccccggcaccccagcccacgatcaccatccttgtctggcactggcccttcactgaccagcccccagagctgcccagcgacacctgcacccgctacggcatcgcccgctgccacctgagtgccaaccgaagcctgctggccagcgccgacgccgtggtcttccaccaccgcgagctgcagacccggcggtcccacctgcccctggcccagcggccgcgagggcagccctgggtgtgggcctccatggagtctcctagccacacccacggcctcagccacctccgaggcatcttcaactgggtgctgagctaccggcgcgactcggacatctttgtgccctatggccgcctggagccccactgggggccctcgccaccgctgccagccaagagcagggtggccgcctgggtggtcagcaacttccaggagcggcagctgcgtgccaggctgtaccggcagctggcgcctcatctgcgggtggatgtctttggccgtgccaatggacggccactgtgcgccagctgcctggtgcccaccgtggcccagtaccgcttctacctgtcctttgagaactctcagcaccgcgactacattacggagaaattctggcgcaacgcactggtggctggcactgtgccagtggtgctggggcccccacgggccacctatgaggccttcgtgccggctgacgccttcgtgcatgtggatgactttggctcagcccgagagctggcggctttcctcactggcatgaatgagagccgataccaacgcttctttgcctggcgtgacaggctccgcgtgcgactgttcaccgactggcgggaacgtttctgtgccatctgtgaccgctacccacacctaccccgcagccaagtctatgaggaccttgagggttggtttcaggcctga

SEQ ID NO: 7 - DNA, 746 bp, Homo sapiens
atggacatgcgcgtgcccgcccagctgctgggcctgctgatgctgtgggtgtccggctcctccggcgacgtggtgatgacccagtcccccctgtccctgcccgtgacccccggcgagcccgcctccatctcctgcaagtcctcccagtccctgctggactccgacggcaagacctacctgaactggctgctgcagaagcccggccagtccccccagcgcctgatctacctggtgtccaagctggactccggcgtgcccgaccgcttctccggctccggctccggcaccgacttcaccctgaagatctcccgcgtggaggccgaggacgtgggcgtgtactactgctggcagggcacccatttcccccgcaccttcggccagggcaccaaggtggagatcaagcgtactgtggctgcaccatctgtcttcatcttcccgccatctgatgagcagttgaaatctggaactgcctctgttgtgtgcctgctgaataacttctatcccagagaggccaaagtacagtggaaggtggataacgccctccaatcgggtaactcccaggagagtgtcacagagcaggacagcaaggacagcacctacagcctcagcagcaccctgacgctgagcaaagcagactacgagaaacacaaagtctacgcctgcgaagtcacccatcagggcctgagttcaccggtgacaaagagcttcaacaggggagagtgttagagggactagacccggggaat

SEQ ID NO: 8 - DNA, 1407 bp, Homo sapiens
atggagtttgggctgagctggctttttcttgtggctattttaaaaggtgtccagtgtgaggtgcagctgctggagtccggcggcggcctggtgcagcccggcggctccctgcgcctgtcctgcgccgcctccggcttcaccttctccaactacggcatgtcctgggtgcgccaggcccccggcaagggcctggagtgggtggcctccatccgctccggcggcggccgcacctactactccgacaacgtgaagggccgcttcaccatctcccgcgacaactccaagaacaccctgtacctgcagatgaactccctgcgcgccgaggacaccgccgtgtactactgcgtgcgctacgaccactactccggctcctccgactactggggccagggcaccctggtgaccgtgtcctccgcctccaccaagggcccatcggtcttccccctggcaccctcctccaagagcacctctgggggcacagcggccctgggctgcctggtcaaggactacttccccgaaccggtgacggtgtcgtggaactcaggcgccctgaccagcggcgtccacaccttcccggctgtcctacagtcctcaggactctactccctcagcagcgtagtgaccgtgccctccagcagcttgggcacccagacctacatctgcaacgtgaatcacaagcccagcaacaccaaggtggacaagaaagttgagcccaaatcttgtgacaaaactcacacatgcccaccgtgcccagcacctgaactcctggggggaccgtcagtcttcctcttccccccaaaacccaaggacaccctcatgatctcccggacccctgaggtcacatgcgtggtggtggacgtgagccacgaagaccctgaggtcaagttcaactggtacgtggacggcgtggaggtgcataatgccaagacaaagccgcgggaggagcagtacaacagcacgtaccgtgtggtcagcgtcctcaccgtcctgcaccaggactggctgaatggcaaggagtacaagtgcaaggtctccaacaaagccctcccagcccccatcgagaaaaccatctccaaagccaaagggcagccccgagaaccacaggtgtacaccctgcccccatcccgggaggagatgaccaagaaccaggtcagcctgacctgcctggtcaaaggcttctatcccagcgacatcgccgtggagtgggagagcaatgggcagccggagaacaactacaagaccacgcctcccgtgctggactccgacggctccttcttcctctatagcaagctcaccgtggacaagagcaggtggcagcaggggaacgtcttctcatgctccgtgatgcatgaggctctgcacaaccactacacgcagaagagcctctccctgtccccgggtaaatga

SEQ ID NO: 9 - DNA, 564 bp, Mus musculus
atggttcgaccattgaactgcatcgtcgccgtgtcccaaaatatggggattggcaagaacggagacctaccctggcctccgctcaggaacgagttcaagtacttccaaagaatgaccacaacctcttcagtggaaggtaaacagaatctggtgattatgggtaggaaaacctggttctccattcctgagaagaatcgacctttaaaggacagaattaatatagttctcagtagagaactcaaagaaccaccacgaggagctcattttcttgccaaaagtttggatgatgccttaagacttattgaacaaccggaattggcaagtaaagtagacatggtttggatagtcggaggcagttctgtttaccaggaagccatgaatcaaccaggccacctcagactctttgtgacaaggatcatgcaggaatttgaaagtgacacgtttttcccagaaattgatttggggaaatataaacttctcccagaatacccaggcgtcctctctgaggtccaggaggaaaaaggcatcaagtataagtttgaagtctacgagaagaaagactaa

SEQ ID NO: 10 - DNA, 2251 bp, Homo sapiens
gaattcaccatggagctgaggccctggttgctatgggtggtagcagcaacaggaaccttggtcctgctagcagctgatgctcagggccagaaggtcttcaccaacacgtgggctgtgcgcatccctggaggcccagcggtggccaacagtgtggcacggaagcatgggttcctcaacctgggccagatcttcggggactattaccacttctggcatcgaggagtgacgaagcggtccctgtcgcctcaccgcccgcggcacagccggctgcagagggagcctcaagtacagtggctggaacagcaggtggcaaagcgacggactaaacgggacgtgtaccaggagcccacagaccccaagtttcctcagcagtggtacctgtctggtgtcactcagcgggacctgaatgtgaaggcggcctgggcgcagggctacacagggcacggcattgtggtctccattctggacgatggcatcgagaagaaccacccggacttggcaggcaattatgatcctggggccagttttgatgtcaatgaccaggaccctgacccccagcctcggtacacacagatgaatgacaacaggcacggcacacggtgtgcgggggaagtggctgcggtggccaacaacggtgtctgtggtgtaggtgtggcctacaacgcccgcattggaggggtgcgcatgctggatggcgaggtgacagatgcagtggaggcacgctcgctgggcctgaaccccaaccacatccacatctacagtgccagctggggccccgaggatgacggcaagacagtggatgggccagcccgcctcgccgaggaggccttcttccgtggggttagccagggccgaggggggctgggctccatctttgtctgggcctcggggaacgggggccgggaacatgacagctgcaactgcgacggctacaccaacagtatctacacgctgtccatcagcagcgccacgcagtttggcaacgtgccgtggtacagcgaggcctgctcgtccacactggccacgacctacagcagtggcaaccagaatgagaagcagatcgtgacgactgacttgcggcagaagtgcacggagtctcacacgggcacctcagcctctgcccccttagcagccggcatcattgctctcaccctggaggccaataagaacctcacatggcgggacatgcaacacctggtggtacagacctcgaagccagcccacctcaatgccaacgactgggccaccaatggtgtgggccggaaagtgagccactcatatggctacgggcttttggacgcaggcgccatggtggccctggcccagaattggaccacagtggccccccagcggaagtgcatcatcgacatcctcaccgagcccaaagacatcgggaaacggctcgaggtgcggaagaccgtgaccgcgtgcctgggcgagcccaaccacatcactcggctggagcacgctcaggcgcggctcaccctgtcctataatcgccgtggcgacctggccatccacctggtcagccccatgggcacccgctccaccctgctggcagccaggccacatgactactccgcagatgggtttaatgactgggccttcatgacaactcattcctgggatgaggatccctctggcgagtgggtcctagagattgaaaacaccagcgaagccaacaactatgggacgctgaccaagttcaccctcgtactctatggcaccgcccctgaggggctgcccgtacctccagaaagcagtggctgcaagaccctcacgtccagtcaggcctgtgtggtgtgcgaggaaggcttctccctgcaccagaagagctgtgtccagcactgccctccaggcttcgccccccaagtcctcgatacgcactatagcaccgagaatgacgtggagaccatccgggccagcgtctgcgccccctgccacgcctcatgtgccacatgccaggggccggccctgacagactgcctcagctgccccagccacgcctccttggaccctgtggagcagacttgctcccggcaaagccagagcagccgagagtccccgccacagcagcagccacctcggctgcccccggaggtggaggcggggcaacggctgcgggcagggctgctgccctcacacctgcctgagtgatgagcccactgcccaccccctcaagccaatcccctccttgggcactttttaattcaccaaagtatttttttatctgtcgactctagacccgggg

SEQ ID NO: 11 - DNA, 942 bp, Homo sapiens
atgcctctgcaactcctcctgttgctgatcctactgggccctggcaacagcttgcagctgtgggacacctgggcagatgaagccgagaaagccttgggtcccctgcttgcccgggaccggagacaggccaccgaatatgagtacctagattatgatttcctgccagaaacggagcctccagaaatgctgaggaacagcactgacaccactcctctgactgggcctggaacccctgagtctaccactgtggagcctgctgcgcggccgcacacatgcccaccgtgcccagcacctgaagccctgggggcaccgtcagtcttcctcttccccccaaaacccaaggacaccctcatgatctcccggacccctgaggtcacatgcgtggtggtggacgtgagccacgaagaccctgaggtcaagttcaactggtacgtggacggcgtggaggtgcataatgccaagacaaagccgcgggaggagcagtacaacagcacgtaccgtgtggtcagcgtcctcaccgtcctgcaccaggactggctgaatggcaaggagtacaagtgcaaggtctccaacaaagccctcccagtccccatcgagaaaaccatctccaaagccaaagggcagccccgagaaccacaggtgtacaccctgcccccatcccgggaggagatgaccaagaaccaggtcagcctgacctgcctggtcaaaggcttctatcccagcgacatcgccgtggagtgggagagcaatgggcagccggagaacaactacaagaccacgcctcccgtgctggactccgacggctccttcttcctctatagcaagctcaccgtggacaagagcaggtggcagcaggggaacgtcttctcatgctccgtgatgcatgaggctctgcacaaccactacacgcagaagagcctctccctgtccccgggtaaatga

SEQ ID NO: 12 - DNA, 2458 bp, Homo sapiens
ctgcagaggcctctagaatctgctagcaaaggttatgcagcgcgtgaacatgatcatggcagaatcaccaggcctcatcaccatctgccttttaggatatctactcagtgctgaatgtacagtttttcttgatcatgaaaacgccaacaaaattctgaatcggccaaagaggtataattcaggtaaattggaagagtttgttcaagggaaccttgagagagaatgtatggaagaaaagtgtagttttgaagaagcacgagaagtttttgaaaacactgaaagaacaactgaattttggaagcagtatgttgatggagatcagtgtgagtccaatccatgtttaaatggcggcagttgcaaggatgacattaattcctatgaatgttggtgtccctttggatttgaaggaaagaactgtgaattagatgtaacatgtaacattaagaatggcagatgcgagcagttttgtaaaaatagtgctgataacaaggtggtttgctcctgtactgagggatatcgacttgcagaaaaccagaagtcctgtgaaccagcagtgccatttccatgtggaagagtttctgtttcacaaacttctaagctcacccgtgctgaggctgtttttcctgatgtggactatgtaaattctactgaagctgaaaccattttggataacatcactcaaagcacccaatcatttaatgacttcactcgggttgttggtggagaagatgccaaaccaggtcaattcccttggcaggttgttttgaatggtaaagttgatgcattctgtggaggctctatcgttaatgaaaaatggattgtaactgctgcccactgtgttgaaactggtgttaaaattacagttgtcgcaggtgaacataatattgaggagacagaacatacagagcaaaagcgaaatgtgattcgaattattcctcaccacaactacaatgcagctattaataagtacaaccatgacattgcccttctggaactggacgaacccttagtgctaaacagctacgttacacctatttgcattgctgacaaggaatacacgaacatcttcctcaaatttggatctggctatgtaagtggctggggaagagtcttccacaaagggagatcagctttagttcttcagtaccttagagttccacttgttgaccgagccacatgtcttcgatctacaaagttcaccatctataacaacatgttctgtgctggcttccatgaaggaggtagagattcatgtcaaggagatagtgggggaccccatgttactgaagtggaagggaccagtttcttaactggaattattagctggggtgaagagtgtgcaatgaaaggcaaatatggaatatataccaaggtatcccggtatgtcaactggattaaggaaaaaacaaagctcacttaatgaaagatggatttccaaggttaattcattggaattgaaaattaacagggcctctcactaactaatcactttcccatcttttgttagatttgaatatatacattctatgatcattgctttttctctttacaggggagaatttcatattttacctgagcaaattgattagaaaatggaaccactagaggaatataatgtgttaggaaattacagtcatttctaagggcccagcccttgacaaaattgtgaagttaaattctccactctgtccatcagatactatggttctccactatggcaactaactcactcaattttccctccttagcagcattccatcttcccgatcttctttgcttctccaaccaaaacatcaatgtttattagttctgtatacagtacaggatctttggtctactctatcacaaggccagtaccacactcatgaagaaagaacacaggagtagctgagaggctaaaactcatcaaaaacactactccttttcctctaccctattcctcaatcttttaccttttccaaatcccaatccccaaatcagtttttctctttcttactccctctctcccttttaccctccatggtcgttaaaggagagatggggagcatcattctgttatacttctgtacacagttatacatgtctatcaaacccagacttgcttccatagtggagacttgcttttcagaacatagggatgaagtaaggtgcctgaaaagtttgggggaaaagtttctttcagagagttaagttattttatatatataatatatatataaaatatataatatacaatataaatatatagtgtgtgtgtgtatgcgtgtgtgtagacacacacgcatacacacatataatggaagcaataagccattctaagagcttgtatggttatggaggtctgactaggcatgatttcacgaaggcaagattggcatatcattgtaactaaaaaagctgacattgacccagacatattgtactctttctaaaaataataataatctagaggcctctg

SEQ ID NO: 13 - DNA, 4374 bp, Homo sapiens
atgcaaatagagctctccacctgcttctttctgtgccttttgcgattctgctttagtgccaccagaagatactacctgggtgcagtggaactgtcatgggactatatgcaaagtgatctcggtgagctgcctgtggacgcaagatttcctcctagagtgccaaaatcttttccattcaacacctcagtcgtgtacaaaaagactctgtttgtagaattcacggatcaccttttcaacatcgctaagccaaggccaccctggatgggtctgctaggtcctaccatccaggctgaggtttatgatacagtggtcattacacttaagaacatggcttcccatcctgtcagtcttcatgctgttggtgtatcctactggaaagcttctgagggagctgaatatgatgatcagaccagtcaaagggagaaagaagatgataaagtcttccctggtggaagccatacatatgtctggcaggtcctgaaagagaatggtccaatggcctctgacccactgtgccttacctactcatatctttctcatgtggacctggtaaaagacttgaattcaggcctcattggagccctactagtatgtagagaagggagtctggccaaggaaaagacacagaccttgcacaaatttatactactttttgctgtatttgatgaagggaaaagttggcactcagaaacaaagaactccttgatgcaggatagggatgctgcatctgctcgggcctggcctaaaatgcacacagtcaatggttatgtaaacaggtctctaccaggtctgattggatgccacaggaaatcagtctattggcatgtgattggaatgggcaccactcctgaagtgcactcaatattcctcgaaggtcacacatttcttgtgaggaaccatcgccaggcgtccttggaaatctcgccaataactttccttactgctcaaacactcttgatggaccttggacagtttctactgttttgtcatatctcttcccaccaacatgatggcatggaagcttatgtcaaagtagacagctgtccagaggaaccccaactacgaatgaaaaataatgaagaagcggaagactatgatgatgatcttactgattctgaaatggatgtggtcaggtttgatgatgacaactctccttcctttatccaaattcgctcagttgccaagaagcatcctaaaacttgggtacattacattgctgctgaagaggaggactgggactatgctcccttagtcctcgcccccgatgacagaagttataaaagtcaatatttgaacaatggccctcagcggattggtaggaagtacaaaaaagtccgatttatggcatacacagatgaaacctttaagactcgtgaagctattcagcatgaatcaggaatcttgggacctttactttatggggaagttggagacacactgttgattatatttaagaatcaagcaagcagaccatataacatctaccctcacggaatcactgatgtccgtcctttgtattcaaggagattaccaaaaggtgtaaaacatttgaaggattttccaattctgccaggagaaatattcaaatataaatggacagtgactgtagaagatgggccaactaaatcagatcctcggtgcctgacccgctattactctagtttcgttaatatggagagagatctagcttcaggactcattggccctctcctcatctgctacaaagaatctgtagatcaaagaggaaaccagataatgtcagacaagaggaatgtcatcctgttttctgtatttgatgagaaccgaagctggtacctcacagagaatatacaacgctttctccccaatccagctggagtgcagcttgaggatccagagttccaagcctccaacatcatgcacagcatcaatggctatgtttttgatagtttgcagttgtcagtttgtttgcatgaggtggcatactggtacattctaagcattggagcacagactgacttcctttctgtcttcttctctggatataccttcaaacacaaaatggtctatgaagacacactcaccctattcccattctcaggagaaactgtcttcatgtcgatggaaaacccaggtctatggattctggggtgccacaactcagactttcggaacagaggcatgaccgccttactgaaggtttctagttgtgacaagaacactggtgattattacgaggacagttatgaagatatttcagcatacttgctgagtaaaaacaatgccattgaaccaagaagcttctctcagaatccaccagtcttgaaacgccatcaacgggaaataactcgtactactcttcagtcagatcaagaggaaattgactatgatgataccatatcagttgaaatgaagaaggaagattttgacatttatgatgaggatgaaaatcagagcccccgcagctttcaaaagaaaacacgacactattttattgctgcagtggagaggctctgggattatgggatgagtagctccccacatgttctaagaaacagggctcagagtggcagtgtccctcagttcaagaaagttgttttccaggaatttactgatggctcctttactcagcccttataccgtggagaactaaatgaacatttgggactcctggggccatatataagagcagaagttgaagataatatcatggtaactttcagaaatcaggcctctcgtccctattccttctattctagccttatttcttatgaggaagatcagaggcaaggagcagaacctagaaaaaactttgtcaagcctaatgaaaccaaaacttacttttggaaagtgcaacatcatatggcacccactaaagatgagtttgactgcaaagcctgggcttatttctctgatgttgacctggaaaaagatgtgcactcaggcctgattggaccccttctggtctgccacactaacacactgaaccctgctcatgggagacaagtgacagtacaggaatttgctctgtttctcaccatctttgatgagaccaaaagctggtacttcactgaaaatatggaaagaaactgcagggctccctgcaatatccagatggaagatcccacttttaaagagaattatcgcttccatgcaatcaatggctacataatggatacactacctggcttagtaatggctcaggatcaaaggattcgatggtatctgctcagcatgggcagcaatgaaaacatccattctattcatttcagtggacatgtgttcactgtacgaaaaaaagaggagtataaaatggcactgtacaatctctatccaggtgtttttgagacagtggaaatgttaccatccaaagctggaatttggcgggtggaatgccttattggcgagcatctacatgctgggatgagcacactttttctggtgtacagcaataagtgtcagactcccctgggaatggcttctggacacattagagattttcagattacagcttcaggacaatatggacagtgggccccaaagctggccagacttcattattccggatcaatcaatgcctggagcaccaaggagcccttttcttggatcaaggtggatctgttggcaccaatgattattcacggcatcaagacccagggtgcccgtcagaagttctccagcctctacatctctcagtttatcatcatgtatagtcttgatgggaagaagtggcagacttatcgaggaaattccactggaaccttaatggtcttctttggcaatgtggattcatctgggataaaacacaatatttttaaccctccaattattgctcgatacatccgtttgcacccaactcattatagcattcgcagcactcttcgcatggagttgatgggctgtgatttaaatagttgcagcatgccattgggaatggagagtaaagcaatatcagatgcacagattactgcttcatcctactttaccaatatgtttgccacctggtctccttcaaaagctcgacttcacctccaagggaggagtaatgcctggagacctcaggtgaataatccaaaagagtggctgcaagtggacttccagaagacaatgaaagtcacaggagtaactactcagggagtaaaatctctgcttaccagcatgtatgtgaaggagttcctcatctccagcagtcaagatggccatcagtggactctcttttttcagaatggcaaagtaaaggtttttcagggaaatcaagactccttcacacctgtggtgaactctctagacccaccgttactgactcgctaccttcgaattcacccccagagttgggtgcaccagattgccctgaggatggaggttctgggctgcgaggcacaggacctctactga

SEQ ID NO: 14 - DNA, 1698 bp, Homo sapiens
atgaaattcttagtcaacgttgcccttgtttttatggtcgtgtacatttcttacatctatgcgaccgagataaaagttaaccctcctcaggattttgagatagtggatcccggatacttaggttatctctatttgcaatggcaacccccactgtctctggatcattttaaggaatgcacagtggaatatgaactaaaataccgaaacattggtagtgaaacatggaagaccatcattactaagaatctacattacaaagatgggtttgatcttaacaagggcattgaagcgaagatacacacgcttttaccatggcaatgcacaaatggatcagaagttcaaagttcctgggcagaaactacttattggatatcaccacaaggaattccagaaactaaagttcaggatatggattgcgtatattacaattggcaatatttactctgttcttggaaacctggcataggtgtacttcttgataccaattacaacttgttttactggtatgagggcttggatcatgcattacagtgtgttgattacatcaaggctgatggacaaaatataggatgcagatttccctatttggaggcatcagactataaagatttctatatttgtgttaatggatcatcagagaacaagcctatcagatccagttatttcacttttcagcttcaaaatatagttaaacctttgccgccagtctatcttacttttactcgggagagttcatgtgaaattaagctgaaatggagcatacctttgggacctattccagcaaggtgttttgattatgaaattgagatcagagaagatgatactaccttggtgactgctacagttgaaaatgaaacatacaccttgaaaacaacaaatgaaacccgacaattatgctttgtagtaagaagcaaagtgaatatttattgctcagatgacggaatttggagtgagtggagtgataaacaatgctgggaaggtgaagacctatcgaagaaaactcccaaatcttgtgacaaaactcacacatgcccaccgtgcccagcacctgaactcctggggggaccgtcagtcttcctcttccccccaaaacccaaggacaccctcatgatctcccggacccctgaggtcacatgcgtggtggtggacgtgagccacgaagaccctgaggtcaagttcaactggtacgtggacggcgtggaggtgcataatgccaagacaaagccgcgggaggagcagtacaacagcacgtaccgtgtggtcagcgtcctcaccgtcctgcaccaggactggctgaatggcaaggagtacaagtgcaaggtctccaacaaagccctcccagtccccatcgagaaaaccatctccaaagccaaagggcagccccgagaaccacaggtgtacaccctgcccccatcccgggaggagatgaccaagaaccaggtcagcctgacctgcctggtcaaaggcttctatcccagcgacatcgccgtggagtgggagagcaatgggcagccggagaacaactacaagaccacgcctcccgtgctggactccgacggctccttcttcctctatagcaagctcaccgtggacaagagcaggtggcagcaggggaacgtcttctcatgctccgtgatgcatgaggctctgcacaaccactacacgcagaagagcctctccctgtccccgggtaaatga

SEQ ID NO: 15 - DNA, 1593 bp, Homo sapiens
atgcctctcctcctcttgctgctcctgctgccaagccccttacacccccaccccatctgtgaggtctccaaagtggccagccacctagaagtgaactgtgacaagaggaatctgacagcgctgcctccagacctgccgaaagacacaaccatcctccacctgagtgagaacctcctgtacaccttctccctggcaaccctgatgccttacactcgcctcactcagctgaacctagataggtgcgagctcaccaagctccaggtcgatgggacgctgccagtgctggggaccctggatctatcccacaatcagctgcaaagcctgcccttgctagggcagacactgcctgctctcaccgtcctggacgtctccttcaaccggctgacctcgctgcctcttggtgccctgcgtggtcttggcgaactccaagagctctacctgaaaggcaatgagctgaagaccctgcccccagggctcctgacgcccacacccaagctggagaagctcagtctggctaacaacaacttgactgagctccccgctgggctcctgaatgggctggagaatctcgacacccttctcctccaagagaactcgctgtatacaataccaaagggcttttttgggtcccacctcctgccttttgcttttctccacgggaacccctggttatgcaactgtgagatcctctattttcgtcgctggctgcaggacaatgctgaaaatgtctacgtatggaagcaagtggtggacgtcaaggccgtgacctctaacgtggccagtgtgcagtgtgacaattcagacaagtttcccgtctacaaatacccaggaaaggggtgccccacccttggtgatgaaggtgacacagacctatatgattactacccagaagaggacactgagggcgataaggtgcggccgcacacatgcccaccgtgcccagcacctgaagccctgggggcaccgtcagtcttcctcttccccccaaaacccaaggacaccctcatgatctcccggacccctgaggtcacatgcgtggtggtggacgtgagccacgaagaccctgaggtcaagttcaactggtacgtggacggcgtggaggtgcataatgccaagacaaagccgcgggaggagcagtacaacagcacgtaccgtgtggtcagcgtcctcaccgtcctgcaccaggactggctgaatggcaaggagtacaagtgcaaggtctccaacaaagccctcccagtccccatcgagaaaaccatctccaaagccaaagggcagccccgagaaccacaggtgtacaccctgcccccatcccgggaggagatgaccaagaaccaggtcagcctgacctgcctggtcaaaggcttctatcccagcgacatcgccgtggagtgggagagcaatgggcagccggagaacaactacaagaccacgcctcccgtgctggactccgacggccccttcttcctctacagcaagctcaccgtggacaagagcaggtggcagcaggggaacgtcttctcatgctccgtgatgcatgaggctctgcacaaccactacacgcagaagagcctctccctgtctccgggtaaa

SEQ ID NO: 16 - DNA, 1470 bp, Homo sapiens
atggcgcccgtcgccgtctgggccgcgctggccgtcggactggagctctgggctgcggcgcacgccttgcccgcccaggtggcatttacaccctacgccccggagcccgggagcacatgccggctcagagaatactatgaccagacagctcagatgtgctgcagcaaatgctcgccgggccaacatgcaaaagtcttctgtaccaagacctcggacaccgtgtgtgactcctgtgaggacagcacatacacccagctctggaactgggttcccgagtgcttgagctgtggctcccgctgtagctctgaccaggtggaaactcaagcctgcactcgggaacagaaccgcatctgcacctgcaggcccggctggtactgcgcgctgagcaagcaggaggggtgccggctgtgcgcgccgctgcgcaagtgccgcccgggcttcggcgtggccagaccaggaactgaaacatcagacgtggtgtgcaagccctgtgccccggggacgttctccaacacgacttcatccacggatatttgcaggccccaccagatctgtaacgtggtggccatccctgggaatgcaagcatggatgcagtctgcacgtccacgtcccccacccggagtatggccccaggggcagtacacttaccccagccagtgtccacacgatcccaacacacgcagccaactccagaacccagcactgctccaagcacctccttcctgctcccaatgggccccagccccccagctgaagggagcactggcgacgagcccaaatcttgtgacaaaactcacacatgcccaccgtgcccagcacctgaactcctggggggaccgtcagtcttcctcttccccccaaaacccaaggacaccctcatgatctcccggacccctgaggtcacatgcgtggtggtggacgtgagccacgaagaccctgaggtcaagttcaactggtacgtggacggcgtggaggtgcataatgccaagacaaagccgcgggaggagcagtacaacagcacgtaccgtgtggtcagcgtcctcaccgtcctgcaccaggactggctgaatggcaaggagtacaagtgcaaggtctccaacaaagccctcccagcccccatcgagaaaaccatctccaaagccaaagggcagccccgagaaccacaggtgtacaccctgcccccatcccgggaggagatgaccaagaaccaggtcagcctgacctgcctggtcaaaggcttctatcccagcgacatcgccgtggagtgggagagcaatgggcagccggagaacaactacaagaccacgcctcccgtgctggactccgacggctccttcttcctctatagcaagctcaccgtggacaagagcaggtggcagcaggggaacgtcttctcatgctccgtgatgcatgaggctctgcacaaccactacacgcagaagagcctctccctgtctccgggtaaatga

SEQ ID NO: 17 - DNA, 396 bp, Homo sapiens
atggatgaggctgactattactgtcaggcgtgggacagcagcttcgtattcggcggagggaccaaggtcaccgtcctaggtcagcccaaggctgccccctcggtcactctgttcccgccctcctctgaggagcttcaagccaacaaggccacactggtgtgtctcataagtgacttctacccgggagccgtgacagtggcctggaaggcagatagcagccccgtcaaggcgggagtggagaccaccacaccctccaaacaaagcaacaacaagtacgcggccagcagctatctgagcctgacgcctgagcagtggaagtcccacagaagctacagctgccaggtcacgcatgaagggagcaccgtggagaagacagtggcccctacagaatgttca

SEQ ID NO: 18 - DNA, 1312 bp, Homo sapiens
caggtgcagctggtgcaatctggggctgaggtgaagaagcctggggcctcagtgaaggtttcctgcaaggcatctggatacaccttcaccagctactatatgcactgggtgcgacaggcccctggacaagggcttgagtggatgggaataatcaaccctagtggtggtagcacaagctacgcacagaagttccagggcagagtcaccatgaccagggacacgtccacgagcacagtctacatggagctgagcagcctgagatctgaggacacggccgtgtattactgtgcgagagacgagaactgggggttcgacccctggggccagggaaccctggtcaccgtctcctcagcctccaccaagggcccatcggtcttccccctggcaccctcctccaagagcacctctgggggcacagcggccctgggctgcctggtcaaggactacttccccgaaccggtgacggtgtcgtggaactcaggcgccctgaccagcggcgtgcacaccttcccggctgtcctacagtcctcaggactctactccctcagcagcgtggtgaccgtgccctccagcagcttgggcacccagacctacatctgcaacgtgaatcacaagcccagcaacaccaaggtggacaagaaagttgagcccaaatcttgtgacaaaactcacacatgcccaccgtgcccacacctgaactcctggggggaccgtcagtcttcctcttccccccaaaacccaaggacaccctcatgatctcccggacccctgaggtcacatgcgtggtggtggacgtgagccacgaagaccctgaggtcaagttcaactggtacgtggacggcgtggaggtgcataatgccaagacaaagccgcgggaggagcagtacaacagcacgtaccgtgtggtcagcgtcctcaccgtcctgcaccaggactggctgaatggcaaggagtacaagtgcaaggtctccaacaaagccctcccagcccccatcgagaaaaccatctccaaagccaaagggcagccccgagaaccacaggtgtacaccctgcccccatcccgggaggagatgaccaagaaccaggtcagcctgacctgcctggtcaaaggcttctatcccagcgacatcgccgtggagtgggagagcaatgggcagccggagaacaactacaagaccacgcctcccgtgctggactccgacggctccttcttcctctatagcaagctcaccgtggacaagagcaggtggcagcaggggaacgtcttctcatgctccgtgatgcatgaggctctgcacaaccactacacgca

SEQ ID NO: 19 - DNA, 579 bp, Cricetulus griseus
atgggcatagtgcttttagagccaacatgtaacagatggatgcaactccaagctgattgcttcttcatgccaacactcttttgactgtataggatctttgtctcttcatctttgatctggattgctggcaaataaaaggagttcatgtagtgttttgtttaagcttgagtcaccatgagtagtagtttaagcaaagaaaaagactctaaagagaaagatcccaaagggccatctgccaaggagagasaaaaagaggcaaaagcctccgrtaggttttgggaaagaaagcaaagaaaaagaccctaaacccaaagggaaagatgccaaagatggaaagaaggattccagtgctgcccaaccargggtggctttttcagttgacaatacgatcaaacggccaaacccagcacctgggactagaaaaaaktctagcaatgcggaggtgatgaaagagcttaacagatgccgggaggagaactcagcacgcttggacttatccaagakgtccatccatgcgctgccgccatcagtcaaagakctgactcaactcacakagctttacttatacagcaacaaact

SEQ ID NO: 20 - DNA, 578 bp, Cricetulus griseus
ttatagttcatcattcttyraaaaccgcttctgtcctgctgtctgctctttcggttcaaattctgctccargacctcctaattccaaargctcaaartctgwtggttccgtagtagtctcttctttgtcargktctaaaatgggctttgcctcttcargctgacctgcaggtggaatgaccttctcctcttggtcaccascagtagcattgaggggaggttctgtccgggtgccattcttgtccttgggtcgtggccggggcttggtaaacttggccttattgagcaratactgtacctcacggtccarggccatcatcttggcctcaatgtcttttgaaagcagcacargcttctctgtggcaggaagcttatcctgctcagccagagttgcattcttccatgcccaggtgtcattgatgactttctctaacgttgtcatctccacctcakygaagatctggtccatctctgggatgagccgggcacccttgaggaaaatgctggagtggttgaggagattatccagagctgaaagccgttcaggccattttctgcgctcttccacccgaaaaaaca

SEQ ID NO: 21 - DNA, 520 bp, Cricetulus griseus
tatggttggctatgcacaagaaactcagcatgagaagattctgcgcggtctarcagttggcatcgcattagtaatgtacgggaggatggaagaggctgatgctctcattgaatctctctgtcgtgataaggacccaattcttcgaagatctggaatgtatactgtakccatggcttattgtggctctggtaacaacaaagctatccgacgcctgctacatgttgctgtaagtgatgttaatgatgatgtcaggagagcagcagtagaatcacttggcttcattttattcakgacccctgaacagtgtccaagtgttgtttctttgttgtcagagagttacaaccctcatgttckatatggggctgcaatggccctggggatctgctgtgctggtacaggaaacaaggaagcaattaatttactagagccaatgacaaatgaccctgtgaactacgtgaggcaaggggccctgatagcctcagctctcatcatgatccakcagaccgaaatcacttgtcca

SEQ ID NO: 22 - DNA, 581 bp, Cricetulus griseus
ctaagagagcatctgacttttctattgccaggaaaacagaattagacctaagcctcccagggagatgaaagactatgggacatggcactcatctgtgtctctttcggtcaccattgggaatagcttgagctctgttcacttgtcccssatkkccttcggcttaaggaggtagtgactataagaaagtcatctgtaattaaaaatacaaataaccatgtatctgcatacttcttagaacatctcctagcattaacattcactttaaccgcaaaagctttctaagcctggctttattccctctgtaagtccaaatgaagccttccttgtgtacttgaaaacagttttaaatactacagcrtaaagccactgyttaaactttgctttcactcawataatccaatactgcctcatccatcagtacagataggcaaaaaacaggcgagattkcccaaggagcttatttgtattgkttgtaacgtttggtgaactccctagagatttgcaagctttataccatttgttcccttggcawagttttttccagctccttagatatgagcaggttcagcaatctactgcct

SEQ ID NO: 23 - DNA, 828 bp, Cricetulus griseus
  misc_feature (122)..(136): n is a, c, g, or t
tssgkraaagaacccgagctaacatggggttagctcgtaaaactacaataaagcctcatgcagtttgcatmaagctttcgcctccattctgtgtttggggkggccgccgtcctgggctaagnnnnnnnnnnnnnnngctttctgagggtctaacattttgggggctcgtcctggatttgcgaccacccctcacctgagtggagtcgatcttggaggtaagtgggtaccctgtattgtctgtgtctttgtgtttttgtgccggctgaaatctggttctgtgctttgcagtcgctcgtgtctcgggaagagacaagakctctggtctcgggaggagacagaatgtgatcagtagacgtgcttgggagatcaccgactgccaccctggaagacgttccakgaagtctgtgggaacctcakggacgcttgggagattcccgtctgggagccggtgagggyacrgtagtyctcctggattggggaagttatccgtcctcycggccgtstgtatttctggaatggttttgtctgtctargtggagacagacatctgatagtttttgtctgtgtcttgggtgttgttttgtcttatctgtgactttgatgatgggactgactgtaaccaacccccctcagtctgacttttgaccattggatggacgttaargaccatagttagtcagttaaagttacagcaccctctttcgttgagtcatgtggcgccacactaggtaactttatcttccagtctttgtttctgtatggyttctgtacaagaattgtttarggcagaggttcggatgacagcttctgcagtctgtatgagcggga

SEQ ID NO: 24 - DNA, 580 bp, Cricetulus griseus
aaatgtcctagtgagccaggcatagtggcacatgcctgtaaccccagcactcaggaagaggaagcaggaggattgcaagttcgaatccagccgggctacatagtgagaccctgactcaaaaacaaaaaacgagaaagtcctacttttgaggaacttgaaaaagccttgagtacagcccaaaaaactgaagaagcacagagaaggatgaaggcagagatggacgaacagataaaggctgttgagagagcaagcgaggaggagcgtctccgtcttcagcaggaactgagtcgggtgagacaggaggccgtcaacatgatgaaaaagacctcagaagaacaacttgctgaacttcagaggctgcatgcagaggagctggccagcagagagcaggaactggccagaaagctccagacccgagagagggagctgcatgagcagatgaaaatagctcttgaaaaaagtcaatcagaatatttgaagctcatccaagataaagagcagcaagattccttggctctagaagagttagagctgcagayaaaagcaatcctttcagagagtgaaaataaactccaggaac

SEQ ID NO: 25 - DNA, 552 bp, Cricetulus griseus
catggcggcggtggagacgcgggtgtgcgagacggagggctgcagcagcgaggccaagctccagtgccccacctgcatcaagctgggcatccagggctcgtacttctgctcgcaggaatgctttaaaggaagctgggctactcacaagttactgcataagaaagcaaaagatgaaaaggcaaaacgagaagtatgttcctggactgtagaaggtgatgtgaacactgacccgtgggcagggtaccggtacacgggtaaactgagaccacactatccactgatgcccacacggccagtgcccakttacattcagaggccagactacgctgaccaccccctatgaatgtctgaatcggaacaggctcttaaaggtacttcccaaattaaactactctcaactgaagatatagaarggatgcgacttgtgtgtaggcttgctaragaagtcttggatattgctgctgggatgattaaagcaggtgtaactactgaagaaattgatcacgctgtacacttagcatgcattgcaagaaattgctatccttctgccct

SEQ ID NO: 26 - DNA, 584 bp, Cricetulus griseus
  misc_feature (193)..(243): n is a, c, g, or t
  misc_feature (503)..(523): n is a, c, g, or t
awgccttgaaagagttacttgtatttgktacatctaatgcttccctatctggttattacaggtcttcaaatacatgccaacgtaggcaagacattgtaatcgaactcctgagttgcccatcatgggcttcgacaatcacactcttgaykgawcctgtttttcctctgcatttcccaactcttgttttattttnnnnnnnnnnnnnnnnnnnnnnnnnnnnnnnnnnnnnnnnnnnnnnnnnnnatgcatttagtcccagcccctgtgaggcagagacaggcaaatctctgtgagtttgagatcagtctcatctacatagtgagttctagggcagccaaggctacaaattgagaccctgtctttaatcatcatcatcatcatcttattcataaatatttcagtattcactctaaaatgtaaagactcattttaaagtatgacaaggtccacatttccctgcctccatcatgatgttcagattttcaattgattcttttttttcnnnnnnnnnnnnnnnnnnnnnaaaacaaaacctttttggggggttttggaacctttgtgtccaaaaggcggggattaaaggc

SEQ ID NO: 27 - DNA, 669 bp, Cricetulus griseus
gctcttggacagaagtggccaagggaaagtgtatcctctgatcaaccgaagacggttccagcaaatggatgttctcgagggcttaaatgtcctggtgacaatatctgagaaaaaaggataagttacgtgtctactatttatcctggttaagaaataaaattctacatmatgatccasaagttgagaagaagcaagggtggaccactgtgggcgatttggaargatgtgtacactataaagytgtaaaatatgaaagaataaaatttctggtaattgctttgaagagttctgtggaagtctatgcgtgggcaccgaakccatatcacaaatttatggcctttaagtcctttggagaactggtacataagccattactggtggatctcactgwtgaggaaggccakargttgaaagtgatctatkgatcctgtgctggatwccatgctgttgatgtggattcaggctcagtctatgacatttatctaccaacacacattcagtgtagcatcaaaccccatgcaatcattattctccccaacacggatggaatggagcttctggtgtgctatgaagatgagggggtttatgttaacacctctggaaggatcaccaaggatgtggttctgcactggggagagatgccgacatctgtagcatatatccgatcga

SEQ ID NO: 28 - DNA, 580 bp, Cricetulus griseus
ctgcgtacggaawgataaakggcwagawttcaaraarctggggactgggcggcgggggggtcttctcacctgccaccgtgtcttggctgtctsctgtgggcccccastagatgctctcactcctgcggaagttccggtgcaatcgcgtgcagagcgtggccagggtgagcaagaccagcaggaaggtcaaggccatggcagcccaagcggcctcttctgtgcgtggagttgggcctcgggccacccggggaggcgctgctgctcgaggagctggggaagcctggcccakgcaggcacaaccctctggattgtcttgcccactgggcatctgakcctctgtcctggacctatcattgcctccaggtcccccagtcatcaaggagtcaggggccacagatgawgttcccaaaatgggctgctgggccttckggctctgtgaagaggccawrgaaaccctcakgcctgagggagtakactggagaccaakggcakctykgakccctyttctyctgacaacactgagagagcctctatatgycayctctacaccatgwrgccgccagcttcscasagcawakgt

SEQ ID NO: 29 - DNA, 584 bp, Cricetulus griseus
  misc_feature (416)..(467): n is a, c, g, or t
cgtttcctgcgctgcgttctgtgtgtctcctcgttttcctcgccgtcctccggttcccgaggccgccgcgcgtctcctcgcgaagcatggcgacgaaggccgtgtgcgtgctgaagggcgacggcccggtgcagggcaccatccacttcgagcagaagggaagtggtgaaccagttgtggtctcaggacagataacaggactgactgaaggccagcatgggttccatgtgcatcagtttggggataatacacaaggctgtaccagtgcaggtcctcattttaatcctcactccaagaaacatggcggaccctcggatcaagagaggcatgttggagacctgggcaatgtgactgccgggaaggatggtgtggccaatgtgtccattgaagatcatgtgatctcactctcgggagannnnnnnnnnnnnnnnnnnnnnnnnnnnnnnnnnnnnnnnnnnnnnnnnnnnggcaaaggcggaaatgatgaaagtacaaagactggaaatgctggaagccgcttggcttgtggtgtgatcgggattgcccagtaaacattccctgtgtgactgagtctcaaactcatc

SEQ ID NO: 30 - DNA, 651 bp, Cricetulus griseus
  misc_feature (28)..(43): n is a, c, g, or t
gaggatgaatggtgcctgaggaacaatnnnnnnnnnnnnnnnntggccttcttagacgtgtgcattgaatataactcatgcacttgcacatacagatagttttgaagtcttgcaatgaccgtgttaagagttcagcagtcttctgtatagggatttagatttataaaacttgctgtatttgttaccacttttgatctgtatgacagtcctgaaaatagatgatagccatctgctcatactctcctgtggttgtaaaaaggctgtttaatttgttgtctcctctcagagaactgaggtttttatagcttagccttttagggggacaatcctaaaagactgtactaaagaattcataaaagtgtgtgtattggggaagataacagtgaaaagaataagatagtggtttacatgaaactagaaagtcttttggggttttagagtaatcctgcaacactagcaacttcactgwggktatgaacacttaaaactagcggcaggcatacaactgcaagaagccattcrattgtcaagatttttatactactactgctgkatatttatactatataccasctatatagtgccccaaatattttctgccattcggacgttagaatcacaatttctaatgcctttattttggatcatgaa

SEQ ID NO: 31 - DNA, 578 bp, Cricetulus griseus
gagcttggctatcagaacttcctctatcccagtgagcctgacctccgagacctgcttctcttcctggctgagcggctacccaccgatgcctctgaggatgcagaccagcctgcaggtgactcggctattttccttcgggccattgggagccaaatccgggaccagctggccgtgccctgggtcccacctctccttcgaactcccaagctgcagtacctccagggctcagccctccagcagtcattccactccaccaggtwggttctgccagaactcagttycaaaggagagccatgggagttccaggcaagtcccctgctgctaccagcccctacacakgtgccccakcttgtgcggagagcagcctcactcctcgaacatcatgccatccagctctgccagcatgtgagcakggattgcccgggagatgaasaccgggtgtgcygggcacaccgtctcccatsccaggargattcccgggctgcacagyaacgactgcacaagcatytggctgaacatcttcgtcaaagctggggcccacttggagcctckacgcaagtccsagasctacgagakaw

SEQ ID NO: 32 - DNA, 579 bp, Cricetulus griseus
  misc_feature (176)..(220): n is a, c, g, or t
atcaaacccggggcttcatgcccagggattataggtgttagttaccatacctgacttttaaatggctttacacacacagtctaccacctgctgcatccctagccctggtcatgtctcttagtctctcattttattgtgagattcatsacaataacacccacccctcttttcccttnnnnnnnnnnnnnnnnnnnnnnnnnnnnnnnnnnnnnnnnnnnnntttagaacattgctttcacctttactcattattatactcatcatttatagtaatgttttargtcagccttaggtaccattaataagtttctcacagatctgaggcttgctgattaattaggctakyctggctggcctgtgagaactggggatttgtatttctctgtctcctcttggatgaattataagtgtttaccatttcgtctggttttttacatgatgctggggattgaaatcaggtcctcaaattccacagcagtcgctttgctgtgtgtaggcagaggttctttcctgcctggtgccacaactgccttgccccaaataaatgcacggatgctatattataaaattgttggccaa

SEQ ID NO: 33 - DNA, 539 bp, Cricetulus griseus
  misc_feature (303)..(319): n is a, c, g, or t
tactctagattaaccatcccagtccttctgtcagcctccgatgccatcatgcagcctgattaggagcaaaggaaagggggaaaggagaagcaactaatcgtcttttcccgatcgtcaggaccctaaagaatggccgagccttgggggaacgagttggcgtccgcagctgccaggggggacctagagcaacttactagtttgttgcaaaataatgtaaacgtcaacgctcaaaatggatttgggagaactgcgctgcaggttatgaaacttggaaatccagagattgccaggagacttctactnnnnnnnnnnnnnnnnnatttgaaagaccgaactggtttcgctgtcattcatgatgcagccagagcaggtttcctggacacggtacargctttgctggaktttcaagctgatgttaacatcgaagataatgaagggaacctgcccttgcacttggctgccaaagaargccacctccctgtggwggagttccttgtgaagcacacaaccagcaatgttggggcatcggaatcataagg

SEQ ID NO: 34 - DNA, 948 bp, Cricetulus griseus
gggactgtcttaaatatctccaaacatggttcttgcagtactgtgcgtattggtcacactggaatggagactcagcacattgttgaaaacatcctggctgtctcaaaagtgctttcataaaaattgccagagaaatggccaagtgtgaaactcttgttcctgaaaactgagaagtctgtttcccttcccatcttttcctcatttgtcacatgtcaggatgaaaacaccttatccttccgtagcatgaaaagaaaggaactaaagaaaaaaatgaagcatgaaaaagaaaagttgaaaaagaaaagcaaagtgttaaggaaaatgtccaagaaggatgacttagcaagtgaaaccagcagtactccakggacggccacaagatcccaggaggaaaagcccagcaaagtaaaagcacaacctgaaagaacagacgagtgtgaagaaacaattccacaactggtaccaatagaagaaataccaaataaagaaaacatgaagatgcaagaaaatggcacagggaaaaaacctccaaaaaagagacctgatccagatacccttaagggcaagawaaggaakgccctgccagctacagagatcccaggagctttggggcctgtcacctcggggaagaaacaaaaaaaagatgttcgggaaatcagaaagccaggagccaagttctttactcccaggaaagcttccaacacacccaaagacaaaaaaccccaagtggcccactcaaactaaaatcaggttcctctgcctgaaggaactatcaagaatacataggcagggtgtggttgcacacactgtgggacatagataggcagatttgtatgggtttgagtccagcctggttgcctacctggtagtttaggccagccagactagtgagacagacaaacttggccaagattggttgtgcacacctacattcctaacactcaagaa

SEQ ID NO: 35 - DNA, 599 bp, Cricetulus griseus
ccattttggtggccgggcgcggaggtgattctacactgagggggaacgcggcggcaagggtggcagtggcagcgttcgtgtgctcgggtccgaatcactgagggaggaggcggtggaggaagaggtggcggcggtggcggtggtcgtagcggtggcggaggaggcgggtacgaatcakctgcgggcagagacatggccaacatcgcggtgcagcgaatcaagcgggagttcaaggaggtgctgaagagcgaggagacgagcaaaaatcaaattaaagtagatcttgtagatgagaattttacagaattaagaggagaaatagcaggacctccagacacaccatatgaaggtggacgctatcaactagagataaaaataccagaaacatatccatttaatccccctaaggtccggtttatcactaaaatatggcatcctaatattagttccgtyacaggcgctatttgtttggatatcctgaaagatcaatgggcagcagcaatgactctgcgcacggtattattgtcattgcaagcactgttggcagctgcagaaccagatgacccccaagatgcagtagtagcaaatcagtacaaaca

SEQ ID NO: 36 - DNA, 608 bp, Cricetulus griseus
caagcagataattaaggggagagatgtcattgcacagtctcagtctggcacaggcaagacggccaccttcagcatttcagtcctccagtgcttggatatccaggttcgagaaacccaagctttgatcttggctccaacaagagagttagctgtacagattcagaagggtctgcttgctctgggggactacatgaatgtccagtgccatgcctgcatcgggggcaccaatgttggagaggacattcggaagctggactatgggcagcatgttgtggcaggcacacyagggcgtgtctttgatatgattcgccgtagaagtttaaggacccgggctatcaagatgttggttttggatgaggctgatgaaatgttgaacaaaggtttcaaggagcagatctacgatgtgtacaggtacctgccacctgccacccaggtggttctcatcagtgccacattgcctcatgagatcctggagatgaccaacaaattcatgactgaccccatccgcatcttggtgaagcgtgatgagttgactctggaaggcatcaagcagttctttgtggcagtggagagagaggagtggaagtttgacactctgtgtgatctct

SEQ ID NO: 37 - DNA, 580 bp, Cricetulus griseus
  misc_feature (473)..(489): n is a, c, g, or t
ctttcatggwgtgtgtatgttttgcagtgaggaattccgtggaaacagatccgktctgtygaaccacatggccatgagaacatgctttcaatattggtttgccagacaacattgtraactgcrctgaattcctatgcacattacagaagaaactggacaatwtacagkgtttgwrctgkgagaagaccttcagagacaaaaacacacttaaagatcacatgaggaaaaaacagcatcgtaggatcaacccaaagaacagagactatgaccgattttatgtcatcaattacttggaactcgggaaatcatgggaagaggtgcaattggaagatgatcgcgagttgctgggccttccagaagatgactggtctgactggcaagaataccctgtctgtgctgtctgtctgttttgtgaaaagcaagaagaaacaatagataaattgtatgtgcacatgaaggacacacatgagttnnnnnnnnnnnnnnnnnagtcagagctcaggttaaatttctatcagcaagtgaagctggtcaattttattcggagacaagttcaccagtgcaggtgctacggttgcca

SEQ ID NO: 38 - DNA, 579 bp, Cricetulus griseus
  misc_feature (216)..(248): n is a, c, g, or t
tatgatgacattccagtcgaagcaacaggcaacaactgkcctccacatattgaaagtttcagtgatgttgaaatgggagaaattattatgggaaacattgagcttactcgttatactcsccaacttcagtacaaaagcatgctattcctatgtatcaaagataaaatagacttgatggcttgtgcccaaacaggctctggaaaaactgcagaattnnnnnnnnnnnnnnnnnnnnnnnnnnnnnnnnntggtccgggagaggctctgagggccatgaaggaaaatggaagatatgggcgtcgcaaacaatacccaatctccttggtactggcaccaacgagagaattggcagtgcagatttatgaggaagcaagaaaattctcataccgatctagagttcgtccttgtgtggtttatggcggtgctgaaattggtcaacagattcgagacttataacgtggrtgccacttgttagttgctactccgggacgcctartggatatgatggagawgggaaagattgsattagacttytgcaaatacttggtgttagatgaagctgaccggatgtkagatttg

SEQ ID NO: 39 - DNA, 664 bp, Cricetulus griseus
ggaagagatgaacatgcccacacagatggtgcagggcggtgcctttgacggcaccacagaagggcccttcaaccagggctatggggagggggccaaggagggtgctgatgaggaagagtgggtcgtggctaaagataagcctgtgtrcgatgaactcttttatacgctatcacccatcaatggcaagatatcaggtgtcaatgccaagaaggaaatggtgacctccaagctgcccaacagtgtcctgggcaagatctggaagctggccgactgtgactgcgacggcatgctggatgaggaggagtttgccctggccaagcacctcatcaagatcaagttggatggctacgagctaccgaacagcctgcccccacaccttgtgcccccctctcacaggaagtccctgccaaaggctgactgawgagggcgcaccgctggggtgggaaaggakggggtccctgggcctgaagtatgctatgccactgacttgctgaatgtccttagccaaggytctgtcctctccatatctcagttccctcatacgtagggtagggaakggcagatactggactctagatgaggtcctcttacctctaaaatccctaagtttctatcaaaatatttctatctaaatattgagaagagcactatatatggagattaa

SEQ ID NO: 40 - DNA, 581 bp, Cricetulus griseus
  misc_feature (445)..(462): n is a, c, g, or t
ggccaggmrccggtgggactgctggggcgccgagcgttgaasacttcaagaaatcacaatgtcgaccgacacagacctttctctttcttcatatgatgaaggycaggggtctaagtttattrcgaaaaactaaggaracaccatttgtccccattggcatggcagggttwgcggcaatcgttgcgtacgggctatacaaactgaamaacaggggaaatacgaagatgtccattcacctgatccatatrcgtgtggccgcccakggctttgtggtcggagccctgactcttggtatgggctattccatgtataargaattctgggccaagcctawgccttakaagacgabctgctgccttgrtctgggaagwgctwgcttagytagacgtctcatattgaggtyacatgtttgtgtctacaataaataacatggatttagacaacnnnnnnnnnnnnnnnnnncgsccsccmcacgggggggrcctccayttttstgtcccttttakggrgggtwtattgccccctgkgggmaatcrgggmmatagskgytcsskggagaattgttgcccctgtctccggtt

SEQ ID NO: 41 - DNA, 618 bp, Cricetulus griseus
cagcgctcgccgctgcagctgccactgcgaccatggtctccggcagcagcggcctcgtagccgcccgcctgctgtcgcgcaccttcctcctgcagcataatgggatacggcatgcatcttatgacgcttcccggaaacatatctacattgatraaaataccaaggttatttgccakggtttcactggcaagcagggcacctttcacagccagcaggccttggaatatggcacaaaactcgtgggaggaacctcgccagggaagggcggcaagacacacctgggcttgcctgtttttaatactgygaaggaagccaaagagaagacaggagcgacagcttctgtcatttatgtacctcctccttttgctgctgccgccatcactgaagcagttgacgcadagattcccttggttgtgtgcattactgaaggtatcccacagcargatatggttcgggtcaggcacacactttcacaccaargaaakacgaggctaattgggccaaactgccctggaatcatcaatcctggagaatgtaaaattggcatcatgcctggccatattcacaagaaaggaaaaataggtattgtgtccagatctggcacgttgacttatgaag

SEQ ID NO: 42 - DNA, 362 bp, Cricetulus griseus
  misc_feature (69)..(91): n is a, c, g, or t
gggggtacgtagggtgctggcacaggacctatgttgatggggaagttgttgaacacgggccgcacaggnnnnnnnnnnnnnnnnnnnnnnncaaaggcatagggtggcatgtgggggtgcaggttctgtgggacaggccgtgggagagcttccacacgctgtactttctcggctggcttctccaatggggggccgatgcgtttgaatgtgttctctgaaacaacatgggattcagtggaaacaaacacacagaactaactccaatacacttctgcctgtgactagatcactgcatgctactatgactgtcatggaatgcaatcctataaggacagcccaacacacgatggttacttctgacc

SEQ ID NO: 43 - DNA, 214 bp, Cricetulus griseus
  misc_feature (30)..(30): n is a, c, g, or t
  misc_feature (205)..(205): n is a, c, g, or t
tcgacccacgccgtccgctgctgacctggnaatatcaacaatgtcatcagaatccagcaaaaaacggaaacccaaagtgatccgaagtgatggaaccccaagcgaagggaaacgaaatcgatctgacactgagcaggaaggcaaatactacagtgaggaggctgaggttgacctgcgggaccctggcagagactatgaattgtgncaagtatac

SEQ ID NO: 44 - DNA, 567 bp, Cricetulus griseus
atttgaaaatgccgacctttgaatcagaggaaaccaaagactcggaggctcctacagcacctcagaatagccagctaacgtggaagcaaggcagacagctgttgagacagtatcttcaggaagtaggatacacagatacaatactagatgtacgatctcaacgggtaaggtcattacttggactgtctaattcagaaccaaatggatccatagaagcaaagaatttagaacagatcctgaatggtggtgaatctcctaaacaaaaaggacaagaaatcaaaaggccctctggtgatgttcttgagacattcaatttcttagaaaatgctgatgacagcgatgaagaagaaaatgacatgattgagggcatcccagaaggaaaagacaagcttcggatcaataagcacaaaataggtaatgaaggtttagctgctgacttaactgatgatcctgatactgaggaagcactaaaagaattcgactttttagtgactgcagaagatggcgaaggagccggtgaagcacggagttcatgggatggtacagaatgggctgaaccaataacgt

SEQ ID NO: 45 - DNA, 576 bp, Cricetulus griseus
  misc_feature (5)..(25): n is a, c, g, or t
ctctnnnnnnnnnnnnnnnnnnnnngtttgtcctatcccagtgtggtttctttcctttgttttatcttactttattttattattatctttagaagtctgtctgttttctaatgagatgggtgggaaggaccaggagaagtgggagtagtagaagggaaaccttaatcaggatatattgtatgaaaaaaatgcattttcaattcaataacaaaaaagtacagcgaaagaggagtttagaaaaatgcactctacagcctaaatgccttgctttgtaaacaagttgattttggaacataattgtgtccacttgctttaagtgttttatgttgtctgtttctcacctcagtagtagaaggaggtggttatgaaagacaagctataatctacaacataaaataccacctgcattttgagaagtggttacacacgactctcttaaaacgttcatgcctacacttaggtgtgtcttatcctttccctggacacttctcccatggtgcttaaatctatgtaaaatttattccttataaagtctaactctgcttgtgataggaagaggggggatgtttggcatga

SEQ ID NO: 46 - DNA, 578 bp, Cricetulus griseus
  misc_feature (308)..(340): n is a, c, g, or t
cttaaaggacagacggggctgccttaaaattagcggcagctgtaggctgctcctggccatgtgagtcagtgcacaccgactaagcgaaggcaccattctatttctggctgcacaggctttgcttgccgtcttttgaagatttctaccgtggtgttcaccttcctttgctgattcttctctaggcacctacagtccttgctgcggaagaagtgagcattgtagaacactagggcagaccagcaggggctggcgctgatggcgggaacgacttccgtaaggtctaaggagtggtgtgaattgtattcagnnnnnnnnnnnnnnnnnnnnnnnnnnnnnnnnnagagctcccctcccagctttctggacagcttgtcccaaggccagggaatgctgttggccttctttcttttctgtcttctgactgacagcacatttcccattcccacagacagtttcttattgctgagatgggcaggaggagggcttcagccatgttctcggctgtccatcggttttagcatctcagttttgaaggcaagggatattgaggtgatcagctgggatgggtatggcaaaag

SEQ ID NO: 47 - DNA, 554 bp, Cricetulus griseus
  misc_feature (191)..(191): n is a, c, g, or t
  misc_feature (439)..(456): n is a, c, g, or t
  misc_feature (519)..(538): n is a, c, g, or t
  misc_feature (541)..(553): n is a, c, g, or t
taaacaaatcaaatcaaattcaagctgggggttcagtttttaagactcaagtgtggagaatgagactaagccaagctctaggtttcttgtaggggtgctatccaggtagggcaagcctaatgattgtcatttggcttgagatagttttcagttgtgtgggtttgtttggtttttgttgttgttcattttanttttactaaataataatatctcagaactttccaagtttctttatggtggtttcttttatcaaatgacttgcaaactacacatgcataagccgaaggatagagattcgaagatgtgctctccgggaagtgtttagatacatctaggataaggggggcgggattatgagctgtgggaaagagtaggcttaaaggttagtgtgacccctttatgtgtgtcagtaaagaagtcagtctgccaccaatggagnnnnnnnnnnnnnnnnnnggtttttttttggtttttcgagacagggtctctctgtttggagcctatcctggcacttgctcnnnnnnnnnnnnnnnnnnnngannnnnnnnnnnnnt

SEQ ID NO: 48 - DNA, 875 bp, Cricetulus griseus
taagtgtttagaatctccagtggggaagaggaaaagaagcatgactgttagtccttctcaggacccatctttctcaggattaaaccagttattccttattgattttggtttggccaaaaagtacagagacaacaggacaaggcaacacataccatacagagaagataaaaacctcactggcactgcccggtatgctagcatcaatgcacatcttggtattgagcagagtcgccgagacgacatggaatctttaggatatgttttgatgtattttaatagaaccagtctgccatggcaagggctaaaggctgcaacaaagaaacaaaaatatgaaaagattagtgaaaagaagatgtccactcctgttgaagttttgtgtaaggggtttcctgcagaatttgccatgtacttaaattactgtcgtgggctgcgctttgaggaagctccggattacatgtatctgaggcagctattccgcatccttttcaggaccctgaaccaccaatatgactacacattttgattggacaatgttaaagcagawagcggcacagcaggcagcctcttccagtgggcagggtcagcaggcccaaacccccacaggcaagcaaactgacaaaaccaagagtaacatgaaaggtttctaggcatgaattgaggaagagaagcagcagagcagatgattggagcagcatttgtttctcccaaaactagacattttagttcatatgtacactatccagtggttgtggacaaccatttacttggagtaaagaacttactttaagtataaactggccccggacagcattgctgatgctgatcctgcgctatagccgctgaaattgtgaatattaactgatgtagcgaaacat

SEQ ID NO: 49 - DNA, 579 bp, Cricetulus griseus
gaccgaattggcatttccaagtcagagttagttgcaatgttggaggaagaagagctgagaaaggccattttagtggtgtttgcaaataagcaggacatggagcaggccatgacaccctcagaaatggcaaatgcacttgggttacctgctctgaaggaccgaaagtggcaaatatttaaaacatcagcaaccaaaggcactggtcttgatgaagccatggaatggttagttgaaacgctgaaaagcagacagtaagcccattcacatcaggtcctgtgaagcaaatgctacgccacacactcactgcaaccagccagatgtgcttctgtgactgttagaactgtgtgattgctggcatgtacagaactgactccaatgtttgtaataaatataaaaaacaagtatttggtgagagggttagcttgattgaattacccaaatggtttatgtaatgtaaaatattcttccttgctttcttgtgttaaggcatatgttctatttgtatggaattcttactcaaatacaattctattaaagaatgtacacttttggggggaaccctcctatttttaaattagt

SEQ ID NO: 50 - DNA, 566 bp, Cricetulus griseus
atagaggtagggaggaggtttcaaaaaaccaggcccttamrcttcrgcyagwymrccagtatgctgtgcttgaaaatcagaagtacagscacwcacagtacagttaaacaatggtctttgctaagccttccaagataattagaccacagctraccwccwagaacagycattcagsgtsttgrttsctggatcaacagtgctgactgatgakaggaakacttcraktccagwaactgtccctgttgcactatggaagttcaagagkcacaactgrtckctatatgtgtyggatttamgggtgwkttcattgycttaaakacttgwkaattasattcaryaktgttyccatasttgctctgcatataaaaycaaacctgsagmcagtggkcatttcaaacatctttatgttcagatactgagccttcgcaagggtgactacctcagatttgctgcacttaattgtggatttcatgtggatcacaacttctgcataagattacagctattagtgtcggcgtgaaccttgaaaccaactcgactggattcctgtcaaagccttcaaaatc

SEQ ID NO: 51 - DNA, 462 bp, Cricetulus griseus
  misc_feature (154)..(170): n is a, c, g, or t
  misc_feature (355)..(372): n is a, c, g, or t
cttgtgtatatatgctgtatctgctatcaccaaggatgctgaagtcaccattgcatttgattatgaatatagtaactgtaattacaaagtggactgtgcatgtcacaagggaaaccggaactgccctatacagaaaagaaatcccaatgctgcnnnnnnnnnnnnnnnnncccctcctagctttcccaccattggagcagagaccagacgtagaaaagcacggcggaaagagctggaaatggagcaacaaaatgaggctccagaagataatcacaacccgcaaccacaagaagtttcagaaaaagtaactgtttccagtgagcgtgaggaagttgacaatccagaagaaaaaccnnnnnnnnnnnnnnnnnnggctacagatgaccaggagaacccagctcatagcaggaggactcgggaagataggaaggttgaagccatcatgcatgcttttgaaaattt

SEQ ID NO: 52 - DNA, 580 bp, Cricetulus griseus
acggtgtgtgttgggtcaggcaggaagcagtgtagatctgggactccaaagtcctcaagagccagaagcaaagttagggagcccagcacccctgtggtcctgggtggccgccaggtaagtggggtagtccctttcctccaagtgckrtgkgtacttcctgtcccaatgactttgcgcttgttcatgtgacttgggtaggccagtggaacataagcagacaagatgagcacagaggcctgaaatacatttattggctcatatactcctttakttcccastgagaaggacacactctgggtcaccattgtcagtccttggatattgactttggactagtctgtgttgcctcttggagatctaagcaaagatgtacataatttggaattcaaaagtggcctattctgaaaacacacagaggggttgttatacatgtggggtagctaaagtcttatggttgccacgcttgtcaagatgataaagacggagaaggagtccgatgatggaatcatgatttacagactagagacacaagaaggaattagagaggtgccagatacagagcataatgaaaggagacaga

SEQ ID NO: 53 - DNA, 738 bp, Cricetulus griseus
  misc_feature (25)..(81): n is a, c, g, or t
  misc_feature (85)..(104): n is a, c, g, or t
attgacccccatcatgtgtggactnnnnnnnnnnnnnnnnnnnnnnnnnnnnnnnnnnnnnnnnnnnnnnnnnnnnnnnnngatnnnnnnnnnnnnnnnnnnnntccctgcrgksrtatyarcamggccaacttgagaagctgcccacaatgaatggctctgaaggtcgscccgagttctatgacttcgacctcatcatcattggtggaggctcaggaggactggcggcagctaaggaggcagcaaamtttgataagaaggtgctggtcttggattttgtcacaccaactcctctcggaactagatggggtctgggaggaacgtgtgtgaacgtggggtgcatacctaaaaagctgatgcaccargcggctttgttaggacaagccttgaaagactctcgaaactatggatggaaagttgaggacacagttaagcmctgactggkagawgatsacasagkctgtgcasaatcacmtcggctcsctgaattggggctaccgagtwgctcttcgggaaamgaaggtctactatsagaactgcctatgggaaattcatyggttctcacamgattamgtgcwaaaratarcmmmkgawmmgcaaaaaatttwttcagcaragcggkttctyatygccmcykgggaaaggscmcgctacctgggcatccctggagacaaagagtactgcatcagcagggatgatctttttctcctgccttactgccccggtaaaaccctagtg

SEQ ID NO: 54 - DNA, 629 bp, Cricetulus griseus
gctttgcgcttcctctttccagccagcgccgagcgatgggcatctctcgggacaactggcacaagcgccgcaagaccgggggtaagagaaagccctaccacaagaagcggaagtatgagctgggacggcctgctgccaacacgaagattggtcctcgtcgtatacacacagtccgagttcgaggaggcaataagaagtaccgtgccctaaggttggacgtgggaaacttttcctggggctctgagtgctgtactcgaaaaacaaggatcattgacgttgtctacaatgcatccaataacgagttggtccgcaccaagaccctggtgaagaactgcattgtgctcatcgacagcacaccgtaccggcagtggtacgagtcccactatgcactgcccctgggccgcaagaagggggccaagctgacccccgaggaggaagaaatattaaacaaaaagcgatcaaagaaaattcaaaagaaatatgatgagaggaaaaagaatgccaaaatcagcagccttctggaggagcagttccagcagggcaagcttcttgcctgtattgcctcaagaccaggccagtgcggcagagcagatggctatgtgctagaargcaaggagctggagttctac

SEQ ID NO: 55 - DNA, 629 bp, Cricetulus griseus
agcaggaggcgccatcatgggtgttgacattcgacacaacaaggaccgaaaggttcggcgcaaggagcctaagagccaggacatctacctgcggctgctagtcaagctgtacaggtttctggccagaagaaccaactccaccttcaatcaggttgtgctgaaaaggttgtttatgagtcgcactaaccggccacctctgtccctgtcccggatgatccgaaaaatgaagcttcctggccgagagaacaagacagctgtggttgtggggactgtcacagatgatgtgcggattctcgaagtgcccaagctgaargtgtgtgcacttcgggtgagcagccgggcccgaagtcgaatcctgaadgctggaggcaagatcctcacgtttgaccagttagctctggagtctcccaagggccgtggcactgtgctcttgtctggtcctcggaagggccgagaggtataccggcattttggcaaggccccmrgaacaccacacagccataccaaaccctatgtccgctccaagggcsggaagttcgaamstgccarargcagaarggccagccscggctataaaaactaaccctggatcttactgttattaaaaaaaataaactttggaaaaaaaa

SEQ ID NO: 56 - DNA, 608 bp, Cricetulus griseus
cgaggtgcctttcctggatccctcctcactggacccgagtgtggtggcagctcgggctggggcccctggtttccagagggtctgggctgtttcggctgctgtaactagatttagttcagtggtgctctggaggagaccgggagaagggttgaagtgtgaggctgggtggatgggaaaattagttttggtcttcacatctctggtttcatttttgctgtcgtagcgcttgttgctgtctctatgttaaaatgccaaaaatgatctagttgtcgctttcctcctgctccagcactccacagcagcttctggctttgtgaggtgtttgtctcagccagtgccatgacctggcaggaacagatctgggttcccactgtctcccatcatgtgtccgactatagtccgtcgggacaagcttctgcaaaactaacctgctttgtccggtttcccccagacaccacctctcgcttccacttgccgcctgagccttcctggtctctctctggctagtgctgcacagwgtctgcttctgctgtcctggaggtctcctgaagttgtgtggkcaccmararggccaaggacgcamtagccctgagctgagctgggctcat

SEQ ID NO: 57 - DNA, 628 bp, Cricetulus griseus
gcaccaaggaggagcccgtggcagctgatgtcatcaaccccatggccttgcgacagcgtgaagaactacgggagaagctggcagctgccaaggaaaagcgtttgctgaatcaaaaattggggaaaataaagactctgggggaggatgacccctggctagatgacaccgcagcctggattgagaggagccggcagctgcagaaggagaaggacctggcagagaagcgggccaagctactagaggagatggaccaagaatttggtgtgagcactctagtggaggaggagtttgagcagcggcgacaggacctgtatagtgcacgggacttgcagggcctcactgtggaacatgccattgattcttttcgagaaggggagactgtggtccttaccctcaaggacaaaggagtgttgcaggagggggaggatgtgctggtgaatgtgaacatggtagacaaggagcgggcagacaagaatgtggagcttcggaagaagaagcccgactacctgccgtatgcagaagacgagagtgtggatgatttggcacagcaaaaaccccgctctatcctggccaaatatgatgaggagctggagggcgagckgccacattccttccgtttggagcaagg

SEQ ID NO: 58 - DNA, 761 bp, Cricetulus griseus
atgacttttggccaccccagcccaagctktacmagktskgcctgkgcctggkmtrcktsgagcttccccagatcaactacaagctgtcagtggaacataaaaaackgcccaaggtggaactaatgccaggaatgagastgctgcakagcctgctggacacacgatgtgtgtacatcctggactgctggtctgatgtattsatctggcttggccgcaagtccccaagactagtgcgtgctgctgcactcaaactaggtcargagctgtgtgggatgctgcaccggccacrccatgcagyggtcagccgcagyctggaaggcaccgaggctcaggtgttcraggctaagttcaaaaattgggacgatgtgttgacagtaractacaactcraaatgcasaggctgtgctgcagggccaggggctctctsggaaagtaaagcgtgacactgakaagaaagaccasatgaaggcwkacctcactgcactcttsctgmcacggywgccaccaatggcmctggctgakgcmsabyamctgawggwrgaatggaatgavgacctkgatggcwtrgaakgcttsgywttggasggmasgaarwkcactcgaactgccrkaggamrartktggccacttmtacmcacaggactgctwkgtstwcytctgcargtwctgggtgcctgtgkagtatgacgaggaagagaagacggaagtcaaggaagggaagggcctcggtcatggcacagaaggggaggaagccaaaactt

SEQ ID NO: 59 - DNA, 630 bp, Cricetulus griseus
ctgaatcacsytwctttwmcttwtasamakgwysyywcatkrgatstacttgmaactgttytyttmccatcaraawaatcagwgratgtttgctgagyatatatattatgctgcttccttaaactacttgytgctttakgatcaattkatatctttkttttcttcccttwccttgtcacctcaggtgcaaatctgaactcamgtgtctgcttttccattttctctktgccccatctttcccccattatccattwgactttattttaaataattgcatcagtctttaaaaaaaatatcaraaccaasgmratwtcaaasaaagctcaaagtttctwyymctggtgactttggaaagcaaccasaattgtcatatagatatatatggtcccttaaaatgcttttgtgtatgyggtgtttaaaaacagttaacttcacagtatctaggtctgartgtcataagtmctcttmacaccctgtccttgcaacaagtttccaaaagagtgtatgcrccttatagtctcagkscacacccatggagagatagtgcagttggkgacactttctagtcccagagctyacatggracctgagggtattaatgtggatcagggtgaawtgscctttctgyac

SEQ ID NO: 60 - DNA, 1187 bp, Cricetulus griseus
  misc_feature (325)..(343): n is a, c, g, or t
tctgccatggcgggtgggtraaagacccgagctaacatggggttagytcgttaaattacaataaagcctcgtgcagtttgcagcaagctctcgaatccgcctggtgattggggtgaccgcgaacctggcctgaraccccggatactkgagtktysgggggtctaacattttgggggctcgtscksgatttgcgaccayccttcacctgagtggattcgatcttggaggtragatgattmgagctcgvaahytdtrtatgttcaatgttctatgtttcttgtkttgtctcttgctgtgttkgtttggtgccatgatttgtatttgnnnnnnnnnnnnnnnnnnntttgtaattcggacttctggggaagaccctgaagtcctgccctggatgaaagtccgagggttgcttgatttgatctgcgaagaatttgtaatttgtatytgatctgcgcagaatttgtaattgaaccatagggtaagcagacttgygagamccttggttccaccctggatgaaagtccaaggkttggttgtaattttggtttggggcaccatttctttgccgcggwktgtcctgtctaatgtywgkgctgtctaatgtgctgwcatttgtgttatgtgtttcttaagcatctctttctgtcccacattgcccatgcacgtggcatgcatgggtcargggtcttttcttgttgccctaakcacatggcacgggaraggagttctgccatgtgtcacgggttakaatgtgtkatgktggagtcccccgatgctgcttttctgaactcgamccactgctgcagcccttacagctgakcctggcccatgtargtgagtctttccctatccccacttgccggkcccrtgggtccctgccatttgcctakctgcccggcattctttgtgctctacacacatggtatgcakgggggccgcargastytttcssacccctgkattggyytarggtctggagttaccagcagcacccctaccccargkctctctgccttgagccacatggagctagagcgtatgaacttatctggcctgatccggacatctaaatggccctaaaggtattaagaactataaaagggactttgacaaaaattttatgttaacctaaaaatatcaaaaagggcggccgccaccgccggggagcttcaacttttggtccctctatt

SEQ ID NO: 61 - DNA, 1002 bp, Cricetulus griseus
  misc_feature (492)..(512): n is a, c, g, or t
tggatccaagcgttacaatcgcaagcgtgaaccttcctaccccaaaaatgaaaattttagcaaccagtcccgtcgctccaattcacagaaaagcaaaacttttaacaagatgccccctcagaggggcggtggcagcagcaaaccctttagctcttcttctaatggtggaagacgagatgaggtagcagaggctcagcgggcagasktymgccctgcccagttctctggccctaagaagatcaacctgaaccacttgttgaatttcacctttgaaccccgtggccaggcaggtcactttgaaggcagtggacatggcmgctggggaaaaagaaacaagtgggggcatragscktktaacaaggaacttkkkkkrcrggccaactgtcagtttgkggkgtctgaagaccaggactatgcagctcattttgctgatcctgacaccttaktcaactgggactttgtggaacaagtgcgcatctgtagccatgaagnnnnnnnnnnnnnnnnnnnnntctatccaccgactgcagccaagataacccgctgtggacacattttctgctgggcgtgcatcctgcactacctttcactcagtgagaaagcctggagtaaatgtcccatctgctacagttctgtgcataagaaagacctcaagagtgttgttgccacagaatcacgccagtacgttgtgggtgataccattacaatgcagctgatgaagagagagaaaggagtgttggtggccttgcctaaatccaagtggatgaatgtagaccatcccattcatctaggagatgaacagcacagccagtactccaagttgctgctggcctctaaagagcaagtgctgcaccgagtagttctagaagagaaagtagcactggagcagcagctcgcagaggagaagcacactcctgagtcctgctttattgaggccgctatccaggagggtaagattcgggaagaggctctgtctggagtacctggaggcaaaagggaagg

SEQ ID NO: 62 - DNA, 906 bp, Cricetulus griseus
  misc_feature (358)..(372): n is a, c, g, or t
  misc_feature (392)..(410): n is a, c, g, or t
ggcaagatgtctcaccggaaattctctgccccgaggcatgggtcattgggcttcttgcctcggaagcgcakcakccggcatcgtgggaaggtgaagagcttccccaaggacgatccttccaagcctgttcatctcacagcctttctaggckacrrsgctggcatgacccacatcgtccgggaagttgacaggccaggatccaaggtgaacaagaaagaagttgtggaggctgtaaccattgtggaaacaccacccatggtagttgtgggcattgtgggatatgttgaaaccccacgaggtctccgcaccttcaakacagtatttgctgagcacatcaktgacgagtgtaagaggcgtnnnnnnnnnnnnnnncacaaatctaagaagaaggnnnnnnnnnnnnnnnnnnngaaatggcaggatgacatgggcaagaaacagctggagaasgacttcaacagcatgaagaagtactgccaagtcatccgcataattgctcacactcagatgcggctgcttcctttgcgccagaagaaggcacatttgatggagatccakgtgaacgggggcaccgkggctgaraagctagactgggcccgagagaggttggagcagcaggttcctgtgaaccaggtgtttggacaggatgagatgattgatgtcatcggggtgacaaaaggcaaaggctacaaaggggtgactagtcgttggcatacaaagaaactgccccgcaagacccatcgagggctgcgcaaagttgcctgtattggagcctggcaccctgcccgtgtggctttctctgtggctcgagctgggcagaaaggctaccatcaccgaacggagattaacaaaaagatttacaagattggtcaaggctacctcatcaaggatggtaagctgattaag

SEQ ID NO: 63 - DNA, 579 bp, Cricetulus griseus
aagtcaagcatttctgtcccaatgtgcccatcatcctggttgggaacaagaaggatcttcggaatgatgagcacacaagacgggagttagccaaaatgaagcaggagccggtaaaacctgaagaaggcagagatatggcaaacaggattggcgcttttgggtacatggagtgttcagcaaagaccaaagatggagtgagagaggtttttgaaatggccacgagagctgctctgcaagccagacgtgggaagaaaaaatctgggtgcctcattttgtgaagccttgtgcaagcacagccctcatgcggttaattttgaagtgctgtttattaatcttagtgtatgattactggccttttcatttatctataatttacctaagattacaaatcagaagtcatcttgctaccagtatttagaagccaaccatgattattaatgatgtccaacctgtctgaccagccagggtctttctgacactgctctaacagctctctctgcactccacctgacaccaggcgctaagtcaaagaatttcttaacttcttgcttctttctagaaagagaaacagttggtaac

SEQ ID NO: 64 - DNA, 961 bp, Cricetulus griseus
  misc_feature (226)..(268): n is a, c, g, or t
atctccgagaatatgaggagccgctggatttggcggctccttcgccctgacggcggtgggtcccgctggacttcagctcctcacgggtgtctgtcacccgtcctgcggagaggtttcttgaccaccacaacaaagacgagttatgatagaaggccagtggacgtaactcctttagaacaaagaaaattaacttttgatacccatgcactggtgaaggacttggaannnnnnnnnnnnnnnnnnnnnnnnnnnnnnnnnnnnnnnnnnntactaagtaaattatcaaatgtcagcctggatactatctataaggaaatggtgactaaagctcaacaggaaataacagtccaacagctaatggctcatttggattccatcaggaaagacatggtcatcctagagaaaagtgaatttgcaaatctgagagcagagaatgagaaaatgaaaattgaattagatcaagttaaacagcagctgactcatgaaagcagtcgaatcagagcagataataagttggacatcaacctggraaggagcagagtaacagacatgttcacagatcaagaaawgcaacttatggaagcaaccaatgaatttaccaaaaaggatacccaaaccaaaagtattatttcagagaccagtaataaaattgacactgaaattgcttccttaaaaacactgatggagtcgaacaaacttgagacaattcgatatcttgcagcctcggtgttcacttgcttggcaatagcattggggttttatcggttttggaaggaatattgacactcctcttgctgctgatcactccataaactgtactttctacatattcttcaaagtactcatcgactaaatagaagtgtttggatattttatttttaggttatatgactttattatgttgaaaagctgtctcccaaagcctggtttgagataaaaggacattttgtccttatccttt

SEQ ID NO: 65 - DNA, 654 bp, Cricetulus griseus
  misc_feature (2)..(16): n is a, c, g, or t
cnnnnnnnnnnnnnnnttttttaacaracttaattcaytttattycccttatataaaacccttatgkggkggccacagytgcascctgggtcctytraacararactytggkgkgggctttcacaaratggkcagkgaattcctgataaggaracttggkgaacacagtytytttccaaaggtcgggggttaggtasctgtaggtyttgraratggcatmaaaggkggccttggcaaakttgcccasggkggcagkgcascccctggctgacgtgtagcaktcatmaataccavccatcatcaktakcttyttaggcmcaggabcararacratsccaktgcctytgggggcarggatradacscmccaacacadasccacagbggcctgtcaytttacatggaacakkgkggggcttgccaatyttgttcccccaktascctyttckyacagggacaatggaaagcttggccasgatgatggcccctcggatggcagkggctacctccttggagcacttaacaccaaraccaacwtgaccrkkgtagbccccaatagcracraaagccttgaacctggtccgctggccagcccaagtctgcttctgcactggcatgatctttaaaacctcatcctttagggatgcgcccagga

SEQ ID NO: 66 - DNA, 771 bp, Cricetulus griseus
ctgggagatgctgtggagcagggtgtgattaacaactcagtattaggctatttcattggccgcatctacctctacctcatgaaggttggaatatctcctgataaacttcgcttccgacagcacatggagaatgagatggcccattatgcctgcgactgctgggatgcagagtccaaaacgtcctatggctggattgagattgttggatgtgcggatcgttcctgctacgacctgtcctgtcatgctcgagtcaccaaagtcccactagtagctgagaaacctctgaaagaacccaaaatagttaatgttgtacagtttgagcccaataagggagcagtgggcaaagcgtacaagaaggatgcaaagctggtgatggagtacctcagctcctgtgacgaatgctacatcacagagatggaacagctgctgaacgagaaaggggaattcactattgaaaccgaagggaagacatttcagttaacgaaagacatggtcagtgtgaagagattccagaaaacactacacgtggaagaagttgttccgagtgtaattgagccctcctttggcctgggcaggatcatgtataccatattggagcacacattccatgtccgagagggagatgagcagagaacgttcttcagtttcccagctgtggttgctccattcaaatgttctgtccttccactgagccaaaaccaagagttcatgccatttgtcaaggaattatctgaagctctgaccaggaatggcgtgtctcataaagtagat

SEQ ID NO: 67 - DNA, 974 bp, Cricetulus griseus
gatggcgctcaccagctttttacctgcgcccacacaactatctcaggaccaacttgaagctgaagaaagagcaagatctcagagatctcggcagacctcactggtctcctcaagaagggagcctcccccatacgggtatcggaaaggctggattcctcgattgttagaggattttggagatggaggtgctttcccagaaatccacgtggcccagtatccactggatatggggcgaaagaagaaaatgtcaaatgcactggccattcaggtggaccctgaagggaaaattaaatacgatgcaattgctcgacaggggcagtccaaagacaaggtcatttacagcaagtacactgacctggttccaaaggaggttatgaatgcagatgatccagacctgcaaaggcctgatgaagaggctattaaagagataacagagaagacaagagtagccttggagaagtctgtgtcgcaraargttgctgcagccmtgcctgttcgtgcagctgacaagctggstcctgctcagtatatycgctacacaccatytcagcaaggagtagcattcmactctggagctaaacagagggttattcggatggtagaaatgcagaaagatccaatggagccgccaagattcaagattaataagaaaattccccggggaccaccatctcctcctgcacctgtaatgcattcctctagtcggaagatgactgtaaaggagcaacaagagtggaagatccccccttgtatttccaacatgaaaaacgcaaagggttacacaattcctctggataaacggctggctgctgatggaagaggacttcagactgtacacataaacgaaaattttgccaaactggctgaagcgctatacattgctgatcggaaggctcgtgaagctgtggaaatgatagcccaagtggagaggaagatggctcataaagaaaaggagaaacatgaagagaaactta

SEQ ID NO: 68 - DNA, 584 bp, Cricetulus griseus
ccttcatttgcatatttagaaaatgggcagacctttactactatggccatcaaaaccagtcccaagcatctggagctgtctgkgcagatgtatgcccaagcagccctggatggagactcccagggatttttcaacctggctctactgatagaggaaggtgctgccgtctcacaccacattctggagtkcctggaaattgacccatcactccatcccagtaacgcctccattctccgggagctgtatgaaaggtgctggagcctsagtaacgaggagtcgcttawcccctgcgccctggcctggctttaccttcacctgcggcttctctggagtgctgttctgcactctgccctgatctacttccttggaaccttcttgctgtccgtakkgatcgcctggatggtgctctatttccagwgtgtctcasccagtggctcctstccascaccatgmctgggtcgtggcagaccccacctcatccgccccaagtccakctgtgcctccarctgsagatgcctccgaccatgacccacccatgatggctaacaaccctgagcctcgagggtgaacttgcacgtccattc

SEQ ID NO: 69 - DNA, 619 bp, Cricetulus griseus
tgcttgggcgtcgcagggccggaggcgcggggatagaaggagcaccatgtccgcggaagttcccgaggcagcgtcggcggaggagcaaaaggaaatggaagataaagtgactagtccagagaaagctgaagaagcaaagttaaaagcaaggtatccacacttgggacaaaagcctggaggttccgattttttaaggaaacgattgcagaaagggcaaaagtattttgattctggggattacaacatggcaaaagcaaagatgaagaacaagcagcttcctgcagcagccccagataagacagaggtcactggtgaccacattcccactccacaggaccttcctcagcggaaaccatccctggttgctagcaagctggctggctgattaaaagagctgaactgcatgagtcttctaatgtcctttatttctccttactacgttacttacccactttctgtttcctttcactcactatgtcatttgagactgacagctttgcaggtagtggtagtatgtgctgctgttgtaagggagcatacatgtgtagaggtttcggttagtttaacagtgcactgatgcaaaggacatgtaacagcaacttaagttacgataattgta

SEQ ID NO: 70 - DNA, 548 bp, Cricetulus griseus
  misc_feature (544)..(544): n is a, c, g, or t
gagagcggtgtgtggagccttcggcttgggagkaaggcgctgtccgaacgaacargacccgagcggcagctgtgctcccgccttggaagtggttcaatcatggttgaaattaaraagatctgttgcattggtgcaggctatgttggtgggcccacatgcagkgtsrttgctcatatgtgccctgaaatcagggtaacagttgttgatgtcaatgagtcaagaatcaatgcatggaattctccaacccttcctatttatgagcctggattaaargaagtggtakaatcctgtcgagggaaaaatctgtttttttctaccaatattgatgatgccatcagagaagctgacctagtatttatttctgtaaacacaccaacaaaaacctatgggatggrgaaaggccgggcarmawatctgaaatatattgaagcttgtgctcgacgcatwgtgcaaaactcawatggggtcaaaatcgtgactgagaaaagcacagtccctgtgcgggcagcatagagcatccgccgtttatttgatgccaacacanagcc

SEQ ID NO: 71 - DNA, 580 bp, Cricetulus griseus
cagtgatgttttatgcacctgtaatgattagattaattcaacataaagttgaatttgatgaagtgagtcattatccaggtatacagttctgcttctatgttgatggccatcatcgtcctttcctcaagacctttaaactcttcttcaaaacttgagtctttatctggctgctaatttattgaagtgtttatttgcccataccacttagttaatataaatggcagccaagctatgtctatagctgatgacattctcccttgctgttgktttcattgtatggatttttttgtcacgtcaatatactgtttatttaggaaagaagaaaataggktgctgagagaaataatttarggactgcctgccttccatttgccttgtctttccagattgttttakccttgggaggattctaggaaactgttcccaatagattttgatctctgatttcatatctttggtttcataaagttacatatgatagaaatttgagtgaaaagcagcgaagagtgaaactgtgggcaaacagtaattttgtaagatacaaagcaagcaggcagacctttatgatgagtgaagagga

SEQ ID NO: 72 - DNA, 802 bp, Cricetulus griseus
acttgctccagccagacatggagaaatgtgggctgtctccccaaatgaccggctggttccaacagtaactcggactccagttcagcgacagagtagtgtgtcttcaacagcttctataactctcggtgatcctggtctcacgaggcgtactcagatttctgaaggagattatttatcatacagagaattacattcagtgggaagaacaccagtgatgtcaggatcgcmgagacctctttctgcacgggcatacagcattgatggcccaaatacttcaaggcctcagagtgcccgcccctctattagtgaaataccagagagaactatgtcagttagtgatttcaattactcacggactagtccttcaaaaagaccaaatgcaagggttggttctgaacattctttattagatcctccaggaaaaagcaaagttcctcatgactggcgagaacaagtacttcgacatattgaggccaaaaagttagaaaagcatccccagacatccagtccaggagattcttgccaagatgatagattgatttcaggagagcagaactactcaccaggtgcacttagtcacaaagatcttccagacagcttgatgaaaatgcctttgagtaatggacagatgggccagcctctcaggcctcaggcaaattatagtcaaatacatcatccccctcaggcatctgtggcaaggcatccctctagagaacaactcattgattatttgatgctgaaagtggcccaccagcctccatatacacatccccattgttctcctagacaggctatgagctgg

SEQ ID NO: 73 - DNA, 1184 bp, Cricetulus griseus
  misc_feature (1029)..(1050): n is a, c, g, or t
tcgacccagcgtccgaaatggttcaatgtaaggaacggatacggtttcatcaacaggaatgacaccaaggtaagacgtatttgtacaccagactgccmtataagaagaataaccccaggaagtaccttcgcagygtakgagatggagagactgtggagtttgrtgttgttgaaggagaaaaggtgcggaggcagcaaatgttacaggccctggtggagttccagttcaaggcagtaaatacgcagcagaccgtaaccattatagacgctatccacgtcgtaagggtcctccacgcaattaccagcaaaattaccagaatagtgagagtggggaaaagaacgagggatcggaaagcgctcctgaagggcaagcccaacaacgccggccctatcgtaggcgaaggttcccaccttactacatgcggagaccctatgggcgtcgaccacagtattccaaccctcctgtgcaaggagaagtgatggagggtgctgacaaccagggtgcaggagagcaaggtagaccagtgagacagaatatgtatcggggttacagaccgcgattccgcakgggccctcctcgccaaagacagcctakagaggacggcaatgaagaagacaaggaaaatcaaggagatgagacccagggtcagcaaccacctcaacgtcggtatcgccgcaacttcaattaccgacgcagacgcccagagaaccctaaaccacaagatggcaaagagacaaaagcagccgatccaccagctgagaattcgtccgctcccgaggctgakcagggcggggctgagtaaatgccggcttaccatctstaccatmatccggkttgggtcwtccmacaagaagaaatgratwtgaaattccascmwtwagaaawkaacaaaratkggagcysaaraccttaagtgcttgctttttgcccgttgaccagatacactagaactatctgcattatctatgcagcatggggtttttattatttttacctaaagatgtctctttttggtaatgacaaacgtgnnnnnnnnnnnnnnnnnnnnnntggtttttctcaatacacctttaagggtttttaaatggtttcatatcggggcaagtggagatttttaaaaacttcatttttaatttggaataaaagtttacaacttgattttttcaaaaaaaaattaacaaact

SEQ ID NO: 74 - DNA, 411 bp, Cricetulus griseus
tctctcactgaatgctttgcagatggccttgtttacggcttatggctccaattctgcaatcctaacagggtcccctacactttcttagtatggtcttcctgcctgacatcactgaggtcacatargcagtgtagaatactggttctgtgtgtcaccagcatatagattgctgtcagctatcacttagtgttttacatttttatagagtatattgttaatgtgtgtgtgggggggggtgaatgtcttttcctcctttttagagataaatgccctctaaagggatwgtgckcttcatccccarggtgttcyttttctaktgcccgctttctgcwkarccagcctggctcgggcattataaacaactgtaccttgcgtcctctatcamtccttyatagttccatgccacttttg

SEQ ID NO: 75 - DNA, 690 bp, Cricetulus griseus
  misc_feature (6)..(30): n is a, c, g, or t
  misc_feature (652)..(652): n is a, c, g, or t
gttggnnnnnnnnnnnnnnnnnnnnnnnnngattgcggctgttgttcgagcgctaacagcggcgcggcggtcccagcaagggcctcagacttcggctttgggtgaaaaaaaatggcccgaaccaagcagaccgctaggaagtccacgggtgggaaagccccccgcaaacagctggccaccaaggcagccaggaaaagcgcgccctctaccggcggggtgaagaaacctcaccgctacaggcccgggaccgtggctstragagagatccgtcgctaccagaagtcgactgagctgctcatccggaagctgcctttccagaggttggtgagggagatcgcccaggatttcaaaacggacttgaggtttcagagtgcagccattggtgcccttcawgaggccagtgaagcgtacctggtggggttgtttgaagacaccaatctgtgtgccatccatgccaagagagtcaccatcatgcccaaagacatccakttggctcgccggatacggggggagagagcttaagtcaaggcggtttttatggcattttgtagtaaattctgtaaaatacttwrgtttaatttgtgactttttttgtaagaaattgtttataatatgttgcatttgtacttaagtcattccatctttcactcangatgaatgggaagagtgactgtgcagacctcagtgacg

SEQ ID NO: 76 - DNA, 580 bp, Cricetulus griseus
atggygttsgaaagcactatggtttgtgtggacaacagtgaatacatgcggaatggagacttccttcccacccggctgcaggcccagcaggatgccgtcaatattgtatgtcactcaaagacccgaagcaaccctgagaataacgtgggcctcatcacactggccaatgactgtgaagtgctgaccacactcacccctgacactggccgcatcctctccaagctccatactgtccaacccaagggcaagatcaccttctgcaccggcattcgagtggcccatctggctctgaagcaccggcagggcaagaatcacaagatgagaatcatcgccttcgtgggtagccctgtggaggacaacgagaaggatctggtgaaactagccaaacscctcaagawagaaaaagtgaatgttgacatcatcaattttggggaggaggaggtgaacacagagaagctgactgcctttgtgaacacactgaatggcaaggacggaaccggatcacatctggtgacagtgcctcccgggcctagcttggctgatgccctcatcagttctcctattctggctggtgaaggtg

SEQ ID NO: 77 - DNA, 1623 bp, Cricetulus griseus
atcaccatggcggctggggtaagttcgccggctctggtgatccaggtcacttcatccaccgccatcctttgactgagtcgggtcagtcggcgccaggagagttccagacccaaacggagagccgatctggggttcgcaggccgtaccgccggagagcagggttcctagggcctggaggggaactgaggctggggctcggaggccagaggtggaatgttctggggttgaggagaagagatgctgggtcttcagtgtctggatgtttaaaaagtggctcrrcygcactgcsmtyykawsmyrtggygkctggaccctgtacacayatcctgaaaactggagagccttcaaggccctcatcgctgctcaktacagcggggctcargtccgcgtgctctccgcaccaccccacttccactttggccaaaccaaccgcacccctgaattksbbaraaagkttcctgctggcaaggtcccagcatttgarggggacgacggattctgtgtgtttgagagcaatgccattgcyyattacgtaagcaatgaggaccttcgtggaagtactccakargcagcggctcadgtggtgcagtgggtgagctttgctgacagtgacatcgttcctccagccagtacctgggtgtkccccaccttgggcatcatgcaccacaacaaacaggccactgaaaatgcaaaarargaggtgaagcgaatcctggggctgctggacactcatttgaagacaakgacttttttggtgggtgagcgagtgaccctggctgatatcacagktgkctgcacccttctgkggstctacaagcargtcttagagccttcttttcgtcaggccttycccaataccaaccgatggttccttacctgcattaaccagccccagttcakggcggtcttgggggaggtgaagctgtgtgagaagatggcccaktttgatgctaaaaagtttgcagagagccagcctaaaaaagaaactccaaggaaagaaaagggttcwckakaagagaaacagaagccccaggctgagcggaaagaagaaaaaaargcagctgccccagctcctgaggaggagatggacgagtgtgagcaggcacttgctgctgagcccaaggccaaggacccctttgctcacctgcccaagagtaccttcgtgttggatgagtttaagcggaagtactccaatgaggacacagtgtctgtggcgctgccatatttttgggagcactttgataaggatggctggtccctgtggtatgctgagtaccgcttccctgaagagctcacccagactttcatgagttgcaacctcatcactgggatgttccagcgattggacaaactgaggaagaatgcctttgctagtgtcatcctctttggaaccaacaatagcagctccatttctggcgtttgggtcttccgaggccaagaacttgcctttccgctgagtccagattggcaggtggactacgagtcgtatacatggcggaaactggatcctggtagcgaggagacccagaccttggttcgagagtacttttcctgggagggggcctttcatcatgtgggcaaaaacttcaatcaaagcaagatctttaagtgaacatgttttgc

SEQ ID NO: 78 - DNA, 579 bp, Cricetulus griseus
  misc_feature (20)..(38): n is a, c, g, or t
  misc_feature (129)..(152): n is a, c, g, or t
cggccgcgggcttctggcgnnnnnnnnnnnnnnnnnnntctctccctctccctccctgctgctgccggcctccgggatccaaccgacgccatgggtttcggagacctgaaaacccccgcgggcctccannnnnnnnnnnnnnnnnnnnnnnncaagagctacatcgaggggtacgtgccatcgcaagcagatgtggccgtctttgaagccgtctctggtcctccgcccgctgacctgtgtcatgctctgcgctggtataaccacatcaagtcttacgagaaagagaaagccagcctgccaggagtgaagaaatctctgggcaagtatggccctgccagtgtggaagacaccacaggaagtggaactgcggatgctaaagatgatgatgacattgatctcttcggatcagatgatgaggaggaaagcgaagaagcaaagaggctccgagaagagcgccttgcacagtatgaatcaaagaaagctaaaaagcctgcggttgtcgccaagtcttccatctttctatatgtgaagcctcgggatgatgacacagacatgacataattagaggagcgtgtcaga

SEQ ID NO: 79 - DNA, 579 bp, Cricetulus griseus
aagaggcggagggacaggttctagtgttggatggcagaggccatcttctgggccgcctggcggccattgtggcaaagcaagtgctactgggccggaaggtagtcgttgtgcgctgtgaargcatcaacatttctggaaacttttacagaaacaagttaaagtacctggctttcctccgaaagcggatgaacaccaacccctctcgaggcccctaccacttccgagccccgagccgcattttttggcgcactgtacgaggcatgctgccccacaagactaakcgaggccaggctgccttggaacgcctcaaggtgttggatgggatccctcctccctatgacaagaaaaaacggwtggtggtccctgccgccctcaaggttgtgcggctgawgcctactakaaagtytkcctacctggggcgcctggctcatgakgtcgggtggaaataccaggcagtgacagccacgctggaggataaacgctacgaaaatgcccctgtccactatccgtacaataaccaatttttttagcttcgcttacccggaagataacatcttgtataataatattatttaactt

SEQ ID NO: 80 - DNA, 591 bp, Cricetulus griseus
ggtttggctggcccggaggggagcctcgtggtagaggtgaccggagctgagcatttcagatctgcttagtgaaccggtgtatcacccaccatgctggctgcaaggctcctgtgtctccggacactgccttccagggttttccagcccactttcaccaaggcctccccacttgtgaagaattccatcacgaagaatcaatggctcttaacacccagcagggaatatactaccaagacaagagttaggattcaccgtgggaaaactggccaaggactgaaagaggcagcttttgaaccatcagtggaaaaaatctttaaaattgatcasatgggaaggtggtttgttgctggaggagcagctgttggtcttggagctctgtgctattatggcttgggaatgtctaatgagatcggagctatcgaaaaggctgtaatttggcctcagtatgtgagggatagaattcattctacttacatgtacttatcagggagtattggtttaacagctttgtctgcmttggcattagccagaacacctgctgtaatgaacttcatgatgaaaggctcttggatgaccaattggtgcaacctt

SEQ ID NO: 81 - DNA, 1577 bp, Cricetulus griseus
  misc_feature (44)..(80): n is a, c, g, or t
gcatcttgcttggtttcttctttctcccgggcaaacagctggcnnnnnnnnnnnnnnnnnnnnnnnnnnnnnnnnnnnnngacttttccagtagctgaaatattactccttcctcctaggtacttctttccttgttctgaggtcccagagtgctgctgcctcaaactagaaatataacaaatataacacatataacacttcctggaagtgttccctacctgccaacaacttcattacaggctttgcttgatgggatggggaaatttccttgatttgatacatakcaagcaratcgtctggagacaasagttggcatacvtrgtatggctggcaagtaagactgggagacaaataggaaaaggtggccttcagtggcctmcttarcaaasacactgggcccctttctacagcgtgcctcctttctgtccatactctgacccacagagcttaktgagacgggagtaatggaatcacatgtctgasggggaaggggattgagcatggtctggtctgtgctgagaargcagactggcttttakcaacatgaagatttcttcatagaagtcatcttystgtgaactgatggctaaacagcctgtggcgttttgaggatatggcacaaaactgtgtagctataaataaattcttcacttggaacttgaaagtatttcattttgaaaaattgawrgacaagaggagttatctargttgccgatttctttcgtggcargacaggaagtggawagcttgagggtcagcytctgtaggtagctgctawrargtagatttctaaatgaarcccttggggagcacactgccaggaatccggaagtgttagctccatccgttactctaatttcgtccttcgattgagtagagaccgatttctcgtggtgttgaaccttccctgcattcttcgctttgtggccacccagcctacatcatgctgcccgggaggctactacctaccctgcttttgatttcttctgcyagttctctgttctttggcattttcttctctccctggacaggcatcgagttgcctgagtgtattcagagcactctggacttgctgtctargcatgttcctgtctcacagatgcagcgctcatgggctcggaactgctgtgtcactttatcgagcagagccaggtgcctctcttctgtgccctctagatcctctctctctacctctaccccaagtgcctctgccaccgtgacttcagaaaagcttggcagtccctctagcaacatcctaagttcagagattgtctggttggtgagttaatagctcagccgaatgctcacattgtctcagtgaggcaactactgaccaagatggttcattgttgcctctgtgagtcagagtagacagcacatttgtttttccttgcacgcttggcaagtggctctggctgattaatatatgcaggtggtggtacaaatgcttgtgaggttccccattttatccctgtacaaacaccagaagcgtgggcaattgcccaagaagaggccctgcttcctgaagccaggtgtgatgcaaagtttgaactgaaatgtggtagctcaggtgacac

SEQ ID NO: 82 - DNA, 777 bp, Cricetulus griseus
  misc_feature (257)..(276): n is a, c, g, or t
gaagatggcggaggagcggcaggactcgctgagagagttcgtggcggtgacgggcgctgaggaggaccgggcccgtttcttcctggagtcagccggctgggacctgcagattgcactagcaagcttttatgaggatggaggggatgaagacattgtgaccatttcacaggcaaccccaagttcagtgtctagaggcacagctcccagtgataatagggtgacgtccttcagagaccttattcatgaccaagatgagnnnnnnnnnnnnnnnnnnnngacagaggagcaggttttatgctgggggctcaragagaagtggacagcagattgttggtsctccccggaagagaagtcccaacgagctggtggatgatctgtttaarggtgccaaagagcatggggctgtasytgtggagcgagtgaccaagagccctggagagaccagkmaaccgakaccatttgcaggakggggctaccgccttggagcagcaccagaggaagagtctgcctacgtggcaggagaawrgasgcgacattcgggccawkatgtycatgyagtgctgaagctctgsagawctggattcagccttgacaatggtgaactcagaagctaccaagacccatccaatgcccagtttctggagtctatccgtagaggrkwktgtgmmgcscaagggagcttysrawgccttmrctsrcgwgggcsrtraactggryagcacggccccccatgtattgaacaccagctctccagcccagcaagcagataatgaagcc

SEQ ID NO: 83 - DNA, 605 bp, Cricetulus griseus
ctcccctagcgccgccgggcccgcaggtctgtgtggagccgcggttgcgggtgtctgttccgcakgatggggttcgtgaaagttgtcaagaataaggcctacttcaagaggtaccaagtgagatttakaaggcggcgagagggtaaaactgactactatgcksggraacgattggkgatccaggacaaaaataagtmcaacacacccaaatacaggatgatagttcgtgtaactaacagagatatcatctgtcagattgcctatgcccgtatagaaggggacatgatagtctgcgcagcatatgcacacgaactgccaaaatacggggtcaaagttggcctgacaaattatgctgcagcctattgcaccggcctgctgctggcccgcakgctyctcaatakgtttggtatggacaagatctatgaaggccaagtggaggtgactggakacgaatacawtgttgagagcatygatggccagcctggtgccttcacctgctatttggatgcaggtcttgcccgaactacaactggcaataaagtttttggggccctgaagggagctgtggatggaggcttgtctattcctcatagtaccaaacgatt

SEQ ID NO: 84 - DNA, 876 bp, Cricetulus griseus
ctcccttttccggtcggcgtggttctcgagcggagtgtcttccgcagccgcgccttcaccatgagcgtcccggctttcatcgacatcagcgaggaagaccaggcagctgaacttcgtgcttatttgaaatcaaaaggagckgagakctcagaagagaactcggaaggtggacttcatgtagatttagctcagattattgaagcctgtgatgtgtgtctgaaggaagatgataaagatgttgaaagtgtgatgaacagtgtggtatccctcctcttgatcctggaaccagacaagcaagaagcattgattgaaagtctgtgtgaaaagttagycaagtttcgggaaggtgaacgcccgtctctgagactacaattgctcakcaaccttttccacgggatggataagaacactcctgyaagatacacagtgtactgcagcctcatcaargyggcagcatcgtgyggggccatycagtacatcccaactgagctggatcaagtgagaaaatggatttccgactggaagctcaccactgaaaagaaacacacccttttaagactactttatgaggcactcgtggattgtaagaaaagtgatgctgcatcaaaggtcatggtggagttgctggggagttacacagaagacaatgcttcccaagctcgagttgatgcccacaggtgtattgtgcgggcactgaaggatccaaatgcctttctttttgaccatcttcttactctaaagccagtcaaatttttggaaggcgagcttatccatgatttattaaccatttttgtgagtgctaaattggcatcatatgtcaagttctatcagaataataaagatttcattgattcacttggcctgttacatgaacaa

SEQ ID NO: 85 - DNA, 595 bp, Cricetulus griseus
  misc_feature (93)..(139): n is a, c, g, or t
  misc_feature (167)..(213): n is a, c, g, or t
  misc_feature (246)..(298): n is a, c, g, or t
  misc_feature (328)..(374): n is a, c, g, or t
  misc_feature (452)..(543): n is a, c, g, or t
tagttccaatcctaattgcaatagctttccttacattagtagaacgaaaaatcctaggctacatacaactacgaaaaggcccaaacatcgtcnnnnnnnnnnnnnnnnnnnnnnnnnnnnnnnnnnnnnnnnnnnnnnntattaaagaacctttacgccccctagcnnnnnnnnnnnnnnnnnnnnnnnnnnnnnnnnnnnnnnnnnnnnnnntarcgttcagcctatgagttcctattccaatannnnnnnnnnnnnnnnnnnnnnnnnnnnnnnnnnnnnnnnnnnnnnnnnnnnncaagcctttctgtatattcaatcttatgannnnnnnnnnnnnnnnnnnnnnnnnnnnnnnnnnnnnnnnnnnnnnnagctgkagcacaaactatttcatatgaagtaactatagcaatcattttactatcacgcctacttataaggggctcttnnnnnnnnnnnnnnnnnnnnnnnnnnnnnnnnnnnnnnnnnnnnnnnnnnnnnnnnnnnnnnnnnnnnnnnnnnnnnnnnnnnnnnnnnnnngcagaaacaaatcgagctcctttcgacctcactgaaggagaatctgaactag

SEQ ID NO: 86 - DNA, 604 bp, Cricetulus griseus
ctggtttgacaagttcaaatatgatgacgcagaaaggaaattctacgagcagatgaatgggcctgtgactgctggctcccgccaggagaatggtgccagcgtgatcctccgtgacattgcaagagccagagagaacatccagaaatccctggccggaagctcaggccctggggcctccagtggacctggtggagatcatagtgagctcattgtaaggattgccagtctggaagtggagaaccagaatcttcgaggcgtggtacatgatctgcagcagtccatttccaagttggaggtcaggctgaacactctggagaagagttcacctactcacagagccacagcccctcagacgcaacatgtgtctcctatgcgtcaagtggagcscccaaccaagaargcggccacaccggcagaggatgatgaggacgatgacattgacctgttcggcagtgatgaggaggaagaagataaggaggcagcccgactacsaraggagaggcttcgtcagtatgcagagaagawagccaagaaaccctcactggtggccaaatcctccatcctcttggatgtcaaaccttgggatgatgagacaaatatggcc

SEQ ID NO: 87 - DNA, 585 bp, Cricetulus griseus
ccctagagataaggcgcttcaagactaccgcaagaagctgctagagcacaaggagattgacggccgtcttaaggagctaagggaacagttaaaagaacttaccaagcagtatgaaaagtctgaaaatgatctgaaggcactacaaagtgkkgggcagattgtgggtgaagtgcttaaacagttaaccgaagagaaattcattgttaaagcaacaaatggaccaagatatgtagtaggttgtcgtcgtcagcttgataaaagtaagctgaagccaggaacaagagttgctttggatatgactacactaactataatgaggtatttgccaagagaggtggatcctttggtttacaacatgtctcatgaggaccctggaaatgtttcttattctgagattggagggttgtcagakcagattcgggagttacgagaggtaatagaattacctcttacaaacccagaattattccagcgtgtargaataatacctccaaaargctgtttgctgtatggaccaccaggcactgdgaaaacactyttggcacgagctgttgctagtcagctggactgcaacttcctaaaggt

SEQ ID NO: 88 - DNA, 578 bp, Cricetulus griseus
ctaagatggaggcgttgtgggagtcacgggctggccactgggccggggggccggctccggggcagttttaccgcgtcccgtccactccctgcgccctcatggacccggcgtccgcgctctgcgagggtccaatcacccggacccagaaccccatggtgactgggacgtcggtactcggggtgaagttcgactgcggagtggttattgctgcagacatgctgggctcctacggctccctggctcgtttccgcaatatctctcgtattatgcgagtcaacgacagcactatgctgggcgcttcgggagactacgccgacttccagtatttgaagcaagttctcggccagatggtgattgatgaagagctgttgggtgatggacacagctatagccctagagctattcattcatggttgacaagggccatgtacagccgacgctccaagatgaatcctctgtggaacaccatggtcattggaggctatgctgatggagaaagcttccttggttatgtggacatgcttggtgtagcttatgaagccccttcactagccactggctatggcgcatacttggct

SEQ ID NO: 89 - DNA, 780 bp, Cricetulus griseus
gactccagactgcctcacttcaccaagagtctgactgggagcaggtatgagccctggacttcaaacagcacagctaggcaacagcagagctcatgggaaagaaattcagcttgaaaatgcaaaggctgctggggaaatgtccatcactgtggatctggaaacagactatgctgagctggttctatatttaggagccatcacacttggggagaagaatagaaagaaaatgcagaaccctctcctcagaaaacgggagagtgaaaatatttctcgagctgtgtgtgctctcctcaactctggaggtggagcgatcaaggttaaaattgaaaatgaaaattatagcttcaacagggatggcctgggactggatttggaagcctctctttgtaaatgtctgccatttgtggggaggcacctagacttcatggagcagggaggatacttttacatctttgtgaaatcttggagtgcagacatctttgggctgccgattggcaccctgagaaccaatttgtacgtaagaacctggtcgtcctcagttgaagtggttgcctctgatgctcttgagttcctccaagaactggaggaaaatggagggagatcctgtgtcagaccagagcctcctgtatgtagagcctgccctggagtagaagaagaaagtctcctagaggacctggctgctgcagttttcaacaagacccaatttcagtaccaggaagacttccccttcaccaggtcaacctatgctgaagtgacattgctttcaaggaaacagctgca

SEQ ID NO: 90 - DNA, 499 bp, Cricetulus griseus
ctccgcagccatgagcagcaaagtgtcccgcgacaccctgtacgaggcagtgcgggaggtcctgcacggcaaccagcgcaagcgccgyaagtttctggaaacggtggagttgcakatcakcctgaagaactatgrcccccakaaggacaaacgtttctcgggcwccgtcaggctcaagtccacccctcgccccaagytytcggtgtgcgtcctgggggaccagcagcactgcgacgaatccaaggccgtagacatcccccacatggacatcgaggcgctgaagaagctcaacaagaacaagaagctggtcaagaagctggccaagaaatatgatgcctttttggcctccgagtccctgatcaagcagatcccacgtatcctgggcccaggcctaaacaaggcaggcaagttcccttccctgctgacacacaatgaaaacatggtggccaaagttgatgaggtgaagtctactatcaagttccagatgaagaaagtgctg

SEQ ID NO: 91 - DNA, 610 bp, Cricetulus griseus
  misc_feature (185)..(204): n is a, c, g, or t
  misc_feature (581)..(581): n is a, c, g, or t
ccgcctgasccgcykcygscymygkgtctckrcmctaggagtcttcgtcctckcccgaccgcgcaatggaaggktaccacaagccggatcakcakaakctgcakgccctgaaggacacakccaatcgcctgcgcatsakstccatccakgccaccaccsccsctggctccggccrccccacatcnnnnnnnnnnnnnnnnnnnntcatggctgtcttgtttttccataccatgcgctacaasgccctggatccccgaaaccctcacaatgatcgctttgtgctctccaagggccatgcagctcccatcctgtatgcagtctgggctgaagctggcttcctacccgagacagagctgctgaacctgaggaagatcagctctgacctggatgggcaccctgtcccaaaacaagccttcaccgatgkggccactggctccctgggccarggcctgggagctgcttgygggatggcctacacaggcaaatacttcgacaaagccagctatcgtgtctattgcatgctgggagatggagaagtgtctgagggctctgkctgggaggccatggsctttgccggaatntacaagctagacaacctccttgccatttt

SEQ ID NO: 92 - DNA, 620 bp, Cricetulus griseus
  misc_feature (333)..(377): n is a, c, g, or t
  misc_feature (513)..(528): n is a, c, g, or t
caaaagggaggaatttgcgtccatcttcttcactagaaatggctcatgtgctctgtaacagggccaggctggtttcctatctcccaggattctgttctttagtgaaaagagttatcagtccaaaagccttttcaactgcagggtcttcaggttctgatgagtctcatgtggccactgcacccccagatatatgttcccgaacagtgtggcctgatgaaactatgggaccatttggccctcaggatcagaggttccagcttcctgggaatatgggcttcgattgtcacctcaatgggactgcttcacagaagaaaagcctgacccataaaactnnnnnnnnnnnnnnnnnnnnnnnnnnnnnnnnnnnnnnnnnnnnntttgtgatggctcaktatgtgaacgagtttcagagtagtgatgcacctgtcgaacaagawattaacagtgcagaaacttactttgaaagtgccagagttgagtgtgtaatccagacatgtccagaactgctgcaannnnnnnnnnnnnnnntttttccagaagtggctaataacaaactaatgattctgactgtracacaggaaactgaaaatgacatgactgcttggagtgaagaggtatat

SEQ ID NO: 93 - DNA, 697 bp, Cricetulus griseus
  misc_feature (654)..(654): n is a, c, g, or t
tgctctagattagagactcccgaatcccttcatcaaccacagatggctgtggaatccaccctgtgcagctccgaggatggaactgaaggaacagaagtctgcagtggcctttcgtgcacagtacttccagcagccaacatgcgtttcttttctgttgctttgttttgttttaggaaaacacttttctccctgacagtttatagatgttgataaatgtcctgtcattctggtcaggagacggtcatgatgaccattggcccagggctccaactctgtggcttagacctcttttctaaaataatggtttttctgcatggcagtcctgtcagaaggtgtcaaaagcattctcaagygctgcctatgacattcttagaattttctggtattacacagttccacacaaatgttcctgctgtgtgaacagagacttctcctccatcctggtagttaaatgatgtcacagggaggcctgcrttggtcawgctggccttctcagtgactcagggatcattctgcatccgtgcatacatgcaccagatatgatgttctctgggcaaacaggccctttcctgtctgtcctgggcacttgtttatctacagcttctcctttctttgccttcgacacatcttatggactatgtatgtattatccangcttgatggaaactggtgcttgtagtcaggtctgtaaagcctt

SEQ ID NO: 94 - DNA, 567 bp, Cricetulus griseus
gctttggccataaagcccgaggcggcggcgttgattacggtgtttggggctgggcagctccggggagcctgctggagccggagtcggacctctctgtcgcggcctgcgttgtgtctccttgtcggcggaccccgcgcttaaaggatgacctctaggaagaaagtgttgctgaaggtcatcatcctgggagattctggtgttggaaagacatccctcatgaaccagtatgtgaatmagaagtttagtaaccaatacaaagccacaataggagcagactttctgaccaaggaggtgatggttgacgacagacttgycaccatgcagatctgggacacagctggtcaagaacggttccagtctcttggtgtggccttctacagaggtgcagattgctgtgttctggtgtttgatgtgactgcccctaacacattcaaaacccttgacagctggagagacgagtttcttatccaagccagcccccgggatcctgagaactttcctyttgttgtattgggaaacaagattgaccttgaaaacagacaagtggscacaaagagggcacaggct

SEQ ID NO: 95 - DNA, 896 bp, Cricetulus griseus
cctgggagtgagacgtctctgggatcggggtctctccacagcagacatgacgaarggtcttgttttaggaatttattccaaagataaagatgatgacacaccacagtttacaagtgcaggakagaattttaataagttggtggctggaaagctgasagaaatgttgaacatatctggacctcctctgaaggcaggcaaaacccgaaccttctatggtctgcatgargacttccccaktgtggwggtggtcggccttggyaagagatcagccggagttgatgaccaggagaactggaatgaakgcaaakaaaacatcagakctgctgttgcakcgggatgcaygcaggttcaagacctggagctgccttcaktggaggtggatccctgyggagatgctcakgctgctgcagaakgagccgtgcttggtctctatgagtyygatgacctaaakcagaaaaagaaggtggctgtatcagcgaagctctatggaagtggcgatcaakakgcctgggagagaggggtcctctttgskkctgggcagaacttggcccgccagctgatggagtctccatccaatgagatgacaccaaccagattcgctgaaattattgaaagaaatctcaaacatgccagtagtaaaacagaggtccatatcagacccaagtcttggatagaggaacaagaaatgggctcgttccttagtgtggccaaggggtctgaagaaccaccagtcttcttggaaatccactacacaggcagccccaatgcaagtgaagcacccctggtgtttgtgggaaagggaattacctttgacagtggaggtgtctccatcaaggcttctgcaaatatggacctcatgcgggctgacatgggaggagctgcaacaatatgctcgg

SEQ ID NO: 96 - DNA, 835 bp, Cricetulus griseus
  misc_feature (412)..(460): n is a, c, g, or t
  misc_feature (517)..(563): n is a, c, g, or t
gcagctgcagatgaggaagatgaggatgaggaggaaggggaagtggtggaagaccgtgattactactatgactcttttaaaggagatgactacaatgaggagaacccaactgaacccagcagtgatggcgctatttcagacaaggaaattgctcacgatgttaaagctgtctgctcccaggaggcgatgacggggccctgccgggctgtgatgcctcgttggtacttcgacctctccaagggaaagtgcgtacgctttatatatggcggctgcggcggcaacaggaacaattttgagtctgaggattattgtatggctgtgtgtaaaacgatgattcctcccactcctctgccaaccaatgatgttgatgtgtattttgagacctcagcggatgataatgagcacgcccgcnnnnnnnnnnnnnnnnnnnnnnnnnnnnnnnnnnnnnnnnnnnnnnnnnacagggtaaagaaggagtgggaagaggcagakcttcaagccaagaaccttcccaaannnnnnnnnnnnnnnnnnnnnnnnnnnnnnnnnnnnnnnnnnnnnnntttagagaaggaagcagccagtgagaagcagcagcttgtggaaacccacttggcccgagtggaagccatgctgaatgaacgccggcggatagctctggaaaattacctagctgccctgcagtctgacccaccacggccgcatcgcattctgcaggctctgcgccgttacgtgcgtgctgagaataaagaccgcctgcacaccattcgtcattaccagcatgtgttggctgttgacccagaaaaggctgcccagatgaaatcccaggtgatga

SEQ ID NO: 97 - DNA, 788 bp, Cricetulus griseus
tgcggcggctcagctcttctgtcgctctccctgtctccctttcgcttccggaaacatggcctctggtgtggctgtctctgatggtgtcatcaaagtgttcaatgatatgaargtgcgcaagtcttcaacgccagaagaagtgaakaakcgcaagaaggcagtgctcttctgcctgaktgaggacaakaagaacatcatcctggmrgagggcaasgakatcctggtgggagatgtggggcagactgtggacgacccctacaccacttttgtcaakatgctgcccgacaaggactgccgctatgctctctacgacgcaacctatgagaccaakgakagcaagaaggakgacctggtgttcatcttctgggcccctgakagtgcaccccttaagagcaaaatgatctatgccakctccaakgatgccatcwagaagaagctgacaggaatcaagcacgaattacaagcaaactgctacsakgaggtcaasgaccgctgcaccctggcakawwaactadgtggcagcgccgtcatctctctggwrggcaagcctttgtgakccgcctccadccccctgcctggagcatctakcakccccagacctgctcatgggtgttgcaggctgccccttttcctgccagaccggaggggctggggggatcccagcagggggagggtaatcccttcaccccagttgccaaatgtcctccccaccccctggaccgtgctcttccctccaccctgacggttctggccatcccaaactgcttctgatcctctgattcctcttg

SEQ ID NO: 98 - DNA, 419 bp, Cricetulus griseus
ggacaacattttagcagttcttaaatatctagctacatctgayatgctggcctcttcgtctgagtatcgacatgggaacgtggtcttctttgatgtgttcggcctrytygctcatmgcatatccttctcgtgttggcacaataataaactacatggctgttacsgctgctgttttgtacctggggaaaaaactgctgcagcccaaacacaggaatgctgactacacsagagacttcttgtgtggacttgccatcactttcattagctggtycactagccttgytacagttcttattatagcagtgttcgtstctctsattggacagtctctctcatggtacaaccacttttatgtygctgtttgcctgymtggaactgcaacagtggctaaaataatactcatacataccctcgcaaaa

SEQ ID NO: 99 - DNA, 580 bp, Cricetulus griseus
  misc_feature (417)..(470): n is a, c, g, or t
agttcgggattcacacctacaccgcaraatgccaggtctaagctgtagattttatcaacacaaattccctgaggtggaagatgtagtgatggtgaatgtaagatccatagctgagatgggagcctatgttagcttgttggaatacaataacattgaaggcatgattcttcttagtgaattatccagaagacgtatccgttctataaacaaactgatccgcattggcagaaatgaatgtgtagttgtcattagagtggacaaagaaaaaggatatattgatttgtcaaawagaagagtgtctccrgaggaagcgattaaatgtgaagacaaattcacaaaatccaaaactgtttatagcattcttcgacatgttgctgaggtattagaatataccaaggatgaacaactggaaagccnnnnnnnnnnnnnnnnnnnnnnnnnnnnnnnnnnnnnnnnnnnnnnnnnnnnnngtgcttatgatgcctttaagcatgcagtctcagacccatctatcttggatagtttagatttgaatgaaaatgaacgagaagtactcattaacaatatcaatagacgtttg

SEQ ID NO: 100 - DNA, 466 bp, Cricetulus griseus
ggaagtgcagggctcacggcctggaaaaaatgtgcaactaacagagaacgagatccgtggtttgtgcctcaaatcccgggagatattcctgagccagcctattcttctggagcttgaggcacctctyaagatctgtggtgacatccatggccagtactatgaccttctacggctgtttgaatatggtggcttccctccagagagcaactacctcttcttgggggactatgtggatcgtggcaagcagtctttggagaccatctgcctgctgctggcctataagatcaaataccctgagaatttctttctgcttcgtgggaaccacgagtgtgccagcatcaaccgcatctatggcttctatgatgaatgcaagagacgatacawtatcaaactgtggaagactttcactgactgcttcaactgcctgcccatcgcagccattgkagatgataagatcttctgctgc

SEQ ID NO: 101 - DNA, 561 bp, Cricetulus griseus
  misc_feature (2)..(16): n is a, c, g, or t
  misc_feature (90)..(120): n is a, c, g, or t
annnnnnnnnnnnnnnactagcccggtctataagagctagttccaggacagcctccaaagccacgggaaaaaccctgtcttggaaggaannnnnnnnnnnnnnnnnnnnnnnnnnnnnnnaaggaaggagggaaggaagggagaaagagagaaagagagaaagagagaaagagagagaagaaaagaacttcaagttaattatattaaaatgtttaatctctataaatatgaaatgaattaaagataaaattttctcctgaaatttaagtgcacttttaaagataagcacttttgatgtctgattgagcaaacataaaacagacaaaaaccacccccaaccacttcgcccttcaaagctaacggatcaaatgtacaaagtgcataaattrgattctcttgagtacttcaagcatcttgaagkgaggactgggaagatyaccagggaaaatagacrgatcaaatgtagtcaataagagccctctcttttccatgggtaacagtaaaaagatttgtcaatgcgggagacaaaggccagcaagatagaccatagacttagacccc

SEQ ID NO: 102 - DNA, 909 bp, Cricetulus griseus
gagagaagcctcggcacaagagtgatgtggaaatcccagcaactgtgactgccttctcctttgaggacgacactgtgccgctctctcccctcaagtacatggcacagaggcaacagcgtgaaaaaacacgatggctgaactcaccaaatacttacatgaaagtgaatgtgccggaggagtctcggaatggggagacgagtcccaggaccaaaatcacgtggatgaaagcagaagactcctctaaagttagtagtggaacacctatcaaaattgaagatcccaatcagtttgttcctttaaacacgaacccaactgaggtgctggaaaagagaaataagattcgggaacagaaccgatacgacctgaagacagcaggaccacagtctcagctgctcgcaggaattgttgtggacaagcctccttctaccatgcaatttgaagatgatgatcagggcccaccagctcctcctaacccattcagtcatctcacagaaggggaccttgaagaatacacgaagacaatcgaaagawagcaacgaggcctggacgamrctgagcwgkwktcmctctcagatgatgcagcatctgtttcacaaattcagtctcagactcaatcaccgcaaaatgtccctgaaaaattggaagaaaaccatgagctgttttccaagagcttcacttccatggacgtgcctgtcatgattgtgaacggcaaggatgagatgcacgatgctgaagatgagcttgctcagcgggtcagtaggttaaccacaagctcgaccatagagagcatcgagatcaccattaagtctccagagagaacccaagaggtcatgtcacctgatggctcgccttcaaagtcaccatccaagaaaaagaagaaattccgcacaccttcttttctcaaaaaga

SEQ ID NO: 103 - DNA, 579 bp, Cricetulus griseus
catggccgctgccgtcgctgcagccggcgctggggagcccctgtccccggacgaattgctcccgaaagccgaggtggagaaggccgaagaggagctggaagaggacgaggacgacgagctagatgagaccctgtcggagagactgtggggtctgacggagatgtttccggagagggtccggtctgccgccggagccacctttgatctctcgctcttcgtggctcagaagatgtacagattttccagggcagctttgtggattgggaccacttcctttatgatcctggtacttccagttgtctttgagacggaaaagttgcaaatggagcaacaacagcaactgcagcagcggcagatactgttggggcctaacacagggctgtcaggaggaatgccaggggctctacctccacttcctggaaagatctagattgtttcttgggtatttgtcctggtaggagaacttcgaaattcagttgaactgctgattgtttggacttttattctttktattttaaactttggcacatccatctatttaaatctggtgggaactttctctgtttctcatggagagac

SEQ ID NO: 104 - DNA, 581 bp, Cricetulus griseus
cggccgggggagtctggcctakacgtccgtgtcgcccggtgcgggcgggatggctgcggaagaagaggacgaggtggaatgggtggtggagagcatcgctgggttcctgcggggcccggattggtccatccccatcttggactttgkggagcagaaatgcgaagtttttgatgatgaagaagaaagcaagttgacctatacagaaattcatcaagagtacaaagagctggttgaaaagctgttagaaagttacctcaaagaaattggaattaatgaagatcagtttcaagaagcatgcacctctcctctggcaaagacacgaacatcacaggccattttgcagcccgtactggcagcagaggactttactatctttaaagcaatgatggtccagaagaacattgagatgcagcttcaagctatccggataatccaggagaggaatggtgtgttaccagactgcttaactgatggtgccgatgtagtcagtgaccttgaacaggaagagatgaaaatcctgagggaggtcctcagaaaatcaaaagaagaatatgaccaggaggaagaaaggaaacgaaaaa

SEQ ID NO: 105 - DNA, 1036 bp, Cricetulus griseus
  misc_feature (175)..(193): n is a, c, g, or t
tttgacagagtggcttgtcaaggagaagtagttcgaaaacttaaagctgaaaacgcctctaaggatcaagtggatccagctgtgcawsaactccttcagctgaaggcacagtacaagtccctctcaggaatcgagtataagcctgtgtctgctactgggtctgaagacaaagatnnnnnnnnnnnnnnnnnnnagaataagtctgaaaagcagaataagcctcagaaacaaaatgatggcccagggaaagactcttctaaaagccagggcggtrsgctgtcatcgagtggagcaggggaagggcaggggcctaagaagcagaccagattgggtcttgaagcaaaaaaggaagaaaatctggccgaatggtactcccaagtcatcacaaagtcagagatgattgaatactacgatgtgagtggctgctatatcctccggccctggtcgtactccatttgggaatccattaargacttctttgatactgagatcaagaaactcggtgttgagaactgctacttccccatatttgtgtctcargctgctytagagaaagaaaagagtcacaytgaggactttgcccccgaggttgcttgggttacaagatctggtaagacagagctggcagagccaattgccatccgacctactagtgaaacagtaatgtatcctgcatatgcaaaatgggtgcagtcccacagagacctgcccatcaggctcaaccagtggtgcaatgtggtgcgctgggagtttaagcacccacagcctttcctccgcactcgggagttcctgtggcaggagggacacagtgcctttgctaccttcgaggaggcagctgacgaggtcatgcaaatccttgagttatatgctcgagtgtatgaagagctcttggcaatccctgttgtgagaggaagaaagactgaaaaggagaagtttgcaggaggagactatacaaccacagtagaagccttcatatctgccagtgggcgtgctatccagggagcaacatcacaccacttaggccagaatttttcca

SEQ ID NO: 106 - DNA, 576 bp, Cricetulus griseus
ccccgcggtatcggtaaaggctttttttctctttaccagggttcacattgagcactcgcggacaggggtaccggrrcmawraaaaagsmacccccggacaagccaggcctytcwwwcccacctccgggcgaacggcggtgagccaaattaacgggcttaakatacacttaagcacaaaaaaggccggccgygaacgctcgacaccaaccgacgcacgakcctacgggagaaggcccaagtacgtggcgggcgctcacccaaagcgggaagagatgccacacacacatgcggacgtcccggggaaacgccgcaagagaactcttacccgcctgaaaccactttctcgaccccccacaaacgacacctcgyaaaaccagagcggcacggacccccgtcgacaaagagccgggaacgacaacacacgccaccgaggccagaccgagcacgcakrakgcagcacgccagggagcgggaagcgacgccrccgctcakaaacgggcaccttcgaggtcaagcctggagcgctccargagcaccgcgaggatagcgagcgagacacgtgcacacgccagtcgg

SEQ ID NO: 107 - DNA, 269 bp, Cricetulus griseus
ccgcgcggctggaggtgtgaggacctgakgctcggggtgggggcggaggcggctcctgcgaccgaagaggacttgcgactcgccgtccgcgcaccatgagggtcctgtgggtgttgggcctctgctgcgtcctgctgaccttcgggtttgttagasctgacyacyaastcgatgtggatggyacagtasaakatgacctggstaaaagcacagaaygctcaaggacagatgatgaagttgctgcatagagaggaagaagctattgagct

SEQ ID NO: 108 - DNA, 508 bp, Cricetulus griseus
  misc_feature (203)..(223): n is a, c, g, or t
  misc_feature (501)..(501): n is a, c, g, or t
caacttagtgttttgttgagtaactaactgttttgcaagaaatatttccatttagaaacataaaagattaatgttccaattatgcatagcttccccattatcaatcaggagagattatggggcacttgggaactattttgtctttataacaggcgtttgcaaggctgagcataatagataaatcagttccctctgaaagtgtnnnnnnnnnnnnnnnnnnnnngaaaaaaagagccaggtggkcaaacttaaattaacatcatcttgttaaagcatattttatttcactgagagaaattcaatatcaaagacttttatatactcaattaccaagaaatctttttttaagtacaatttaaaaatcattgaaaatgtgatccacatcatagccattcttttcctcaaacttaggtggacaagcttctcawagtggcagtgggaactggcatgtcacaaawwacgtartartgcttwcargcagtttgcccctgtaagaaccanctgtgct

SEQ ID NO: 109 - DNA, 1044 bp, Cricetulus griseus
  misc_feature (533)..(555): n is a, c, g, or t
  misc_feature (714)..(758): n is a, c, g, or t
ccccatagtccgggagtcaaagccggttgtcaagccagtcctgtcccgcactcatctgccttttctttttctctcaacatgacagatgccgctgtgtccttcgccaaggacttcttggcaggtggagtggctgcagccatctccaaaacggsggkrgcgcccatcgagcgggtcaagctgctgstgcaggtgcagcatgccagcaagcaaatcacggcagataagcaatacaagggcattatagactgcgtggttcgtatccccaaggaacagggggksctgtccttctggcgtggtaacctggccaatgtcatcagatacttccccacccaggctctcaactttgccttcaaagataaatacaagcagatctttttkggtggtgtggacaagaggacccagttttggcgctactttgcagggaacctggcatcaggtggtgccgcgggggccacatccttgtgctttgtgtaccctcttgattttgcccgtacccgtctagcagctgatgtgggtaaagctggagctgaaannnnnnnnnnnnnnnnnnnnnnntgcctggktaaratctacaaatctgatgggattakgggccygtaccaaggctttaatgtgtcagtacagggcattatcatctaccgagctgcctactttggtatctatgacactgcaaagggaatgcttccagatcccaagaatacccatatcttcatnnnnnnnnnnnnnnnnnnnnnnnnnnnnnnnnnnnnnnnnnnnnnttcctatccttttgacacggttcgtcgacgtatgatgatgcagtctggacgcaaaggaactgatatcatgtatactggcacaattgactgctggaggaagattgctcgtgatgaaagaagcaaggcttttttcaagggtgcatggtccaacgttctcaggggcatgggtggtgcctttgtgcttgtcttgtatgatgagatcaagaagtacacataattatgtcttaagtttctccccaagagcaggcatgttgtacaatacaccatatcttgaacattctggaca

SEQ ID NO: 110 - DNA, 1006 bp, Cricetulus griseus
agtctgtcagagcgcggaggttcagcaagtctgtcagaccgcaatggcgccttccaggaagttcttcgttgggggcaattggawgatgaacgggacgaagaagtgcctgggagagctcatttgcacgctgaacgcggccaaggtgccggcagacaccgaggtggtttgtgcgccccccgccgcctacatcgattttgtcaggcagaagctasatcccaagattgctgtggctgcacagaactgctacaaagtgaacagtggggccttcactggggagatcagccctggcatgatcaaagacttakgagccgaatgggtagtgctagggcactcggagagaaggcacatctttggggagtccgatgagttgattggacagaaagtggcccatgccctatccgagggccttggagtgatcgcctgcattggggagaagctagatgaaagggaggccggcaccaccgacaaggttgttttcgagcaaaccaaggccatcgcagataatgtgaaggactggaacaaagttgtcctggcctatgaacctgtatgggccattggtactggcaagactgcaacacctymacakgcccaggaagtacacgagaagcttcggggatggctgaaatccaatgtctctgatgcagtggctcaaagcacccgaatcatttatggaggttctgtgactggagcaacctgcaaagagctggcaagccagcctgatgtggacggcttccttgtgggtggtgcttccctcaagcctgagtttgtggacatcatcaatgccaaatgttaaacaccagcatcttccctaccctccgctaggccaggattaggttgcccaggagcttaagaactgctcccacaagtcacatgcttctgatgtcatcgccccatcttgtttgctaatccacactgtaccttcctacacctttgacacctcccttataaggttgggaccaggccaatccctttaccacttacaatgaatgaaataatgtcacctatt

SEQ ID NO: 111 - DNA, 598 bp, Cricetulus griseus
  misc_feature (32)..(46): n is a, c, g, or t
agctgtgctgtgacgggtagacctggactgannnnnnnnnnnnnnnttgagtcagagaaaaaagcaagacagaatcttcagagtttcccggaaccactaattattccagttttatacttgaccaaccttacccatcgttcacgcttacatgaaatttgtgatgatatctttgcctatgtcaaggaccgatattttgttgaagaaactgtggaagtcattaggaacaacggtacaaggctgcagtgcagaatcttggaagtcctccctccattacatcaaaatggttttgctaatgggcatgtgggcagtgttgatggagagactattgtcatcagtgacagkgatgattcagaaacmcaaagcasctcttttymacatggaaagaaaaarratgcggtkratcccttgktattyaggkaccagggkgcarcccmckwaaaaggrgatwtatgagtykgskgkcgkaaaagcaacmcaawtcagcrggrraaaacmccttwttttcycgkgataaaaaaaaggtttttttggaaaaccactgkgamccmcaagrkggaatywttaawattarggsrtywtytytttyaacatacaacat

SEQ ID NO: 112 - DNA, 1945 bp, Cricetulus griseus
  misc_feature (14)..(94): n is a, c, g, or t
  misc_feature (1559)..(1601): n is a, c, g, or t
catcgtgtggaaannnnnnnnnnnnnnnnnnnnnnnnnnnnnnnnnnnnnnnnnnnnnnnnnnnnnnnnnnnnnnnnnnnnnnnnnnnnnnnnnctgcagcgagatccactatgaccggattggtggtagggatgcagcacacctcgtcaaccaggatgaccccaatgtgctagagatctggaaccttgtgtttatccagtataacagggaaactgatggccttctgaaacctcttcccaagaaaagcattgatacagggatgggcctagagagactggtatctgtgctgcagaacaagatgtccaactatgacactgacctttttgttccttacttcgaagccattcagaagggtacaggtgcccggccatacactgggaaagtcggtgctgaggatgcggatggaattgacatggcctacagggttctggctgaccatgctcggaccatcaccgtggcactggccgatggtggccggcctgataacacaggacgggggtacgtgctgaggcggattcttcgaagggctgttcgatattcccatgakaaactgaatgccagcaggggtttctttgctacattagttgatgttgtcgtacagtccctgggagacgcattccctgractaaagaaggacccagacatggtgaaggatattattaatgaagaagaggtacagtttctcaagacactcakcagagggcggcgcatcctggaccgaaaaattcagagcttargagactgcaagaccattcctggagatactgckkggckcctctatgacacttacggattcccagtggatctcactggattgattgctgaagagaagggcctggtggtagatatggatggctttgaagaagagaggaaactagctcagctgaagtcacagggcaagggagccsgkggggaagacctcatcatgctggacatttatgctattgaggagctccgggcaaagggtttggaggcgacagatkattctccaaaatacaactaccattctgactccaatggtagctatgtgtttgagtgcacagtggctactgtgctwgctctgcgaagagaaaagatgtttgtggaagakgtggycactggccadgagtgtggagtagtgctggacaagacctgtttctatgccgaacaaggagggcagatctacgatgaaggctacttggtgaaggttgatgacagcagtgaggataaaactgagtttacggtgaagaatactcaggtccgaggcgggtatgtgctgcatataggaacaatatatggaaacctgaaagtgggggatcaagttcggcttttcattgatgagccccggcggagacctgtcatgagcaaccatacagccacgcacattctgaacttcgccctgcgctccgtactgggggaagcggaccagaaaggctcactggttgctcctgatcgccttcggtttgacttcactgccaagggagccatgtccacccagcaaatcaaggtakgctgaggagattgtcaatgccatgattgaggcagctaagcctgtctatacccaggactgtcccctggnnnnnnnnnnnnnnnnnnnnnnnnnnnnnnnnnnnnnnnnnnngacctatactgaccctgtgcgagtcgtttccattggggtccccgtgtcagagctgttggatgacccctctgggcctgccggctccctcacttctgttgagttctgtggaggaacgcatctacggaattccagtcacgcaggagctttcgtgatagtgactgaagaagctattgccaagggtatccggaggattgttgcatgtcacaggtgctgaagcccagaaagccctcaggaaggcagagagcttgaagagatctctgtctgtcatggagaccaaagtgaatgcccagactgcacccaacaaggatgtgcagcgggagattgccgaccttggtgaggccctg

SEQ ID NO: 113 - DNA, 824 bp, Cricetulus griseus
cgtgccagcgatggaggggcagcgggtggaggtggacggcgggatcatggaagggggcggccagatcctcagggtctccaccgccctgagctgcctcctgggcctccccttgcgcgtgcagaagatccgcgctggccgcatcacgccgggcctcaggcctcatcatttatctggactggaaatggttcgagatttgtgtgatgggcacctggagggggcagaaatcggctcaacagagataaccttcataccagagaagatcagaggtggaatcctcactgcakatacgaakacagcagggagtgtgtgcctcttgatgcaggtttcaatgccttgtgttctgtttgctgcttctccatcggagcttcgcttgaaaggtggaactaatgctgaaatggcacygcagattgatyacaccatgatggttttcaagccaatcgtygagaaatyyggtkycaaatttgattgtgacwtyamaatgaggkgctattactccawawgggggcggygaggtkattgycckwatgtcaccarttaaacaktyskacccaataaatctgactgatcgtggctctgtgaccaagatttatgggagagcttttgttgctggagttttgccattaaaagtagcaaaagatatggcagcagcagccgtacgatgcatcagaaaggagatcagggatctgtacgtcaacatccagcctctgcaggagtccagggaccaagccttcggcaacgggagtggaatcatcattgttgctgagacatctactggctgcttgtttgctggctcatcacttggcaaaagaagtgtgaatgcagac

SEQ ID NO: 114 - DNA, 564 bp, Cricetulus griseus
cggagagkckcggagmcgctctttcysgmaggatcgccgcgatggccgcccagggagagccgcaggtccaattcaagctcgtcctggtgggcgacggtggcaccgggaagacgacgtttgtgaagcgccacttgacgggcgagttcgagaagaagtatgtagccaccctgggcgtggaggtgcacccgctcgtcttccataccaacagaggacccattaaattcaacgtgtgggacacagccggccaggagaagtttgggggcctgcgcgatggctactacatccaagcccaatgtgccattataatgtttgatgtaacatcaagagtcacctacaagaatgtacctaactggcatagagatctggtacgggtgtgtgaaaacatccccattgtattgtgtggcaataaagtggatattaaggacagaaaagtgaaggcaaaatctattgtcttccaccgaaagaagaatcttcagtactatgacatttctgccaaaagtaactacaactttgaaaagcctttcctctggcttgccagaaagctcattggagaccctaacttgg

SEQ ID NO: 115 - DNA, 937 bp, Cricetulus griseus
  misc_feature (104)..(146): n is a, c, g, or t
ccgagagaagcaagatggcggacgtgctggatcttcacgaggccgggggcgaggatttcgccatggatgaggatggggacgagagcatccataaactaaaagannnnnnnnnnnnnnnnnnnnnnnnnnnnnnnnnnnnnnnnnnngggtcccgagcgcgcatgcgagaggattatgacagcgtggagcaggatggcgatgaacctggaccacaacgctctgttgaaggctggattctctttgtcactggagtccacgaagaagccactgaagaagatatccatgacaaatttgctgaatatggggaaataaaaaacatccaccttaacttggacaggcgtacaggatacttgaaggggtatactctagttgagtatgaaacatacaaagaggctcaggctgccatggagggactcaatggtcaagatttgatgggtcagccaatcagcgtcgactggtgttttgttcggggtccaccaaagggcaagaggagaggtggccgaagacgaagcaggagtccagaccggagacgtcsttgatagatcctctgttgcccargtggtctctacacgagtccatttggttatgctgccttgcataaatagggctagggtagaacttgtgtttatatttaatttcttaccctatctacttagtattgctttgagttaaaacctaataataaatgttccattttgttttctacatttaagattattttactgttctggagactgtttatagtaaggccttctgagtcactgggaagacatgtctgtctggagtgtaattctgagtttctagaggctcgggcagagattgttcatcatttctttttcttagaagaccagagagcaggggtagtgaggttcttaaggcattaaggagtgattcttacatactcttgtgagcaaatactatattagtgcttctcctc

SEQ ID NO: 116 - DNA, 1155 bp, Cricetulus griseus
  misc_feature (616)..(633): n is a, c, g, or t
  misc_feature (1135)..(1135): n is a, c, g, or t
gaaagcctctgaataatcccatctccatgagcaacgattggataacacaatgacgtggaaaatgggaccccatttcaccatgctgctggccatgtggctagtgtgtggatccgaatctcattccactgtcttggacagagacagccacacagggcggaaagtacctttggcctctccaatcagcgctaggtcagctcgctatctgaggcacaccgggaggtctggtggaactgagaaatccactcaggaagaatcaaatcttcagcctccccaaaggaggaagagtgtaccagtgttgagattagctcacccgacagtgaggcccgcccccttargtatcaatggagtcccarttagacctgagttaagaccaataactaggagctctccgcatgagatggtccgagatgaggggtcctctgcacggccgagaatgttgcggttcccttctgggtccagctctyccaatatcctggccakstttgcaggaaagaacagggkgtgggkyatctcarycccscatgcgctmaragggctactaccgsctaatgatgagcctyctgaargacratgtgtattgcgagctggcagakwrgcacatccatcakatcgtgcnnnnnnnnnnnnnnnnnnaggaagggggcaaggtacggaggatcaccagtgaaggacagatcctggagcagccgctggaccccagtctcatcccaaagctgatgagcttcctaaaactggagaagggcaagtttagcatggtgctactaaagaagactctgcaggtggaggagcgttacccttatccggtcaggttggaggccatgtatgaggtcattgaccaaggccccatccgcaggatcgaaaagatcagacagaagggttttgtccaaaagtgtaaggcctcaggcttagagggccatgtgctccaggaagggaacaatggcggcgggggagcaggaagcacaggcctgggcagtgagaagaagaaagaggagccaaggagagcacaagtccaccccaccagagagcctcagagaaagctggccaccaccaaggcagccattacccaacctcccccaaccccaagggccactacccttcctcctgctccagtcacaacagctactcgggccacgtnccggatggtgacagtagctg

SEQ ID NO: 117 - DNA, 960 bp, Cricetulus griseus
  misc_feature (225)..(248): n is a, c, g, or t
  misc_feature (317)..(334): n is a, c, g, or t
gccggaagcgaggaaggtgctgtgtaatcagtgagaycgwsmsrcgckkgcggccctcacaatgcccgactacttaggtgcggaccagcggaaaaccaargaggacgagaaggacgacaagcccatccgagctctggatgagggggacrtcgccttattgaaaacttatggtcagagtacttactctagrcagatcaagcrggttgaggatgacattcaacaacnnnnnnnnnnnnnnnnnnnnnnnnctggtattaaagagtctgacactggcctggccccaccagccctctgggacctggctgcagataaacagnnnnnnnnnnnnnnnnnngccgctacaggttgcaaggtgtacgaagataatcaatgctgattcagaggaccccaaatacattatcaatgtgaagcagtttgccaagtttgtggkggatctcakcgatcaggtggcacctactgacattgaagaarggatgagagttggtgtggaccgaaataaataccaaattcacattccactacctccaaagattgacccaacagttaccatgatgcakgtggaagawaaacctgatgtcacmtacagtgatgktggtggctgtaargagcabattgagaaattgagagaagtagytgaaacccctctactccatccagagagatttgttaaccttgggattgagcctccgaagggtgttctgctgtttggtccccctggcacaggcaagacactctgtgctagggcagttgctaacaggactgacgcttgcttcatccgagttattgggtctgagctcgtacagaaatacgtcggtgagggggctcgaatggttcgtgagctttttgaaatggccagaacaaaaaaagcctgccttattttctttgatgaaattgatgccattggaggggctcggtttgatgatggtgctgggggtgacaatgaggtgcagagaaccatgt

SEQ ID NO: 118 - DNA, 582 bp, Cricetulus griseus
  misc_feature (412)..(412): n is a, c, g, or t
agctaatgaaattcagcaaaatgaacttaaaaatatgtttacacaatgccagacacgaataattcakatttagatttttagtcacaagcctatggtttttaaaaattcaaaatgaagttctcacccagcaggtttttcgtttgactttstgaacaggttttgtcccaattgctgggattaaagatgtgctccaccacagaccakccttatgaggctattttaacctgtactgagtttagggattgcaaattctaattrtgtktatcattgattgtttcccaaggagtttgaacctgaggaaattttcagatatatagactctaagtaccatcctggactgtaggccagagtagcaaatacaccacagagtggtttgttggtctcactcgggaaggtgcaggaaagaaccaanctggtgtttggagggggaaggggagtattctgtgaagcatatgcagtgtggatacacccatttaaagaattagcattttcctgctctatcaagttcattcctgtacactgcctttatgagggaaattatacatttagattgtagtaacttttactagtgtgggggaagga

SEQ ID NO: 119 - DNA, 610 bp, Cricetulus griseus
cacgtccgaagccgtgagtcgccgcagcaacagctatggtgtcagtaatcaacaccgtggacacctctcatgaggacatgattcatgatgcccagatggactattatggcacccgcctadmaacctgctcstssgrcaggtccstcaaaatctttgatgtgcgaaatggagggcagatcctcattgcakaccttasaggacatgaggggccagtatggcaagtakcctgggcccaccccatgtrcsgcaatakcctgrcctcctgtksctatgaccggaaagttattatctggaargaggaaaatggcacttgggagaagactcatgagcactcaggacatgactsctsagtgaactctgtatgctgggcccctcatgattatggcctgattttggcctstgggakctcggatggggccatctccctgctgacctatacaggggaaggccaatgggaagtgaasaagattaacaacgctcacacgattggctgtaacgccstcagttgggcccctgctgttgtgcctggaagcctcatakaccaaccatcagggcagaagcccaattacatcaagaagtttgcatcaggtggctgtgacaacctcatcaa

SEQ ID NO: 120 - DNA, 2676 bp, Cricetulus griseus
gtcgacccacgcgctccgggggaaataaaataaaaggttaaagagagttaaagcaaatrrtaaaagttatagagggttaaaataagttgtagaaggtcagasaaaagttgtcgaaggtcagakaaaaggttgttacaaattaaaaaaaatgtaaactgtgctatggtttctcatgtctacaaataaattttaaaaatrrtaatataagttaaaattttaaccatattaagctrattytgttttwaataagtcctstttatttctcaagtaaattatrtatacttgttttaaaaatgttctatttcctggtataaacttaagcatgttaagcaaagcaagttacggccattttgtaactggtcacatgacttgactggycgccattttgctaaagttaaaaaaagaatacttaarccgccmtcttgactaaaggkgaccmcwtggaaattwgaggtaccatyttakaaacaagttttcadttaakatttwaamtgtyaatgcttctatvtrttacagwaagaccttaagkgratttmaatttcyttttamamccwkyybycwwaygtyygttyywattaawsykkgywcttamagmssttcaatttaraattattyytaagcaaagcctgacartgtaaagttcttgttttatraaagatrctratctatwtaagaygktacagttyrtgttttyaraagttaagtttaagaatgttgrgtgtgatggcacacacctttaagctcakggtgtwgatggcacacgmctttaagttkagggcgttggtggcatacgcctttaatcccaccaytcgggagkaagaggcagatggatctttatgagttcaaggcctgcctggtccggcakatcgawttccagrwcagrctccarmgtsmsrgaaaaaccctgcctcarawagaagttaagctactgtttaagraatataaggtasctctatrcagtttttaagttcagctgtgctgtttcraacattttactaagttraaaccagkkacagactaaatcatttrcagaratawgaccttacctagccacctgtrtgcttmwtgtgtgcttaagrmaagyaactaaaacagacaaacagacctctaatgcttcagagatcttcagaatatgrcatttawattgkyatctttaaagtttataatgtcagacagactgccagatccggacagtgacccaragtctccaaagaagattacgaggcacctcagttcctgcacctggaccagtgagcgagatgctcagatgtgawacctgccgcctrccakracctggccgakamtgtggacaaagctgctggacactggaaaattgattgyacccctwtgcctagacaaaacaaggkcagtcttttccatgtycctcttccacagagaggaaaaaaaaactctcacwgtatakgcctggcgaaratygctgktctttgagacasctgcctccarcggtaatggagaaacttgggtrtggctaactgkmtwctagactggcttctgtcacttttyagtagattcgrataaartatacccttctcagatctctgaaatattactggttgtcagcttgacagcatcrgkcagtcagrtccactatagactagtcagtatgttagctrataaaatagtaactatctactgttcakgcacragytcaaagtttttaagtttattttggttgtcatctaagtacaaacttaaagggcttttcatcaggccaaaggcacctctgtccaatccatacctggctctctggacagaagaaaaatgtacatgcttatatcccaaatctgcagtttttgctaggactcaaagttataaatatgttcttgctgtttaaacagatatctgctttttctacactgtgggcttcagaaaataagttttaacctctgttcctagtttaaacatgtcttaaacaggtttctgcttctggctgacatctgagtatcagttgctgactacaggctgttctaagtagactgcgaaccctagacttgctgtggatgtgaaccagtcagctgatgtggacaccccctgtctctgcaacagtgtctgctaaccagaagcccctgatggattccccrykkcckaaattcctttttgcttttgactagcatttcaaccttctggggtccctaacttcgtcccaaagtcagcaggaagcagtttggaaaagaatttcgccgtccattttccckggttraaatgctaagtcaaaaggaactcccttrcatggggatgmcartatctatcactccctgatggggatgctagagagacagcaattccatgattggaatttacamaraaaagawaatgggggaatgaaggaaccrgcttccttttggcagccataayrgyygaacatgtgcttgcyatramcytgycytrgwmacgtagaggtcagatgcctgtctcgtgacaaggaaccttaktcacttaraggtcagatgcctgtcttgtgacaaggaaccaatcggaagttagctggtggcgctatgctttatggctctgggtgtgctttacggacaagcgcacagcaatgacgtagagagcatagcaaccaccctgggagggcctatgagccataacaaccagttgaccaatcaacacagggcaagccctccaagcctggaggcacaccaatcatgagcctat

SEQ ID NO: 121 - DNA, 462 bp, Cricetulus griseus
  misc_feature (321)..(341): n is a, c, g, or t
ttagcacagtggttctcagccttcctaatgctgcagtcctttgacacagtggttcgtaaccttcctaatgctgcagtcctttagtacagttcctcagttgttgtgacccttgaccataaatcttcgctactgttatgtaaatatctgtgttttccaatgcattgtcttgactcctgtgcaagggtcattcacccccccagagcttgaacactgctgccttaggctgctcatgattcatggtaagtgttacatccagcaaaatatcttgacaggtaggtagaccatgataagtgctcaaagaagtgacaaaagatctacttnnnnnnnnnnnnnnnnnnnnncagagctkgactttttttaacaagggaaaagttgacagcaatgctggaatgaaaatgggaggcttacccaagggggggagatgtttcatggaaccccaccccctggaagtcggaggcaaaa

SEQ ID NO: 122 - DNA, 612 bp, Cricetulus griseus
agttccgtctgccccggagctgtctctcaccgagrwccactgccctttggtgcagacagaaagaacaagtagcaactaaacaggagaagaatggctttgaagcagatttccagcaataggtgcttcggggggctccagaaagtttttgaacatgacagtgttgagctgaaatgtaaaatgagatttgctgtctacctaccaccacaagcagagagtggaaagtgtcctgcactctactggctgtctggtttaacttgcacagaacagaatttcatatccaagtctgrctttcagcaagctgcctcagaacatggccttgtcgtcattgctccagataccagcccccgtggctgcaatattaaaggagaagatgacagctgggactttggcactggtsctgggttttacgtgamtgccactgaagatccctggaaaactaattacagaatgtattcttacgtaactgaggagcttccacaacttataaatgccaatttcccagtggacccacasaggatgtctatttttggtcactccatgggaggccacggagctctgatttgtgctttgaaaaatcctggraaatacaaatccgtgtcagcatttgctcca

SEQ ID NO: 123 - DNA, 582 bp, Cricetulus griseus
aagtccccgaggtgtgccagctgggtcccacagcttgcggtggtgcttctccagggactcaggtgtgtgcacagcaggggtactcggcggtccggtgctgctcgcaggcaagaagagatcatttaaagattgagaccaagactgaaagaatggctgacctccatcagctcaaggacaatgaggtattgatggcctttgcctcctatgcaactattgttcttaccaagatgatgttcatgagctcggcgactgcattccagaggctaaccaacaagatttttgccaacccakaagactgcgctggatttggcaagggagagaatgccaagaaatttcttcggactgatgagaaggtggaacgggtgcgaagagcccacctaaacgatattgaaaacatcgttcccttccttggtatcggcctcctctactccttgagtggtccakacctctcaacggccctcatgcacttcaggatctttgttggtgctcggatctaccacacaatcgcctacttgactccccttcctcarccaaacagggcctttgcattttttgctggctatggagttactttgtcaatgg

SEQ ID NO: 124 - DNA, 1045 bp, Cricetulus griseus
  misc_feature (839)..(856): n is a, c, g, or t
acttgaatgtcagctgaagacagaaagggatgagaaggagctttataaggtgcatttgaagaatacagaaatagaaaatactaagcttatgtcagaggtacagactttaaagaatttagatggaaacaaggaaagcatgattgtacaggtgaaagaagagattgacaaactgcagtcaagtttggttgaaaaggaaaatttgtacagggctctcctgcttacagcctcaaataaagaagatacaatatttttaaaggagaaacttcgtaaagcagaggagcaagttcaagcaacacggcaagaagctatctttctagctaaagaactcagtgatgctgtgaatgttcgtgataaaacaatggcagacctacatactgcacgcttagaaaacgagagagtgaaaaagcagctagctgatgctgtgagaaaagaccaggaaaagactgatacaatggagcatgaactgagaagagaagttgaagatctgaaactccggctccagatggctgcagatcattacaaagaaaagtttaaggaatgccagaggctycaaaaacaaatcaacawactttytgaccagtcagccagtactaacagtgtcttcacaaagagaaatgggagtcagcagaaagtgaatgatgcttcaataaacacagacccagccacttctgcttctgccatggatgtaaagccagcagtgtcttctgcagagataaattttgacatgttaacaaaggatcatgtctgtgaaatgaccaaagaaattgctgagaaaacagaaaagtataacaaatgtaaacaactgttgcaggatgagaaaaccaaatgtaataaatatnnnnnnnnnnnnnnnnnnatggagctgaagtggaaagaacaagtaaaaattgccgaaaatgtaaaacttgaactagctgaagtagaggacagttacaaactacaattggcagagaaagataaagaaataaatgggctggcctccaatttggaaaatctctcaagggagaaggaacttataaggagattagaagatcagaaaggaaga

SEQ ID NO: 125 - DNA, 807 bp, Cricetulus griseus
cctcatcctggccccacatagttctgaagatgaaaccgtagtattgctcatgcaagcagctctagcgagttttcttttggaacacacctgaacacatttcctgtgtctgacttgttcacctaatgcttcgttcattctgaacatgtagattcaatcgtgagctttcttcacctgttaagagtgcaaaagtatgttgggaaagggatgtggcagagaagaggagatgggtttgagaagggattagaaggagaatagatgagataccagagtccaaggtcccagcaggactggtraaaggaacctgccgactcagcagggagaatgaagattgatcagctattaaatccttaktagaggtaggcttatgaagaaggrcagggaaatgggattgaggtrtakaaagcaggcrcaagactagktgcttgctatagaatctgtkgattccaacagcctgtstgaattcacttacgagctcaagaaggartgtstagcatcacgctattgtagcttttgacttggagctggtccargctgaaagccagctgcagcctctctcgtgtkcacatctccagaccatctcacctctgccctgctgtggggagcaggcatggcagtaaaagtggcctgggctctctctttcagttcattgtttgcttttctgggaattagaargtrggcaccaagatccatggcagcgttacttcttctgcatggkatgcggtgaacccctctgctggcttacacagtgattcaagataacaagtcaatagaaactgccgaggtgggacagagtggagccagggagcc

SEQ ID NO: 126 - DNA, 579 bp, Cricetulus griseus
tgtggcgcaggcaagggacccgtsraaataaacagccactgctttgcgagtcgctttcctgggcctgcgtccgagtatccaccgctgtgggcagctcakacgccgaagctcttaactgcagctatgagcagcaacgagtgtttcaagkgkggacgatctggccattgggccagggaatgccctactggcggaggccggggtcgtggaatgagaagccgaggcagaggattccaatttgtttcctcatctcttcctgacatctgttaccgctgtggtgagtctggtcatcttgctaaggattgtgatcttcaggaggatgcctgctataattgcggtagaggtggccacattgccaaggactgcaaggagcccaagagagagcgagagcaatgctgctacaactgtggcaagccagggcatctggctcgtgactgtgaccacgcggatgagcagaagtgctattcttgtggtgaatttggacatattcaaaaagactgcaccaaggtgaagtgctataggtgtggtgaaactggtcatgtagccatcaattgcagcaagacgagtgaagtcaactgttac

SEQ ID NO: 127 - DNA, 611 bp, Cricetulus griseus
  misc_feature (27)..(45): n is a, c, g, or t
  misc_feature (63)..(82): n is a, c, g, or t
  misc_feature (92)..(131): n is a, c, g, or t
  misc_feature (175)..(211): n is a, c, g, or t
  misc_feature (305)..(323): n is a, c, g, or t
  misc_feature (348)..(370): n is a, c, g, or t
  misc_feature (424)..(436): n is a, c, g, or t
  misc_feature (438)..(450): n is a, c, g, or t
tsgctgtggctgccgctgtggtgcttnnnnnnnnnnnnnnnnnnnkgccatccttgtcgctgnnnnnnnnnnnnnnnnnnnntgcagccatnnnnnnnnnnnnnnnnnnnnnnnnnnnnnnnnnnnnnnnnaacggctgggtaacacrgaksgssaccaccccgcagttcccaannnnnnnnnnnnnnnnnnnnnnnnnnnnnnnnnnnnncatgtggaagctaaccagggacgagaccaactatggcataccacagcgtgcgcttcgaggkcactcccattttgtcagwgatgtcgktatctcnnnnnnnnnnnnnnnnnnnctctcakgctcctgggatggaacannnnnnnnnnnnnnnnnnnnnnngggcaccaccacgagacgatttgtaggccatactaaggatgtactgagtgtagnnnnnnnnnnnnncnnnnnnnnnnnnntgtctggatctcgagacaagaccataaagttatggaatactctcggtgtctgcaaatacactgtccaggatgagagtcattcagaatgggtgtcttgtgtccgcttctccccgaacagtagcaaccctatcatcgtctcctgtggatgggacaagctggtc

SEQ ID NO: 128 - DNA, 906 bp, Cricetulus griseus
  misc_feature (641)..(668): n is a, c, g, or t
aggcgggctggctcagtgcagcggcggcagcgggggaagatggcggcggctgttccccagcgtgcatggaccgtggagcagttgcgcagcgagcagctgcccaagaaggacattatcaagtttctgcaggatcacggttcagattcgtttcttgcagagcataagctattgggaaacattaaaaatgtagctaagactgctaataaggaccatttggttacagcctacaaccatctttttgaaactaagcgtttcaagggtactgaaactgtaagtaaagtgtctgaacaagtgaaaaatgtgaaacttaatgacgataaacccaaagaaaccaaatctgaagagactcttgatgagggtccacctaaatatacaaaatctattctaaaaaagggagataaaacaaactttcccaaaaagggagacattgttcactgctggtatacagggacactcccggatggaactgyttttgatactaatattcaaacaagttcaaagaagaagaaaaatgccaagcctttaagcttcaaagtcggagtaggcaaggttatcagaggatgggatgaagcgctcctgactatgagtaaaggagaaaaggctcgactggagattgaaccagaatgggcctatggaaagannnnnnnnnnnnnnnnnnnnnnnnnnnnaaataccaaactcatttttgaagtggaattagtagatattgactgaaaccagtgcatcagctctgaagacatcaacaacaataaaaacttggccttgaaacttaatgtgactaattagagcttgttactattttaagggaagagtggactggaaaattcaaggagttaaagcttgtttacttgatctcaatttttgagaaatgtaatcccctgggagcccctttaagtttcatatttt

SEQ ID NO: 129 - DNA, 649 bp, Cricetulus griseus
cggcggtctctgccgaaagagggaagatggcgcttgatgggccggagcagatggaactggaagaggggaaggcaggcagtggactccgccaatattatctgtctaagattgaagaactccagctgattgtaaatgataagagccagaatctccgaaggctgcaggcacagaggaacgagctaaatgcaaaagttcgcctactgcgggaagagctgsrgctgctacaggaacagggctcctatgttggagaagtagttcgggccatggataagaaaaaggtgttggtcaaggtccatcctgagggcaaatttgttgttgatgtggacaagaacatcgacatcaatgatgtgacgcccaattgccgagttgctctaaggaatgacagctacactctgcataagatcctacctaataaggtggaccctctggtgtcactaatgatggtggaaaaggtgccagactcaacttatgagatgattggtgggctggacaagcagattaaagagattaaagaagtaatcgagctgccggtgaagcaccctgaactctttgaagcactgggcattgcacagccaaagggagtgcttctgtatggacctccacgcactgggaagacattgttggcccgcgctgtagctcatcatacgga

SEQ ID NO: 130 - DNA, 579 bp, Cricetulus griseus
  misc_feature (184)..(203): n is a, c, g, or t
  misc_feature (477)..(495): n is a, c, g, or t
  misc_feature (529)..(529): n is a, c, g, or t
catggtacagcacacatggaggccaaagatcagctctgttggaactggtcctctccttctacctttccagggttgtttagggatcatactcaagttgcttccgtagtaagcactgttacctgttgagccatcttgctagtccctatktrtttaccttttgagttgataggttgtttggagacannnnnnnnnnnnnnnnnnnnctgatcctcctacttctgcctccagagggctgggatcacaggcatgtaccactatgcctgctgcctatcttccctttgttttggaaagcatatttgatattattgtagaagcattttcaaatttagaaagccagaagatcacttaaagtcattttgagaactgaaaaattatctgaatataacctgtattacttttgaaaaaatataagaaaagtaaaatcattcaaggkaatcactactattttttgatacacatctttatacattagtctgnnnnnnnnnnnnnnnnnnnttctctctctctgattgggtcttatgtatcctangttggccttgaactcctgatcctcctgcttctatctgagcactggaatta

SEQ ID NO: 131 - DNA, 1432 bp, Cricetulus griseus
  misc_feature (485)..(504): n is a, c, g, or t
  misc_feature (507)..(508): n is a, c, g, or t
  misc_feature (606)..(617): n is a, c, g, or t
  misc_feature (791)..(833): n is a, c, g, or t
  misc_feature (1425)..(1425): n is a, c, g, or t
gaacagacgagtgtcggggccctgaagccgcttccaagatgatgcccacaccagttatcctgttraaagaggggactgatagctcccaaggcatccctcagcttgtgagtaacatcagtgcttgccaggtgattgctgaggskgkaagaaccacactgggtccccgtggcatggacaagcttattgtggatggtcgaggcaaagcaacaatttctaatgatggggccacaattctgaaactccttgatgttgtccatcctgcagccaagactttastakacattgccaaatcccaagacgctgakgttggygacggyaccacctcakkgaccctgctggctgccgaktttctgaagcasgtgaagccctatgwggaggaaggtttgcaccctcagatcatcatccgatctttccgcatagtcacccaattggctgttgacaaaatcaaagagattgctgtgactgtgaagaaacaagataaagtnnnnnnnnnnnnnnnnnnnnawnnatgtgcgatgacagccctgagctscaagttgatctctcascwgaagaccttcttcgccaaratggtggttgatgctgtgatgatgcttgatgagttgnnnnnnnnnnnnatgattggcatcaagaaagttcagggtggakctttaraggaktctcakttggtggctggtgtcgcattcaakaagactttttcttatgccsggtttgaaatgcagcccawgawatataagaaccccaagattgccctcttaaatgttgagcttgagctgaaagcagagaaagannnnnnnnnnnnnnnnnnnnnnnnnnnnnnnnnnnnnnnnnnnattgttgatgctgagtggaacattctctatgacaagctagagaagatccatcagtctggagccaaagtcatcttgtccaaactccccattggggatgtggctacccagtactttgctgatagggacatgttctgtgctggccgagtgcctgaggaggatctgaagaggacaatgatggcctgtggaggctcaatccagaccagtgtgaatgctctgattccagatgtgctgggccactgccaattgtttgaagagacccaaattggaggcgagaggtacaatttcttcactggctgccctaaggccaagacgtgtaccatcatcctccgtggaggcgctgaacagtttatggaggaaacagaacggtccttgcatgatgctatcatgatcgtgaggagggccatcaagaatgactctgtggtggctggtggtggggccattgagatggagctctccaaataccttcgggattactcaaggaccattccagggaaacagcagctgttgattggggcatatgccaaggccctggaaattattccacgacagctgtgtgacaacgctggctttgatgcccaaacatccttaacanacttcgg

SEQ ID NO: 132 - DNA, 581 bp, Cricetulus griseus
  misc_feature (500)..(517): n is a, c, g, or t
gcggcgcgtggtccacgccgagcggycgacgagtcccgtctgcgccgtcagaatgactgaktgggagacagccacacctgcggtggcagagaccccagacatmaagctctttgggaaatggagcaccgacgatgtacagatcaatgatrtktctctgcasgattacattgctgygaargasaagtatgccaagtacctgccccacagtgcggggcggwatgccgccaakcgcttccgcaaagcccagtgccccatcgtggagcgcctcaccawctccatgatgatgcacggccgsaacaacggcaagaagctcatgacggtgcggatcgtcwagcatgcctttgagatcatccatctgctcactggcgagaaccctctgcaggttctggtcaatgccatcatcaacagtggcccccgggaagactcaacgcgcattgggcgagccggcacagtgaggaggcaggctgtggatgtgtccccactgcgccgagtgaatcaannnnnnnnnnnnnnnnnnacaggagctcgtgaggctgctttccggaatatcaagaccattgctgagtgccttgcagatgagc

SEQ ID NO: 133 - DNA, 671 bp, Cricetulus griseus
  misc_feature (12)..(39): n is a, c, g, or t
  misc_feature (41)..(84): n is a, c, g, or t
acgtgtgaaaannnnnnnnnnnnnnnnnnnnnnnnnnnncnnnnnnnnnnnnnnnnnnnnnnnnnnnnnnnnnnnnnnnnnnnnggcgcacccgtacctaactcargagaagctgattgagtactgccaatccaaaggcatcgtggtgaccgcgtacagtccccttggctctcctgacaggccctgggccaagcctgaagacccttctctcttggaggatcccakgattaaggcratkgcrtccaagtacaataaaacaacagctcargtgctgatccggttccccatacaaaggaacttggtggtgatccccaagtccgtgacaccagcaagaattgctgagaacctgaaggtctttgacttcgagctgagcaaggaggatgtgaccactctactcagctacaacaggaactggagggtgtgtgccttgatgagctgtgctaaacacaaggattaccccttccacgcakaagyctgaagcttcggatgcctgctctctcccacgagacttgcacctgctcttcctgtwtcatctgtccttgtgggtgtastgtagactgtgtccctctrcactgtsyggaacctggaagatcagacawcgagggtctgttagtttgatgtagtctccacagagcattatcagtagctgagtgattttcttcagcctttct

SEQ ID NO: 134 - DNA, 582 bp, Cricetulus griseus
cctccattattcttccaatgtcaccaagctgttggaggcacttcttcaaaggacccaggctactgctgagatcaccagcagagagtccctgtcagccaacatcgagtggaagctgacattgtggactacctgtggcctctccaaggacgagctacgggggctggcaggacttggtgtgcctgggaggtggtcaggcccaggagcagaagcccctgcagcagctatggaatgccatcttgcttgtggccatgctcttgtgcacaggccttgtggttcasgcccagcggcaggcatcaagacagaaccagcaggaacctggaggccaggtgggagccagaytgtggaagctcttgtgcccacagcccttgggcctgcaagactgtggccatccttttcccacagggggatttgttcaaacgacgtgtggttcggagactagcatccctcaagacccggcgctgccggctgagcarggcagcacacagscttscagarcctggcatggasacgtgtgctgyytgtctagataacttctgtracaaacagyggctccgggtmttgccctgtaagcatgagttycac

SEQ ID NO: 135 - DNA, 611 bp, Cricetulus griseus
  misc_feature (91)..(115): n is a, c, g, or t
caccatggcggtcggcaagaataagcgcctgacgaaaggcggcaagaagggcgccaagaagaaagtggttgatccattttcgaagaaagannnnnnnnnnnnnnnnnnnnnnnnnatgttcaatattagaaacattgggaaaacactagtcacgaggactcaaggraccaaaattgcatctgmtggcctcaagggtcgtgtgtttgaagtgasccttgctgatctgcagaatgacgaagttgcatttagaaaattcaagctaattactgaggatgttcagggcaaaaactgtctgactaacttccatggcatggatcttacccgggacaagatgtgctccatggtcaaaaaktggcagactatgattgaagcccatgtggatgtcaagacgactgatggttatttgctccgtctgttctgtgttggttttactaaaaaacgcarcaaccagatacgcaagacctcctatgcacagcaccagcakgtccgccagatccgcmagaagatgatggamatcatgacccgagawgkacagacaaatgacttgarrgaagkggttaataagttgattccwgacagcwktggkraagacmtatgaaaggcttgccgcg

SEQ ID NO: 136 - DNA, 763 bp, Cricetulus griseus
ccggcccggacacggacaggattgacagattgatagctctttctcgattccgtgggtggtggtgcatggccgttcttagttggtggagcgatttgtctggttaattccgataacgaacgagactctggcatgctaactagttacgcgacccccgagcgtactatcctgcgctgtgggttcggktgscckrgcwgawrygctttgagcacctgtggcctggccatcaactcatcatgttcctggcscgcctgacttcacagctggtcagggctgttccttgggcaggtttcagtcgttcctggcctgcctctggggtgatcggcagssatgcttttccacccctttacaatttgcagcctgcaagccaaagtcgggctgcctccctccctggtaagggggcccakttggagcttgaggagttcctggtccccaggaagatgtccatcagtccattagagagttggctkactgctcggtatctattgcccakactggatgttggggtcccaatgactgtgattccctcccaaatctamgagtgtccacccagccaggaggaggaagccaagcagggagtcagggaagtctgggatgccactgcagtgcagtgcaaaaatgtgctgaagatccgaagacggaagatgaaccaccacaaataccgcaaactggttaagaggacacgatttcatcggcgtatagtgccggaaggacggctgaaaaagaagcagattaagtttgagaacgatttttaccccatcttgct

SEQ ID NO: 137 - DNA, 584 bp, Cricetulus griseus
tgtgtgacttcaggagtagggcttatggccattggcttatggccctggaagaatatcttgggatgacaggtcctccctccttattctctgtctcctggccaccgtgacatgagtagatttcctctgcccatgtgtctgccatgttataccccttcaccccargctgaaatgtctgagacagtcttttattgatgatgstgctgggaactgaacactggtcawgaagaastgcttttaatggctggaacatcttctccacggctctatcttatagagttcytgaaacagtaatgaaaagctgagtgacaacctatttaraactatttcataactggtaattttgtcagttatcasagtagaataattgcatagaaaaaccctcaasaaaaagtttgytgaataaatatagagtgaatgattatttttataattaaagttacatttgaatttagtatttatcacaacccaatacatgtacttaattagtttcttccattctatctggcttcgtggttaacattcgttgttatgatacttttctcctatttttaataaaatactgtgactgttcatttttatttccg

SEQ ID NO: 138 - DNA, 569 bp, Cricetulus griseus
trcrrgtgctggagcgacggagctggcagggcctggatgaagtggtacggctgctaaactgcagtgagtttgcattcacagacatggstaargaagacaaggcttccagcgagtccctgcgcctcattttggkggkggkcttggggggctgtacattctcagagatatcagccctgcggtttctgggcagagagaaagggtacagattcatctttctgacaacagccattacaaacagygctcgcctsatggaasccatgagtgaggtgwaagcctgaagttttcttggccagtatctgattgtggaccccagtgggatgctggtgtttgacctccacctgctagaagaatccctcagctatacttctcggagctagggactttgaaactaatttgggctttagagaacatgtctgaagagagaattcatgttctgtcccccacgatattattttgtttataaatytagcccatgctgctaagatatgcarggagaggtatcctttgctaaatcctatttgaatattattgtaaataaagcctctgttctcaaatgcaaaaaaaaaaaa

SEQ ID NO: 139 - DNA, 637 bp, Cricetulus griseus
  misc_feature (584)..(598): n is a, c, g, or t
  misc_feature (634)..(634): n is a, c, g, or t
tactttgctgaagttgaacagatggcttttgacccaagcaacatgccccctggcattgagcccagccctgacaaaatgcttcagggtcgcctttttgcttatccggacactcaccgccaccgcctggggcccaactatctccagatacctgtgaactgtccctatcgtgctcgagtggccaactaccagcgggatggccccatgtgcatgcacgacaatcagggtggtgctccaaactactaccccaacagcttcagcgcacctgagcagcagcgctcakccctggagcacaggtcccagtgctccacagatgtgcagcgcttcaacagtgctaatgaagacaacgtcactcargtgcggaatttctatacgaaggtgttaaatgaggaggagaggaaacgcctgtgtgagaacattgctggccacctgaaagatgctcagctgttcattcagaagaaagctgtcaagaatttcactgacgtccaccctgactacggggcccgcatycaggctcttttggammaatataatgccgagaaagcctaagaatgcgattcatacctatacgcaagcgggctctcacnnnnnnnnnnnnnnnaaagctaaccctggaagctcaagggctcaccctggngct

SEQ ID NO: 140 - DNA, 425 bp, Cricetulus griseus
gtcgacccacgcggcggggggktcatacaagacccagggagcagtggccatcatcctcccgccaggagccgcgtcgttcctgcgcacatagactgtacactatgaagaatgcacaggaagacttgatgacttggtacttgttttatttcctctgcgcttcagkaacaagtgttagcaaatgakactttctcctggcctctgcccactggggagcagcatggttgttcttccagtcggaaacgtcctttcttgtgtgccagtgagggtggtgggccaggcccagaactgaagcacatctggggagttggacttcgaggccacacttgtgaaacactcagactgctgttgtaaagcttttttttttttckggggkgykcgttctacagctgtttgaaakgttwaataaasctttataaactttaaaa

SEQ ID NO: 141 - DNA, 593 bp, Cricetulus griseus
atggaagagctacttcaaaatgaggttaatcggcaaggtgttgacatagaagcagctcgaaaagaagaagaaaggataatgcttatagatgcaaggcaatggttaaatagtggtcacatcaatgatgtccggcatgcaaaatctggaggcgccgcgctccacgtggcagctgccaaaggctatacagaagttttaaaacttttaatacaggcaggctatgatgttaatattaaagattatgatggctggacacctcttcatgctgcagctcattggggtaaagaagaagcatgtcgaattttagkggacaatctgtgtgatatggagatggtcaacaaagtgggccaaacagcctttgatgtarcagatgaagacattttargatatctagaagagttgcaaaaaaaacaaaatctgctccatagtgaaaaacgggataagaaatctccactaattgagtcaacagcmaatatggaaaataatcagccacagaagacttttaaaaacaaagagacgctgattattgagccagagaaaaatgcatcccgcatcgagtctctggaacaagaaaaagccgatgaggaggacgaagg

SEQ ID NO: 142 - DNA, 612 bp, Cricetulus griseus
gttgcggacgttttgctcgcgaaccacagcytgcggacatggcgaaccaggtgatcagatgcaaggctgcagtcgcctgggaggccggaaagcctctctccatagaggaagtakaagtggcccctccaaaggctcatgaagttcgaattaagrtyattgccactgccgtctgccacaccgatgcctataccctgagtggagctgatcctgaggggtgtttcccggtgatcttgggacatgaaggtgctggaattgtggaaagtgttggtgaaggggtgactagggtgaaggcaggtgatactgtcatcccgctttacgtcccacaatgtggagaatgcaaattttgtctgaatcctaaaacaaacctttgccagaagataagagtgactcakgggaaagggttaatgcccgatggcacgaccagattcacctgcaaaggaaagcctcttttccatttcatgggaaccascacatytctctgagtacacagttgtggctgacatctctgttgctaaaattgacccttcggcacctttggataaagtatgccttctcggttgtggcgtttcaaccggctatgggtgctgctgtgaacactggcaaggtggagcc

SEQ ID NO: 143 - DNA, 362 bp, Cricetulus griseus
  misc_feature (308)..(308): n is a, c, g, or t
gaaaaaactggctgggcgaatgcaaggcggcgtatggaaccacakcattgtgtgcttccaaacacatsagggsccccttttccakcacakggggcakarggatgttcacgctctgattttstaacaggcatcttcatgcctacatcacaksacacacacaccctacacacacaggggaccakgacacgctgaagarggactasgcragcacaggktagggcaccagggactcctgtgttgagccatggsctggggcacacatgcagaaacataagacactgkgcctccaatagaggggatagatttanggcattgaagcaggggttcaggagaccctgggtgggaggaaaaaggggggtgtg

SEQ ID NO: 144 - DNA, 585 bp, Cricetulus griseus
cataagatgcttcccaaacttttcacattgtctagctagcaattaagaagacatccaaaatagtgagaagcagatagaaagagatggttagctatgcaagcaatgtgtgtgggagcatctccaaagacaaagaaggaataggggaggagkgsagagaagcccccakaacaagctgtgggcctggacagaaggagatttgggtargaagtggctctgtctgcttctcagcctccgaaatgtttcagccaagctggaagggagttttggtcacaattgcccagtggacagacctctgtctgggcctacatgtsccttgctatgtcctgtccctggctgtaatagtccccacgaaacctggcctgygtatggacatggtagaggargtctatcatgtgccctgcactaagacacctgagcaacarttagtgtgatagccacgttggacatgacaacmgaacggtgacatttcaatragctagcatasctyttctgyctggcscagygtaaggwrcmactcaygatcatgcgkyytcmtgtykctagwggsccacaatgggctttgggggstsactgaakatatctgac

SEQ ID NO: 145 - DNA, 569 bp, Cricetulus griseus
  misc_feature (566)..(566): n is a, c, g, or t
accatattgcgggcaactggatttgatggtggaaataaagctgatcaattagattatgaaaattttcgacatgttgtacataagtggcattacaaactaaccaaggcatcggtgcattgccttgagacaggsgmatatactcatatcaggaatatattgattgtgctaacaaaaatacttccttggtacccaaaagttttgaatctgggtcargcyttggaaagaagagtgaataaaatatgccaagaagaaaaaagagaagaggccagatctatatgcattggctatggggtaacacaattatactttaatgtgatttatgagactagattacagaaggattctgaagatgtgaaaatgttttacaatgttgaagtcttatcttctgctttacttcaggagattatgggagattatgcgatcatgttcccacaggctggtgagagttgtcacttctgattatcaacttccggtctatactggatgatagtttcaaaggccacatataatatttcttgaaatggaaaaatgcaattttgtgcgtagttactatatcttgaggagcnaaa

SEQ ID NO: 146 - DNA, 740 bp, Cricetulus griseus
gtgttcctgggtcggctactgtgtctgattgtcgccacgccggagccatgtttcgaaaccagtatgacaatgatgtcactgtttggagtcctcaaggcaggattcatcaaattgaatatgcaatggaagctgttaaacaaggttcagccacagttggcctwaagtcaaaaacacatgcagtgttggttgcattgaagagggcacagtcggaacttgcagctcaccagaagaaaattctccatgttgacaaccatattggtatctcaattgcgggtctgactgctgatgctagactgttatgtaattttatgcgccaggagtgtttggattccagatttgtatttgacagaccacttcctgtgtctcgtcttgtgtctctaattggaagcaagacccakatcccaacacagcggtatggccggagaccctatggtgttgggctgcttattgctggttatgatgatatgggccctcacattttccaaacctgtccatctgctaactactttgactgtagagctatgtctattggagcccgttctcaatcagctcgtacttacctggagagacatatgtctgaatttatggagtgcaatttagatgagctggttaaacatggtctgcgtgccttgagagaaacactccctgcagagcadgacctgaccacaaagaacgtttccattggaattgttggtaaagacttggagtttacaatctatgatgatgatgatgtgtctcca

SEQ ID NO: 147 - DNA, 579 bp, Cricetulus griseus
tcgtttggctttggacagcgtcgcagagtcgtctgggtccaaccgctgggccgccgaaagcttttgtcagggacctgggcgagaacgaggcccgcgaggttcccgatggtgtccatgactttcaagcggagccgcagcgaccggttctacagcacccggtgctgcggctgttgccatgtccgcaccgggacgatcatcctggggacctggtacatggtggtcaacctattgatggcaattttgctgactgtggaggtgactcatccaaactccatgccagctgtsaacattcagtatgaagtcattggtaattactattcatctgagagaatggctgataatgcctgtgttctttttgccgyctctgytcttatgtttatcatcagctcaatgctggtatatggagcaatttcttatcaggtgggctggctgattccgttcttctgctaccggctttttgacttcgttctcagttgtctggaggccatcatctctgtcacatacttgccaagaatcaaagagtctttggatcacttacctgatttcccctacaaagatgaccctcctgggcttgggact

SEQ ID NO: 148 - DNA, 507 bp, Cricetulus griseus
  misc_feature (51)..(63): n is a, c, g, or t
  misc_feature (66)..(88): n is a, c, g, or t
catgtatagtgtctgaagacaagggatccgaagatgcttgagtagccgggnnnnnnnnnnnnnatnnnnnnnnnnnnnnnnnnnnnnnagcagaggccagtgtggtctacagatagagtgccaggataggatccaaagctacacaagagaractcttgtctcaagaaacaaacaaaaagaattgaccaatargtcctttagtcttatgttgagacttggattcatagagtactttaaggtyttcagagactttgaagttagattttcttgcttaatattactcagtacatagagagtccttcacttggatcaccttgttattgtcctggtatagtattgagtgagtgttactttctaggtcttgactaggggatgccaaaatggcagaatatgagcctaggcactcttgccaaatgttaactcacaagcctgctgaaagccccataattatatagctacttttattagatcaattttaatgaggaccaaattactgtaccttactct

SEQ ID NO: 149 - DNA, 621 bp, Cricetulus griseus
  misc_feature (521)..(521): n is a, c, g, or t
aatgctggaatgactggatcaaacaaccttagtgaccctttgctattctattaggagccagcctccagctgaatccccctaccacctctccccctacctccatgatagtctgagcattgtttargccctaaccctgggctttgtctctcagtgaatagaatttatacctattacatatccttcctctctaggccctagccctaaattctgtttgtcagtcagtagaactcattcatattgtaaaggtcacaggtgctttactacttggcaagggaatttcaatgtagctagccctgaaactttgttttgagaattgtcatgcggagactttccccaaagttctactatgtttaaatgtgtggaaatattaaaacacagcatcagattctagaagtcttaatccaagtctgaccaagcccgatgcacagagttttcattctgtctttccttggtccactttcctagcatacctacaggaatgcctcaacagatgtcagcaattttagaagagttttggccgnttgtatttctgtttaatattcaagaactggggacatactgtggatgtagtagagtataaaacttggaaaacacaggtgttgaaagaaaaataagtatctt

SEQ ID NO: 150 - DNA, 320 bp, Cricetulus griseus
  misc_feature (99)..(120): n is a, c, g, or t
aattcaaccagtgtcacatcgtscacagcaaccgtggtgtcctaactaccgtctttttgctaggacttaaactgacttgaatgcagcaaaaagttgacnnnnnnnnnnnnnnnnnnnnnnggcaaggataaaatgaacaatcttttgtggtttcttgggaaaacttttcataccaggtgatcaattcagaaccccattattacctgcaagtgctgatgtgatgtgcagaasccacagtaaaacgaaaaacatccaaatgtacaaaccgtyggaaatcaargktttcagctctmtctctctctctctctctctctctatct

SEQ ID NO: 151 - DNA, 588 bp, Cricetulus griseus
tcgacccacgcgtgccgctggagatatccaraagcttcaagacaaggccactgttctaaccacggagcgtaagaagagaggaaagactgtgcctgaggagctggtcgaaacccgaagagctcakcaagtaccggcaggtggcatcccatgtggggctacacagtgctagcattcctgggatccttgctctggacctctgtscttcggacaccaacaagattctcactggtggggcagataaaaacgttgttgtctttgataagagtactgagcaaatcctggccactcttaaaggccataccaagaaggtcaccagcgtggtgtttcatccttctcaggaactggwgytttctgcatccccasatgcgactatcakgatttggtcggtcccaaacacctcctgtgtacaggttgttcsascccatgagagtgcagtgacaggcctcagcctccatgctactggagactatctcctgagttcctctgatgatcagtactgggccttctctgacatccagacagggcgcgtgctcaccaaggtgacagatgagacttccggctgctctcttacctgtgcacagttccatc

SEQ ID NO: 152 - DNA, 700 bp, Cricetulus griseus
aaggaggccatagtgcatttctctgcccttgacagcctttcgcgtcagcatggctgctctggcggctctgcgcggcggcgtccgccggcctctgcttcgagggctgctgcaggaagtaagatgcctggatcgaagttatgcatccaaacccactttgaatgaagtagttatagtaagtggtgtaagaactcccattggatccttcatgggcagccttgcctctcagccagccactaagcttggatctattgcaattcaaggagccattgaaaaggcagggatcccaaaagaagaagtaaaggaagtctacatggggaatgtcatccaagggggtgaaggacaggcccctacacggcaagcagcattgggtgcaggtttaccaatttccactccgtgtaccacggtaaacaaagtttgtgcttcaggaatgaaagccatcatgatggcttctcaaaatctcatgtgtggacatcasgatgtgatggtggcaggtgggatggagagcatgtcaaacgtcccgtatgtaatgagcagaggagcaacaccgtrtggtgggataaaacttgaagacctgattgtaaaagatgggctgactgatgtctacaataaaattcatatgggtaactgtgctgagaatactgcaaagaagctgagtattgcccgaggtgagcaggacacttatgccatcagctcttacagc

SEQ ID NO: 153 - DNA, 580 bp, Cricetulus griseus
ccgtgtggcagcggttcctcctggtgattctattgctccttcttggctgctcgttgtcgcgttctccatctcaccatgctgtctctagattttctagatgatgtgcggcggatgaacaagaggcagctatactaccaagttttaaactttggaatgattgtctcctcagcactaatgatctggaaggggctgatggtgataaccggaagtgagagtccaattgtagtggtgctcagtggcagcatggagcctgcgtttcacagaggagacctccttttcctcacgaaccgagttgaagatcccatacgagtgggggaaatcgttgttttcaggatagaaggaagagagattcctatagtgcatcgagtcttgaagatccatgaaaagcaaaatgggcatatcaagtttttaaccaaaggagataataatgccsttgatgaccgaggcctctataaacaargacaacmttggctasagaagamagatgttgtarggagagcgaggggatttgytccttatattggaattgtgacaatcctcatgaatgactatccywaatytaagyatgcagtactgkttt

SEQ ID NO: 154 - DNA, 703 bp, Cricetulus griseus
  misc_feature (14)..(34): n is a, c, g, or t
tactcatgaacccnnnnnnnnnnnnnnnnnnnnnaagcatttttgcaggattcatcatctcacacaacattccaatctcctctattcaagtaataaccataccatgatatataaaaaccaccgcaatcctagttactattattggtctttcaattgcactagaactaaacaacctaacttataaccttaaactaaatcttcaatcaccacaaaacctattctcaacctctttaggatattttacacttatcatacaccgtttactaccaataaaatatctaacaataagctttaatacagccatagctacacttgatctgacatgattggaaaaagcaatcccaaaaactatctcactatctaattacaaagcatcacaagctatcacaaaccaaaaaggcctcattaaactatactttatatccttcttaatctccctagtatcaatcccaattttattatttaatttccacgagtaatctcaataataataaacacacccataagtwaagttcacccagaaacaaccattaatcaagctgagcagctatataatgctgctacaccagctccaccctcacctatcaaccccagttcatcaccatcataaatcactcatcctcccatatcattaaaattcaaaattaactctacaccctcataatatttagtaacaaacgtcatacctaactctataaaaaaa

SEQ ID NO: 155 - DNA, 578 bp, Cricetulus griseus
  misc_feature (509)..(509): n is a, c, g, or t
aaagcgaagaaggaagctcctgcccctcccaaagccgaagccaaagcgaaggccttgaaagccaagaaggcagtgctgaaaggcgtccacagccacaaaaagaagaagatccgcacgtcacccaccttccggcggcccaagaccctgcggctccggaggcagcccaaatacccgcgaaagagcgcgcccaggagaaacaagcttgaccactatgccattatcaaattccccctgaccactgagtcagccatgaagaagatagaagacaacaacacacttgtgttcattgtggacgtcaaggccaacaagcaccagatcaaacaggctgtgaagaagctctatgacattgatgtggccaaagtcaacaccctcataaggcctgacggagagaagaaggcatacgttcgcttggctcctgattatgatgctctggatgttgccaacaaaattgggatcatctaaactgaatccagctggctaattccaaatatactctttttcaccmtwtnaaaaaagaaaaaaaaatataataaaagggggggccccccccgggggggacccccactttggtccctttt

SEQ ID NO: 156 - DNA, 580 bp, Cricetulus griseus
  misc_feature (519)..(519): n is a, c, g, or t
  misc_feature (535)..(535): n is a, c, g, or t
ccttgtggactgggagaacagcaatttgcagaggttaggctgggaaggtgtgggaggaaggtctgaagaaagtgtctgagagaaagacccaggtccaggtgatgctcaaaatgttacagagttcattctgagtcacaaacacctggcaaggtgtgcagggaggatcttcatcagtgaggggaaacggatctttccagaaagctcacacttctccaacacatgtctaggtatttgaagagtctcaatagctgtwgactaatggggtctgtgggctttcttaacgtctggggttttttcttggctcacaggtgagctcccaaaakccagcccctcctgaccccarcccctgttgtcttcacatgggcttgcttgggctcatgacctttccarcctcttcarcaktgggttggcwsacsgctggagaggygatactgactcactgaaagagtagactgccagtgctttgggacagtcccacacacactgaatcgaacgttcaaggtagcgagcatgacgcanaatgcaggctcctcantggagagcgtcctgtgcacctgccgtcaccctggaaatgacgtgt

SEQ ID NO: 157 - DNA, 570 bp, Cricetulus griseus
gcgtctgaagggagccttcaaagccgtgatgatggccataaagcagctgagcagtgaggagctagagcagttccagaaaatgggagtattgttgtggaaggccatgaattgcacgaagaagatattcgcctcatgtactcctttgaccaggccacaggagggactgcacagtttgaggcgcactctgatgctcaggctttagttctcttagacgtcacacctgaccagtcaatggtggatgaaggcatggctcgggaagtcatcaatcgtatccagaaacttcgaaagaagtgcaatctggttccaacggatgaaataacagtttawtataatgcaaaatctgaaggaagatacttgaataatgtcattgaaagccacaccgacttcatatttgccactgtcaaagctcccttgaaagcatacccagttcctacatcagataatatccttattcaggagcaaacacagttaaaggggtcggaactggaactcacactcaccaggggatcctgtgtgcctggtcctgcttgtgcttatgtgaaccttaacatctgtgcaaacggcattgag

SEQ ID NO: 158 - DNA, 579 bp, Cricetulus griseus
  misc_feature (237)..(251): n is a, c, g, or t
  misc_feature (464)..(476): n is a, c, g, or t
  misc_feature (478)..(495): n is a, c, g, or t
  misc_feature (522)..(541): n is a, c, g, or t
tgagagccaccagccaaggcggggacttgatgtctgacctctttaacaagcttgtcatgaggcgcaaaggaatctctggaaaaggacccggttctggcactagtgagggacctgcgggagccttcacgcggatgtcagactccatcccacccctgccacccccacagcagcccgcgggcgacgaggatgacgatgactgggagtcctgagtgtgctctgacccctctcccacattcnnnnnnnnnnnnnnngaggggcttctcagccagctgaggcctttcargtcctgctgcccatgcaggtccagggggtgatacaagtgttaggggtctgtgcccaatctcttcatggagtggggactgtgcgagccgcctgctgcttccctgcttcacaccactgcttgactccctcctcccctgaagagcaacagcagcaagaaggaataaagaaagtaactagggccnnnnnnnnnnnnngnnnnnnnnnnnnnnnnnncaacagggcccttttagtaaatgaaannnnnnnnnnnnnnnnnnnncccccaccggggaggacctccattttttgtccccttta

SEQ ID NO: 159 - DNA, 696 bp, Cricetulus griseus
cgatttgaagtctccccagatggatccttcttgctcataagtggcattgctgggttttctcatttgctatcaatgaagaccaaagaactgattggtagcatgaagattaatggaagaatttcagcatccacattctcttccgatagtaagcggatatatacgtcttctgggaatggagaagtttatgtgtgggatgtgaattcaaggaagtgcattaacagattttttgatgaaggcagtttgtatggattaagcattgctacgtcaaagaatgggcagtatgtggcttgtggttctaagagtggagtggtaaacatatacagtcaagattcttgcctccaacaaacaaacccaaagccaataaaagctataatgaacctggtcactggtgttacttccttggcattcaatcccactacagaaatattggcagtggcttcaagaaaaatgaaagaagctgtcagattggttcatcttccttcctgtacagtattttctaactttccagtttttaaaaagagtactgtttctcgtgttcaaaccatggatttttctcccagaagtggatacttcgccttggggaatgagcagggcaaggccctgttgtataggttacaccattactcagacttctaaagatgtttttcttgaaattcaattgaacccatgtcagtacatcttccccagaattttcaa

SEQ ID NO: 160 - DNA, 587 bp, Cricetulus griseus
gcgaaaaaarrgagagaaaacatatcagctaccatactttgcttcctaatcactactatgtttgagtaaaggcagtgtttcttattcattttattttttattgttcatacaatatagaagcatttaagagagtgatttttatttataattcatatggtttatgtcaaatgttacaaagtagaactttatatagctgtcactggttcttgagtatttttacttacaatgtttttttggtaatgaaaatctgtgttaattttcatttggaaactaaagcaattcataatttttgtgggatcttgtaaagtgttcagttatttcttgtgctccttttctggtttcctttcttattaactatggactccttatttgcatttctaggtcctgggggtttgggaggatcaktgcattatgccacaatggctaggtctgctgtgagacctgcaagccttaacttaaatcgttctcgaagccttagcawcagtaatccagatatatctggcactcccacatcaccagatgatgaagttcggtcaatcattggcagtaaggtaaactgaagacatgactatccwtttwtaacagtg

SEQ ID NO: 161 - DNA, 580 bp, Cricetulus griseus
  misc_feature (167)..(184): n is a, c, g, or t
ggctcggaggaggccacggtgcaactctcttcggtcgtcccggatccgggttcatccgacaccagccgcctccaccatgccgcccaagttcgaccccaacgagatcaaagtcgtgtacttgaggtgcaccggaggtgaggtcggcgccacgtccgccttggcccccnnnnnnnnnnnnnnnnnnctgtctccaaagaaagttggtgatgacattgccaaggcaaccggtgactggaaaggtctgaggattacagtgaaactgaccatccagaacagacaggcccagattgaggtggtgccctctgcctccgccctgatcattaaagccctcaaggagccgccaagagacaggaagaagcagaagaacattaagcatagtggaaatatcactttcgatgagattgtcggcattgcccgtcagatgaggcaccggtctttagccagagaactttctggaactattaaagagatcttgggcactgcacagtctgtgggctgtaatgtggatggccgccaccctcatgacatcattgatgacatcaacagtggtgtagtggaatgcccagctagttaagaagca

SEQ ID NO: 162 - DNA, 583 bp, Cricetulus griseus
gaggtggagaagctgggtgtggggtgcacggagccggtggggaagccgagctgcagcgagcgtarggtcggatcggactggggttgcggycgarggccagcccggagcccgcakgagakgatyccgactgtgagacccgccttscsggscccggcccctcccagctcccccagcgacggctgcttcctggtccccgacgcakscatggccgaagaacaacctcaggtcgaactgttmgtgaaggctggcrgtgatggggccaakattgggaactgccccttctcccabaggctgttcatggtgctctggctcaagggagtcaccttmwacgtcaccaccgtggacaccaawagacggacagagacagttcagaaactttgcccgggtggacaactcccattcctgctgtacggcaccgargtrcacacagacaccaacwagatcgaagaattcctggaagctgtgctgtgccctcccaggtacccaaagctggctgctctgaaccctgagtccaatacctcakggctggacatatktgccaagttttcggcctacatcaagaactcaaacccakcactcartg

SEQ ID NO: 163 - DNA, 579 bp, Cricetulus griseus
  misc_feature (183)..(201): n is a, c, g, or t
  misc_feature (342)..(372): n is a, c, g, or t
awggggaatactggagactgctagagatcttttgcagtgtctgtggacctttcgagagtgaattattctcataatcagagccctgctttaatggagtaccttcaagggagggtcttcaacctcttgttaggtcctgtctcatcaagctgtgatgtcttcgttcctagatctctctggactggnnnnnnnnnnnnnnnnnnngggccaggaggacatctgaaagcttggaagcctgggagtgagttagatgcctttgggctattgtttggttgacagtggtaaagtcttccattagccctggcctaatgctttatgaaagagccaacggtggctgaaggtggnnnnnnnnnnnnnnnnnnnnnnnnnnnnnnngattcatacactgagtcatgggcttcacaggaaacagcaagggtaatgaacatgctcccatcacagtcctgtctgaatttatgttatcgtgtctggagggtgttcawggggtatacctggatcttgttgaaaatataagccatctatggtttctaatttggatggktttgttataaaggagctcagagygctcatttgaaagaattc

SEQ ID NO: 164 - DNA, 584 bp, Cricetulus griseus
  misc_feature (343)..(362): n is a, c, g, or t
tgcatttctgtcgcgctggtccggcggctctgagttttgaaggtgacagcgggacgtgacccgcctgggtcccgcgatgctagcggcacggcagcttctcggtggatcgcttcccgtgcgggtatttgtgcgtttcagcagcggcacgacagcacctaagaaaacctcatttggttcgctgaaggatgaagaccggatcttcaccaacctgtatggccgccatgactggaggctgaaaggtgcccagagtcggggtgactggtacaagacaaaggagatactgctgaaagggcctgactggatcttgggtgagatcaargcatctggtttacggggccgtggnnnnnnnnnnnnnnnnnnnngcctcaaatggagcttcatgaataaaccctcagatggcaggcccaagtatctggtggtgaatgctgacgagggggagccaggaacttgtaaggaccgagagatcatgcgccatgaccctcataasctggtggagggctgcctggtaggargccgggccatgggtgcccgggctgcctacatctacatccgaggagaatwytacaatgaagscctccaatctg

SEQ ID NO: 165 - DNA, 578 bp, Cricetulus griseus
gtgtctttgtattttgatactaagaggtaccaggaagcgttacatttgggttctcagctgctgcgggagttaaaaaagatggatgataaagcccttttggtggragtacagcttttagaaagcaaaacataccatgctttgagtratckgccgaaagcccgagctgccttaacctytgctcgaaccacagccaatgccatctactgcccccytaaattgcaggctaccttggacatgcagtcaggtattattcatgcagcagaagagaaggactggaaaactgcttactcatacttctacgaggcatttgaaggctatgactctattgatagccccaaggctatcacatctctgaagtacatgttgttgtgcaaaatcatgctcaacaccccataagatgtccaggctttggtgagtggaaagcttgcacttcgatatgcagggagacagacagaagcattgaaatgtgtggctcaagctagcaaaaacagatcactggcagattttgaaaaggccctgacagactaccgggcagagctccgggatgacccaatcatcaacacacacttggctaagtt

SEQ ID NO: 166 - DNA, 896 bp, Cricetulus griseus
tgattttgtcaatgcaaaaaaactcaacatcaaaaacagaggattgaaagagggcatgaacccaagctatgatgattatgctgactctgatgaagaccagcatgatgcctatttggagaggatgaaggaggagggcaagatccgggaggagaatgccaatgacagcagtgatgactcaggagaagaaactgatgagtccttcaaccctggtgaagaggaagacgatgtggcagaggagtttgacagcaatgcctctgccagctcctccagtaatgagggggacagtgaccgataagagmagaagcggaaacagctcaaaagggccaagatggccaargatcgcaagagccgcawgaagtcttcadaggcgaagaarggtaaagatscaaatgcccctaagakgcctatgtctgcatacatgttgtggcttaatgccmrccragagaagatcaagtsakaccatsctggsrtsarcmtcacagatctttctwagaargcaggcgagatctggaagggaatgtcccaagagaagaaagaggagtgggacccaaaggctgaggatgccaggagggaatatgaaaaagccctgaaagaatatgaaggaggaagaggtgaatcttctaaaagggacaagtctaagaagaaaaagaaagtaaaagcaaagatggaaaaaaaatccactccctctaggagttcatcatccaagtcttcatcaaggcagctaagtgagagcttcaagagcaaagaatttgtgtccagtgatgagagctcttcatgagagaacaagagcaaaaagaagatgaggcggagcgaggactctgaagaagaggaactagccagcactcctccaagctcagaggactctgcctcaggatctgatgagtagaggaagaaaa

SEQ ID NO: 167 - DNA, 580 bp, Cricetulus griseus
ctgcasttctcctgctaccggwccttgaagcaagtctacractgggycatacctccaagatggaaagcaaacagggaacctgaaaaacctgctctgtggatgtgggttctggagtcatcakcwagaccctcacatatcccctggaccksttcaaraarcgtytgcargtgggagggtttgagcgtgcccgatccgcctttggcgargwgcgtarctacargggcctcctggacctcaccaakcaggtgctacaagatgaakgcacccakggcctcttcaagggcctgtcccccarcctgctgaargcggscctctmcaccggcttcatgttcttctggtacgagctcttctgtaacctcttccactgcataaggagtgaakacagatagctgtgakcatgggaggggcctwcagtccacactggaggcgcctstsctgaccasacttgttctgcgcgcatactgrgcgatkgctgctgcctggttgacctargccrgctgtcctgggcatgaakagwtatccacagccgatggcagaakggcaagggccttttctgaraagaacakasawrggasagctt

SEQ ID NO: 168 - DNA, 579 bp, Cricetulus griseus
atggctctcaacttgtgatgtcaagatacgagggcttttgaggaggtgtttttgttgggtttttgcttttcgttttttctttttggttatggtgctatttctgacatttaactttgaatatgtgacacactcctaagtaccagkaaggataagtaataaatgatagttgaaatgtttacactgagcactakgtgtttgggacgcgcakggatttaacgcacagatgtactttaatgcttadgaccagtctgtccttttgagcakttggaaggtgaatgtgagctggtccarcagtccgtgctctggcttctttctgtakcacttgaagtgtgtagyggcatatatgcaaaagtagcccctcccctcakttctgtatgtsakagtcctatgactttattcacttavgaatttttaaagaagtttgaagtatttargyttgatttttttttttttacttcttttgaaagattattatcatcaaacatattaagaaagatttaaaaggatccccccccatatcttattttaaaaaggggtcctggcaatgtctagtaatttttgattacaagaaaaggatca

SEQ ID NO: 169 - DNA, 579 bp, Cricetulus griseus
tgtgctcccagcctccctgagacagagtcccacatgcacacacacactttctggcaagtgccatagtgatgggaaattattttcatggggattttattgtttttcccttttgataggttgcagatatttttttatttaaaaatacaattttaataaaatgtgaggtttacaatgagcttctaacacctttttttaagccgaggtctttctattgcttttcaagtgctgtccatgatattgctggtattgggcatgaatctatagaacgataaaactttaaagaagtatgtactgaatgaattttaattttgaaaaaaatcagtataaatttaaagaattatgctaacatggcataattttaatgaaatataagagggatgtagttaagtccttttatactgtctgaattaatgccagtcatcatcttagatattcatagtacctattgcttattggcttaatggaatacgtcagtgttaacctgtgctttgtagacctttctctgacagtggtgaagagggatagagattataacatcactggcacaaacatgaacccactgtagaargaarggactyt

SEQ ID NO: 170 - DNA, 579 bp, Cricetulus griseus
aatcacttataaatsgcgcccaagcaaskacccgaagcccaaattccargagggtgagagagtgctgtgctttcatgggcctcttctctatgaagcaaagtgtgtaaaggttgccataaaggacaaacaastgaaatactttatscattacagtggctggaataaaaattgggatgaatgggytccasaaagccgagtcctcaaatatgtggacaccaatttgcagaamcakcgagagcttcaaaaggccaatcaggaacagtatgcagagggcaagatgakaggggctgctccgggaaagaagacatctggtctgcaacagaaaaatgttgaagtgaaaacaaawawgaccaakcakaaaacacccggaaatggagatggyggcagtaccagtgagacacctcakcctcctakgaagaaaagagcccgggtagatccaactgttgaaaatgaagaaacattcatgaacagagttgaagttaaagtaaagatcccggaagaattgaaaccatggcttgtggatgactgggacttgatcaccagacaaaaacagcttttttatctwyctgccmasaaraa

SEQ ID NO: 171 - DNA, 579 bp, Cricetulus griseus
  misc_feature (89)..(103): n is a, c, g, or t
agtagaggtacttgccaccaagcccgatgacctgagttccagtccctggacctacttggcagaaggagagagctaggttttccaagttnnnnnnnnnnnnnnncatcaataagcaaataacaagggtaattaaaagaattttaatggcaatgtaaattaaaaagaaaagtattaagctgttttgaccttgggaaacatttttttccactttcctaaggtgtgcttcccttttttgctccattaattatctcagcctcattcgtgatctgtgtagggttattgtgactgtggagaatgtattcacggccattgatgactaagtctacctactcagctctctgtgactgaggtgcctgtcatccagggaagaagctcagtgagactaccctctgcttacttaagatctctcctctgacatacctaatggcagcatccttaggtttatttaaagttcttaatgccaacagttttaaagaaatcacatgagctgtacaatgtagccagaccttgaatgtgcaaataggagactatagtacgttctcaagacgttttgctcctcgaagccctatcagttgtaaa

SEQ ID NO: 172 - DNA, 579 bp, Cricetulus griseus
tggaatgtggggacaaacttgtttgaagtgatgcccagccagtgaacaagcaagacctaaaagaaattcaacaaaatgagatgggagtagactggattctaagttggaaaggatgacagtgccaagtcacagatggaaagggttgctctaaggaaacctacttggttgcccccacatcctatacatgtaccacacatttctcagcttgaagtactgtattgtagaaaacagacccacttctgactttctaggcattgtaggaaaatgcttatttcctttcctacccctttcttctacaatgtccaaatggttgcacagtcagaatctgtgtgccacctgtacttctatattagaactaatactyttaacatttmcatacccatatscccacataattgyaaccaaccagtattatctagtgctgcgtctakttatkaatgggaagttttctgtcaatactgacctaatwggctgtttgggatttgaatactctgagaaagtggagagagasamatakaaktsctcgtttcttgggtgcttcctccttgaccttgtgttgggaactgccacattttcaac

SEQ ID NO: 173 - DNA, 579 bp, Cricetulus griseus
tatgtcacaggagactttaatccttcagattcttgtatacctttgaataaatggttaatgttcacttaaaaagacagattttggagattgtattcatatctatttgcatttgatttctargtcaattgatgtgattatttttgttaaatgttgtcttgtgcccttaactacgagctgaattgtattaaacactacaaagtcatggtgagtattttaaatcagtttgtgtagttaggtttcccaacacctgtggttacctaatgtttaatattataggactgtcctcatacagtttgtcaattttcaaggatataaagaaagacagaaggactctttgaattctgtatttatcatttgctttctgtatatatagtttaataacctgcttgggtgtgatttgccaagcttgaagtctaatgcatttgcataaattctacactgtccggagcttgaagctacagaagcattgttaggaattgcttggacactgacttctaaactytttgacatcgktaatgagcatgttcatcttttcttgtcactagtccaagaaaaataagcttgtgtattactaaaggc

SEQ ID NO: 174 - DNA, 580 bp, Cricetulus griseus
cagtttcctgacaagcagtgtgccaccagttaccgctgatagcaccacgaaagttccttakgccaaagggacagtagtgtttaagggcactaagactggcttgtggaacaaagggacagtagtgtttaagggcactaagactggcttgtggaaatgaacagcaaaagccttctacaacttagcccttgtctaataaatgcatgccagcttccctctgttgtccatcatggcagtaaggtagagaaccatggacagaatttattgaaattggaaggggaggagaggggagttgccagatagtttttaggtttcatgtaatcttcctggattttttttgcctccttctttagtcagccctttaaggctcacggggctctgagcaaaaagtagcagtatttccaactgagggattttagtcatgggtggagcaaccgcttattgtgtgtgagaccctgttagcatattctgagcactagcatctcaaaaaataaaatwggttctactcttaarggagagcacagggaacataatattatcctgctgtttcacacattttattttcttgtscagacttaccacc

SEQ ID NO: 175 - DNA, 533 bp, Cricetulus griseus
catgtcgcaagatcaaggtgaaaaggagaaccccatgcgggaacttcgcatccgcaagctctgcctcaatatctgtgttggggagagcggagataggctgaccagggcggccaargtgttggagcagctcacgggccagacaccggtgttttccaaagccagatacaccgtcaggtcctttggcatcaggagaaatgaaaagattgccgtccactgcactgtccgtggagccaaggcagaagaaattctggagaaaggtctgaaggtgcgggagtatgaattacggaaaaataacttctcagacaccggaaactttggctttgggattcawgaacacattgatctgggcatcaagtatgacccgagcattgggatctatggcctggacttctatgtggtgctgggtargccaagtttcakcatcgcagacaagaagcgcawgacaggctgcattggggccaaacacagaatcagcaaagaggaggccatgcgctggttccagcagaagtatgatgggatcatccttcctggca

SEQ ID NO: 176 - DNA, 579 bp, Cricetulus griseus
gtgggcgtcttcccctcgctgcacgtggtcaaggtgctgctggactgcggggccgaccccgacagccgggacttcgacaacaacactccgctgcacatcgctgcccaaaacaactgcccggccatcatggatgcgctaatcgragcaggggcccacatggatgccaccaatgccttcaagaagacagcctatgagctgctggacacaaagctactggccaagagcaccgtgcagcccttcaactatgtgacgctgcagtgcctggccgcccgcgccctggacaggaacaaggtcccttataagggattcatcccakaggagctggaggccttcatccagctgcactgagcccggcccagacacctgcgtgcactttagcctactccaagcgaaagcaccctgtcctcttgggctgcaggcagtgagggtcattggagtgggccccgctgttggttctagaagccttcaaggtcacgtggtaggaagatggcctttctctgtgacaaagcaaaagagtgccaggacctccccagtggcgtctgtctgggtctggagtcctgtgcccacgacacacgtgga

SEQ ID NO: 177 - DNA, 580 bp, Cricetulus griseus
gccccttcaggagaggtgttttcgaactctgcatcttgtgaactgacaggttctggatcttgcaacagcatgctgaaactgggtaataaatctcctaatggaataagtgattatccaaagatcagagtgacagtaacccgagatcagscacgtagagtcctgccttcatttggaggctataatagaagaccaagtggccgtcgacatagcaaaagcaatccagagagttccttaacatggaaacctcaggagcagggtgtaacagagatgatttctgaagasagtggcaagggtgtgaggcgtccccattgcactgtggaggagggtgtccaaaaggatgaaagagaaaaataccgaaagttattggaacgacttaaagaaggtggkcatggaaacactctccctgctgtatcttcacatcatagttctcagagaagccagatggacacattaaagaccaaaggctgggtggaagagcakastcacggaatcagaacagcccattttgttccaaaacagtacagagtcgttgaaacaargggacctctctgttcagtgagaagtgagaakaggtactcat

SEQ ID NO: 178 - DNA, 633 bp, Cricetulus griseus
agatctggcacgttgacttatgaagcggttcaccaaacaacccaagttggcctggggcaatctttgtgcattggcattggaggtgacccatttaatgggacaaattttattgattgccttgaagtcttcctgaatgatccagccacagaaggcatcgtactgattggtgaaattggtggtaatgctgaagaagacgcctctgagttcctgaaggaacataattctggtccaaatgccaagcccgtagtgtcgwtcattgctkgygtaactgctcctcctggcagaaggatgggccatgcaggggcaattattgctggaggaaaaggtggtgctaaagagaagatctctgcccttcawagtgcgggggttgttgtcagcatgtcccccgcacagctgggatccaccatatataaggagtttgaaaagaggaagatgctgtgaaggacacaacatgaagctcttcaaggctgtggaagaactctcgtggactgagagtcagtccagaktgtcagctcacacatctgacactggtctctcagttcatcggaagcccaggcaaattttagaatgtcctaaattgagctattttcacttactgtgtaacagagacagataataaatctatcatttgat

SEQ ID NO: 179 - DNA, 589 bp, Cricetulus griseus
  misc_feature (109)..(109): n is a, c, g, or t
cctggcacaaggttcatctataccgaatcacctgatgggggctgaggtaggaagatccagggacaggaactgttccttgacacaggcttcacctgtaagaattctccanaaaggctgtgtgggtggtaaagtccagggaaggaggaattccttgaaacatggaagagctaaccagaagggttctaacagtgggagagttggrgaaattagtacttcttcaaaacacgctccctatataaaaattcgcccgaagccctgggaaagagggaaagacagggaaatcaacactccaattaaatacagtccccatgtgaaaggttaccagagggatccccagggggccactgcaaggaaaaccaacaattgcgacagagacaccagccagcaagctcggcagatagtttttataaaaattcacaaggggagccaagtttgccgctgcagtgaatgtggtaaactgttccagaatgctaggtatttctctgtccataaaaagatccacacgggagagaagccttacatgtgtctgacctgtggtaaagcttttgttcagagctcctccctcacccagcactatagaattcacagt

SEQ ID NO: 180 - DNA, 593 bp, Cricetulus griseus
  misc_feature (3)..(11): n is a, c, g, or t
  misc_feature (30)..(51): n is a, c, g, or t
ccnnnnnnnnnggagaaaaaagacccgatnnnnnnnnnnnnnnnnnnnnnnttgacttttttgaagacattgattcagatgaagatgagggagggctgtttggacgtcagaagattaagtcaagcaaaagttccaggaatctgaaatacaaagatttcttcaatccagttgaaagtgatgatgacatcgctagtgtcgtttatgatgacttadgttctaacaaagaggaagaatttgctgargaagcagaagaaagcatttctgaaatggatgaagataacgacctggaakaaagtgagggtggcgagcaacttaaagaargctcgaaaagagtaaccttcgctttgccagaggatgaggctgaagacacgagtcccttagctgtaaagcaagaatctgatgaagttaaatcctcttttgaaaagagacaggagaagatgaatgagaaaattgcatctttggaaaaagaattgttggagaaaaagccttggcagcttcaaggggaagtgacagcacasaagcggccagaaaacagcctgctggaagagacactccactttgaccatgctgtcagaatggcacctgtaatcaca

SEQ ID NO: 181 - DNA, 579 bp, Cricetulus griseus
aggccgtgaacccgggaagtgcttctctctgtagaccccgctgcctcacgcttcccgccgccatggagtacctcatcggcatccarggccccsactatgtcctcgtcgcctccgatcgggtggccsccagcaatattgtccakatraaggacratcakgrsrrgrkgkttaagatgagkgaaaaaatcttactcctatgtgttggagargctgraracactgkacagkkkgcaragtatatccasaagaacgtgcagctttataagatgcggaatggatacsaattgkcccccacagcagcagctaatttcacacgkcgaaacctggctgactgtctacggagtcggaccccatatcatgkgaacctcctcctggctggstatgatgagcatgaagggcsmscactttactatatggactacctggcagccttggccaaggctccttttgcagctcatggctatggtgccttcctgactctcagtatccttgaccgatactacacaccaactatctcacgtgagagggcactggagcttctcaggaagtgtctggatgagctccagaagcgcttcatct

SEQ ID NO: 182 - DNA, 620 bp, Cricetulus griseus
cgctagaggcaccgtgcggtggggtgtgctggcggctggcggagtgagactttggcagacatggctcccagctcgctggctcccgaacccgagagtcggaagggtatccgggcggtgctgctggggccgcccggggctggcaaggggacccaggcacccagattggctgaaaacttctgtgtctgccatttggccactggggacatgctgagagccatggtagcttcaggttctgagctggggaaaaagctgawggccacgatggatgctgggaaactggtgagtgatgaaatggtcgtggagctcattgagaagaatttggagagtccttcatgcagaaacggctttcttctagatggcttccctcggactgtgaggcaggctgaaatgcttgatgacctcatggagaagaggaaagagaagcttgattcggtgattgaattcagcattccagactccctgctgatccggaggatcactggaaggttgattcaccccaatagtggccggtcgtaccatgaggagttcaaccctccaaaggagcccatgaaggatgacatcactggagagcccctgatccgaagatcagatgacattgagaaggccttgaagatccgcct

SEQ ID NO: 183 - DNA, 722 bp, Cricetulus griseus
gctatgcacagatcctgagggatgtgggaggcattgttttggccaatgcctgtggcccttgcattggccagtgggacaggaaagacatcaagaagggggagaagaatacaatcgtcacttcctacaacaggaacttggcaggccgcaatgacgcaaaccctgagacccatgcttttgtsacatccccagagattgtcacagccctggccattgcaggaacccttaagttcaacccadaaaycgacttsttgacaggcaaggatggcaagaagttcaagctggaagctccagatgcagatgagcttccccgatcagactttgacccakggcaggacacctaccadcaaccccccaakgacagcagtgggcarygggtakacgtgagccctaycarccagcgcctgcarctcttggagccttttgacaagygggacggcaaagacctggaggacctgcaaatcctcatcaaggtcaaagggaagtgcaccaccgaccacatttctgctgctggcccctggctcaagttccgtggacatctggacaacatctctaatracctgctcattggtgccatcaacattgaaaacggcaaggccaactccgtgcgtaatgctgtcacccaggagtttggccctgtgcctgacactgctcgatactacaagaaacatggcatcaggtgggtggtgattggagacgagaactatggtgaaggctcaagccgg

SEQ ID NO: 184 - DNA, 518 bp, Cricetulus griseus
  misc_feature (173)..(201): n is a, c, g, or t
ggggaggcttcarcttcccttagagcagagacgcgggcgccgccggcctcgcctgttgccgcgggagccgggcgggaggagcacggaaggagccatggctctggacgggataaggatgccagatggctgctacgcggacgggacgkgggaactgagcgtccatgtcacggacnnnnnnnnnnnnnnnnnnnnnnnnnnnnncggggaggtgcacatcggaggggtgatgttgaagttggtggagaaactcgatgtaaaaaaggattggyctgaccatgctctctggtgggaaaagaagagaacgtggctgcttaagacgcactggaccttggataagtatggcatccakgcagatgccaagcttsagttcaccccccagcacaaactgctccggctgcagcttcccaacatgaagtatgtgaargtgaaagtgaatttctctgaccgagtcttcaaagctgtgtctgacatttgcaagactttcaatataagacaccctgaagaactttctctcttaa

SEQ ID NO: 185 - DNA, 535 bp, Cricetulus griseus
  misc_feature (467)..(481): n is a, c, g, or t
tactcacttccttcttctgcctcatgaaacctgtctgtttttaccacattgttacctgcttggttaggtgccttgtctatcttcttgtactgtatgtatctcatgagtcctgccaagataagcactggctggtagcgaattccacagaaacaaatacttttaaagttacactgatttttggttaccgatgtttacatttttaagttatataaccttgggttaattccttaaaggactggagactactcagcttctcatttgtaaaatgaagctgctacttaacttcattggactcttagccccaaacagacctagaacagagtgcaggagtagaaaacagataaaatatggtttacaaatattggttgtaccagaatatttgcttttaagaagtatttctggccattcgtagtgacagacaattttagtcccakcacttgggagggagagatggacagcagttgtcnnnnnnnnnnnnnnnatttacatggtgaattccakgcaagccaggggtacataaggaaactctgtctca

SEQ ID NO: 186 - DNA, 819 bp, Cricetulus griseus
  misc_feature (554)..(579): n is a, c, g, or t
  misc_feature (654)..(675): n is a, c, g, or t
ctcagggctgcggaagggagcagagctgaacggctgggcgggcctggccaggccagcggagcggagacgtcggccgagtggctgcgaacatgcgcttttgacacgttggcggtatgtgtccacatgtgggtatgttcatgagaatgcagtgcccacagaggcaggaggcatctgattccctggagctggagctacagatggttgtgagccaccttatgctttcttgatcatggatggtgaagatataccagacttttcaagtttaaaggaagaaactgcttattggaaggaactttccttgaagtataagcaaagcttccaggaagctcgggatgagctagttgaattccaggaaggaagcagagaattagaagcagagttggaggcacagttagtacaggctgaacaaagaaatagagacctgcaagctgataaccaaagactgaaatatgaagtggaggcattaaaggagaaactagagcatcagtatgcacagagctacaagcaggtctcagtgttagaagatgacttaagtcagacccgggccattaaknnnnnnnnnnnnnnnnnnnnnnnnnngctggagcaggccaatgatgacctggagagagcaaaaagggcaacaatagtttcactggaagattttgaacaaannnnnnnnnnnnnnnnnnnnnnaaatgcatttttagaaagtgaacttgatgaaaaggaatctttgttggtctcagtacaaaggttaaaggatgaagcaagagatttatagcaagagctagcagttcgggaacgacaacaggaagtgacccgcaaatctgctcctag

SEQ ID NO: 187 - DNA, 581 bp, Cricetulus griseus
accgtccctccgcagccctccggcggtcacagtagccgatcgggtcgggtcgcatcgtctcctgcgcgcatcctcggatctgatttaaaccaccaccatgtcgagcaaaaaggccaagaccaagaccaccaagaagcgccctcagsgkgcracatccaatgtgttcgccatgtttgaccagtcccagatccaggagttcaaagaggccttcaacatgatcgaccagaaccgggatggcttcattgacaaggaggacttgcatgacatgctggcttctctaggcaagaatcccaccgacgcctacctggatgccatgatgaatgaggccccaggccccatcaacttcaccatgttcctcaccatgtttggagagaagttgaatggcacakatcccgaggatgtcatcagaaatgccttcgcttgctttgacgaggaagcaacaggcaccatccaggaggattacctgagggagctgctcacaaccatgggcgaccsgttcacakatgaagaagtggatgagctgtacagggaggcgcccattgacaaaaaggggatacttcactacatcgagttcacacgca

SEQ ID NO: 188 - DNA, 750 bp, Cricetulus griseus
  misc_feature (12)..(84): n is a, c, g, or t
atgtgtggaaannnnnnnnnnnnnnnnnnnnnnnnnnnnnnnnnnnnnnnnnnnnnnnnnnnnnnnnnnnnnnnnnnnnnnnnntgcgtttggtccttccctgttttgaccaaatcctaagggggagaaaaccctagtatgccaaaaaataacatgctaagcattaggagattcctaacagtcccttaattaccagacagcctgtgagaggacaaaggctgaccatccacctgtgckgagtagctagctccttctagaagggatagcgtttagaagttgctttggtttgaactgtccccaggatgccacagaagagcagggcacatcttggaggcggctagggcaagttgtgtgcctaccaagatagactcccctakcagctagacaggctgggagtatatgtagctgtcctggatccccttctgttgctagcaggataagtgaccactcagagggagcttaatagttttcttatagtctagctctttgggggacctaccattctgtgccttgagagctgtaggaccaacagactaagatyggatggctytcacaaagagagcagatgagcttyctctacgygggtgggctgtggggacaggactgggaggatcacactcgtaccttatgtcctgtaaattctgattctctattccaagagggtataccggaggtgcggaaactggaggtagcaatattaattcttaagtatgcacctgactttctatccccatagggttcctctgttgc

SEQ ID NO: 189 - DNA, 538 bp, Cricetulus griseus
atcctgtcctttggtttataatctagttgtagagataagaaacatacaaacaacgacaacaaaaaccaaaaaccaaaccctaagattatttggagcatgcattctgtcagatgtgtgccttcagagcatggaggargcaaaggctttgggggctggctacaggagtcagttaaaaacttcagggaggagagagccattgaaagggagtccttattggagtagggaagtcagtgcattccatgagaccagacttgagggtagatgatgtgagaaaggcattaatttaagaacccttatgatagtcaaaacagccttcttatagtggagagtgtggagagtagggttaaatctgtaaaaccgyatgaagcccattgcagaaagcttgttgaatgtatttttaactakgaaagagttggggtcaatataaaagtcctcccacactgtgtcataaagaatggtgtagcataatggctcctttctaactctggtggtgggcatttgacaatacatatcattaagccttaacatatggaaacct

SEQ ID NO: 190 - DNA, 614 bp, Cricetulus griseus
  misc_feature (4)..(33): n is a, c, g, or t
  misc_feature (428)..(448): n is a, c, g, or t
actnnnnnnnnnnnnnnnnnnnnnnnnnnnnnntgtccattattaatcagagagggaaaattggacccttgatgatacaaagctaccaagtggtgaagctgaaactgattaggcgcagccttctaactaataatggactgtgattgctagtaaaaatctcccgcggcatttattaaatggacaattcctgggcagtaactgtggagattctgagtgggtctargatgtagccacggatttatttttagcagataggtgggttttgtaagggaaattcatgaaatgttactattaacagtcatggtggaccttcgcaactatttatatttggttattttatttgtactggtttgctgtttaaaattctttccaggtgtargtggcaaatgcttttaatcccagcactcatgagacagagtcaggcagcnnnnnnnnnnnnnnnnnnnnncttggactacagagcaagtgccaggattggctccaaagctacacatagaaaccctgtcmcaaaacamacawtaaatcagagcatatttcttatgcttttccctataacctgtaagcgccatacataattaacttattgaagcttctgtaacccttacactgggaca

SEQ ID NO: 191 - DNA, 951 bp, Cricetulus griseus
  misc_feature (328)..(353): n is a, c, g, or t
  misc_feature (462)..(481): n is a, c, g, or t
ggagagctgtcggtaggagcttcgccgagtccggggtctgaagctgaccggtctgacgtcccacccttgccgaacccactakaaccgcagccatgtccggggacgagatgatttttgatcctactatgagcwmmrrgaaaaagaagaggaagaagccttttatgttagatgaagaaggtgatgcccakacagaagaaacccagccctcagaaacaaaagaagtggagccagaaccaactgaagacaaagatgtggaagctgatgaagaagacagtaggaaaaaggatgcatctgatgacttggatgacttgaacttctttaatcaaannnnnnnnnnnnnnnnnnnnnnnnnnatatttgacattgatgaagctgaagaaggtgtaaaggatcttaagattgaaagtgatgctccagagccagctgagccagaggatgacctggatattatgcttggcaatnnnnnnnnnnnnnnnnnnnntgtcaaattcccagatgaagatgaaatactagaaaaagacgaagctttagaagatgaagacagcaaaaaagacgatggcatttcattcagtaaccagactgggcctgcttgggcaggctcagaaagagactatacatatgaggagttgctgaaccgagtgttcaacatcatgagagaaaagaatccggatatggttgctggagagaagaggaaatttgttatgaaacctccacaggttgtccgagtaggaaccaagaaaacttcttttgtcaattttacagatatctgtaaactattacatcgtcaacccaaacatctcctcgcatttttattggcagaattgggtacaagtggttctatagatggtaataaccagcttgtaatcaaaggaagattccaacagaaacaaatagaaaatgtcttgagaagatatatcaaggaatacgtcatttgtcacacatgccgatcac

SEQ ID NO: 192 - DNA, 850 bp, Cricetulus griseus
  misc_feature (697)..(711): n is a, c, g, or t
gaaacatcggggccgagttgggatggatgaagatgaggggcctcgggcgcctcgcgcacttcagcccaagaaacctaagaaagcagggggtggcgggggtggcggtgctgctgcgctaggccaccctggctttgggacttctggaggcagtagcaacaagctgcctaaaaaggcccaaaagacagccccacctgtcctgccagctggttatgattcggaggaggaggaagaaagcaggcccatgagttacgatgaaaagaggcagttaagcctggatatcaataagttacccggggagaagctaggtcgagttgtacatatcatccaagccagggagccctctttacgtgattcaaacccagaagaaattgagattgactttgaaacactcaagccatccacacttagggagcttgagcgatacgttttatcctgccttcgaaagaaaccccggaagccctacaccattaagaaacctgtggggaagacaaaggaggagctagccctggagaagaagcgggaactagaaaagcggttgcaagacgtcagtggacagcttaactccaccaaaaaacctcccaagaaagcgaacgagaaaacagagacgtcgtctacgcagcaagtggcagtgtctcggctcatcgcttccagctccagctcagattccagctcctcgtcctcgtcttcatcttcttcnnnnnnnnnnnnnnnggactcgggctaaggggccaggccagatgggaaaggaaggctcggcaggaccggacccctgtaccacccttccccaccacttccccttgctgtgacacttctgcatctcatccctccataggagagctggctctgcagg

SEQ ID NO: 193 - DNA, 572 bp, Cricetulus griseus
  misc_feature (523)..(564): n is a, c, g, or t
aatgctttccakttacacackaactgaaaactgtgtaagatttcctttgtgcactgtgtgctctgtgagagggcctgtcaagcakagcagaraggaggcaaggctgatccasgctgcttctctgcaagctgastcaaagcatgagatacattattccaactcagatgtatttggacactcatcatacatcakacctaatgagatctastakatggatatgtgtggtatgcaaattagaggccttctcatcctctggaaatattasagtasaggasaatgggtaaaaccaaatatgctctaactcaatcagttagacatattcatgaagggaatggtaagtacggscagcttacttagtgtggggcatctcctawgtctgagaactcaagcccatcaattagtcacccacaaaagtaaccagagcattggaagaactgttaataccagagtccttagtaggtagcataaaacattatgcactacttggagttgttatgtaaaattctatcttcagggtccctcnnnnnnnnnnnnnnnnnnnnnnnnnnnnnnnnnnnnnnnnnntgttgttg

SEQ ID NO: 194 - DNA, 271 bp, Cricetulus griseus
tccaaaacccctctcaccttaaggagcacatccggaaccatmctggggaaaagccttacgagtgtacacagtgtggcaaagctttccggwggaagtccaacttcaatttgcataayaagaaccacatggtgtgataaaacctatgagtgcaaagaatgtggcaagcccttcagtgacctcctgtcaatgaggaaacacatgaagatgcacactgtgaaaaaaccggttgattgctgccactgtgggaaaaccttccgaaacgagtctatcc

SEQ ID NO: 195 - DNA, 520 bp, Cricetulus griseus
  misc_feature (226)..(240): n is a, c, g, or t
ggttttgaatgaagaaaacagctgataaggcctcaaacttgttattaatggactctacggaaaatggaggtagggtggggaaggggcacttaatgggctgtgctgtgcatagggagtgaacctcactgccttggcttgacacagtggtgcctgtcctttcaataaaaaacatataagcatctggtcatttcctgggcaaggtacttgtcagtcagtgaagtcctannnnnnnnnnnnnnnttgaggccagttgttctagccctttccttttaaggattaaaaacggactaagcaaggtgtggtagcttgtgatcccargatcatcaggagtttgaggctaacctgggttatatagactctccctcaaaaaaccaaaaagtgccaagagctgtgagtcaggaagaaggaggcattgtgaagggctggagaatcagaaagatggcagtgataaagcaagggtagagctctgttctcgatagtcacaagctggtttacaaatgggtgagccagcttttgcttc

SEQ ID NO: 196 - DNA, 582 bp, Cricetulus griseus
tatcaagctgccccacttcaacaccatggaaacccaakaagcaatataggagacgtctaagagaagaattctctttcattccttcagcagcacttgatttattagaccacatgctgacwcktgayyccagcaagcgttgcacagctgaacagaccctacagagtgacttccttaaggatgtggaactcagcaaaatggcacctccagacctacctcactggcaggactgccatgaactgtggagtaagaaacgtcgacgccagcgacaaagtggtattgtratagaagagctgcctccgtccaaagcctctcgaaaagaaaccacctcagggacaacagctgagcctgtgaagaacagtagcccascaccccctcagcctgctcctgttaaggcagagcctggtcctggggatgcagkaggtcagtgctgagatggagcctacttctatgaagtgcacttacgtagatttgagggtagaagacatatgttttcataaccccgtgtttttatccagtggaatattaggagagagataattgtcctcatttctcactagaagataaaccttactttctgcacat

SEQ ID NO: 197 - DNA, 519 bp, Cricetulus griseus
ctgacttggtggtgatactaaagatcctgccaacattggaagctgttgctgccctggggaacaaagtcgtggaaagcctgagagcacaggatccctcagaagttytgaccatgctgactaatgaaactggctttgaaattagytcttctgatgctacggtgaaaattctsattacaacggtgccacccaatctccgaaaactggatccggaactgcatttggacatcaaagtgttgcagagtgccttatcggccatccggcatgcgcgttggtttgaagaaaacgcttctcagtccacggttaaagttctcatcagattgctgaaggacttgaggattcgttttcctggctttgagcctctcacaccctggatccttgaccttcttggacactatgctgtgatgaataaccctaccagacagcctttggccctgaatgtggcatacaggcgttgcttacagattctggctgctggactgtttctgccagggtcagtgggcatcactgacccctgtgaga

SEQ ID NO: 198 - DNA, 624 bp, Cricetulus griseus
gtactcacctaaggagctgctagcactactaaagtgtgtagaagctgagattgcaaactatgaggcttgtctcaaggaggaggtggagaaaaggaagaagttcaagattgatgaccagcgaaggactcacaactacgacgagtttrtstgtaccttcatatctatgctggctcaggaaggtatgcttgccaacctagtggaacagaacatctcaktgcggcgccgccaaggggtcagcattggtcggcttcacaagcagcggaagcctgaccgacggaaacgctctcgcccctataaggccaaacgccagtgaggacctctggccctgattctgcagcctctcttgccacaaggctcttaccaagtcccctccctatcccacttttttccccccagtattactgaatagttcagctagatcccakgccctgggagtgggaataagctgtgtgtcctgctttattatgctctggggcctggcaggggtaagtcagccccataatgctcaggaagcagcagttagaattggagggtgctgtggcctccacaaccatctatggaacagcagtacctggccttgttgcctgggcagcagaatatacattttacctactggagatgtct

SEQ ID NO: 199 - DNA, 721 bp, Cricetulus griseus
agtttcctggtaaacccagaatcaggatacaatgtttctttgctatatgaccttgaaaatctgcctgcatccaaggattctattgtgcatcaggctggcatgttgaagcgaaattgctttgcctctgtctttgagaaatactttcagttgcaagaagagggcaaggaaggagagaacagagcggtcatccattaccgggacgatgagaccatgtatgttgaatctaaaaaagacagagtcacagtagtcttcakcacggtgtttaaggatgacgacgatgtggtcatcggaaaggtcttcatgcaggaattcaaagaaggackaakagccagccacacagccccccaggtcctttttagtcacagggaacctcctctagagctgaaagacacagatgctgccgtgggtgacaacattggctacatcacctttgtgctcttccctcgccataccaatgccactgctygakacaacaccatcaacctgatycacacgttccgggactatctgcactaccacattaagtgctctaaggcctatattcatacacgaatgcgagcaaaaacatctgacttccttaaggtgctcaaccgtgcacgcccagatgccgagaaaaaagaaatgaaaacaatcacggggaagacattttcatcccgctaacgcttgggaactgaggaggaagcgctgttgatggaaggctggaccgcttgctactggataa

SEQ ID NO: 200 - DNA, 897 bp, Cricetulus griseus
agtgaaggagcttcatatggctgagaagactaaacttatcactcagttgcgtgatgcaaagaacttaattgaacagcttgaacaagataagggaatggtaataacggagacgaagcggcagatgcatgagaccctggaactgaaagaagaagaaatcactcagcttcgtagtcgcatcaaacaaatgactagccaaggagaggaattgcgggaacagaaagaaaagtctgaaagagctgcttttgaggaacttgaaaaagccttgagtacagcccaaaaaactgaagaagcacagagaaggatgaaggcagagatggacgaacagataaaggctgttgagagagcaagcgaggaggagcgtctccgtcttcagcaggaactgagtcgggtgagacagkmgrccswcrrcrkgrkgaaaaccycasaaraacaacttgctgaacttcasaggctgcmtgccarrggagctggccascagagagcaggaactggccagaaagctccasacccgagagagggagctgcmtgascaratgaaaatagctcttgaaaaaagtcaatcagaatatttgaagctcatccaagaaaaagagcagcaagattccttggctctagaagagwtagagctgcagaaaaaagcaatcctttcagagagtgaaaataaactccaggaacttgggcgagaagcagaggtttaccgaactagaatacttgaattggaaacctccttggaaaaaagcttacaagaaagcaaaactcagtcagagcatttagctgtccatctggaagctgagaagaataagcacagtaaagagctcacagccatgactgagaagcacagggcagagctggagcgtctccagcagcagcaggacagcctgtgggctgagagactcc

SEQ ID NO: 201 - DNA, 593 bp, Cricetulus griseus
ggagggctcggtttccctgcctcgacaacctgaggactctgcacctgctgctgaaaccatgtctagcaatgggacagatgctcctgctgaagcccaggctgctgtggaagatctttttccacagcccagcgtggtggaccgcatggccagcctgcctctcatcagctccacgtgtgagatggtgagcgcagcatacacctccaccaaggaccgatacccccatgtgaggaccgtgtgtgatgtggctgagaaaggcgtcaagaccctcactgcggctgcggtcagtggggsrywkcccwkcytskmcaasctgrrgmcycwgattgcttcggccagcgagtacgcgcaccgagggctggacagattgcaggagagcctgcccatcctccaacagccgactgwkargtgkyctwgcagacactaaggaactggtgtsatstacagtatctggagccaaagaaatagtatccagctcagtgaccagkgcaaaggacacagyggccacccgggtaaccggggcagkggatgtgactcggggggctgtgcagagcaccatggacatgacaaagtcagcagtgaccagcggtgtccac

SEQ ID NO: 202 - DNA, 232 bp, Cricetulus griseus
ttaggtgtccttcaagatgtccttgctctgatcacaaactatccctatctctttgactctccatcacaccagcccaggcatctctttctggcttctgtgctcctacttcctaagccccatcctctcttgctcaatccttactatkctctttattcgttgtgtgtggtatttgtgttcaagccagaagtcagccgtaggtatcattcctcaagagccattgaccctgtgtttt

SEQ ID NO: 203 - DNA, 592 bp, Cricetulus griseus
ggtgcagatcaagaccctggagggcgagttctcggtcaccatgtggtcgtccgatgaaaaaaaagatattgaccatgaaacagtggttgaagagcakatcattggagagaactcacctcctgattattctgaatatatgacaggcaagaaactccctcctggagggattcctggcattgacctctcasaccctaagcaactggcagaatttgctagaatgaagccaaggaaaattaaagaagatgatgctccaagaacaatagcttgccctcataaaggctgcacaaagatgttcagggataactctgctatgagaaagcacctgcacacccacggccccagagtccacgtctgtgcagagtgtggcaaagcgttcgttgagagctcaaagctaaaacgacaccagctggttcatactggagagaagccctttcagtgcacattcgaaggctgtgggaagcgcttttcactggacttcaatctgcgcacgcacgtgcgcatccatacgggagacaggccctatgtgtgccccttcgacggctgtaacaagaagtttgctcactcaactaacctgaaatctcacatcttaaca

SEQ ID NO: 204 - DNA, 486 bp, Cricetulus griseus
gccaggcctcctccgtagagcaggacatcagccaccttcaagagagcatccgggcagagattccttctggggatgagcaggagcaggagcataatggaccactggacaacaaaggaaaattcactgctggaaattttcttattaatccccttgagccaaaaaatgcagaaaaactcaaagtgaagatcgccgatcttgggaatgcctgctgggtgcacaagcatttcactgaagatatccagacaaggcagtatcggtctttggaagttctgataggatctggctacaacacacccgctgacatctggagcactgcgtgcatggcctttgaactagccacaggggactatttgtttgagcctcactcaggggaggattacacacgtgatgaagatcacatcgccttgatcatagaacttctggggaaggtgcctcgcaagctcattgtggcagggaaatattccaaggaatttttcaccaaaaaag

SEQ ID NO: 205 - DNA, 1129 bp, Cricetulus griseus
  misc_feature (426)..(442): n is a, c, g, or t
  misc_feature (445)..(445): n is a, c, g, or t
  misc_feature (1021)..(1058): n is a, c, g, or t
  misc_feature (1064)..(1064): n is a, c, g, or t
tggcgggtgggtgaaagacccgagctaacatggggttagttcgttaaattacaataaagcctcgtgcagtttgcagcaagctctcgaatccgcctggkgattggggtgaccgcgaacctggcctaagaccccggatacttgagtkttcgggggtstaacrttttgggggctcgtscgcgatttgtgaccacccttcacctgagtggattcgatcttggaggtragatgattcgagctcgaaacttatatatgtkcaatgttcaatgtttgcttgtttwgkctcttgctgttttgtttggtgccatgatttgtatttgatctgcgcaaaatttgtatttgtrattcggacttctggggaagaccctaaaktcctgccctggacaaaagtccgagggttgcttgatttgatctgcgcagaattggggnnnnnnnnnnnnnnnnnacngaatttgtaattgaaccatakggtaagcagacttgcgagaaccttggttccaccctggatgaaagtycaaggttdggttgkaatyttggtttggggcaccatttctttgccgcggtttgtcctgtctaatgtctgtcctgtctaatgtctcsrtgtctcatatttgtggcatgcatgggtcargrktcttttcttgttgccctawkcacatggyacgggaaaggagttctgccatgtgtyacgggttakaatgtgktatgttggartcccccgaggctgcttttctgaactcgraccactgytgcagcccttacagctgakcctggcccrtrtwggtgagtctttccctatccccacttgccggtcccgtgggtccctgccatttgcctagctgcccgrcattctttgtgctctacacacatggtatgyaggggggcygyawgagtctttttcccacmcctggattggccwagggtctgggkttaccagcagcacccctaccccaggtctctctgccttgagcacayggrgswcgagcgtatgaacttatctggcytgakggttaawtgsccytannnnnnnnnnnnnnnnnnnnnnnnnnnnnnnnnnnnnnggttcncgcccccacaatttgccacctttttttttccccacttttccctatgttttccattaacacttttt

SEQ ID NO: 206 - DNA, 558 bp, Cricetulus griseus
gtccggggggatatcagatatcatgtatatcagatatttacatcacgattcataacagcagcaacattacagttaggaagtggcaatgaaattttaaggttgggggtcaccacaacatgaggaactgcattaaaagatcacagcattacgaaggtagagaaccactgctgtgatataaacataacctgctagctaacctacttatctacccctatggcccagtcaaccttgctgaattatcttaaagtatttaactctccatgcttattgaacaaattttggccaagggtgggacaaactgaactgctaccttcagcctggcttggggagactgagtagatagtccagggcagatcctttacctggtctccatcccacggtctcaaaactgaatctgggacagctgtgacaaactgggcaaaagtcaaggctttatgaatgaacaatcacccaaaataaattccaaaatcaaacacctacttcattagaaagctccaractgggggctagagagatggttcagaggttaaaaggatgggctgctcttccagaggtcct

SEQ ID NO: 207 - DNA, 561 bp, Cricetulus griseus
  misc_feature (143)..(157): n is a, c, g, or t
  misc_feature (540)..(555): n is a, c, g, or t
ggaagaagctgactaaakaaccagccaaagccttaaattgtgcaaaacatactgttgctatgatgtaactgcatttgacctaaccactgcgaaaattcattccgctgtaacgtttttcacatatttaaagcagaagcacgtcnnnnnnnnnnnnnnntgcataaggtttttgtagtgtgatgtcttaatcatagtctaccatcaaatactttaggagtatccttaatgttkagatagaatattagcagcatgcaataattacatcctaagttctcaagcagaggcagtctattgcaaggaccttctttgctgccagttaccataggctgttttaagttagaaaactgaatagcaacactgaatactgtagagatgcactttgctcagtaatacttgagttgttgcaatatttgattatccatttggttgttacagaaaaattcttaactgtaattgatggttgttgccgtaatagtatattgcctgtatttctacctctagtaatgggctttatgtgctagattttaatatccttgagcnnnnnnnnnnnnnnnngtcttt

SEQ ID NO: 208 - DNA, 612 bp, Cricetulus griseus
  misc_feature (601)..(605): n is a, c, g, or t
tgtcaccatgtgatccaccagcaagagagggcgccagtgaaaggcatcctctataagataagtcttataaaatatatagatttgtgataattaagactgagctaacagatgagaaatcctagtctttggccaagcatatttgtacctaatataagtgtctgtgtattatttggggccctaacttgtcgggcagactcgggtggctggtgtaaagcacccacgtggcagtagggctgcagtggcttttagcagaaagatttatggtaacagaatggtgtcagtgagcgggatgaccccatgccccaaggttcccagaggaagaggaaaacctgctgccacagccggcccttttgggctgctgagaggcatatgctcgcgccatcatggagttcatggaggttggactcggcactcccaagatgataaagacagatccagataaagaaaaacatctaaaggtttacactacatttaaaaatatctgtaggcttgtgagagaaaaaataacaggagaaaatagagtagttgggtgtggtggcagacacctttaatctccagactccaaakggagaggcaatcggatttccacagagaaaccctnnnnnagaaaaa

SEQ ID NO: 209 - DNA, 579 bp, Cricetulus griseus
ggctgggagctgcgtggagctagacttcgcgatgccgacgggcgactttgactcgaagcccagctgggccgaccaggtggaagaggagggcgaggacgacaagtgtgtcaccagcgagctcctgaagggratscctctgcccaccggggacaccagtccagagccggagctactgcccggagagccactgccacctcccaaggaagtcatcaacgggaacgtaaagactgtgaccgagtacaaggtagatgaagatggcaagaagttcaagattgtcaggaccttcaggattgagacccggaaggcatcgaargctgtggccaggaggaagaattggaagaagtttggctactctgagtttgacccaccggggcccaatgtggccaccaccacagtcagcgatgatgtctccatgacattcatcactagcaaagaggacctaaactgscaggaggaggaagacccaatgaacaagctcaagggccagaagattgtgtcctgccgcatttgcaagggcgaccattggaccacccgctgcccttacaaggacacactggggcccatgcagaaggaactggc

SEQ ID NO: 210 - DNA, 634 bp, Cricetulus griseus
  misc_feature (47)..(47): n is a, c, g, or t
acagattttcgatctgacaaatctatgggaaatgtatataaactggngaaaatgaacagggcaatctgagagaagttacagctgtgtatgatcgtattcttggtattccaacgcagctctacagtcatcatttccagagatttaaagaacatgtacagaataacttgcctagagatcttttaactgaggaacagttcattcaactgagaagggaattagcttctgtaaatggacacagtggtgatgatggacctcctggtgatgaccttccatcaggaattgaagacataactgatccagcaaagctaattactgaaatagaaaacatgagacacagaatcattgaaattcatcaagaaatgtttaactataatgagcatgaagktagtaagaggtggacatttgaagaaggtattaaaagaccatattttcatgtgaaaccattggaaaaggcccaactaaagaactggaaagaatacttagaattcgaaattgaaaatggaactcatgaaagagttgtggttctctttgaaagatgtgtcatatcttgtgccctctatgaggagttttggattaagtatgccaagtacatggaaaaccatagcattgaaggagtgaggcatgtcttcagcag

SEQ ID NO: 211 - DNA, 583 bp, Cricetulus griseus
taaaccggcgtctgcggagcgggtattcaggctagaaggaagcttttaggtccggcagcmctgcagaaatggcagagtttgggatctctcctggccagcttgtggcagtgttctgggacaagtcatctcctgakgaggccctaaaaaaactggtagatagtcttcaagggttaactggcagtgagggccaaatattcacggaaaacatcagccaactgttgcagtctgcccataaagaatccagcttcgatgttattctgtcgggtgtagtcccaggaagcgcctctctgcacaatgctgaggttctggctgagatggccagaatccttcggccagggggatgtctttttctgaaggaaccagtggagacagctgtagttaatgatgacaaaatgaagacggcctctaaactgtgttcggccctgactctttctggccttgtggaagtaaaagagttgcagcgggagtccttaagccccgaggaggtgcaatctgtccaggaacacctgggctaccacagtgacagcctgctctcatttcgtatcaccggcaagaagcctaactttgaagtgggctcttccag

SEQ ID NO: 212 - DNA, 621 bp, Cricetulus griseus
  misc_feature (408)..(429): n is a, c, g, or t
gaccttgagccctcgtaagcgwcmkggcggttctcttaaagctgggagtcctctgcagtggccaaggaggccgagctctgttgctccgaagccgggtggtcaaacctgcttatgtctcagcgtttctccaggaccagcctaccccaggatggcatggcacacagcacattcacctgtcaccaagctaccattctggttccaaggctgcatctctccattggactagtgagagggctgtcagtgttttgctcttgggcctgcttccagctgggtacctgaatccctgctctgtggtggactactccctggctgctgccctcaccctgcacggtcactggggccttggacaagtggtgactgactacattcatggggatatatcgaagaargctgtcaaggcaggcctcnnnnnnnnnnnnnnnnnnnnnnttgctgggctttgctatttcaactaccacgatgtgggcatctgcagagcagttgccatgctgtggaagctctgacctctgcagtgcaacaccttggattgtatgccactttgcctctgctctgtctatgccgttcagctcccagtgagcagggcgtggagaagtcccatggtgtcagaatttcttctaatta

SEQ ID NO: 213 - DNA, 603 bp, Cricetulus griseus
  misc_feature (76)..(93): n is a, c, g, or t
agtctcgtgtccgcggtgccgttactcgcagtcgggcggcggctgaggctcagcgcagagcgcaggtagcgggttnnnnnnnnnnnnnnnnnncgcggaggcacctcggcggtcagagcccctgcgctagtgcagccaccttcgcctgctccgcgcttccttccttcgctcgcaccatggctgatcagctgactgaagaacagattgctgaattcaaggaagctttctccctattcgataaagatggtgatggcaccatcaccacaaaggaacttgggactgtcatgcggtcactgggtcagaacccaacagaagctgaattgcaggatatgatcaacgaagtggatgccgatgggaatggcaccattgacttcccagagttcttgaccatgatggctagaaaaatgaaagatacagatagcgaagaggaaatccgcgaggcattccgagtttttgacaaggatgggaatggttacatcagcgcagcagaactgcgccatgtcatgacaaacttaggagaaaaactaacagatgaagaagtagatgaaatgatcagagaagcagatattgatggagacggacaagtcaactatgaagaattcg

SEQ ID NO: 214 - DNA, 600 bp, Cricetulus griseus
  misc_feature (183)..(201): n is a, c, g, or t
agtttgtccctactactgaaggtcccttttatgtttctgctgtgcattcctttccggtcctctccctcgtctgccatctttgctctaattgcaaactggtgaggcttagtgtttgctcatcaaccaggcaatagggtgaacttgcacgctctgggtaagtgtgttgactagtttgatgtcaannnnnnnnnnnnnnnnnnnatctgaaaggagaggacctcaatgaagaaaatgcctccataagattggactgtaggcaagcctgtggggcattttcttaattagtgactgatgttcgagggcccagtccattgtgggtggtgccatccctargctggtggtcctgggttctaccagaaagcaggctgagcaagccatggggagcakctcccctccatggcctctgcatcakctctttgcctccaggtttctgccctgttagagttcctttcttgacttccttcaatgatggactagaataargaagtayaagtcaaatgaactctttcctttccaagttgctttggtcatggtgttccatcacakccatagaaaccycawctaakacagcaaggaagcatttytcacccctcctcctgg

SEQ ID NO: 215 - DNA, 589 bp, Cricetulus griseus
aaagactttaaaaccaaaaaaatctgaagtttaaatgacaggagccagtcaggtcaggtcataccctgtaggctcctgagtccttccttctcacgtgtctctggtgcctgagaatgttgggatagcatccaggggctcaagcgacttcttcatagtttatatctgataaaatcctgacccgtgtgacgtgtttgtcacccttcgttacaaacagcatctactgaggacagatgcctgcgtcatctcagtcgacctttccttcctctctccccctcccccacctctstctctcttcttctcttccctcctcctctccctcttcctcctttccttctcgctctgcccttctctctctcaatttttgtgatcagtgaaatcagatgatgcctcaaggcacttaagatctttaatttgcattttatgcatttcacaaaatkgarrtgksccattcttctaaatatctttccattttccattagctgacatttgagtagcagttttcaaattgytggcttcatgatgtcatcatttgccgggaatcccacctatagctcagctgtctgggcacttgtcttccttgatgtgcatg

SEQ ID NO: 216 - DNA, 605 bp, Cricetulus griseus
cgtcttcccggcgcggcttgtgagggattatccactgcgctgarttcgtcggaaccatggcgtccctttccctggcrcytgygwatatcttcaaggctggagctgatgaagagagagccgaaacagctcgcctgtcatcctttattggtgccatcgccattggagaskkggkgaagagcactttggggcccaagggcatggacaaaattcttctaagcagtggacgakatgcctctctaatggtaaccaatgatggygccaccattctaaaaaacattggtgttgacaacccakcagctaaagttttagttgatatgycaagggttcaagatgatgaagtkggtgatggcactacctctgytactgttttggcagcagaactactccgkgaagcasaatctttaattgcraaaaasatacmtccacagaccatcattkcargttggagagaakccaccmwrgcagcawgagakgcgctgktkacctcygctgttgatyacggttacgmtgamgkcaaattccggsmwkattkaatgawmattgymggaacgacwttatcctcaaaactycttaytcatcatarggaccmctttacsgarttagct

SEQ ID NO: 217 - DNA, 902 bp, Cricetulus griseus
tccgcaggctgcggctgcagaggatctccccgagaagctgcgaggatgctgtccgtgcgcgtcgccgcggccgtggcccgtgccctccctcgacgggcgggactggtctccaaaaatgctttgggttcatccttcattggtgcaagaaatctccatgcctccaacatgcgacttcagaagactggcactgctgaggtgtcctccattcttgaagagcggattcttggagctgatacttctgttgacctcgaagagactgggcgtgtcttgagcattggtgatggtattgcccgagtacatgggctgaggaatgttcaagcagaggaaatggtagagttttcttcaggcttaaagggtatgtccctgaacttggaacctgacaatgttggagttgtcgtgttcggaaatgataaactgattaaagaaggcgacattgtgaagagaacgggtgccattgtggacgttccagttggcgaggagctgttgggccgtgtagttgatgcccttggtaatgccattgatgggaagggtccaattggttccaagacccgtagacgagtgggcctgaaagcccctggaatcattccccgaatctcagtgcgggaaccaatgcagactggcattaaggctgtggatagcctggtgccaattggtcgtggtcagcgtgagctgattattggtgacagacagactgggaaaacatcgattgctattgacacaatcatcaaccagaaacgtttcaatgatgggactgacgaaaagaagaagctgtactgtatctacgttgctattggtcagaaacggtccactgtcgcccagttggtgaagagactgacagatgcagatgccatgaagtacaccattgtggtgtcagctacggcttctgatgctgccccacttca

SEQ ID NO: 218 - DNA, 389 bp, Cricetulus griseus
cccacgcgtccggggacgcctgggttcccgaccgcttgcttcggcgattgtcakggtactgataaccatggcatccctgtggctgctcagagttcccttcctgtgtgccctgctctggacctcttgtactctcakktwcyakggcccatgakcctggggccggcagccatcacagcaktgtgggcctggtacaagatcacagtgcatgaccaasagcatatcatggaacatctasaaggtgycrtcgacaaaccagagacagagatgtcccctcaagaactgcagctccactatttcaaaatgcatgattatgatggcaacgatttgcttgatggcttagaactgtccacggccatcactcatgtccataaggaggaggggagtgatca

SEQ ID NO: 219 - DNA, 700 bp, Cricetulus griseus
gccagaaaccccctcgctgcgcggcggctgcgtccgccccgctccggaagcggaaacgcactcgaggtcaggcgtgctcccaagatggcggccctcagggctctggtgtcaggctgcgggcggcagcttcaggggttcctcgcaggccccgccgcgaccggctggttaaggcttccagctcgtgggttgagagaagtggtggagatccaagaagggaagacaactgtaattgaaggtcgaatcacagaaactcccaaggcaactccrartscccctaacccctcaggccagtgccccatctgccgttggaacctgaagcacaaatataactatgaggatgtgctgctgctcagtcagttcatccggcctcatggaggcgtgctgccccgcaatgtcacaggcttgtgcctggaagaacaccgaaagatcgaggagtgtgtaaagatggctcatcgagcaggtctattcccaaatcacaggccacggcttccagaagggtccttacctakgaataaacccaaactcaaccgctacctgactcgctgggctcccagctctgtcaagcccatctacaaaaaaggtcaccgttggaacaaagtgggtatggccgtggggtcaccactcctcaaggacaatgtctgctactccaggagacctttgaagctctttcattaatgggagccctgcagctgaagactct

SEQ ID NO: 220 - DNA, 586 bp, Cricetulus griseus
gccggcagactcgccgccatgggccgtgtgatccgagggcagaggaaaggcgccggatctgtgttccgcgctcacgtgaaacaccgtaagggcgccgcgcgcctgcgtgctgtggacttcgctgagcggcacggctacattaagggtatcgtaaaggatatcattcatgaccccggccgcggcgcccccctcgcgaaagtggtctttcgggatccctaccgatttaagaagcgcacggagctgttcatcgccgcagagggaatccacacagggcagtttgtgtactgcggcaagaaggcccagctaaatatcggcaatgttttgcccgtgggcaccatgcctgagggtactatcgtgtgctgtctggaggagaagcctggagacaggggcaagctggcccgagcatccgggaactatgccacagtcatctcccacaacccggagaccaagaagactcgagtgaagctgccttcggggtccaagaaggttatttcctccgccaacagakctgttgttggtgttgtggccggtgggggtagaattgacaaacctatcttaaaggctggtcgtgcctaccacaagtaca

SEQ ID NO: 221 - DNA, 591 bp, Cricetulus griseus
aaggaagttggcagtatcatcggaaagaaaggagaatccgttaakaagatgcgcgaggagagtggtgcacggatcaacatctcasaagggaattgtcctgagagaattatcactttggctggcccgactaatgccatcttcaaakcstktgctatgatcattgacaaactggaagaggacataagcagctctatgaccaatagcacagctgccagtagacctcccgtcaccttacggttggtggttcctgctagtcagtgtggctctctcattgggaaaggtggttgcaagatcaaggaaataagasagagtacaggggctcakgtccargtggcargggatatgcttcccaactcaactgagcgggcaatyactattgctggcattccgcaatccatcattgagtgtgtcaaacagatctgcgtggtcatgttggagtcccccccgaagggcgtgaccatcccgtaccggcccaagccctcgagttctccagtcatctttgcaggtggtcaggacaggtacagcacatgcagcgacagtgcgagctttccccacaccaccccgtccatgtgcctcaaccctgacctggag

SEQ ID NO: 222 - DNA, 602 bp, Cricetulus griseus
cacaggactgctgagctacctggtgttcaacatcatccccaccctggctgacatcattattggcatcatctacttcagcatgttcttcaatgcctggtttggcctcattgtgttcctgtgcatgagtctttacctcatcctgactattgtggtcacggasyggagakccaastttcsccgygatatgawcacacagtgaaaatgtcaccaakgcacgagcagtggactcgctgctcaactttgakacggtgaaatactacaatgctgagggttatgaagtagaccgctacagagaggccatcgtcaagtatcagggtttggagtggaagtcaaatgcttcactggttgtattgaatcagacccagaacttggtgattgggcttgggctcctggctggctccttactttgtgcatacttcgtcagtgagcagaagctgcaggttggggactttgtgctttttggcacttacatcactcaactgtacatgcctctcaactggtttggcacctactacaggatgatccagactaatttcattgacatggagaacatgtttgacttgctgaaagaggaaacggaagtaaaggatgttcctggagca

SEQ ID NO: 223 - DNA, 555 bp, Cricetulus griseus
atggcgggtgaaaaagccgagaagcctgacacaaaagagaaaaagccagcagccaagaaggctggtggtgatgccgatggtgcagccaaaaagggtgaccctaaggttaaaaaacccaagaaggggaagccccattgcagccggaaccctgtcctggtgagaggaattggcaggtactcccgatctgctatgtattccagaaaggccctatacaagaraaaatactcagctgcaaaaaccaaggktgaaaagaagaagaaaaaggraaaggkccttgctactgtcactaaaccagttggcggtgacaagaatggtggtactcgggtggktaarcttcgaaaaatgcccaggtattaccctactgaagatgttcctcggaagctgctgagccatggcaagaagcccttcaktcakcatgtaaggaagctgcgtgccagcatcactccagggactgtcctgatcatcctcaccgggcgccacaggggcaagagggtggtcttcctgaagcarctgggcagcggcttgctacttgtgacaggacctcttgccctcaac

SEQ ID NO: 224 - DNA, 567 bp, Cricetulus griseus
tgccttcccctggacagaaggcaaagttggtgtatgaagaagagtcttctgaagaggagtctgatgatgaaattgcagaaaaggattccgatgataattgggatgaagacgaagaagagaaagacagtgaaaaggatgagggagttgatgaagacaatgaagaagatgmggacmcwsrcgwtmmrgaagaraatggggaggacagaratgggtcaagtggaaaaaraattaaatggrrattctgattttaratcctcgaaaatggaaagtggaagaaragtgaagacaagcagccagtcacactgtggaacacctggctcatyttgcccartgctkccgcatcctcccagggaggctcgccctgtgccaggagacaarargccgycatatgcttccaagttcacagaggcsacaccaccttcctgtcctgagtgccccagactttaactgtgtaaataagagwgkktcattcaaatgttaataaactttacacagyaaatagatacactttgccatgtactgacctgagtgtccaatatatggtatatttttataatataatactct

SEQ ID NO: 225 - DNA, 898 bp, Cricetulus griseus
aggcgcagaatggatgaaatcagtgaccatgctaaagttctaacactcagcgatgatttggaaagaactatagaggagcgtgttaacatcctgtttgattttgttaagaaaaagaaagaagagggcattattgattcatctgataaagaaattgttgctgaagcagaaagactggatgtaaaagccatgggtcctcttgttttgactgaagttctctttaatgagaagataagagagcagatcaaaaaatacaggcgccatttcttaagattttgtcataacaacaaaaaggctcagcggtaccttcttcatggtttggaatgtgtggtagcaatgcatcaagctcagctgatctccaagataccacatattttgaaggagatgtatgatgcagatcttttagaagaagaggtcatcatcagctggtcagaaaaggcctctaagaaatatgtctcaaaagaacttgccaaagagattcgcgtcaaagcagaaccatttattaaatggttgaaggaagcagaggaagaatcttctggkggtgaggaagaaatgaagatgaaaatattgaggtggtatattcgaagactgccagtgtaccaaaagttgaaactgtgaagtctgacaacaaggatgacgacattgatattgatgccatttaaaggatggatgcaacttagcttaacagtataatgctgcaaatttttctccattatcagccagaagtgcaacatgtatgtgcaaaagctaaaatggcttaacatcatgctacacttgatactaaaaagctattactgtgagtggtctataattaagcccaatgagacatctagggagtccatacatatcagtgagcagttgtagtttgcttatttatagcatgtttcttttggaaaaacta

SEQ ID NO: 226 - DNA, 1675 bp, Cricetulus griseus
aagatgaaaaaggacggtcatactacgtagaccacaattctagaacaaccacatgggccaagcccaccatgcaggaagacccaagatcgaagatccctgctcatctgagagcaaagacaccagtggacaatgacctgggacctttacctcctggatgggaagaaagaacccacacagatggaagagtcttctatataaatcacaatacaaaaaagacacagtgggaagatcctcgcactcagaacgtggcaacaactggaccagcagtgccctactccagggattacaaaaggaagtacgagttcttccgaagaaagctgaagaaacagcagaacgacattccaaacaaatttgaaatgaagcttcgccgtgcaaatattctggaggactcttaccggagaattatgggtgtcaagaaagccgacttcctcaaggctcgactctggattgagttcgatggtgaaaagggacttgaytatggaggagtygctcgagaatggttcttcctcatttcaaaggaaatgtttaacccttattacgggctcwttgaatattctgctwcggataatyacaccctycagataaatccaaactcgggcctgtgtaatgaagatcacctctcttacttcaagttcattggtcgtgtggctggaatggctgtttatcatggcaagctgctggacggctttttcatccgccccttttacaagatgatgcttcagaagctgataaccctgcatgacatggagtctgtggatagtgaatattacagttcactgcgatggattcttgaaaatgacccgacagagctggacctgagatttatcatagatgaagaactttttggacagacacatcaacatgaactgaaaactggtggatcagagatcgttgtcaccaaywagaacaagaaggagtatatttaccttgtgatacaatggcgttttgtgaaccgaatccagaagcaaatggctgctttcaaagagggattctttgaactgataccacaggacctcatcaagatattcgatgaaaatgaactggagcttctcatgtgtggtctgggagatgtggatgttagtgactggaaggagcatacaaagtataaaaatggctacagcgtaaaccaccaggtcatccattggttctggaaggctgttttaatgatggatgcagaaaaaagaatacgcttgcttcaatttgttaccggcacatcccgtgtgcctatgaatggatttgctgaactctatggctcgaatggaccacagtccttcacagttgaacagtggggcacccctgataagctgccaagagcacatacctgctttaatcgcctggacctgccaccctacgaatcgtttgacgaactctgggataaacttcagatggcgattgaaaacactcagggctttgatggggtcgattagattacaagtaacaagctgtggtgtcttaaacaccatagtttttaagcaaaagcaaaattgcatcttaacattttccagagtacttctataagatagtcactggctcttccccgagagaccagagtacacagttcatccaaggtttcagccaccaccatactgaagtgttcatttgtccagttactttgtcctttcattggggttcacacgacagggcatttaagtcctgtgtgcctggctgtatctca

SEQ ID NO: 227 - DNA, 611 bp, Cricetulus griseus
tcgaagtcgtgataggaaaggggatagaagagacagggatcgggaaagagagaaagagaacgagaggggtcgaagacgagatagagattatgataaagaaagaggcagtgatcgagaaagggacagggagagatcaagagagcggtccaaggagcagcgaagtagaggtgagggagaggaaaaaaagcacaaagaagacaaggaggataggcgacacagagacgacaaaaaagaattcaagaaaaaacacagcagaagtagaagcagagaaaggaaacacagaagtagaagcagaagcaaaaatgcagggaagcggagcaggagcaggagcaaagacaagtcaagcaaacataaaaatgaaagcaaagaaaagtcaaacaaaagaagtagaagtggcagtcaaggaagaactggcagtgttgaaaaattgaggaaacgagaacacagccctagcaaagagaagtctagaaagcgcagcagaagccaagaccgctcccacaagagagatcatggggatggcaaggaccagtcagacagacaggatcatcagagaagccagagtgtagagccagagagccaagaaaaagaacataaaaacaaagatgagacta

SEQ ID NO: 228 - DNA, 623 bp, Cricetulus griseus
  misc_feature (432)..(473): n is a, c, g, or t
gcttctgccgtgctagtgacagtattcaggaggatgtgcttaggcttctgacactgtgtgtcagaacggcactatttcagtttatagccctctcatacatagtacagtagttgattaaaaaacaaaaccagtaaaatggcatttgcctcacagttattaactatcaatctggctagatcttcatgcagtaacctaaatgtgatatattgggtgtgagagaactgtgttggggtttttagattttcgacactagtttgcctctttaattttcacaacccyttattagcaagttccttttatatataggccctaaaattgggatagttaaaatatggttgttaattatgattagcctttggtgaaaataggtttaaagtctgttttgattccaatgtttctcccaaagaattctgtgttaaatatacaccaagnnnnnnnnnnnnnnnnnnnnnnnnnnnnnnnnnnnnnnnnnncctggaaataggagtaagtttgtatgttattgtkgatagagcaactcaggtaatttccatttctggttttctattctctgkgtaractacctgggkgtcactttctarccagcaaggggcttcactgctgtctagatgtctttcataatg

SEQ ID NO: 229 - DNA, 592 bp, Cricetulus griseus
ccgggtcggtgtagctctccgcgcctgctgctgtgtctgtcgctctcgggtggcgtgttccgcgtttcctgtccgcaccggtgcaccggtgcagctccggcctcgggcccgaccgccacaccatggcttccgctttggaggagttgcagaaggacctagaagaggtsaaagtgttgctggaaaagtccactaggaaaagagttcgtgatactcttacaagtgaaaaatccaagattgagatagaaataaagaacaagatgcagcagaaatcacagaagaaatcagaacttgacaatgaaaagccagctgctgtggttgctcctcttacgacaggatacactgtgaaaatcagtaattatggatgggatcaatcagataagtttgtgaaaatctacattaccttaactggagttcatcaggttcccactgaaaatgtgcaggtacacttcactgagaggtcatttgatcttttggtaaaaaatctcaatggcaagaattactccatgattgtgaacaatcttttgaaacccatctctgtggaaagcagttcaaaaaaagtcaagactgatacagttatcatcttatgtagaaa

SEQ ID NO: 230 - DNA, 897 bp, Cricetulus griseus
ccccccaacctgcggtccatcatgaagttccagtataaagaggaccatcccttcgaatatcggaaaaaggaaggtgaaaagattaggaagaaatacccggaccgggtgccggtcatcgtggagaaagctcctaaagccagggtccctgatctggacaagagaaagtaccttgtcccttctgacctcactgttggccagttctacttcttaatccggaagaggatccacctgagacctgaggacgccttattcttcttcgtcaacaacactattcctcccacgagtgctaccatgggccagctgtgtgaggacaaccacgaggaagactattttctgtatgtggcctacagtgacgaaagtgtctatgggaaatgaggcagaagcccagcagatgggagcacctggacttgggggtaggggtggggtgcttgtgggactcggggaaccagatggagggctcccaaccatggaggagacgcaaggtgaagaacatcggaaaacatcacaccgcacacactgtcttctgttttttcacaagctcaatcgttagttttctctgcttcctcagcccasgaagatcttgtgttggcttgactgtgagagcagggtgggtactttgttactcacagctttgctctgaattttcctgcagtttcatcagacggttgggaggagggcaggtggccactcgagaggaatacagttcagcagcaactcctgtctctttgggcagaggtttaatttttggcatttgcacaaaatgccaaaatttgcacatagggaaagggggaaaatgctttaggagctgtaggggaccatacctaagggaccaaaaaattcccactgtcattgaagcattgtgacccctgacctctgtctccaattcctccctctcca

SEQ ID NO: 231 - DNA, 584 bp, Cricetulus griseus
ccggcagcaaggacctgtgttggctgtcctgtttgctcgggaccggtgtccgagccccagtcttggtcgtctgcgctgctgccccgagaccgakacggcgcgagttggcgggcggcgaccctgacgcccggcccgaattctcggstgccccctaggtggggtgaagcttcctgtcttttgcctttgctccggtgctggctgcaggatgaactgtcgatcggaagtgctggaagwgtyggtggagggacggcaggyggaggakgccatgctggctgtgctgcacacmrygctyctacrccgywgyrcgggcargkttsactacaagaaagaggggacttactccatcgkcwccgtgggcmtccakgwtgktgactgygactkcattgrcttmrcatwtgtgcktgtcakcytcygacgagcksgmccgarccttgcgcatwgkttgktggggratysamsgwygcactgyswmattcwgstggygrwggkcyakgccagatgkcyykggaattctaccagaagaaatagtctcgctggcctttttcagacgagtgcatcccttgggaggtgtggacagtcaaggt

SEQ ID NO: 232 - DNA, 1202 bp, Cricetulus griseus
  misc_feature (2)..(23): n is a, c, g, or t
  misc_feature (184)..(221): n is a, c, g, or t
  misc_feature (264)..(301): n is a, c, g, or t
  misc_feature (338)..(379): n is a, c, g, or t
  misc_feature (382)..(383): n is a, c, g, or t
  misc_feature (385)..(396): n is a, c, g, or t
  misc_feature (423)..(460): n is a, c, g, or t
  misc_feature (463)..(477): n is a, c, g, or t
  misc_feature (497)..(503): n is a, c, g, or t
  misc_feature (515)..(540): n is a, c, g, or t
gnnnnnnnnnnnnnnnnnnnnnncccgccgggttgagaggagcgtggccctctcctcgcctctcctttccccgacatggcttgtgcccgtcccctcatatcggtgtactcggaaaagggggagtcatctggcaaaaatgtcactttgccagctgtattcaaagctccaattcgaccggatatknnnnnnnnnnnnnnnnnnnnnnnnnnnnnnnnnnnnnnacagccgtatgccgttagtgaattggcaggtcatcagaccagnnnnnnnnnnnnnnnnnnnnnnnnnnnnnnnnnnnnnnttycaagagtccgaggtggaggaacccacygttctgnnnnnnnnnnnnnnnnnnnnnnnnnnnnnnnnnnnnnnnnnnttnnannnnnnnnnnnntggcgtcgttggcaycgcakagtaaannnnnnnnnnnnnnnnnnnnnnnnnnnnnnnnnnnnnnscnnnnnnnnnnnnnnnagctgtggtgatgytaaagnnnnnnnaatcgaagaaannnnnnnnnnnnnnnnnnnnnnnnnnagatarrgkggaagggkmcaagawgaccaargargctgktcasctgctgaaraarcytawagcatggawtgacatcaaaaaggtctatgcctctcagagaatgagagcgggcaaaggcaaaatgagaaaccgaagacggatccagcgcaggggaccctgcatcatctatmatgaggataatggtatcatcawrgycttcagraacatccctggtattactctgctcaatgtgagcaaactgaacattttgaaacttgctcctggtggacatgtgggacgtttctgcatctggaccgagggtgccttccgaaagttagatgarttgtatgggacttggcgtaaggctgcttccctgaaaagtaattacaaccttcccatgcacaagatgatgaacacmgacctaagcaggatcctaaaaagcccakagatccaaagagccctccgagcaccacgcaagaagattcatcgtagagtcttgaaaaagaacccactgaaaaacctgagaataatgttgaagctcaacccgtatgcaaagactatgaggaggaataccattcttcgccaggccagaaatcacaaactgcgggtgaagaaactagaagcagcagcagcagcgctagcagcaaaatcagagaaaggggcagcagatcagaagtcagtag

SEQ ID NO: 233 - DNA, 579 bp, Cricetulus griseus
tctcgagtgctatgctcactgaagccctgtctcagtttagtacaggcgctagttctggctctggcactggtacaaatggaaccaaagatgtaaatatcactacatttctgatgctgatggaggggctccgaccctcaaattcacgctttagtcaagagaactccactgctcgacaagtcttgccttattgtgcacccaatsgaggctatccacctcattggacgccttgtcagagtccggatcacaaacttaagcawatagctccaggytktgaatttactccccctcttggcaagtaccagtataacctaactcatggaggttcccaaagaacaggcagtaaaaatacctggccatggtttcaatgggtactctccaacgagcgtggagcatttacttctcttgaaccttttgcagttctccagaatctctgcataagacttcttaatgtttctggtacaagggatgagaagggaccttctcttaagaatctatcaatacataaagctttgaataatctcactgttccagctagcccagtatgcttaaaagctccttttttctttctgctctctaatg

SEQ ID NO: 234 - DNA, 580 bp, Cricetulus griseus
  misc_feature (496)..(540): n is a, c, g, or t
cattaagaacaatagcatttttaagtatagatcaaaatcaaattagtgttaatttgagattcacaaacatttcatgttacacaattaaaataattctcctcctctaaaaaataaagaagatgctgaagaaatagctcagttggtaaagctcctcctgtgtaagcataaaaatgtgagtttggattgcaagcacctgtgccaaaagacaggtgtgtggcatacatctgtaacccaagtgctatgaaaagcagagacagccaaatccctaagcacactggcaaaccagtctakccaattggtwagcttggcccasggagagagcctgtctcaaaatakaaagtcagatgtgataaacaaagacacctaaccttgacctctggtctccaaatgtgtgtaagcatgcagttgcaaacatgctcacagtacactacacagcatacaaatgcatacagaaaaaagaaaataaaagttggacatakccggaagttggtggcannnnnnnnnnnnnnnnnnnnnnnnnnnnnnnnnnnnnnnnnnnnnctgtgagtttgagcccagcctggtctccatagtgagtgcc

SEQ ID NO: 235 - DNA, 574 bp, Cricetulus griseus
gcgagaagccgagagtcggagacgctatccgcttccakccgtcgcgcagaccctgccggagccgctgccgctatggatgatcgggaggatctggtgtaccaggcgaagctggcagagcaggccgagcgatacgacgaaatggtggaatcaatgaagaaagtagcagggatggacgtggagctgacagttgaagaacgaaaccttttatctgttgcatataaaaatgtgattggagccagaagagcatcctggagaataatcagcagcattgaacagaaggaagaaaacaagggaggagaggacaaactaaagatgattcgggagtaccggcaaatggttgaaactgaactcaagttaatctgttgtgacattctggatgtactggacaaacacctcattccagcagctaacactggcgagtccaaggtyttctattataaaatgaaaggggactaccacaggtatctggctgagtttgccacaggaaatgacaggaaggaggccgcagagaacagcctcgtggcttacaaagctgctagtgacattgcgatgacagaacttcctccaacgcacc

SEQ ID NO: 236 - DNA, 625 bp, Cricetulus griseus
gactccaaggatgtgatggacagcacaactacacagaattattggattgacatccacttackatggggagactatgatycccatgatatcgagcgctatgcccgggccaagttcctgggattataccacagacaacatgagtrkskacccttctcccacakgtgtgctcattgccattgacctggcctatwatctacacagtgcctatggaaactggtttccasgcagmaagcctcttatacagcaggctatggccaaratcatgaaggcaaatcctgccttgtatgtattacgygaacggatscgcwaaggactgcagttgtattcatctgagcccactgagccttatctgtcctctcagaactatggtgaactcttctctaaccagattatctggtttgtggatgacaccaatgtctatagagtgaccatccacaagacctttgaggggaacttgacaaccaaacccatcaacggagccatcttcatctttaacccacgtacggggcagcttttcctcaagataatccatacatctgtgtgggctggacagaagcgtttgggtcagttggccaagtggaagacagctgaggaagtggctgccctgattcgatctctgcctgta

SEQ ID NO: 237 - DNA, 557 bp, Cricetulus griseus
atatgtcttcastggctctcgcctcaagctctattkgcctaaggagacttgcctcatcaccttcctgctggcaggcattgagtgtcccaraggagcackaaacctaccaggcttggtgcaggaaggagagccattcagtgaggaakccacacttttcaccaaggaactagtgctgcagcgagaggtggaggtagakgtykagagcatggacaasgctggcaacttcwtckgctggctgcacatggatggggctaacctgtccgtcttgctggtggagcaagcgctttctaaggtccacttcactgccgagcgcagcgcctactaatagcccctcctatctgctgaggaagccgccaagcagaggaaggagaaggtctgggcccactatgaggagcatcctgtagaggaggcgttgcctgtgctggaggagaaggagcgttctgccagctacaagcccgtgtttgtgactgagatcacagacgacctgcacttctatgtgcaagacgtggagactggcacccagctggaaaagctgatggagaacatgcgcaatgacg

SEQ ID NO: 238 - DNA, 503 bp, Cricetulus griseus
  misc_feature (69)..(90): n is a, c, g, or t
  misc_feature (381)..(393): n is a, c, g, or t
  misc_feature (395)..(417): n is a, c, g, or t
  misc_feature (429)..(458): n is a, c, g, or t
cacctgcagagttctgcagcctatcgcttctcargtgtgaggcctggggctctgtcaggatcatccaannnnnnnnnnnnnnnnnnnnnnttggactccacacagactgataaacttaaggccttggaagtgtggcagtatccagcaatttcctaagggtgttaatgtccatggaagtatgcagccatactctagttaaactctgagctaggtccaagcctcaagctaacagcctgcggttgtcccaactgcaggagagtatgccaggagggttacgggtccaaggaagttcaaggtgagcttgaagaaccctgtgtcaagttaaaaagtaaaagtasgtctaggatatagctcagtgttaakagtgcctgcctggagccnnnnnnnnnnnnngnnnnnnnnnnnnnnnnnnnnnnntgaggcagagannnnnnnnnnnnnnnnnnnnnnnnnnnnnnctggtctccatagcgagtgccatgataggctccaaggctacacat

SEQ ID NO: 239 - DNA, 536 bp, Cricetulus griseus
  misc_feature (121)..(184): n is a, c, g, or t
  misc_feature (420)..(494): n is a, c, g, or t
ggagaagccaaaatgtttgctaagggtactgagattactcatgctgttgtcatcaagaagctgaatgagattctgcaggccagaggcaagaagggaacagaccgtgccacccagattgaannnnnnnnnnnnnnnnnnnnnnnnnnnnnnnnnnnnnnnnnnnnnnnnnnnnnnnnnnnnnnnntcaagttcaatatcattgcctctctctacgactacaaccctaacctggccacatacatgaagccagagatgtggcagatgtgcctagattgcatcaatgaactgatggatatcttggttgcacattccaacatctttgttggagagaacattttggaagagagtgagaacttacacaattttgatcagccactgcgtgtacgcggctgcatcctaactctggtggaacgaatggannnnnnnnnnnnnnnnnnnnnnnnnnnnnnnnnnnnnnnnnnnnnnnnnnnnnnnnnnnnnnnnnnnnnnnnnnnacaagtatgtgccatcattgaacgtgtgcagcgctacctgga

SEQ ID NO: 240 - DNA, 1094 bp, Cricetulus griseus
acgatcccagcaccagaccccgccagattttagcggtcgtcgtcgggtggcaaggacggactaggaataactgctctgtctrgaggcgtgtcttgcgttgcgccgccctttcctgcaccgctaagcytccctgatcgctcttgttttccggagcgctgcttctctttcccgcgccgtctacacctccttcccaccagrgataatggcgacagctgaggtactgaacattgggagaaaactctatgagggtaagacaaaagaagtctatgaattgttagataatccaggaaaagtcctcctgcagtccaaggaccagattacagcaggaaatgcagctagaaagaaccatatggarggcaaagctgcaatctccaataagattaccagctgtatttttcagttgttacaggatgccggtatcaaaactgctttcaccaagaaatgtggggagactgctttcattgcaccccaatgcgaaatgattccaattgaatgggtgtgccgaagaatagcaactggatcttttctcaaaaggaaccctggtgtaaaggaagggtataaattttacccaccaaaagtagagatgttcttcaaggatgatgccaataatgacccgcagtggtctgaggagcagctcattgctgcaaagttctgctttgctggacttgttataggccagactgaagttgacatcatgagtcatgctacccaagctatatttgaaatcctggagaagtcctggcttccccagaactgtacactggttgatatgaagattgaatttggtgttgatgtaaccaccaaagagattgttctggctgatgttattgataatgattcctggagactctggccatcaggggatcggagccagcagaaagacaaacagtcttaccgtgacctcaaggaagtaactccggaaggactgcagatggtaaagaagaactttgagtgggttgcagatcgagtggagttactcctgaagtcagatagtcagtgcagggttgtagtgctgatgggttccacttctgaccttggtcactgtgagaaaattaaaaaggcttgtggaaacttcgggattccatgtgaacttc

SEQ ID NO: 241 - DNA, 551 bp, Cricetulus griseus
gtgtgtgtgctacggggtgcagtgtgtgcttgaaatagtgggaacgccatgtcccgtggttccagcgccggttttgaccgccacattactattttctctccagagggccgactctaccaagtagaatatgcttttaaggctattaaccaaggaggactcacatctgtggccgtcagaggaaaagattgtgcagtaattgtcacacagaagaaagtacctgacaaattattggattctagcaccgtgactcacttgttcaaaataactgaaaacattggctgtgykatgactgggatgacagctgacagcagatcccakgtacagagggcacgctatgaggcagctaattggaaatacaaatacggctatgagattcctgtggacatgctgtgtaaaagaattgctgatatttctcaagtctacacgcagaatgctgaaatgaggccgcttrsttgttgtatgattttaattggtatagacgaagaacaaggccctcaagtgtacaagtgtgatcctgcaggctactactgtggctttaaagccaccgcagc

SEQ ID NO: 242 - DNA, 584 bp, Cricetulus griseus
  misc_feature (512)..(512): n is a, c, g, or t
gggaagagctgaagcaggcgcttttggctcggcgcggtccgctgcaatccgtggaggaacgcgccgccgagccaccatcatgcccgggcacctacaggaagggktcggctgcgtggtcaccaaccgattcgaccagctatttgacgacgaatcggaccctttckakgtactgaaggcrgcagagaacaagaaaaaakargccggcgggggcggcgttggtggccctggggccaadakcgccgctcadgccgcggcccadaccaactccaacgcggcgggcaaacagttgcgtaaagagtcccakaaagatcgcaagawccckctgccccccagcgtcggcgtggctgacaaaaaggaggagacgcagccgccggtggcgcttaagaaagaaggaataaggcgagttggaagaagacctgatcaacaacttcagggtgaagggaaaataattgataggagaccagaaaggcgaccacctcgggaaagaagatttgaaaagccacttgaagaanagggtgaaggaggtgaattttcagttgatagaccaattattgaacggcctatccgaggccgaggtggtcttg

SEQ ID NO: 243 - DNA, 570 bp, Cricetulus griseus
  misc_feature (51)..(70): n is a, c, g, or t
cccagactgggtttctctgtttaatagtcctggctgtcctggaactccctnnnnnnnnnnnnnnnnnnnncaactcactgagatccatctgcttctgcctcccaagtgctgagattaaaggtgtgtgccaccaccactcagccaaaaagttttaaataaatatctgcaatgttaaaataagttgggggtcttgatccagataacacagcagaggatgtgagagtaagtagagggttgattgtaactagaaagggagactttctcccatggaactccaggggaactgtaaataccaagaccaatttggggaggagactaaagccaggaaacacatctatgaaacagattctagtttgccgacagcattctcatactgtccttctccatgcccagccattgcccttagaaagctaggaagttcctaaagagtcagtgccacatcattcaagcctagtataggaagcccagtgtttggggctgactgtttcttgggatcatttgaattctgaaagggactgctggaacagtccttgtggctggagaatagaaattagaccctgaggctttcta

SEQ ID NO: 244 - DNA, 356 bp, Cricetulus griseus
  misc_feature (298)..(298): n is a, c, g, or t
gaggatggggacgacgtgttcgaggtggagaagatcctggacatgaagtgcgagggaggtaagaacctttataaagttcgatggaaaggatatacgtctgatgatgatacctgggagcctgagattcatctggaggactgtaaagaagtttttcttgaatttaggaagaaagttgccgagaacaaagctaaagcaatcaagaaagatattcagagactgtctttaagcaatgacatatttgaagcagactttgatagtgaccagcaaagtgacacaaaagaagatacttcaccgaggnaagaaaaagaaaaaaataaagtgcaaaggaagagaaaagtccagatgatctgaaaaaa

SEQ ID NO: 245 - DNA, 722 bp, Cricetulus griseus
ataaatcacaagctaaatcaatcagagagcgacggagacctagagaaaaaaggcggtcgactggagtttccttttggacacaagatagtgatgaaaatgaacaagagcggcagtcggatacagaagatggttccaataagaaggagacacagacggattctgtttctaggtatgacagcagttccacgtcatcaagtgatcggtatgattccttgctgggtcgctctggttcatatagttacttagaagaaagaaaaccttatagtagcaggctagaaaaggatgatksaactgacttcaaaaagctttatgaacaaattttagccgaaaatgaaaagctaaaggcacagctacatgatacaaatatggaactaacggatctaaagttgcagttggaaaaggctacccagagacaagaaagatttgctgataggtcactgttagagatggaaaagagggaacgaagagctctagaaagaagaatatctgaaatggaagaagagctcaaaatgttgccagacttaaaagcagacaaccagaggctaaaggatgaaaatggggccttgatcagagtcataagcaaactttccaaataggacggagaagagaaacaagcaaagcagcaggacttgcacatactccgcagtggaccacattggcagccactggacacccgaaagaacctttggagactcatttcccgatatcctgccaaatgccct

SEQ ID NO: 246 - DNA, 580 bp, Cricetulus griseus
caagaaagcagtgacactgggcttcaggacagacttgcagctgtcagcccttgctcctggtgaggttcttgtctgatacaaggacatcagagaggaatcacaccctgactgactgatacaaagtaaagcccctttctctcatctcctctttcttcctcttacatcttggtaagaaaatggcagccatcaaggtgacaggggcggacaggaatgacaccttctccatcttcacagttaaaattggaacctgtgtaagactgttcatgggagcagggtagaactgcctccatgggccagttctaaaatcctgcttctaggctgggcaggtggctcactcagtggataaagcacacgtcatgcacacttgcagaccagagtttggatccccaaaaccttaagctacgtgaccaagatgcttacaagttcctgcagggttctggggagaacctgtctcagtaactagaatagagtgcaactgagaagatgccccgtgtcaacctcaggcctccacacatgcctacaagagtgcgaacatagaaaccctagagtccctgctcccaaaccaagcatggtggcatgt

SEQ ID NO: 247 - DNA, 282 bp, Cricetulus griseus
tgacttakgtctgggaacgagcacctccaaccatgtgacctgaaacttgccatctgcccctgtgtgagcttcacgcccgccccctggatgcactaagatttgctcttgtttggtcctggtctggacgcaaaacaaggagatggtkatttaaagagaaatccctatttatttgacacacaaaaaatccagttaatatattaatgtgaaataaacccagtttgcaccttgatttgtttgctacaactgtgaaacagtaaatgaagtaactggaaaaaaaaaata

SEQ ID NO: 248 - DNA, 777 bp, Cricetulus griseus
cgactccggaagatgctctgtctccggccacaggtccccctccctttgggctggagtggcgacgccagcacaggggcaaaggtcacctgctgctggctgcgactcctgggctggttgaggaaatgccaccagcccaagaaaaggctgtggcatttgcttcttgggatgacaatgagccctggggcccgtggactgggaacgggaccttctggctgccagctgtgaaaccgtttcargagggtgtctacctggctactgtgcacctgccctatctgcaaggacaggtctccctgcagctgactgtgcacaagtcccccaaagtgtctctgacaccagcaccccttgtgtgggctgccccargagaggcacccccggagctgctctgcctcgtgtcccatttctaccctgcggaaggcctggaggtggagtgggagctcagaggtggtccagaaggcggttccagawaggctgagggggggacgtggctctccaccgtccgccaccattctgatggctctgtcagccaggccgggcacctgcggctccccccagtcactgcccagcagcatggagtccgctatgcctgtcgggtccaccaccccagcctgcccgcatcgggtcgcagtgctgaagtcaccctggaagtggcaggcctctctgggccttcagtcgaggacagcataagcctgttcctgtccgctttcctcctcctgggactcatcaaggcactgggctggatggctgcctacgtgaccttccgtgaagactcaaaggtga

SEQ ID NO: 249 - DNA, 536 bp, Cricetulus griseus
  misc_feature (226)..(240): n is a, c, g, or t
agcttggcgagcagctggacaacgaacgagttgggatggccaccagctgggggagcatcttgcaagatgagaaacagcttgaggagttggcacagcaggccatataccgggccttggctgagggcgtggtgctgakgyytkykkwkagtcccagctcctctcaagtggtgacctatgccccgttcacgctcttcccctayaccagtccctagtgctctgctggagnnnnnnnnnnnnnnncagatggatttcaacatgctggtggatgctgtcagccagaactcggccttcctggaacaaacatctgtctagcactatcaaaaaggacgactacactgcccgtctctttgatatctacaagcaagtcctgaaagagggcattgcccagactgtgttcctgggcctgaatcgctcagattacatgttccagtgcagcgcagatggctccaaagccctgaaacagattgaaatcaacactatctctgccagctttgggggcctggcctcccggactcctgctgtgcaccgacatgttc

SEQ ID NO: 250 - DNA, 581 bp, Cricetulus griseus
cgtggagagcgcttcataaaaccggcctggtgatccagcactgcggaggcgaaggcaaaagagcagaagttcaargtcacccktagstasmkagtctasaaaacagcatgtactcacccattcctcaragcggctcttcattcccagcctcagtccaagacccaggcctacacatatggcgtgtggagaagctgaagccggtgttaatagcrcgagagaaccatggcatcttcttctctggggattcctacctaktgctacacaatggcccagaagaggtctcccatttacacctgtggataggccakcaatcatcccgggatgagcakggcgcctgtgctgwgctggctgtgcacctcaacaccctccttggggagcggcctgtgcagcaccgtgaggttcaagggaacgagtccgaccttttcatgagctacttcccacgtggsctcaagtaccaggaaggtggtgtggagtccgcatttcacaagacatccttgggggccaccccagcagccgtcaagaagctctaccaggttaargggaagaagaacatcckagccactgagagggcactgagctgg

SEQ ID NO: 251 - DNA, 580 bp, Cricetulus griseus
aaaggaagcgtgggtcctggggagggtgcatcacagcagccaggaggtgcacagcaggagtctgactctacatcttgacaagctatcctgttgtcaaatgctgtgctaagggawkaagcatccmyagtgttccagaggtcagtaccacaggctcctggacttctagaccagcagggcatcatgtataaagaactaatttggtacctggagcagaaagggaaagctcagggctgcagaaggaggagacccttttctgcccttaatattcaggaccgacctgagccccgatccacagctggctttacttccgttcactctggtgctcctgcatcacataagcttgcccctcctttttcttcctactccctgcttactctaggcatgggaaggggtgagcagcaagctttggttatggttttgattccttggtcaaccctgttaggctatgctaaacatatatgggtttgatccttggataggtatgggcctgcaaggcagggatgttttaggggacattgctgaagtgtaataccttatgtatctttctcccccagagcccttcatttccctgcttttgttc

SEQ ID NO: 252 - DNA, 379 bp, Cricetulus griseus
aggccggaaggatctgcttcctgattgctgggatggaaggcgtgcactgctatgcctggctagatccttttatgatgaatgatgtctgaaaaggactttttacttctttttcaaaggacacactcaaaggacacactcagtagtagtcacasgctcttgtatgtatgtacatacataggcataccatttargaactgaaactagcagaagtctctccatttgggagcttaagtcakaatacctgtgatgatttccaagtaccakccagtwatcatttaaaatgacctgcakgcatctgtagtttcattgtgactattatgtactacacacaccatttcctaggtctccagtttttggtagattaaatttagattaaaaa

SEQ ID NO: 253 - DNA, 524 bp, Cricetulus griseus
  misc_feature (210)..(222): n is a, c, g, or t
  misc_feature (224)..(237): n is a, c, g, or t
gcatccakaagtttaaaacacaaacaaatacaaagtcatacacatggttgtatcacaggaatatggtttccacctagaatgctcagctggggaaggatgaagccatcagctacatggtgcatggtttggtttccatccagaacaggctctcatgactgaacagggaagaaagaacataaagctgtgccaaaaaatagagaaaaggttttnnnnnnnnnnnnncnnnnnnnnnnnnnnaaaatgctgtgataaaccaaaagggaggaaaaatctgccccttatggtatttccctcctatcaatttggatactacagttgctctccaaaagaccggtttgtaccaatgaaacgtgtgactttgtaatcccaacgctgtattttctagaaccttctttggtggtttttctatctgctaaaattctgtggtctggaggcctcccaccacagatggaaactgtttttggcttattctttctgtcctcccttgttgctccccactccttcctctgatgtccttgctttgg

SEQ ID NO: 254 - DNA, 579 bp, Cricetulus griseus
tgtcattactttgaagaagtcttcagacagtgctttggtttgcctccacaaaaaataaagatttagaaccaggcagaaagcattcactaataaaattattgatgtatgatttttttttagtattgcctcccatgtggaaaactctaacttcatgtggaagttttatttatgttcatctgaactctcccaaaatataatttgcaaaaagcatcaggctccaaaaatagaccatttgaaggcmtgtggtggcgatacagtatgccttattggktcactggtggtttgctcttcagaatctgtgacttcagtactaacacattgaatttcttttgtattgagyygaaatcatwgwttctaaatcagcatttgcgttctcagctggtaatttcattgtaaagaattgattctacttaaagacagaatagcctgggctcgggtcatgtgtgtcatcaccccacccaccccattgtgccttcctgaagatcaggatgggacagtgtagagtgagtgtttgccattcaatagggccacattctgccttttgaagaaggaaagactgtccctaagtgtggagggctc

SEQ ID NO: 255 - DNA, 433 bp, Cricetulus griseus
  misc_feature (186)..(208): n is a, c, g, or t
aacagagtaggcaggagggagtgctctgtggttaggtgggtcaggctgtccagcgcctgtcgaaacacccagtgcagctggtaccctaaaacttgctggccagccagtccagcgtacctggggtaatccaggcctagtgaaacactgggaaatggctgatgaagacacctgatggcaacctgtgannnnnnnnnnnnnnnnnnnnnnncacacacacacacacacacrcgttcktttttggacacstgcaaacacmyatcagcayatacaccacawaattyatkcacacagggaagakatgattggytctcatctaacacatgtwyactaatwatmccactcgccwgakgggtgtyyctgtagatatgtytatmtaaaatasacacagagatgaatcccacccgcccttgaagacctaagatcgccatcaccc

SEQ ID NO: 256 - DNA, 795 bp, Cricetulus griseus
  misc_feature (3)..(105): n is a, c, g, or t
  misc_feature (111)..(164): n is a, c, g, or t
  misc_feature (188)..(215): n is a, c, g, or t
ccnnnnnnnnnnnnnnnnnnnnnnnnnnnnnnnnnnnnnnnnnnnnnnnnnnnnnnnnnnnnnnnnnnnnnnnnnnnnnnnnnnnnnnnnnnnnnnnnnnnnnnntgccannnnnnnnnnnnnnnnnnnnnnnnnnnnnnnnnnnnnnnnnnnnnnnnnnnnnnaagacctctttcttccaggctttnnnnnnnnnnnnnnnnnnnnnnnnnnnncaccattgaaattctaagtgatgtgcagctgataaaaactggagacaaagtaggagccagtgaagccacactgctgaacatgctcaacatctcccccttctcctttgggctgatcatccagcaggtgtttgacaatggcagcatttacaacccagaagtgcttgacatcacagagcagactttgcactcacgcttcctagagggtgtccgaaatgttgccagtgtttgtctgcagattggttacccgactgttgcctcagtgccacactctatcatcaatggttacaagcgggtcctggctttgtctgtggagactgattacaccttcccacttgctgaaaaggtcaaggccttcttggctgatccatctgcatttgcggctgctgctcctgtggctgctgccaccactgctgctcctgctgccgctgcagccccagcgaaggctgaagccaaggaagagtcggaggaatcagatgaggatatgggatttggtctgtttgactgatccctcagagcaacctactcagccagtttaatttgagaaatatggaaataaagaataaagtcttacttctgttgt

SEQ ID NO: 257 - DNA, 906 bp, Cricetulus griseus
agccctggacatttctagagaaacctacttggccattctgatggaccggtcccacaatggccctgtgatagtgggcagccctcawggcggcgttgatattgaagaagtggcagcttccaatccagaactcatctttaargagcaggatkgacatttttgaaggaataaatgatagccaggcccagcggatggcagaaaatctgggcttcctcgggcctttaaaaaaccaggcagccgaccagattaaaaagctgtatcatctcttcctgaagattgatgcgactcargtggaagtgaacccctttggkgagactgcwgaaggacaagttgtctgttttgatgccaagataaactttgatgacaatgctgagttccgacaaaaggacatatttgctatggacgacaaatsagagaatgagcccattgaaaatgaagctgycargtaccatcttaagtacatcggactagacrggaacattgyctgcttcgkkaatggcgctggattagccmtggctrcttrtsacataattktsctgaatggagggaagccagctaacttyytkraccytggargtggkgtaaaggaagcccaagtctatcaagcattcaaactgatcacatctgatcccaaggtggaagccatcctcgtcaatatatttggtgggattgtcaactgtgccatcattgccaatgggatcaccaaagcctgccgggagttagaactcaaggtgccactagtagtccggcttgaaggaactaatgtccaagaggctcagaaaatcctcagaaacagtggcctccctatcacatcagctgcggacctggaggatgctgccaagatagctgttgccagtgtggcaaagaagtgatgtgatggcttcccccggctcccgtgaagataggcac

SEQ ID NO: 258 - DNA, 688 bp, Cricetulus griseus
attctcttgccagagataaagggtatgactggtttaccaaacaggaactttccccaagccctcaagggaatggaggcctttatctagatgcctggccttggggaaagraccatggaactaaacaatatactacaacttaagagcaattttcatacgtcaagggcctaagcactgagctgttccctaattgtgcccctttgtgtcttagtcttactatatgtgcctgttcccctcttargctcccaaaagggaaggkcctggtgtctttcccctctcccgttacaccctacattctgatctctgtacttactagcttacttacttactgttgcccttaatggtctcagactttggatctgaactgtaggctctttcatccttggggtcaggggtgtccartgaacctctaacatttctggttytggtgtaattaggarggcacagagagattccyggytycagtgktkgggatytttattttcaaagaatcmttttgtttagaggggctwccattgyacacattttttatcctttaccaaagctygcacaaaatttcccaaasggaaakgcattwayaktgagaatcattaaaaatgaaataaaaaggtgctggagaagtgtgatctgcagtgtcaaaatgctggaactttgtcaagcagcgatggtcacctatacggtccataccaaa

SEQ ID NO: 259 - DNA, 854 bp, Cricetulus griseus
gaaccaggaccttccaattgccagcagagaggtttcaccagcagcaccctcaggttattgatgtggatgaagtagaggaaacaggaattgtattcagctacaacataggttcccagcagacgtgtgccaacaatagacaccattgctccgtgcatgcagagtgcagagactatgctactggcttctgctgcaggtgcgtggccaactacacgggcaacggcaggcagtgtgtagcagaaggttccccacagcgggtcaatggcaaggtgaagggaaggatcttcgtggggaacagccaggtgcccgtggtgtttgagaacactgacctacactcctatgtggtgatgaaccatggacgctcttacacagccatcagcaccattcctgaaactgttgggtattctctgcttcccctggsrcccattggaggcatcattggatggatgtttgcagtggagcakaaygggttcaagaatgggtttagcatcactgggggcgagttyayccgacaagccgaggtgaccttcttggggcacccggkcaakctggycctgaagyarcactycaktggtattgackaacacggacacctgaccatcaacacagaactagacggccgagtgccacagatcccctatggttcttcagtgcacattgagccctacacagagctgtatcactactccagctcagtgatcacttcctcctccaccctggagtacacggtgactgatcctgatccggacggcactgcaccctcacacacccatgtttaccagtggcgtgagaccattacctttcaagagtgtgtccatgatgacttcatgccatccctgcccattacccatcatctc

SEQ ID NO: 260 - DNA, 586 bp, Cricetulus griseus
cctgcctgtcgccatggccgcctacaagctagtgctgatccggcacggcgagagcgcctggaacctggagaaccgcttcagcggctggtacgacgccgatctgagcccggcgggccacgaggaggcgaagcgtggcggacaggcgttgcgagatgctggctatgaattcgacatctgcttcacctccgtgcagaagagagcaatccggaccctctggacagtcttggatgccattgaccagatgtggctgccagtggtcargacctsgcgcctcaatgagcgacactatgggggtctgactggtctcaataaagccgaaactgctgctaagcatggtgaggcgcaggtaaagatctggaggcgatcttacgatgtcccaccacctccaatggagcctgatcatcccttctacagcaacatcagtaaggatcgcaggtatgcagaccttactgaggaccagctaccctcctgcgatagcctcaatgacactattgccagatcactgcctttctggaatgaagaaattgtttcccagatcaaggaggggaagagagtcctgattgcagcccatggcaacagtcttttg

SEQ ID NO: 261 - DNA, 587 bp, Cricetulus griseus
ggtgaccgcggcaaagggcacacgctagagccatgaagttcctcagcaaggccgggtccttctcgagattttactccctcaaagttgccccgaaggttaaaactccagttccccctgcaggagtacctctgcagcctgaggatcttgagtttaccaaattaccaaatggtttggtgattgcttctctggaaaactatgctcccttatcaagaattggcttattcgttaaagcaggcagcagatatgaggactccaacaacttaggaacctctcatttactacgtcttgcatctagtttgactaccaaaggagcgtcgtctttcaagataacccgtggaattgaagcaattggtggtaaattaagtgtggcagcaacaagggaaaatatggcctacactatagaaggcatgcgaaatgatattgaaattctgatggagttcctgctcaatgtcaccacagcaccagaatttcgccgttgggaagtagctgcccttcagtctcagctaaagattgacaaagctgttgcctttcagaattcacagactcgtgtgattgagaacttgcatgatgctgcctacaagaatacc

SEQ ID NO: 262 - DNA, 579 bp, Cricetulus griseus
  misc_feature (455)..(472): n is a, c, g, or t
tttatacccccttctcctgggsyccccacttccttcagggatctcctagtgggtgacttgggaaccgtgatcattcctgtctcaggcatggtcctcatcgtggtacagctgctcaccaccccattaktcacagccacgtctcccastcagggcrgaagatggaggaacctgtaccctctcaagcctgggtgctggagtactcccaagggcaaggggtyccctgaacttcagtttcccttccgtgactatctcaaccttgctagactcaagggcccaaccctttgggcaggatggggacagtggcagggcccatgacagtgccagcttcaccttctgcagtccgccttccccagggctggagatccatcacatggagtaggggcttaccccatctcttggggcttggggctctagaatcccttggtgaccaaggcccagcctaatccaccccagcnnnnnnnnnnnnnnnnnncacataggggacatgaggacagagctgtggccttaaatccagaggccagttttggtcctcaacggtgtctaacccttagtaggaaacagaatgatatgggctggaca

SEQ ID NO: 263 - DNA, 579 bp, Cricetulus griseus
ccgcgaagtgggctcstggaccagtgagacccagaagagggttttagcacccgggaggtcgcggaaggctgctccgcggctgtcatcatgccacaaaatgaatatattgaattacaccgtaaacgctatgggtatcgtttggattatcatgagaaaaagagaaagaaagaaagtcgggaggcccatgaacgttcaaagaaggcaaaaaaaatgattggcctgaaggctaasctctaccataaacagcgccatgctgagaaaatacaaatgaaaaagactattaagatgcatgaaaagagaaacaccaaacaaaagaatgatgacaagaccccacaaggagcagtccctgcctatctgctggacagagagggacagtctasagcaaaagtactttccaacatgattaagcagaaacgaaaagagaaggcggggaaatgggaagtccctctacccaaagttcgtgcccaaggagaaacagaagtattgaaagttattcgaacaggaaaaaraaaaaagaaggcatggaagatgatggttactaaagtctgctttgttggtgatggttttacaagaaaaccc

SEQ ID NO: 264 - DNA, 714 bp, Cricetulus griseus
gtcgacccacgcgtggggggctaccctactggcccctcagctgcaagctgtgaattgagtacctatttccaagctttctcctgactctttggaccgagctaacccttaagtgcctttaaggaggaagaaacagccactgtgcctcatggattctatgctctcccrsrggcattgtggggtgatgctccctgggtgccaagccctattctargtactgtgaacagcmaakagctggctwggggtgggggataccttgctggctgagytgccacagtgycatatrctsccakgccakcatscasgctggkcacatwwcwtaccwvasytkgccttstggggctaggtttctgttcacaggacagtcctcttcattggtgccccakatgccttgtatcttgcactttaaacaaagggagcatctctgtgccaaagaccaaaggcctcactcaccctgtgcctcatgaccacaagtcaggcaagactggaattgtgccacttgcatccaccccttcaggcaggaaaacctgcttgaaggcttggcccaagagtcaagacaaaaggatgagactccaaagaagccaacatccacctcaaggaatgaggggtcaagtcccttcaccctggtggcctctaattggagctccacagttggagaggaaaagaccagatatggatgggcctaatgccatacagaaaatctcaagccctgttatg

SEQ ID NO: 265 - DNA, 623 bp, Cricetulus griseus
gtactacccacgcgtccggcttaagcgtcctacctaaggtacgctgggagacgctgygatggcsagktcrgcagccgcagcctccttccttgctccgactctggagcarctccggcacctgscagcggasctgcggtcacttctgcctctagtgarggwcrgcgaagcccaggakacakccgaggaatttaatcgagagaygttctggagaagacttaatgaggcagcagkgaacctgtcaggggaagccackattctgaccacacttttckcccgacttccactgccgtctccacrggaaacccakaggatctgtgagcaaatkcatgttggcatcaarsaaattattgamstatatyattcacttcctaaaaatcasgggatcaccctgagaaagctggtgcggaatgctactwtggacgttgtggatggcatggctcatctyctggwagtgcttatctctccatctyakagcactgagaactgygaccttattycckgcwatagtgtctcggtagcatgccaaaaggtgtctgagattccaaaagataacaaggctgcagcccttatgatgctgacaaagtgtgtgaatcctgtgaaagatgcacatgaagaaatggagc

SEQ ID NO: 266 - DNA, 579 bp, Cricetulus griseus
  misc_feature (327)..(327): n is a, c, g, or t
cctctggtggcagccatcaggtgagccaagatgggtgcatacaagtacatccaggagctatggaggaagaagcagtccgacgtgatgcgctttttgctgagggtccgttgctggcaataccgccagctttctgcgctgcacagggstscacgccccacccggcctgataaagcgcgaaggctggggtacaaggccaaacaaggttatgtcatatacaggattcgtgtccgccgtggtggccgcaaacgcccagttcctaagggtgcaacttacggcaagcctgtccatcatggtgttaaccagctaaagtttgccagaagccttcantctgttgctgaggagagagctggacgtcattgtggggctttgagagtcctgaattcttactgggttggtgaagattccacatacaagttttttgaggttatcctcattgatccattccataaagctatcagaaggaaccctgacacacagtggatcaccaaaccagtccacaagcacagatagatgcgtgggctgacatctggctggcgaaagagccgtggccttggaaagggccacaagttccaccacact

SEQ ID NO: 267 - DNA, 1453 bp, Cricetulus griseus
  misc_feature (290)..(353): n is a, c, g, or t
  misc_feature (371)..(387): n is a, c, g, or t
  misc_feature (390)..(406): n is a, c, g, or t
cttagaccagctcgggaaccggctcgtgcgcacgtccctgctaaacgctctccagggtgtgtataggaacctctgttcttttcctgctcgcccaccggagtgccagacaatgtctattctcaaggtacttgcccgagagatctttgactcccgtgggaaccccactgttgaagttgatctctacacctcaaaaggtctcttscgagcggctgtgcccagcggtgcctccactggcatctacgaggccctagaactccgagasaatgataagactcgctacatggggaagnnnnnnnnnnnnnnnnnnnnnnnnnnnnnnnnnnnnnnnnnnnnnnnnnnnnnnnnnnnnnnnnctggacgtggtggaccannnnnnnnnnnnnnnnntcnnnnnnnnnnnnnnnnngcaccgvgaataaatctaaatkkgstgcaaatgccatcctgggaktatccctggcagtctgcwaagctggtgccgcagaaaagggggtacccctgtaccgccacatcgctgacttggctggcaaccctgaagttattctgcccgtccccgctttcaacgtgatcaatggtggttcccacgctggcaacaagctggccatgcaggagttcatgatccttcccgtgggcgcgtccaccttccgggaagccatgcgcattggggcagaggtttaccacaacctgaagaatgtcatcaaggagaaatacgggaaggatgccaccaatgtgggtgatgagggcggtttcgcgcccaacatcctggagaacaaagaagctctggagctgctgaagactgcaatcgggaaggctggctacacagagcargttgtcayygggatggacgtggctgcctctgagttcttcargtctggcaaatatgacctagacttcaagtctccggatgaccccagcaggcacatcacacctgaccagctggctgacctgtataagtccttcatccaggagtatccagtggtgtccatcgaggacccctttgaccasgacgactgkgaggcctggaaraatttcacakctagtgcakgcatccasgtggttggggatgatctcacagtaaccaaccctaasakgattgccaaggctgtcagtgagaaktcctgcaactgcctcctgctcaaagtcrrccagattggctctgtgaccgagtctctgcaggcgtgtaakctggctcagtccaatggctggggtgtcatggtgtcccatckctccggggagacagaggacactttcattgccgacctggtggtarggctctgcactgggcagatcaagactggtgccccttgccgatctgagcgtctggccaactacaatcagatccttataatcaaggaagagctgcgcatcaaggccaagtttgctggcataagcttcaggaaccccctggccaactaaagtgtgtggagatcctgaaaacacctgccgcttagcc

SEQ ID NO: 268 - DNA, 829 bp, Cricetulus griseus
  misc_feature (740)..(762): n is a, c, g, or t
cgggagcgcccgccgccgccaggcagactgacagagaccagccatggcagacgagccgaagcccatcagtccgcttaagaacctcctggccggcggctttggcggcatgtgcctggtgtttgtggggcaccccctggacacggtcaaggtgcggctgcagacgcaaccgccaagtttgccaggacagccacctatgtactctgggaccatcgactgtttccggaagactcttattagagagggcatcacagggctgtatcggggcatggctgcacccatcattggagtcacccctatgttcgctgtgtgcttctttgggtttggtttggggaagaaactacagcagaaatctccagaggatacacttaactacccacagctgtttgcagctggaatgtkrkskggtgtgttcaccacgggaatcatgacccctggagaacggattaaatgcttgctgcagattcaggcttctacgggggaaaccaaatacactggtaccttggactgtgcaaagaagctctatcaggagtttgggatccgtggcttctacaaagggactgtgctgaccctcatgcgagatgttccagccagtgggatgtatttcatgacatatgaatggcttaaaaatctcttcactccagagggaaagagtgtcagtgacctcagtgtaccccggatcctcgtggctggaggctttgccgggatcttcaactgggctgtcgcaatccccccagatgtgnnnnnnnnnnnnnnnnnnnnnnnccctcctgggaaatatccccatgggttcagaaacgtgctgagagagctgatccgggatgaaggagtg

SEQ ID NO: 269 - DNA, 1022 bp, Cricetulus griseus
cgcgcataccagctttggcagtgcggcgagggtgaccaatagaaaccggggacctcgcgtttcctcctaagctccaccccttgaccccaagcgccgtggcggaagaatacaatcagaggacctggggcsgswycaatcacggaagcggaagcggckggaggtggcggaactctgcgagcttctggcacacgtgtgcgaattgctatgatggawgtcaaaragaagaaaaaattsacaggaaaaagtccaaagacagcacaaggaaagactagatttcataaaaaccgtgattctggktcttcaaagacattcccacagaaagttgtcaaggaaggtgggccctaaagtgtcatctaagaactcttgagaaaggtgccacaaaacctggcaaaaagggtgtgaagcagttcaagaacaagccacaagggggcaaaggaccgawggacaaattccagaagccaaatacattcaacawgaagaggaagttccagccagatggtaaaagcgacgaatcakcagccmagaaacccawatgggatgacttcgaaaagaataataaagagctgaagcagagcaggcagctcagtgataagaccaactatgacatcgtggttcgagcaaagcacatttgggaragcttgagaagaaaagactgygrtmaagaaaawagaaggaagctgatgagtgatttgcagaaattgattcmasggaaaattaaaactattgctttcgcacatgactcgacacgtgtgatccagtgcttcattcagtatggaaatgaagagcagaggaagcaggcttttgaagaactacaaggtgacttggttgaactaagtaaagccaaatattccaggaatattgtcaagaaatttctcatgtatggaagtaaaccacagatagcagagataatcagaagttttaaaggtcacgtgaggaagatgctgcgacattcagaggcatcagccatcgtggagtatgcgtacaatgacaaagccattttggaacagaggaacatgctgacc

SEQ ID NO: 270 - DNA, 897 bp, Cricetulus griseus
  misc_feature (827)..(861): n is a, c, g, or t
ggaacgcgccgcagaaccgggttctggtgactctagctgcgttcgctcctctgtccttttgcctacccaccgccgtatccggccgactcacccctcctgtgccaggaacgtgctgtcaccggcgccatgccctacccatacccagcactgaccccggagcagaagaaggagctgtctgacatcgctcatcgaattgtggccccgggaaagggcatcctggctgcagatgagtccactggaagcattgccaagcgcctgcaatccattggcactgagaacaccgaagagaacaggcgtttctaccgccagctgctgctgactgctgatgaccgtgtgaatccctgcattgggggggtgatccttttccatgaaacactgtaccakaaggccgatgatggacgtcccttcccccaagttatcaagtccaarggcggkgttgtgggcattaargtagataaaggcgtggtgcctctggcaggaaccaatggtgagaccaccactcaargactggatgggctgtctgaacgatgtgcccagtacaagaaggatggagctgactttgccaagtggcgttgtgtgctaaagattggggaacatactccctcagcccttgccatcatggaaaatgccaatgttctggcccgttatgccagcatctgccagcagaatggcattgtacccattgtggagcccgaaatcctscctgatggggaccatgacttaaagcgctgtcagtatgtaactgagaaggtactggctgctgtctacaaagctctgagtgaccaccatgtctatctggaaggcacactgttgaagcccaacatggnnnnnnnnnnnnnnnnnnnnnnnnnnnnnnnnnnnaatgaggagattgccatggcaactgtcacagcactt

SEQ ID NO: 271 - DNA, 508 bp, Cricetulus griseus
gaaaaatagctatgaagggcaaaaacaaaagttatccaacctagaatattatggaatgctaaactctaccagcaagcccaagttccgtctgttgatwtccagaatttcttaaaaacaaatgatgaactgaagaagtttctgcagaactttctgctatatggaattgcatttgtagaaaatgtccctcccactcgagagcacacagagaagctggcagaaaggatcagtttaatcagagaaaccatctatggaaggatgtggtatttcacttcagatttttctagaggtgacactgcatacaccaagctggctctagatcggcacactgacactacctactttcaagagccctgtggcattcaagtatttcattgtcttaagcatgaaggaacgggtggcaaaacactgttagtggatggattctatgcagcacaacaagtacttcaaaaagcacccgaggaatttgaactcctcagcaaagtaccattaaagcatgaatatattgaaa

SEQ ID NO: 272 - DNA, 1192 bp, Cricetulus griseus
  misc_feature (250)..(267): n is a, c, g, or t
  misc_feature (494)..(519): n is a, c, g, or t
gtctagctatataaaccaggctgatctcaaagttgcaatcctcctgtctcagcttcccaagtgctgggatttcaggcatctaccactctattcactaagacttactgaatgagcttgaaatagtaactcaagtcattaatcccagcactcactccagaggccaaggaaggtggatttctatgagttcaagggcagcctgctccacaaagtgagttccaggacagtctgaacagagtgaaatcctattccnnnnnnnnnnnnnnnnnncacaatacaacctacttactgaatgattgttaagcaaatgagaactcacagctgaatagtggagatgcaacaacctctgtgttcaaaggtggggaggaatgtgtgcttgtcacactgtgttatttgacatctattgaagctttgtctcagatacttttccaattgctgtgaccaaatatccaaaaagaagggactggagtggtttgttttggcttgcagcttgagannnnnnnnnnnnnnnnnnnnnnnnnnacaaaacatttctgaggaggagcaaggccagctttgaggaaagtgggtgggtttgggcttggctcatctggactcattctgaggcgcttgaagaacttttgtacaccatgggtgtaggaggcatcctacagctccaagccagcattgcaactgtaagacccctggaaagctcargcttccaggatcttagcccaggactgaagccaccccaatcaccaggctgagttgaaagcttgatgcaaactgcatgaggctttattgttgtttaacgagctaaccctatgttatctcgggtctttcacccacccgccatggcagatagctagcaaagatagttcgaagcgtctgcatagagatcttgtagggcagagtaaggggagtgtctaggggtacgcacaggctcaggattggtgtgcctccaggcttggagggcttgccctgtgttgattggccaactggttgttatggcccataggccctcgcagggtggttgctatgctctgcacatcattgctgtgcacttgtccgtaaagcacacccagagccgtaaagcataccaccaccagctaacttctgattggttccttgcaggaggcacgcatctgaccttagtgactaaggtcagataatcatgtgttcagctgttatggctgccgaaatggggagctggtcg

SEQ ID NO: 273 - DNA, 580 bp, Cricetulus griseus
tttgttgtttttgtcattttttctttttgtgttgcttgtccctttgtgggccggacgagcctatctgggatccagatgggggagtcggcatcctgtggaaatatacaagcataccctcgtctcgatgttattaggatgttcggtcctttttaaagaccagaaagaagatctttttacataacttttggaagggcggaattaaatttatgtgcccaatgtaccatagtaggkgtgacattcttcttatttgtatttaaatgatttaaaacaaataargtgtgagacaaaatatgatgaggagtaaaatatttattggccttttgtaagwgtkwaatttgtgtttttaagacctgatgagtkctttctataatagcttgtccttgtggattataagggatttttgtagtgtggactatatgtcattgagcacaaaatgatttaaaagctttggaggtatatgtcggaccattgtctgttttaatttgagacggcatacccatcatttgaaaacaatgagttagatgttgtatcatatcctttatagcttcttttgtccgagtagtggctgttattagatgag

SEQ ID NO: 274 - DNA, 574 bp, Cricetulus griseus
ccatggaggctgagcctcctcctctggaggagcggcggcggctgcaggaggagttgagtgagttcgtagagagctgctgccggactctggaggaggtgacggcgtccctgggatggagcctggatcagctggaccctggggaccaggcggaggccgaggatgaagtcacgatatgcccttatgattccaatcatcatatgcctaaatcatcactagcaaagcatatggaatcttgcagattgaggaagctgggttatgccaaagaggaagaggatgaaatgcacaatcctgcttttttctatgagaatttgaagattccttcagttactttgaataaggactcacagttccagataattaagcaagctagaactgcagctgggaaagatggggattgttatagtccaagaatgtattcttcagtgcctgttgaagttcctctgaatcacaaacgatctgtttgtgaccttacccaagcagatcgtcttgccctttatgattttgtcattgaggagacaaagaaaaatcgatctggttctcaagtcattgaaaacgacagcgatctgtttgtaga

SEQ ID NO: 275 - DNA, 534 bp, Cricetulus griseus
  misc_feature (296)..(313): n is a, c, g, or t
agcggctgcaccgccgaccgcacgcacggccatggctggggcgctggtgcgcaaagcggcggactatgtccgcagcaaggacttccgggactatctcatgagcacgcacttctggggcccagttgccaactggggtctccccattgctgccatcaatgacatgaagaagtctccagagattatcagtgggcggatgaccttcgccctctgttgctattccttgacattcatgagatttgcctacaaggtacagcctcgaaactggcttctgtttgcgtgccatgtaacaaacgaannnnnnnnnnnnnnnnnnggaggacggcttatcaactatgagatgagtaagaaggcgtcttcgtagcagttcgaggaccagctcttgaaagggagtgcctcagccactgctgccaagccacagattacattagcataaatggtcttgccgaagggaaaacacggaatgctatccttaattaccatgccaacattatagaaaagccgagagtccctaaaccaactctctgctgccttacc

SEQ ID NO: 276 - DNA, 536 bp, Cricetulus griseus
  misc_feature (363)..(379): n is a, c, g, or t
gccgccatcacgccccgggtctccaggcctccgtcaccgcgaggctcagattacactgtgcacccaccatgagtcttgacatccaktgtgagcagctgagtgatgccaggtggacagagctccttcccctgatccagcaataccaagtggtcaggttggatgactgtggtctcactgaggtgcggtgcaaagacatcagctcakccattcagtccaaccccaccctaacagagctcagcctatgcaccaatgagctgggggaccctggcgtgtgcctggyactccasggcctgcagaatcccacctgtaagatccagaagctaagcctgcagaattgcagcttgaccgaggctggctgtaggnnnnnnnnnnnnnnnnnacgttctttacctaccctgcgggagctacatctcagtgataatcctctgggagatgcaggtctgaagctgctctgtgaaggacttctggacccccaatgccgccttgagaagcttcagttggaatactgtaacctcacagctaccagttgcgagcct

SEQ ID NO: 277 - DNA, 578 bp, Cricetulus griseus
  misc_feature (226)..(283): n is a, c, g, or t
cgggggcggcagaagcggctgaggtggccgtggcagtggtggaggttggctcgacccggcaatttgaggagctactgcgcctcaaagccaagtcgctcctcgtggttcatttctgggcaccatgggctccgsagtgtgtacagatgaacgatgtcatggcagagttagctaaagaacaccctcatgtttcattcgtgaagctggaagccgaagccgttcctgaagnnnnnnnnnnnnnnnnnnnnnnnnnnnnnnnnnnnnnnnnnnnnnnnnnnnnnnnnnngagagtcgaccggttagatggtgcacatgccccagagttgaccaaaaaagtccagcgacacgtgtctagwggatcctttcctcctaktgctactgagcatattawagaagatctcaacgttcgcctgaaaaagttgactcacgctgccccctgcatgctgtttatgaagggaacaccycaagaaccacgctgtggtttcagcaagcagatggtggaaatccttyacaaacacaatattcagttcagcagttttgatatcttctcagatgaggaagttcgacaggggctcaaaaca

SEQ ID NO: 278 - DNA, 638 bp, Cricetulus griseus
gacgctcgtgggtgtttcgcagtttctcgtctttggactctgcttgtctgatcacccagkatgccgcgtggaagccgaagccgctcttcccgggtggcccctccggccagccgggcccctcagatgagggctgctcctagacatgcacctgcagctcagcctccagcagcagctgcaccatctgcagttggctcccctgctgstgcacccaggcagccaggcctgatggcccagatggcaaccactgcarctggtgtggctgtgggctctgcggtgggtcacaccctgggtcatgccatcactgggggcttcaktgggggtggcagtgctgagcctgcaagacctgacatcacttaccaggagccccagggaacccagctgctggaccagcagcgagggccatgctctcttgagatcaaacagtttctggaatgtgcccagaaccagartgacstcargctttgcgarggtttcawtgargwgttgcgacagkgcavaattgcmaatggkttaatctaatcmagaakytcaaactgaasaaakgggctctgcctmattgatagkgaaagtgkggaccctgagkaaacaaatcttatytctwatarctsctttacttcagccatggagagartsctaac

SEQ ID NO: 279 - DNA, 282 bp, Cricetulus griseus
  misc_feature (191)..(192): n is a, c, g, or t
gggctcttctaccccagatggctctgtctttatcaaagcccgatgaagcatacacaatgaaaaggtgtttgaatctagtttttttttgttgttgttgctacttaatgcttacataacatacagatatctgctctggcggaggagggcwacacttctgtttttaaactgagtttttcagatgaagcattatnnaaaatatcaagtagtggaattactctttagtgattggactgtgcttctataagcaatttatatttaaggtgagcatcttaagtgatgtgt

SEQ ID NO: 280 - DNA, 1733 bp, Cricetulus griseus
  misc_feature (84)..(93): n is a, c, g, or t
  misc_feature (97)..(136): n is a, c, g, or t
  misc_feature (140)..(219): n is a, c, g, or t
  misc_feature (222)..(242): n is a, c, g, or t
  misc_feature (255)..(299): n is a, c, g, or t
  misc_feature (303)..(322): n is a, c, g, or t
  misc_feature (334)..(373): n is a, c, g, or t
  misc_feature (380)..(393): n is a, c, g, or t
  misc_feature (395)..(414): n is a, c, g, or t
  misc_feature (421)..(452): n is a, c, g, or t
  misc_feature (464)..(484): n is a, c, g, or t
  misc_feature (771)..(806): n is a, c, g, or t
  misc_feature (845)..(855): n is a, c, g, or t
  misc_feature (858)..(886): n is a, c, g, or t
  misc_feature (891)..(909): n is a, c, g, or t
  misc_feature (946)..(966): n is a, c, g, or t
ccgtcagaacgcaggtgttgtgaaaaccaccgctaattcaaatccaacatgggaaaggaaaagactcatatcaacatcgttgtnnnnnnnnnntagnnnnnnnnnnnnnnnnnnnnnnnnnnnnnnnnnnnnnnnnaatnnnnnnnnnnnnnnnnnnnnnnnnnnnnnnnnnnnnnnnnnnnnnnnnnnnnnnnnnnnnnnnnnnnnnnnnnnnnnnnnctnnnnnnnnnnnnnnnnnnnnngctgagcgtgaannnnnnnnnnnnnnnnnnnnnnnnnnnnnnnnnnnnnnnnnnnnnaaannnnnnnnnnnnnnnnnnnntgccccaggacnnnnnnnnnnnnnnnnnnnnnnnnnnnnnnnnnnnnnnnnrgctgannnnnnnnnnnnnngnnnnnnnnnnnnnnnnnnnngawtttnnnnnnnnnnnnnnnnnnnnnnnnnnnnnnnntgagcatgcccnnnnnnnnnnnnnnnnnnnnngtgaaacagctaattgttggtgtkaacaaaatggattycaccgagccaccttacarccaraagagatacgakgaaattgtgaaggaagtcagcmcctacattargaaaattggstrcrrccctgacacaktwgcatttgtgccaatttytggktggratggkgacwacatgctggagcctaktgctaatatgcctkggkksaagggatggawagtyacccgtaaagatggcagwgccagkggtaccacactgctggragctttggattgtrtsstgccaccaactcnnnnnnnnnnnnnnnnnnnnnnnnnnnnnnnnnnnngatststataaaatyggkggkrttgggactgtkcctgtnnnnnnnnnnngannnnnnnnnnnnnnnnnnnnnnnnnnnnnttacnnnnnnnnnnnnnnnnnnnacmacagaagtaaagtctgttgaaatgcaccatgaannnnnnnnnnnnnnnnnnnnnggagacaatgtgggcttcaatgtaaagaacgtgtctgtcaaagatgtcagacgtggcaacgttgctggtgacagcawaaatgacccaccaatggaagcagccggcttcactgctcargtgattatcctgaaccatccargccaaatwagtgctggctatgctcctgtactggattgtcacacagctcacatagcatgcaagtttgctgagcttaargagaagattgatcgccgttctggtaagaagctggaagatggcsctaaattcttgaaatctggtgatgcagccatcgttgatatggttcctggcaagcccatgtgtgttgagagcttctctgactatcctccactgggtcgttttgctgttcgtgacatgaggcagacagttgctgtgggtgtcatcaaagctgtggacaaraargctgctggagcgggcaaagtcaccaagtckgcccakaaagctcagaargctaaatgaatattacccctaacacctgccaccccagtcttaatcagtggtggaagaacggtctcagaactgtttgtctcaattggccatttaagtttaatagtgaaagactggttaatgataacaatgcatcggaaaaccttcaggaggaaaggagaatgttttgtggaacatttttgtgtgtgtggcagttttaagttattagttttcaaaatcagtactttttaatggaaacaacttgaccaaaaatctgtcaakwwttttgagacccattaaaatacaagtttaatgagaaaaaa

SEQ ID NO: 281 - DNA, 604 bp, Cricetulus griseus
tccacttccagactgaagccgtctgtacagagcctcaattcagttcctgggaagacaagaaaataaaaagayacttctttaaaaatggcgatggtatcakaattcctcaagcaggcctggtttattgacaaccaagaacaggaatrtgtkcaagctgtaaaatcatccaaaggtggtcctgggtctgccgtgagtccctacccatccttcaatccatcctcagatgttgctgccttacacaaagctatcatggttaaaggtgtggatgaagcaaccattattgacattcttaccaagagaaccaatgctcagcgccagcagatcaaggcagcatacttgcaggaaactggaaagcccctggatraaatgctgagaaaagcccttacaggccatctggaagaggttgttttggctctgctaaaaactccagcccagtttgatgcasatgaactccgtgcggccatgaaggggcttggaacagatgaagacactctcattgagattttggtatcaagaaataacagagawatcagagaaatcaacagartctacagagaagagctaaagagagatctggccaaagacatcacttcggatacttctg

SEQ ID NO: 282 - DNA, 608 bp, Cricetulus griseus
  misc_feature (35)..(59): n is a, c, g, or t
  misc_feature (93)..(141): n is a, c, g, or t
  misc_feature (173)..(220): n is a, c, g, or t
  misc_feature (259)..(301): n is a, c, g, or t
  misc_feature (489)..(512): n is a, c, g, or t
attgcctctctgctcgcgtcaccgccgggatgaannnnnnnnnnnnnnnnnnnnnnnnngcggtccatcacgcagatcaagtacaaccgcgannnnnnnnnnnnnnnnnnnnnnnnnnnnnnnnnnnnnnnnnnnnnnnnntactctgtgaatggcgagaggctgggcacctnnnnnnnnnnnnnnnnnnnnnnnnnnnnnnnnnnnnnnnnnnnnnnnnaccaagcatgtccttactggctcagctgataacagctgnnnnnnnnnnnnnnnnnnnnnnnnnnnnnnnnnnnnnnnnnnngaagaccaactcagccgtccgaacctgtggctttgacttcgggggtaacatcatcatgctctccacagacaagcagatggggtaccagtgttctgtgagcttcttcgatctacgggatccaagccagattgacaccaatgagccctacatgaagatcccctgcaatgactccaagatcaccaktgccnnnnnnnnnnnnnnnnnnnnnnnnattattgcaggacatgagagtggtgagctcaaccagtatagcgccaagtctggggaggtgttkgtgagcgttaargaacactcccsgcagatcaat

SEQ ID NO: 283 - DNA, 875 bp, Cricetulus griseus
ttcaaagtttttaagtttattttggttgtcatctaagtacaaacttaaagggcttttcatcaggccaaaggcacctctgtccaatccatacctggcactctggacagaaraaaaatgtacatgcttatascccaaatctgtagtttttgctaagtatgttcctgctgtttaaacagatatccagatatctgctttttctgcactgkgggcttcagtaaataagttttaacctctgttcctagttwaaacatgtcttaaacaggtttctgcttctggctgacatctgagtatcakttgctaactacaggctgkyctaagtrgactgcgakccctggacttgctgtggatgtgaaccaktccagctgatrtggacaccccctgtctctgcaacagtgtstgctaaccadaagcccctgatraattccccattgsctarattcctttttgcttttgactagcatttcaaccttctggggtccctaacttcgtcccaaagtcagcasgaagcagtytggaaaagaatttcrcygtccattttccctggttraaatgctaagtcaaaakgaactcccttgcatggggatgacagtatctatcactccctgatggggatgctagagagacagcamttccatgattggaatttacaaaaaasaaaatgggggaatgaasgaaccggcttcccttttggcagmcataayagccsaacatgtgcttgscatatacctgccttggtcacttakaggtcakatgccygtcttgtgacaaggaaccaatcagaagttagctggtggcgctatgctttacgaccctgggtgtgctttacggacaagcgcacagcaatgacgtagagagcatagcaaccaccctgggag

SEQ ID NO: 284 - DNA, 964 bp, Cricetulus griseus
tactccgctaagtaaaccattattgtgcaacttgcctcctaccttgactttgcctgacctccatccttggacatggacactcagatttcaaagaaaaacccacatgagatggattatttttttctagagtatggccccagagagtccttcccctccatcgtgtctggctgctgacctgggtattgtgccattagtgcagggcctccatggcaacactgagttactctgggtttactgtcatcaccaggcttccctacaggctgttctcagtccacctttcaagtctgtgtgtattctgtgtgtgttagcagcagccttggtgttcagtgccagggtgtgcggttttgataagctacagcccattttgagacggtgaggccacttytctactacctycctctytggtgtggcctctcggccaaagctcccatccacagctgggatgtctgagccacakyctgctgcactgttwycgctctgggatcttctgagttacttttttaggctgtggtttggygamargawccmacacattaacgatyytttttttccccaaaagcchctgwawaattcttggcatgttttsatgkccctgttggctgcctggtttgggagcagttgtggaraadaggacagtmccacacagagtgtggaattttgggagctgcttgkggcctgcctgtttctggcatgtaccctgggcgtgtgctgwacctgctgggccagctgcgcacgtttctaccctgtccctggagcahcascgtgagcascatgagtgkctctggaagyttaaagtggagtgttctakgaagtgtccctgacavaattccctgttctctatgaccccatttgggctctcagcccctytakcaactttatgccccggycctatctttgctcccgtcctctcygtctgctagtccttgaagcctttaaccaaatgggagtgggtgcagaaagcctt

SEQ ID NO: 285 - DNA, 584 bp, Cricetulus griseus
acgtccgtctccgggtcgcagcggctgtggagctgatcacctgggagcgaattaaaaatgggcgatgttgagaaaggcaagaagatttttgttcagaagtgtgcccagtgccacactgtggaaaagggaggcaagcataagactggaccaaatctccwtggtctgttcgggaggaagacaggccaggctgctggattctcgtacacagatgccaacaagaacaaaggcatcacttggggagaggataccctgatggagtatttggagaatcccaaaaagtacatccccggaacaaaaatgatcttcgctggaattaagaagaagggagagagggcagacctaatagcttaccttaaaaaggctactaatgagtaattctgatgccttatttattacaaaacaaatgtctcatgacttttaatgtgtattataatttaattcacaccaaaattcagatcatgaatggctaacaatgtttttgttggacagtcctgattaagtaaaacttgacttgtagtaaagtggatacgatcttttttaaaataacaattccagttgcataaatactatcacttctctccctt

SEQ ID NO: 286 - DNA, 619 bp, Cricetulus griseus
  misc_feature (580)..(612): n is a, c, g, or t
agctacttcctttcctttcggtggcgcgcggcggcaagatggcggtgcagatttccaagaagaggaagtttgtggctgatggcatcttcaaagcagagctgaatgagtttctcactcgggaactggctgaagacggctactcgggagttgaagtccgagttacaccaaccagaacagaaatcattattttagccaccagaacacaaaatgttcttggtgagaagggtcgtcgaatcagagagttgactgcggtagttcaraagaggttcggcttccctgagggcagcgtagagctttatgcagaaaaggtggccacaagaggtctgtgtgccattgctcaggcagagtctctacgttacaaactcctargaggacttgctgtgcgaagggcctgctatggtgtgcttcggttcattatggagagtggggccaagggctgtgaggttgtggtgtctgggaagctccgaggacagagagccaagtccatgaagtttgtggatgggctgatgatccacagtggagaccctgttaactactatgttgatactgcggtacgccatgtactcctcagacagggtgnnnnnnnnnnnnnnnnnnnnnnnnnnnnnnnnngggaccc

SEQ ID NO: 287 - DNA, 1051 bp, Cricetulus griseus
gttccagaaagcaggcttctcaaactcgtggacaacaatctgctgaagaagacaactttaagaagccaactcgaagcaacatgcagagaagtaagatgaggggagctgcctcaggaaagaagtcggctggttcacagccaaagaatcttgaaccagccctcccaggaagatggggcggtcgctctgctgagaaccccccttctggttctgcgcggaagaccaggaagaacaagcagaagattcctggcaacggagatggtggcagtaccagcgaagtgccccagcccccccggaagaaacgggcacgggctgaccccactgtggagagtgaggaagcattcaagaatagaatggaagtgaaagtgaagattcccgaagagctaaaaccatggctggtggaggactgggacttggttaccaggcagaagcagttgttccagctccctgctaaaaagaatgtagatgccattcttgaggagtatgccaattgtaagaaatcacagggaaacgttgataataaggagtatgcggttaatgaagttgtgggagggataaaagagtatttcaatgtgatgctgggcactcagctgctctacaagtttgagcggccccaatatgccgaaatccttctggcacacccagatgcgccratgtcgcakatctatggggcgccacacctactgagattatttgtgagaattggggcaatgttggcctatacgccccttgatgagaaaagcctggcattattgttgggctatttgcatgatttccttaaatatctggcaaagaattctgcctctctgttcactgccagtgattacaaagtggcttctgctgactaccatcgcaaagccctgtgaaggkctactgaccactcactatcgtctggtatctgtaaacacttctgkttagtcctttcattgtataattgatgttctttacmactgkcgatgtaaaacarggcttatgtttcattttgttttctgttctgttgtaaacagaaataaaaagagtgcccaactcctttccttatttaaaagttgcttcc

SEQ ID NO: 288 - DNA, 832 bp, Cricetulus griseus
  misc_feature (259)..(277): n is a, c, g, or t
aaaggtgaaggaggtgaattttcagttgatagaccaattattgaacggcctatccgaggccgaggtggtcttggaaggggtcgaggaggccgtggtcgtggaatgggccgaggcgatggatttgattctcgtggcaaacgtgaatttgataggcatagtggaagtgatagatcttctttttcacattacagtggcctgaagcatgaggacaaacgtggaggtagcggatctcacaactggggaactgtcaaagatgaannnnnnnnnnnnnnnnnnncaaatgtgaccgaggaaacacctgaaggtgaagagcacccagtggcagacactgaaaataaggagaatgaagttgaagaggttaaggaagagggtccaaaagagatgactttggatgagtggaaagctattcaaaataaagaccgagcaaaagtagagtttaatatccgaaaaccaaatgaaggtgctgatggacaatggaaaaagggatttgttctgcataaatcaaaaagcgaagaggctcatgctgaagattcggttatggaccatcatttccggaagccagcaaatgatwtaacgtctcaactagagatcaattttggagacctaggccgcccaggacgtggtggcagaggaggacgtggtggacgtggacgtggtggacgtccaaaccgtggcagcagaactgataagtcaagtgcttctgctcctgatgtagatgacccagaggcattcccagctctggcctaactggatgccataatacaacactggttcctttgtggaccctcctgttcaaagcttttgcatgcttaaggatcccaaacaactaaga

SEQ ID NO: 289 - DNA, 578 bp, Cricetulus griseus
ggctgcggctgcgggagcaggatggggggaagagaagggaattccaacctgtagaactttgggggtcctatggtcgggttctccccggcgactgtgcatggtgaaaggggcgggacctctgggggctcgtgggggcgttgggggttcgcagggtgaggaagggggtgtcaagtgagagagagctcgtgcaggacttccaaacttaraaccttgaggccctcggggctcakgtccagggaccgggcgctcgggccgccatgcgcgacaggacccatgakctgaggcagggggacaacagctcggacgacgaagatgaggctcgagtcgcgctggtggtgcacccargtaccgcccggctgggcagcccadatgacgagttcttccagaaggtccaggcaattcggcaaactatggccaaactggagagtaaagtccgggagttggagaaacagcaggtcaccattctggccacgccccttcccgaggagagcatgaagcakggcctgcagaacctgcgcgaggagatcaaacagctggggagagaggtccgggcacagctaatagccatagagcctcag

SEQ ID NO: 290 - DNA, 669 bp, Cricetulus griseus
cgaggtgagggaagtggatgcgatggccgggtccgcgtgkgtskccraggtctctcggctgctgggtgcattccacaatacaaaacaggtgacaagaggttttgctggtggtgttcaracagtaactttaattccaggagatggaattggcccagaaatctccgcctcagttatgaagatttttgatgctgccaaagcccctattcaatgggaggagcgtaatgtcactgccattcaaggaccaggaggaaagtggatgatccctccagaagccaaagagtccatggataagaacaagatgggcttgaaaggcccactaaagaccccaatagcagctggccatccatctatgaatctgttgctccgtaagacatttgacctttatgccaatgtccggccatgtgtctcaattgaaggttataaaaccccttacacggatgtaaatattgtcaccatccgagagaacacggaaggagaatrcagtggaattgagcatgtgatcgytgatggagttgtgcakakcatcaagctcatcaccsaacaagcgagcaakcgcattgctgaktttgccttcsagtacgctaggaacaaccaccggakcaacgtcacagcggwgcacaaagccaacatcatgcggtatgtcagatgggctttttctgcataaaatgc

SEQ ID NO: 291 - DNA, 680 bp, Cricetulus griseus
  misc_feature (15)..(15): n is a, c, g, or t
  misc_feature (23)..(81): n is a, c, g, or t
  misc_feature (555)..(574): n is a, c, g, or t
cgaactcaactctangggccgannnnnnnnnnnnnnnnnnnnnnnnnnnnnnnnnnnnnnnnnnnnnnnnnnnnnnnnnnngcytctgcgttctggtagtggcgctgcttgggccggtggctgaastgagagctgctggtgtcgcgattgaggagaactgcgagtgtgttcagcctgtccccttcgggatcccakccacgatgagtgctgcccgggagtytcacccayackgggtgaagcgttcagcctcccccgacgacgatcttggatctagcaaytgggaagcagcagacttaggcratgaagagagaaaacaaaagttcttgagacttatgggtgcaggaaagaaagaacacactggtcgtcttgttataggagatcacaaatcaacatctcacttccgaacaggggaagaagacaagaaaattaatgaagaactggagtctcagtaccagcagagcatggacagtaaactatcaggccgataccggcggcactgtggacttggcttcagtgaggtagaagatcatgatggagaaggtgatgtggctggannnnnnnnnnnnnnnnnnnngccggatgccgagagtccagatgactcagacagtgattctgagtctgagaaggaggagtctgcagaagaactccatgctactgagcatcctgatgatgcagaagac

SEQ ID NO: 292 - DNA, 579 bp, Cricetulus griseus
aaagcagccctgctggcccagtatgccgatgtgacagacgaagaggacgaggcagatgagaaagatgatccgggtgcttccacaacaaacatcagttctgataaatctctgtttcgaaacaccaacgtagaagatgttctcaatgctcgaaaattggagcgagactctcttcgggatgagtcccaaaggaagaaggaacaggacaagctgcagagggagaaggacaaactagccaagcaggagcgcaaggagaaggaaaagaaaaggacacagagaggggaacgcaagcgataacctcggccactctgttccttccacccgtgaattgattgtgcgtctatatatttaagagaactgagactaatgcatttcccaaaatttcttaaggcttttccccctctgtttacatgttcaaaaggaaaatcacaatcacttgttactacaaaatgtgccatgtttggtagygtgggcaatcaattctagwtattatctttaccaaagatctggaattagggtaaccttwctattttagtactgaaatcctatgctcttctggctttttaaaaaaggtcttccctc

SEQ ID NO: 293 - DNA, 581 bp, Cricetulus griseus
gtgtgggagagcaggtgctgtgakaaactggggtgtgctctgggacccctgtcctgcttcctcagcccctcctggcctcagccgggcgctctggtcctgcaggaccatcagcacgtgcccatcgacatccagaccagcaagctgctcgattggctagtggacagacgacwctgcaacctaaaatggcaaagtctggtgctgaccatccgggagaaaatcaacactgccatccaggacatgccagagagccaagagattgcccagctgctatctgggtcttacattcattacttccactgcctaagaatagtggaccttcttaaaggtactgaggcctccaccaaaaatattttcggccggtactcttcacagcggatgaaggattggcaggagatcataggcctgtatgagaaggacaacacctacttagtggaactttctagcctcttggttcggaatgtcagctatgagatccccttgctgaagaagcagattgccaagtgccascagctgcagcaagaatacagccgcaaggaggaagarggccmggctggggctgctgagatgcgggagcagtttta

SEQ ID NO: 294 - DNA, 664 bp, Cricetulus griseus
gcccctcgcttcccgacgctccgtcccccctgcccgccttctcccgcagccgccttccgcakgccgtktccaccgaggaaaaggaatcgtatcgtatgtccgctatccagaacctccactctttcgacccctttgctgatgcaagtragggkgrkgrsctgcttcctgctggcactgaggattatatccatataagrrttcaacagagaaacggcrggaagaccctcaccactgtccaagggatcgctgatgattacgataaaaagaaactagtgaaggcgtttaagaagaaatttgcctgcaatggtrctgkaattgagcatccagaatatggagaagtaattcagctacagggtgaccagcgcaagaacatatgccagttcctgatagagattggactggctaakgacgaccagctgaaggytcatgggttttaagtgcttgtgactctctgaagcttaagtgaggatttccttgcaatgagtagaatttccctcctgtsccttgtsacaagtttaaaaacctcacagcttgtataatgtaaccatttggggtccgcttttaacttggactagtgtaactccttcatgcaataaactgaaaagagccatgctgtctagtcttgaagtccctcatttaaacaggtcaagcagtaagccctggc

SEQ ID NO: 295 - DNA, 574 bp, Cricetulus griseus
tgtcttaggatgttttagggttatgattttatgctgggctgtacccatagctatttgaggacatatgcctgattatttcattaatcacaaaataaacttaaatttagtaaaaactggccaacatcaaagcatatttcaagaatgcaatggttcaaacaaattcaacatgtccccttctcaaaagagaaggcaacaatgaaatgtctgtacattctgtagctaaagaagcatattctaacaacatatattattgggcaaacatatcatgaactgatatcaaaaaatcaaattaaatgtcattataaatcattggcgttcattttagaaacacagctatggaccagtattaagagattatatcaatatatttttctttaaaaattcaaaggaggggctggagagatgactcacaggtgaagagcactggctgctcttccaaaggtcctgaattcaattcctatcaaccacatgggggctcacaaccatctataatgggatctggtgccttcctctggcctgcaggcatacatgcatacaggaacacgtttacataataaataaacttaataaaaaa

SEQ ID NO: 296 - DNA, 452 bp, Cricetulus griseus
gaattttgtagtaactggtaattcgattttgtcctacttaactacatattaattcagaacttgtattctgagtttaacagtcttttagagtgacgagcaaccttgatgtttgcactaagattttatttgaaatacaagaggggttaaaggaggtttcagtagtgcacatgtgactaatttatttgaactatatgctaaagacatctaccagtttcttcgaatgccttttaaaaaaactcattacacatatgattggtgaaatgctgagtatcatatttttcttattgcatgtcagctacatatatggttttgtacaatgaaaaactaatttgtttgacattccccatgttaaactaccgtcatgttcagcttcattgcatgtaatgtagacctagtccaagcaatcatgtgctcgggagagtgttctttattcaataaagttttaatttagt

SEQ ID NO: 297 - DNA, 508 bp, Cricetulus griseus
catcctatttgtaaactctttctcctttaaatggttggttaatactttgagactttgtttacgtgtggcagtgttgtaaaaagaaactaaagatcacattttacctgtatggatgaatttcccttttcttcttcaagtgcagtttgtgacgtgttctgttattccagatctgaaagttacaggtgatattgggagttgacagcatttgcttgagtttattcaattccattaggccttcacatgtgttaatctcatttccaacattgaattgcggcggtaacattttcctttctgtgaagtcctaaacttagttatgacctccttagcaatgcctttgaaaggggatattgcgtccatggtaaattaattgtatacctaaacagatatagctcagctttgcctggcaggcttggcattgacatctggtagacttctgcacatgtaaaattgaattcaaataaaatcatgtacactttctagttcttaatttttgactttctgatcaata

SEQ ID NO: 298 - DNA, 485 bp, Cricetulus griseus
gttgagagatgacctggagttgtattacaagctgcttaaaacagccatggtggagctcatcaacaaggactatgcagactttgtcaaacctctcaacaaacctgtgatcatggatacttcgatcgttacacagatcattacactggattaggactgatgattttgagctgtcatgattttgcctctaggtcggcatggacagagccctcaaccagctatctgtgcttttgggacaattacgagaagaggttatgagtcttaagtcctctgtcagtgaaggaattctggcagtagatgaacgaatgtctaaacaagaagacattaggaagaaaaagatgagtgtgttgagacttataacagatattcgatcagttgagaaaattgaaaaaatcttaaactctcaaaattctaaagatgcatcttcactataagcaagcaccccactcttgactggacaggttcttggacagaattgccacagaatt

SEQ ID NO: 299 - DNA, 578 bp, Cricetulus griseus
tgcgtggagctcctggatccgtgctacggatctgactgcgaatatcagtgccagccagtgagtcccacagagtacatttgcatctgtgctgagggcttcgcacccaaacccggggaaccgcacaggtgtgaaatgttctgcaatgaaagttcatgcccggctgactgtgaccctaacactcctgatttttgccattgccctgagggctttattctggacgaaggtcacatatgcgtggacattgacgagtgcagtcaagaggaatgctcccgcaatgagtgtcgaaatcttcccggctcctatgagtgcatctgtgggcctgacacagctcttgctggccaggttagcaaggactgtgatcccacccctgttattgaatacaacgaggaccatggctctggggagcccccagtcagtccaacaccaggctctcccacaggtccgccctcagcaaagccagtgcattctggcgttctcattggcatctccatcgccagcctgtccctggtgggggcgcttttggcgcttctatgtcacctgcgcaagaacaaggagcccgacgtgcacagctatagtac

SEQ ID NO: 300 - DNA, 386 bp, Cricetulus griseus
aaagcactgtctaagtggggtcagactttccatttaaataaccttgttttaattataattagaatttgagacttagccttacatcatggtgccatgtcccaggacttgggaggccaagtcagaaggatcctgtgttcaaggcgtctgagctacacaaacgctttcttttattgtggtttcaggccggtaggttcagtggtagtgtatggttaatcatgttcgagtgtacacacaaacaatatagtcagagtgctttatattgccactttggctggctgtggtggtgaacacctgtggaggtacagacaggaggggcatgagttccaagccaaactaagttaggggataccgcctcataatcctcaacaaaaatagcacccccaact

SEQ ID NO: 301 - DNA, 495 bp, Cricetulus griseus
aagggactgggtagtcagcttaattcctctggcgcttagtttttaactagtaaacagaaatcaccaaattatcagttagtgtgtgaaaaaagcttgatgctaccgggtgattcagttccttcttacagaagcactaacttaaccgactcccatactagaaacagcatcttggtgcactggcctttattaattccatggcagacactagttttaaaagagaaatatttctatatctagtgtgttagtgttctaaaactaataacttccctgactttgattgtcttttggctgtgtctcttgctatgagcatctagtggtttgaaatttttgtttagtttgatatataaagtatttcacataaataattaatcttgccaatataatttcccctaaatgtctattagttacattgcaactttttatataaaaaatttagtctacatgtcatttctaacattttcattcgaaagaaattaagcctcctgtagttgttgc

SEQ ID NO: 302 - DNA, 579 bp, Cricetulus griseus
  misc_feature (548)..(548): n is a, c, g, or t
  misc_feature (556)..(570): n is a, c, g, or t
gccaaactctgctcagcaaactgaccgaagctcacctgttagagccagtagtgaaaagaatgattgccttcgagggaaacgagatggagtcaacagtcttgaaagaaaattgaagagacgcccagaaagagaaggccttcccagtgaacggtgggatcgagttaaaaaaatgcggaccccccaaaagaagaaaatcaaattgagtcaccccaaggacatgaacaatttcaaattagaaagagagcgtagctatgacttagtccgtaatgctgaaacacattcgctaccctcagacacgtcctactcggagcaggaggactctgaggatgaagatgccgtctgtccagctgtgagctgcctgcagccagaaggagatgaggtggactgggtccagtgtgatggcagctgcaatcagtggtttcaccaggtctgtgttggtgtctctccagagatggcagagaaggaagactacatctgtgtgcgctgcatggcaaaggacacaccaagccgaaagtaaaaacaaaacacactcacttaatggaattcangactccannnnnnnnnnnnnnntcaatctca

SEQ ID NO: 303 - DNA, 211 bp, Cricetulus griseus
  misc_feature (70)..(113): n is a, c, g, or t
ttgaaactgatgttctcatttaattatgtatattgattataaagattgggcctgataactttttatcgannnnnnnnnnnnnnnnnnnnnnnnnnnnnnnnnnnnnnnnnnnntagatcatttggctctttttattgaatgctgaatattttgtgtgaaaaaattatttcctatctagagtgtatatagtatttataaatttaaaaccaat

SEQ ID NO: 304 - DNA, 344 bp, Cricetulus griseus
  misc_feature (32)..(48): n is a, c, g, or t
gttgggtgtgtatgtaatatagactgcagtgnnnnnnnnnnnnnnnnngtgtgtgcttctgacgggagttcctacaacaatccctgttttgttcgggaagcatcttgtataaagcaagaacagattgacataagacatcttggccactgcacagacacagatgatacaagtttattgggaaagaaagatgatgggctgcaatatcgaccggatgagaaagatgctggtgatcaaagggaagatgtttatattggaagccacatgccttgtgctgaaaacctcaatgggtactgcatccatgggaagtgtgaattcatctactctactcacaaagcttcttgtag

SEQ ID NO: 305 - DNA, 459 bp, Cricetulus griseus
  misc_feature (94)..(108): n is a, c, g, or t
  misc_feature (405)..(421): n is a, c, g, or t
ggtgattcctcttcccttggccatacgtgaaagagagctctgcagccataatcctaatagcagctggctgccatagctagaagcccatgggaannnnnnnnnnnnnnntgtcaactacagggccatgatctcttgtgcactcaggcaggctctgcatcattcaaggggctgtgctctggttcttgcaggcacagtctccccgctaccccagctctcttagaaatggaccaggaaggaggtcacagtgaccagtaccatggatctcccacccacacatctctgttcacctccatagttcctgagactgtcatcaccatcccctctttatcccatgtagccattgtccagaacaagcacccctccctattctctgccacctgtgtggcaagaccactccatcttccnnnnnnnnnnnnnnnnnggctgcatgctgctatccctcctatgtggaccatcctc

SEQ ID NO: 306 - DNA, 578 bp, Cricetulus griseus
gttagatctttctttagaaagcctctagatgtgcagttcatgcctgggaagtaagtaattgtgcgcattatttcaaatcagcgctggtccaaatggcacccagagattctgctttccacagagctcattcaagacagttccttgacctcgcactgaggtacacatgctggccatttagagaaaaatcaaaactccataagagacatcctggtccttccccctttcccacatccacagaatcatggcatggaaggtggttagaaatccagggaaaattagagtcagggaccttgtacacgtcagttttaagatgggagatgattaggaagctgtgaaaaaagtagagttgagaacattgtacatgtcagttttaagagaacctgtagatttattagcaaatagaccacttgatgggagagaattcaaattgcttgttcattcttaaagataattaatcccattgtgtattcacctgaattcactcgcttggatttagtaaaatttggtgaaacagtagcattaaactttgtttagagtttatcttttgggtttatccttagaattataaagaaatgatt

SEQ ID NO: 307 - DNA, 295 bp, Cricetulus griseus
agatatccaactttgaatacttgatgcaactcaacacaattgccggacgcacctataatgacctgtctcagtaccctgtgttcccctgggtcttgcaggactacgtgtccccagtcttggacctcagcaatccagctgtcttccgggacctgtccaaacccatcggtgtggtgaacccaaagcatgcccagctcgtgagggagaaatatgagagctttgaggacccagcaggtacaatcgacaagttccactacggcacccactattccaacgcagcaggtgtgatgcattacct

SEQ ID NO: 308 - DNA, 573 bp, Cricetulus griseus
cgttaaaattgcttctaakasctactcctaraatgatggccttaaacaacatgtatttgktgctgctttgattcatttttgcttcagtttatttagctcatggaaaattttcaaacaaaactcagattaktaattgttcttcatgtccttgtccatcttttttatacttcttcattttattttattatatatattattttttscacttggtgtaatggcacacatctttaatccgaggctgatctgagtccaccacagcctggtctccatagcaagttccaagctagccacggctttatagtgataacctgtctcaaacaaaatcagtcttgcttatacctgwatctaccttaatgttattttaaacccatatcctatgtgatgtgaaggtaactyagttttttaaatcatttttattttaatgwgwtttggtgtttttcttgaatgtatgtctgwgtgagtygytggattctggasttacagttgctgtgtggatgctgggaattgaacccasatcctctggaakaacagytastactcttaaccactgattggtacatctctcctagytyt

SEQ ID NO: 309 - DNA, 559 bp, Cricetulus griseus
  misc_feature (441)..(465): n is a, c, g, or t
ttccgcgccgtcaccatggtgcgcatgaatgtcctggccgatgctctgaagagcatcaacratgctgagaagakaggcaaacgccaggtcctcatcargccctgctccaaagtcatcgttcgattcctaactgtgatgatgaagcatggttacattggtgaatttgaaatcatcgatgaccacagagctgggaaaattgtcgtgaacctcacaggcaggttgaacaagtgtggagtgatcakccctagattkgatgtgcagctcaaagacctagaaaagtggcagaacaatctgctcccgtcccgtcaatttggcttcattgtactgacaacctcagctggcatcatggaccatgaagaagcaagaagaaaacacacaggagggaaaatccttggtttctttttctagagatgtaaaacgtaartaaaaagcctccataknnnnnnnnnnnnnnnnnnnnnnnnncccccsgggggggacccccatttttggtccctttargggarggwtaactggcsscctskggsaatatcagggsmaaakmtgkysccgggaggaa

SEQ ID NO: 310 - DNA, 593 bp, Cricetulus griseus
  misc_feature (457)..(471): n is a, c, g, or t
tccggttgccgccatcttcctcgggcggaagccggcttctaggtgggagttcagtggcgggtgccgtgggtagcgcggacggtcggccggtgccatgccgtcatcaccgctgcgggtggcggtcgtgtgctcgagtaaccagaaccggagcatggaggcrcacaacatcctcagcaagcggggtttcagtgtccggtcctttggaacaggaactcatgtgaagctcccaggaccagcacctgacaagcccaatgtttatgacttcaaaaccacatatgaccagatgtacaatgatcttctcaggaaagacaaagaactctatacgcagaacggaattttacatatgttggacagaaataaaaggatcaagccccggcccgaaaggttccagaactgcaaggacctgtttgacctgattctcacttgtgaagaaagagtctatgaccasgytgtasannnnnnnnnnnnnnnataacaggagacctgccagtcagtgcatgttggcaatgyggacatccaggacaaccatgaasaggccacccykggggcatyccttmtctgcgayctctgccagtgtmtccagcacactgagg

SEQ ID NO: 311 - DNA, 585 bp, Cricetulus griseus
ttcatgactctaaagaagcttaaccgattagcccacatcaggttaaagaaaggaagagatcagacccatgaggccaagcagaaagttgatgcctaccacctgcagcttcagaacctgctctacgaagtgatgcacctgcagaaggagatcaccaartgtctagagttcaagtccaagcatgaagaaattgatctggtcagtttagaggaattttattcagaggctccaccaaacatcagcaaggctgaaatcaccatgggagaccctcaccaacagaccttggcacgtttggactgggagctggagcagcggaaaaggctggccgagaagtaccgagaatgtctgtccaacaaggagaagatcctgaaggagattgaggtgaagaaggagtatctgagcagcctccagcctcgactcaacagcatcatgcaggcgtscctcccagtgcaagaatacctgttcatgccatttgaccaggcacacaagcagtatgagactgccaggcatctgccacctcccctctatgtgctgtttgtgcasgccactgcatatgggcaggcctgtgataagacgttgtctgtggca

SEQ ID NO: 312 - DNA, 509 bp, Cricetulus griseus
tctgtgaaaagtttctataaaacagtctcctgacatggtttttatttctcaactacagctatgaatgaagtaaaatgtaatcattggttcagtttaacaaggggtaaaagtccaagtgtctgttgtatatatacttgaagaaactgattggctgttgttgtatgtaggtaaaccccagtgataggtaccatcttatgcctataattacaccagcatacccacagcagaactccacgtacaatgtgtccgtttcaacacggatggtcatggttgaggagtttaaacaaggtcttgctatcactgatgaaattttgctgagtaaggcagagtggtccaaactttttgaagctccaaacttctttcagaagtacaagcattatattgtacttctagcaagtgcgcccacggaaaagcagcgtctggaatgggtgggcttggtggaatcaaaaatccgcatcctggttggaagcttggagaagaatgagtttattacactggcgcatgtgaac

SEQ ID NO: 313 - DNA, 579 bp, Cricetulus griseus
agtgtctgggtgctggctgacgtacgacggatctcccagaaccatgcccgaggtcgccgacacttgctccttggcctctccagcctcggtctgccgaacccagcacctccatctgcgctgcagcgtggacttcgctcgccgggtgctgaccgggaccgccgcgctcaccgtccagtctcargaggataatctgcgcagcctgactttggatacaaaagaccttacaatagagaaagtggtgatcaatggacaagaagtcaaatatactcttggagaaagacaaggttacaaagggtcaccgatggaaatctcccttcccatcgctctgagcaaaaatcaagaggktgttatagaaatytcctatgagacctctcccawatcctctgctcttcagtggctcactcccgaacagacttctgggaagcagcatccatacctcttcagtcagtgccaggccatccactgcagagcagtcctcccatgccaagacactccttstgtgaaactaacctacaccgcagakgtgtctgtcccaaaagaactggtagctctcataagtgccatccgatatggagaagg

SEQ ID NO: 314 - DNA, 578 bp, Cricetulus griseus
  misc_feature (92)..(111): n is a, c, g, or t
  misc_feature (329)..(350): n is a, c, g, or t
gcgtgggctccggcacgggggatcgctgacggggacgggggctgggtccgaggagagcgggcgcaggatggacgaggacgtgctgaccactnnnnnnnnnnnnnnnnnnnncgagagtggggtgggcaagtccagcctgctcctgaggttcacagatgacacctttgatccagaacttgcagcaacaataggtgttgactttaaggtgaaaaccatttcagtggatggaaataaggctaaacttgcaatatgggatacggctggtcaagagagattcagaacattaactcccagctattacagaggtgcacagggagttatattagttnnnnnnnnnnnnnnnnnnnnnncctttgttaaactggataattggttaaatgaattggaaacatactgtacaagaaatgacatagtaaacatgctagttggaaataaaattgataaggaaaatcgtgaagttgatagaaatgaaggcctcaaatttgcacgtaaacattctatgttgttcatagaggcaagtgcaaaaacctgtgacsgtgttcagtgtgcctttgaggagcttgttgagaagatcattc

SEQ ID NO: 315 - DNA, 581 bp, Cricetulus griseus
aatatagaagcatgataattttagtgcctgttagaattcatttccattatttattttaccatgagtcacttctagcctgaaactttscartgttagcacaatattttttgaaaattttttatctataaaatttttcttatttttgcctgcacgtgtcaggaccatgtgcttgcagtgcccatggagaccagaagagggcatcagatactcctgaaactggagttacagttacagttgtgagccactatgtgggtgctcagaattgaaactaggttctctakaagaccagccaactaggacttttaactgctgggccatctctctagccctaaactttggcaactcakaattgtgtcctcgggagagtgaggtgtttarggtccatttggygtcttcgctcagtacctgccctattaatcttaactggctaaagtggagatgagcagaccaaccacctttgtgttttacactaccaggtagctatcgaattatgctcakatgtcctgtwgakaaaacaagtaagaagttagctggttttggagagctttgaactcatccagggtaaagcaccggctctccca

SEQ ID NO: 316 - DNA, 672 bp, Cricetulus griseus
gaaaagaaagttaaagaccataaatctgaaagcaaagagagagacatcagaagaaattcagaaaaggatgataaatataataaaaacaaagtgaagaaaaggggcaaatccaaaagtaggagtaagagcaaagagagatccaaaagtaaggaaagagaatcaaagcataacaaacacgaagacaagaggatgaggtcaagaagtaaagacagggatcatgagactattaaagaaaaagaaaaacaggtggattctaaagggaaagatcaggaaaggagtagaagcaaagagaattctaaacaggtagaatcaaaaagtgatgagcatgatcatagcaaaagtaaagaaaaggatagacgtgcacagtctawgagtagagaacgtgatctaactaaaagtaaacacagttacaacagtagaacaagggagcgaagcagaagcagggacaggagcagaagagtgcgctctataagccatgacagagatcgcagcagaagcaaggagtaccacaggtacagagaacaggagtataggagaagaggaaggtcacggagccgggatcgaagaactccaggacgatcaagaagtaaagacaggaggagaagaaggagagattcccggagctcagaaagagaagatagtcaaagtcgaaacaaagagaaatatagaagc

SEQ ID NO: 317 - DNA, 444 bp, Cricetulus griseus
agccccctggtgagacagctctccacctcatcagacacctccacacccaccagctctagctcacaagttggagccagcacttctcagccagtgaggaggaggaggggagagagttcattcgatattaataacattgtcatcccaatgtctgttgctgcaacaactcgtgtggagaaactacaatacaaagaaatccttactcccagctggcgagaggttgatcttcagtctctgaaggggagtcctgatgaagagaatgaggagatcgaggacctatctgatgcagcctttgccgccctgcatgccaaatgtgaggcaatggagagggcaaggtggctgtggaccacaagtgtgccaccccagcgtcggggcagcaggtcttacagatcatcagacggccggactaccccacagttgggcagtgccaacccctccactccacag

SEQ ID NO: 318 - DNA, 565 bp, Cricetulus griseus
  misc_feature (155)..(213): n is a, c, g, or t
  misc_feature (522)..(557): n is a, c, g, or t
gaagcagggagcaccctgatctgcaactgtggtgccagccctggaaacagcagtctgcagaggggagagtgcatcccagacacatccacatcacagacaccaggagcaaagaggagtccccaagctatagaactttgaatggggcattgtataannnnnnnnnnnnnnnnnnnnnnnnnnnnnnnnnnnnnnnnnnnnnnnnnnnnnnnnnnnagaagccccgcacctactacccagctgtggagcagaagctggtagtagagaccagaggatctgccctcgatgatacagtcaaccccctctgtgagaatggtgatgaccccctctcccctcgcctaagctggcctctcgaccaagacaggagcagaggggacagtgataccaaacctagctccccaaaggtgaaggaatacgtttcgaagaaggtcctgccggaagaatcccctgctctgaagctgctggacagatgcggataatggctggtgagtttctcacaccagtgggagttcaacctgctgacgnnnnnnnnnnnnnnnnnnnnnnnnnnnnnnnnnnnnatggactc

SEQ ID NO: 319 - DNA, 551 bp, Cricetulus griseus
ctattcagctggatgggttaaacgcgtcacagataagagagctcagagaaaagtctgaaaagtttgccttccaagcagaagttaacaggatgatgaaacttatcatcaattctttgtacaaaaataaagagattttcctgagagaactgatttcaaatgcttctgatgctttggacaagataaggctcatctcactaactgatgaaaatgcacttgctggaaatgaagagttaacagtcaagattaagtgtgataaagagaaaaacctgctgcatgtcacagacactggtgtaggaatgaccagagaggagttggttaaaaaccttggtaccatagccaaatctggaacgagcgagtttttaaacaaaatgacagaggcacaagatgatggtcagtcaacttctgaactgatcggccagtttggtgtcggtttttattctgccttccttgtatcacataaggtcattgtcacatctaatcacaacatcgatacccagcacatctgggaatctgattccaacgaattctctgtatttgctgacccaggagga

SEQ ID NO: 320 - DNA, 580 bp, Cricetulus griseus
gcatggtgcctcttcctccccatgggaccacaaaaatctctgctccactctatatgtgtgggagcctctggtgctctcggaggcagtgacgtggtaaattgcccctggggacaccaggcacagggtggctcgtagaggataggccttcagtgccagctttcctccacctccgcacaacttcctcagagggcttcaagccaaaccaatagcctttttgtgtgaaacatctttgaggtgggaaagggaccactggagctttgctagcaataactgactttcagtttactgttttgaaggagcagggactcagcacagaattcactttaaatggagctgaaggagtgtccctcctctgtgtgaaaagaaaatagttttattcttcattctgactttttaaactgtttgacttccagttagtttgaatgagagtaataatttttctacatggactcaaagggtaggagcattaactgtcatcattgtgatgtgtggtgtgtgccttcccttggatgtcacagccattgagttccttgtgggcctcatggtcttgctcttgttagttctaatgatagccagactt

SEQ ID NO: 321 - DNA, 305 bp, Cricetulus griseus
  misc_feature (227)..(246): n is a, c, g, or t
tgattcccaggtaactggaagttaatgtttaataccttcactagtgtgaataactgaaagcatactattcctgacagtatgtatatgtgtaaatctgtatcaaaaagaaaaagactaattcttgaattgttcttcaataagttgaacaagtttaagacggtggtgttatggtttggatatgaaatgacatgaataagttcccgtattcaacagttggccctcagctnnnnnnnnnnnnnnnnnnnntggtagaacctttcaaggccatacctggtccctggtcccttcctctcccttggcatcct

SEQ ID NO: 322 - DNA, 579 bp, Cricetulus griseus
tctcagatctctcggccttgccagggcccaccagagaagactgacgctctggtccggccatacctatgggggaccaaccttgtgcctccgggagatccacgctcccaccaggaaatacgcgggaacccaagcctccaaaaaagcgctgtctcctggctccacggtgggattatccagaagggactcccagtggaggtagtaccactctcccctcggcgcctcctcctgcatctactggactgaagtctcaccctcctccgccggagaagtagtgaaatagcttttttcgcagcctaaatcagtctttgaaagattgcagtatgactccatttccttggtgcatttgtaaaatagttcacccattgaagaccatgaagactctttccaatgctaccctgcttttgctggtgtcccgcacctggaagttgtgatgctcaaggctcatctcatattttctaccccattgaccatttctctatttggctgtgctactgggagatcatatttacaaactgagtattatgatgtgatgactgtgatttcacctccagaatttggatgaatttatgacgtgggcaa

SEQ ID NO: 323 - DNA, 567 bp, Cricetulus griseus
  misc_feature (256)..(269): n is a, c, g, or t
  misc_feature (271)..(284): n is a, c, g, or t
tcagcttgcctccaaaaccccttgtctatgatttttgagtgctggctgctaggcctgtccatcttttgcttgggttttgagaatgcaaactcaattctcacaattgtgggcaagtactttatccaccaaacacccccaacccccagctctcaaattaagctttctgttgtacttttgttagatttgattggttcctaaacagactcatttaagagtagaaactctcaggacaactgaggctatatagagaaacctnnnnnnnnnnnnnncnnnnnnnnnnnnnntagctctagctggacatggtaactcatgtgtctaatctcaccccttgagaagctgaggcaggaggatcttactaagttcaagcctagcctaaactattgatgtgttacaatattcctggtgagatgtgactagatatctacttgccccagataaagggctggcaacagacctgtaaggataccaccaaagtccatcttggtgaaccaatgagttttatgggtgttaattatcaggaatatgagtgagaggttccttataagaccggaagttattctaaagaca

SEQ ID NO: 324 - DNA, 392 bp, Cricetulus griseus
tttgttatgccaaactgtttttctgtcacttaaaaaaatatttctaaggcctatttaaagataacttctgctctgcttcacaatgacttcggaaactcgcttcagtgtttaataagtattgcccttctgaggaaatgttctttatagctgacttaaattacttactctgtagcataaagccatttgtagttttgtcttcagccatcttcttcagagggtaacaattagaagataaccactaagttatcacccattcacattctggagctttatttgcttgtttcttctttacacagagctaaaagttctgaatttctcactacaattcttattcaggagtccactatttaccactgaaattaatataccattaccaggcccttcaattgggc

SEQ ID NO: 325 - DNA, 140 bp, Cricetulus griseus
acacgtacgcccatgcgtccgtccgggacgggtccatacggagttgttcttgatttccgtcgttacttataagggaaacttacacaatgtcgcggaaccctagatgtcctgcagtatgaaggatgatgatgtcctcaagc

SEQ ID NO: 326 - DNA, 319 bp, Cricetulus griseus
gaaaacgttagtccgcttgcaactgtttaaaggtgtagagactttgaagagctgggacctggcatgaggctttccatctctggggacctgtccttaaggggagaaagctcctcacccccttcttttcctttttgcaatcctggccaggaggtaacactttgtttcacaatatattcccatagacgaaacacaatgggctggctgatcatatactgaatcctccaaaaccgtgagcctggttaacctttcttgttaggaagcctatccatcttacacatcatttatagtcatggcaacctgaccggagtcgcgaacattt

SEQ ID NO: 327 - DNA, 582 bp, Cricetulus griseus
  misc_feature (16)..(16): n is a, c, g, or t
  misc_feature (21)..(21): n is a, c, g, or t
  misc_feature (24)..(24): n is a, c, g, or t
  misc_feature (54)..(54): n is a, c, g, or t
  misc_feature (56)..(57): n is a, c, g, or t
cctggagactagcggnacgtncancgacttaggggcactcgctggcaagaatcncnnggaggtacgcccgagggacctcaggaaaccatgcccgaaaccacacagtgaagcagggactgccttcattcagacccagcagctccatgcagctatggctgataccttcctggaacatatgtgccgcctggacattgactccgcacccatcacggcccgcaacactggcatcatttgtaccattggtcctgcctcccggtctgtggagatgctgaaggagatgatcaagtctggaatgaatgtggctcgtttgaatttctctcatggaactcatgagtatcacgcagagactatcaagaatgtgcgaacagccacagaaagctttgcatctgaccccatcctctaccggcctgttgctgtggctctggacacaaagggacctgagatcaggactggactcatcaaaggcagcggcactgcagaagtagagctgaagaagggagccaccctgaagatcaccctggacaacgcctacatggagaagtgtgatgagaacatcctgtggctggactataagaacatctg

SEQ ID NO: 328 - DNA, 579 bp, Cricetulus griseus
tgttatcttttcattcatccactctgtgccttgtcagcctttgaaagtcttagttgctcccaggctgctattctcagggaccttagaaagggacctggttggtcttgtgacagaatgtgtcttctggggcacactcttccaagaatggccttgtcttcattttcattagggaatgctgcttgcagatgttcagtaaaatctaaatggaatgctcattgcactggttccagcaaggggctgccatgagaccaggagaccacacttggtgggccaatcatgtccttcactacagtgccttagattctcccttatatggactctctgaggccttgctcaagcctcgggttctgtggattgggcagcctgtctgggcccttactcaggacccacaacgtcatcctcattctttctgttcacaaacatctcaaagctctttcattgtgaccctgtgttccttgttgtaaatcacagctagctggctagtcccatgaccctcacaatccaaggtggagaactgtgatgcaggtagagagccatgtgatgactaagtacagaacgtcattgaataaatactgtgta

SEQ ID NO: 329 - DNA, 582 bp, Cricetulus griseus
ttactcccacagtttgactctcaagtgccaaagtactctgtgaaagggatagctgggagcaccggtggcctctcaagctacacacaaagaattttggagcagagggaaaatacagactttgggcttgctatattgcaagactcagatgcgttgtggcctcacaaacacaaccaggcacagaaaaaagaagagacgagctctggtccagagaatgtccagacccaaaatccacgttatagcagagaggaactgaattcaatgactcttgatgaagtagaacaactgaatacaaagctccaacagcaaatccaggaagtgtttgaagagttaacacaccaagtccaagagaaagactctttggcgtctgagctccatgtccgccatgttgctatcgagcagctcctcaagaactattccaagttaccatgcctgcaagtgggacgggcaggaccgaggtcacacctgcccataaacaactgaactgaacgtagcgtctgacttttaccctctgttagtctgccaagcatgtgtacctcgaacacatttgaagaaagttatagtccattcttacagtgtgttgga

SEQ ID NO: 330 - DNA, 568 bp, Cricetulus griseus
actttatcaacatcctgcaccgatactataagtcggccttggtgcagatctatgaactggaagaacacaagatagaaacttggagagaggtatacctacaggactcctttaagccccttgtctgcatttctccaaatgccagatcactgagttccccaagccagaattcatgtctaagtctctggaagagctacagattggcacctatgccaacattgctatggtccgtactaccacacctgtctatgtggctctaggcatctttgtacagcaccgagtctctgccctgcctgtggtggatgagaaagaatttggcagcagaaaagacctataacaacctggatatatctgtgacaaaagctctacaacaccggtctcactactttgagggtgttctcaagtgctatctacaggagactctggagactatcattaatagactggtggaagcagaggttcaccgtctggtggtggtggatgagaacgacgtggtcaagggcatcgtatcgctgtccgatatcctgcaggctctggtgctcacaggtggagagaagatgccctgagcgtg

SEQ ID NO: 331 - DNA, 578 bp, Cricetulus griseus
  misc_feature (95)..(112): n is a, c, g, or t
gcaccagttcacctgggtcctgctaggggctgctgggctctgttgggaggtgttttcttctccctgtcctcagccccacccctgcctgtttggcnnnnnnnnnnnnnnnnnnccttttaccactattgaaagcaagtgcccaggaggaaggcggagggtttgggccactcagcctgcaccccacgatgctcgcctgtcaactgtgaaggccacctgcgcccccacctccactccagccactctgctgtcttccagggttggggatcccgcagggtcacctcttcctagccctcagtattgtcagggacaggccctcctggtgagcacagtggcccttttgtctttccccaccagatcactcttgggtctggggcaggggattccactgtcttggatagagacctctggaggttgggtggatggggacgcacctggttgattccctgtccccatcacctacctgcctgtcccttggagggttgacaatcagaatctcctcccaggctgcttatctccttgcgctgggacaggcctgataccattcccacctcccatgggcaaagctgggagacgactct

SEQ ID NO: 332 - DNA, 203 bp, Cricetulus griseus
ttagtatggtcccatgcatcaacagcattggtatcatttgaggaaattattgtaaagtatattttttggtgttgcatgagacatagtgagttaaaaactttggtgctactgttcagcagtctgaaacccagtgatttttcagagtttagcatgaatcagaatcacatgaagacttacgtaagtactggttctcattcctgaaa

SEQ ID NO: 333 - DNA, 345 bp, Cricetulus griseus
  misc_feature (294)..(310): n is a, c, g, or t
tttgttgtttgtttgtttttccaagatagggtgtctatatatggctctggctgtcctatactcactctgtagaccaagctggtattaaaggtgtgggccactattcccagctgtggatgtgtaaaacaaatagcactctctttaatatatatatatacatgcatatgtatgtatatgtgtgtatataatgctcatagaaataatatgatgctcatgttgaaatccagaattgccatctgctttcaaagttaaatgcatgcttagcatttaacttgagaaatttattcctagatnnnnnnnnnnnnnnnnngaaatatattggtgggtatgggaacaaaagactgt

SEQ ID NO: 334 - DNA, 569 bp, Cricetulus griseus
ttgagcccaagagctgcacctacacctacctgctgggtgacccggagtctcgagaggctcttctgatcgaccctgttctggagacggcgcaacgggatgctcatctggttaaagagttggggctgaagctgctctatgccgtgaatacccactgccatgctgaccacatcaccggctcaggggtcctccggtccctactccccggctgccaatcggtcatctcccgcctcagcggagcccaggccgatgtgcatatcgaggaaggtgattccatccgatttggacgatttgccttggagactcgggccagccctggccacaccccaggctgtgtcacctttgtcctgaatgaccagagcatggcctttactggagatgccctgctgatccgagggtgtggacggacagacttccaacaaggttgtgctaggactttgtaccattctgtgcacgaaaagatcttcacacttcctggcaactgtctcatctatccggctcacgattaccacgggctcaccgtctctactgtggaggaagagcggactctgaacccacggctcaccctcagc

SEQ ID NO: 335 - DNA, 577 bp, Cricetulus griseus
  misc_feature (109)..(126): n is a, c, g, or t
gttaggccctgcaggtggaagccaacaggaggccccaggaatttggccagggtatgctgagtcccttctgggggtcatctcctcagcagagttaatttgagctggtgcnnnnnnnnnnnnnnnnnncatcccccttctccagtagacactaaggtctgggagggagccacagcacagggacattcctgccatcactgctgtctctggcaccaccacatccacaccatgggtagctgcttttcaagaactctgaggcaccatgaggactggcctcccgaaggttctcataagctaggtaggtgtgggaggggagacaggtaagcattcagtggcccccaccagggcctcctcggagttcctttgacatctcaacaaggtggtgattggatagtgagggaacagtggcagggatggatctgtggtcacttcatcccactgttgtgtccaccaagggatgaggcaggcagacctggtgagagctggtaaagcatctctggtctccagcgggcacccggctaacctggccttctatgcctgttgcttcttgggactcacagtgggcgggtatgggtgcctt

SEQ ID NO: 336 - DNA, 578 bp, Cricetulus griseus
gaacgaggacggactgccatgaaggcctcaggcacgcttcgggagtacaaggtggtggggcgctgcttgcccaccccgaagtgccacacaccacctctttatcggatgcgcatcttcgctccaaaccatgtggwggccaagtcgcgattctggtatttwgwgyctcagctgaagaaaatgaagaagtcatccggggagatagtytattgcggacaggwgtywgagawatcaccgcttcgtgtgaagaacttcgggatttggttgcgctatgactccagaagcggcacccacaacatgtacagggagtaccgggacctcaccacagcaggcgctgttacccagtgctatcgagacatgggggcccggcaccgtgcccgtgcgcactcaatacacataatgaaagttgaggagatcgcagccggcaagtgccgaaagccagctgtgaaacaattccatgactcgaagataaagttcccgctgccccaccgtgtgttgcggcgccaacacaagcctcgattcaccaccaagaggcccaatacattcttttagaccacagaataaagtcctgcctggcttgt

SEQ ID NO: 337 - DNA, 566 bp, Cricetulus griseus
ttttgattggctgtgtttttctgtaaatggtctctgttgcatagagaagtttcattaataaggggtgaggactatactttatttgtgggtgtaagggcaaatatttagaatgtagttaargattatgctggcttagtaaagtggtggttatagatcttcctcccccccccaagatccatgactttgctargtttggtttgttgtttgttttcaaatatttttaaattacatttagttatttattgtgtgcttgtgtatgtgtctggacttcagtgccacagtgcacctgtaaagatcagaggacagctctcaragatctgttctctccttcctccttgtgggtcccaaggattgkactcatgttgttaatcttgacaagwctttattccctgagccatctcactggctctaatgcaatttatttatcaatgacacattatgtctatgtatttatgcasatatwaaattggctacacaaacactakctgccttttactcaaaaatctatttcatgatcatgaaagctttttgctgagcaatggcggcatatgcctttactcccacca

SEQ ID NO: 338 - DNA, 637 bp, Cricetulus griseus
  misc_feature (55)..(69): n is a, c, g, or t
ctagcactgcccgcagcttcctggcctaagtgcgtctgcccacccagaacaactnnnnnnnnnnnnnnntctagcaatggccttcgcaaatctgcgcaaagtgctcatcagtgacagcctggacccctgctgccggaagatcctgcaagatggagggctgcaggtagtggagaagcagaacttgagcaaggaggagctgatagccgagctgcaggactgcgaaggccttattgtccggtctgccactaaggtcaccgctgatgtcatcaatgcagcagakaagctccaggtggkgggcagggctggcacaggcgtggacaacgtggatctggaggctgccacgaggaagggcatcctaktcatgaacacccctaatggaaacagcctcagcgccgcagaactcacctgtgggatgatcatgtgcctggccagacagattccccasgcaacagcttcgatgaaagatggcaaatgggaccggaaaaagttcatggggacagagctgaacggaaagacactgsgaattcytggcctgggcagaatyggaagagasgtggccacccgaatgcagtcctttgggatgaagactgtaggctatgaccccatcatttctccagaggtggcgggctcctttgga

SEQ ID NO: 339 - DNA, 853 bp, Cricetulus griseus
ctaatgaccaggtgaccaaggatgctgcagaagctataaagaaatacaacgttggtgtcaagtgtgcgaccatcacccccgatgagaagagggttgaggagttcaagttgaaacaaatgtggaaatcaccaaatggcaccatccggaacattctgggtggcactgtcttcagggaagctattatctgcaaaaatatcccccgactggtgacaggctgggtaaagcccatcatcattggtcgtcatgcttatggagaccaatacagagcaactgattttgttgttcccgggcctggaaaagtagagataacctacacaccaaaagatggaactcaaaaggtgacatacgtggtgcataactttgaagaargtggcggtgttgccatgggcatgtacaacgaggataagtcaattgaagattttgcacacagttccttccagatggctctgtctaaaggctggcctttgtatcwmagcaccaaaaacactattctgaagaagtacgatggacgtttcaaagacatctttcakgagatctatgacaagcaatacaaatcccagtttgaagctcagaagatctggtatgagcataggctcattgatgacatggtggcccaagctatgaaatcagagggaggctttatctgggcctgtaaaaactatgatggcgatgtgcagtcagactcagtagcccaaggttatggttcccttggcatgatgaccagtgtgctgatttgtccagatggtaagactgtagaagcagaggctgcccatggcactgtcacacgtcactaccgcatgtaccagataggacaggagacatccaccaaccccattgcttccatttttgcttg

SEQ ID NO: 340 - DNA, 624 bp, Cricetulus griseus
  misc_feature (608)..(608): n is a, c, g, or t
acgctgctccctccttcagaatgtcatacccaggctatccccctacmggsyrsysacctktccctgsmtatcmkcctgcaggtcaggagtcatcctttccccctccgggtcagtatccctatcccagtggctttccaccaatgggaggaggtgcttacccaccagcaccaagtgtcggctaccccggggctggaggctatgctacacctggaggttatccagcccctgggggctatcctgttagcccaagtccagggggtgttccagtctatccgggaggacaaggctttggagccccacctggtggagcaggcttttctggctatccacagccacctgcacagtcttatggtggtggaccagcccatgttccagtaccaggtggctttcctggaggacagatgccttctcagtaccctggaggacatgctccttaccctagccagcctgctgcgatgactcagggcacccaagggacaatcccgagcagcctccaactttgatgctatgagagatgcagaaattctccgcaaagcaatgaagggatttgggacagatgagcaagcaattgtggatgttgtgtccagccgttccaatgaccagaggcnacaaattaaaacagct

SEQ ID NO: 341 - DNA, 579 bp, Cricetulus griseus
tactgccgcttctagtagtttccaggcgctgccgggcggctgggaccgagcggtcctgaggctgtggctgcggctgcttgggagctggtagcggcgcgaagtgtgagctgatggccaagtggggtgagggagacccacgctggatcgtggaggagcgggcggacgccaccaacgtcaacaactggcactggacagaaagggatgcctcaaattggtccacagaaaagctgaaaactctattcctggcagttcgagtagaaaatgaggagggcaaatgtgaggtgacggaagtgaacaagcttgatggagaggcgtccattaacaaccggaaaggcaaactgatcttcttttatgagtggaccatcaaattaaactggacaggtacctctaagtcaggagtgcaatacaaaggacatgtggaaatccccaatttgtctgatgaaaacagtgtggatgaagtggagattagtgtgagccttgccaaagatgagcctgacacaaatctcgtggccttaatgaaggaagaaggggtgaaacttctaagataagcagtggggatttacatcagcaccctcaata

SEQ ID NO: 342 - DNA, 579 bp, Cricetulus griseus
ggcagcttgtgaggttttgtgtggtctcgtcgccagcacagccgggcctacaggcaagcaaccatgtctaarggacctgcagttggtattgatcttggcaccacctactcctgtgtgggtgtcttccagcatggaaaggtggagataattgccaatgaccagggtaaccgaaccacgccaagctatgttgcttttactgacacagaacgattaattgggtggagaagactttgataacagaatggtcaaccatttcattgctgagtttaagcgaaagcacaagaaggacatcagcgagaacaagatagctgtcaagcgtctgcgtactgcctgtgaacgggcaaagcgcaccctctcctccagcacccaggccagtattgagattgattctctctatgagggaattgatttctatacctccattacccgtgctcgattcgaagaattgaatgctgacctgttccgaggcactctggaccctgtagagaaagcccttcgagatgctaaactagacaagtcacagatccatgacattgtcttggtggggggttccaccagaatccccaagattcaaaagct

SEQ ID NO: 343 - DNA, 665 bp, Cricetulus griseus
  misc_feature (565)..(565): n is a, c, g, or t
agtgggcggtggacgcagagccgggctcggcggcttctgcgtctctatggtcggaggtgggcggctttccctgagtggctgctgaagccgrakctcggacgggatgtttcgtctcaacgccctttctgcattggcagaactagctgtgggctctcgatggtaccatggggtatctcagcccgcacagaccaaacgaagactgatgatggtggctttcctgggagcatccgcagtgactgccagtactggtctcttatggaagaaggctcatgcagagtctccgacttgtgtcaacagcaaaaagactgatactggtgataaagggaagactaaacaccaagaggaagtctccaaccatgaggaaagggctgcagatgctgggaccgagtcttacccagaagaraagaagaagaagcgttctggattcagagacagaaaagtgatggagtatgagaatcggatccgagcctactccacaccagacaaaatcttccgatattttgccaccttgaaagtaatcaatgaacctggagaaacagaagtgtttatgaccccacaggacttngtgcgatccataacaccaaatgaaaagcaacctgaacacttgggcctggaccagtatataataaagcgcttttgatggaaagaaaattgcccaggaacga

SEQ ID NO: 344 - DNA, 855 bp, Cricetulus griseus
gcctcccagcgccgagcggagctgcggaggagaaagctgctcatgaactccgagcagcgcatcaaccgcatcatgggctttcacaggcccgggagcggcgcggaagaagaaaatcaaacaaaatcaaagccccaggacagtgacaaactgaactcccttggtgttccttcagtttcaaagagggtagtgctcggtgattcagtcagcggtggaacatctgaccagcccagtggtgtggcagaagttaagggtacccagctgggagacaaattggactcattcattcagccaccagagtgcagtagtaacgatggtgtggagctccggcagcggagcagaggtgacccgacagcaggctcggcccagagggcttctcaccatggcctagaacagtacctgtccagatttgaggaagcgatgaaactgcgcaagcagctgatcagtgagaagcccagccaggaagatggaagtacaacagaggaattcgactcttttcgaatattccgattggtggggtgtgctcttcttgctcttggcgtcagagctttcgtctgcaaatatttgtctatattcgctccatttcttactttgcaacttgcgtacatgggactatacaaatattttcccaagggtgagaagaagataaagaccacagtgctgacagctgcgctgttgctatctggaattcctgctgaagtgataaatcggtccatggagacctatagcaaaatgggtgaagtcttcactgatctctgtgtctactttttcacttttattttttgtcatgaactgcttgattattggggttcagaagtaccctgaaacctgaagaactgagaacaagtttacaaagtg

SEQ ID NO: 345 - DNA, 495 bp, Cricetulus griseus
cgcggaggccgcacgatgcctggagtcactgtaaaagacgttaaccagcaggagttcgtcagagccctggcagccttcctcaaaaagtccgggaagctgaaagtccccgaatgggtggacacagtcaagctggccaaacataaagagcttgccccctatgatgagaactggttctacacacgagctgcttccacagcacggcacctgtacctccgcggtggtgccggggtcggctccatgaccaagatctacggaggacggcagagaaacggtgtcagacccagccacttcagcagaggctccaagagtgtggcccgccgcgtcctccaagccctggaggggctgaagatggtggaaaaggaccaagatgggggccgcaagctaacacctcagggacagagagatctggacagaattgccggacaggtggcagctgccaacaagaagcattagaacaaaggatgctgggttaataaattgcctcattcataaaaa

SEQ ID NO: 346 - DNA, 747 bp, Cricetulus griseus
  misc_feature (300)..(333): n is a, c, g, or t
tatccccacccccctttttgtcctggaaatctggaaagcctgctttgtgggactcattgagtcccctgaaggtactcaggagctgaagtggacggctttcacctatctcaagatcccacaggttttggtgaagttgaagaaacacctacatggagaaaaggacttcactgaggatgtcaactctgcttttgagttcctgttgaagctcacgcccttgttggacaaagctgaccagcgctgcaattgtgactgcacaaatttcctcctccaagaatgcaacaagcagggacttctgtctgnnnnnnnnnnnnnnnnnnnnnnnnnnnnnnnnnnaacagatcgggacccccagctaaaatcatcagaaaatgccaacatccagcctaaccctgggctgatcctccgggcagagcccaccgtcacaaacattctcaagacgatggatgcagaccactccaagtccccagagggactgctgggggtcctgggacacatgctgtccgggaagagcctggacttgctgctggctgssgckgctgccactgggaagcttaagtcctttgcccggaaattcatcaaggcaggagctgcagctgatctcacttctgccacagccaccgctacctcttcggaagggccaggaaggagggtgaggctgtgccatgaaacctcacccagtagctgccgagaacccccgcaacccctcatcgctggagccggagatgggagaagaagagtaacagagag

SEQ ID NO: 347 - DNA, 610 bp, Cricetinae gen. sp.
cgctgctgcgtccgcagccatgagtatgctcargctacagaagaggcttgcctctagcgtcctccgttgtggtaaaaagaaggtctggttggaccccaatgagaccaatgaaatagccaatgccaactcccgtcagcagataaggaagctgatcaaagatgggctgatcatccggaagcccgtgactgttcattcccgggcccgatgccggaaaaacactttggctcgacggaagggcaggcatatgggcatagggaaacggaagggtactgccaatgcgagaatgcctgagaaggtgacctggatgcgaaggatgcggatcctgcgtcgacttctcaggagataccgggaatccaagaagattgaccgccacatgtaccatagcttgtacctgaaggtcaaagggaatgtsttcaaaaayaagcggattctcatggagcacatccacaarctgaaggcagacaaggcccgcaagaagctcctggctgaccadgctgargctcgcaggtctaagaccaakgaagcacgaaagcgccgkgaggarcgyctccargccaagaaggaggagatcatcaagactctgtccaakgaggaagagaccaagawataa

SEQ ID NO: 348 - DNA, 953 bp, Cricetulus griseus
tgtctgtgtcgcccataccagaccacgcggctgttcgcccgacgctgctcatcgtgcattagcggtcccaaaaagttcaaagtccaagatggcaacactcaaggaccagctgattgtgaatctacttaaggaagaacagaccccccagaacaagattacrattgttggggttggtgctgttggcatggcttgtgccatcagtatsctcatgaaggacttarcakatgascttgcccttgttgatgtcatggaagacaagctgaagggggaaatgmtggatctccagcrtggcrgscttttcctcaraacaccaaaaattgtctctggcaaagactatagtgtgacagcaaactccaagctggtcattgtcacagcgggggcccgtcagcaasagggagagagccgactcaatctggtccarcgaaacgtgaacatcttcaagkksatsattcccaacgttgtgaaatacagtccagactgcaagctgcttattgtttcaaacccagtggatatcttgacctacgtggcttggaaaataagtggctttcccaaaaaccgagttattgggagyggctgcaatttgsatyctgcycgatyccgttatctgatgggagaaaggttgggtgytcacccactaagctgtcatggatgggtcctakgggagcatgsagactccagtgygcctgtgtggagkggasygaatgtagcyggtgtctccctgaagaatctsaatccagagctgkgcactgataccgacaaggagcagtggaatgasgttcacaascaggtggttgwcagygcctatsargygatcmmwcygaasggttatacatcctgggccattggtctgtctgtggctgacttggccgagagcataatgaagaatcttaggcgggtgcatcccatttctaccatgattaagggtctctatggaatcaaggatgatgtcttcc

SEQ ID NO: 349 - DNA, 581 bp, Cricetinae gen. sp.
  misc_feature (471)..(489): n is a, c, g, or t
accatggaggctgtgccggagaagaaaaagaaggttcctgctgtgccagaaacccttaagaaaaagcgaaggaatttcgcagagttgaaggtgaagcgctttcggaagaactttgctttgaakacactgcggaaggcgcggaggaagcksrtkkrtgaaaaggcaaagcattaccacaaggaatacaggcagatgtaccggacagagattcscatggctaggatggcarggaaagctggaaacttctatgtgcctgcagaacccaaactggcatttgtcatccgaatccgaggtatcaatggtgtaagcccaaaggtccgcaaggtgttgcagctgctccgtcttcgycagatcttcaatggcacctttgttaagctcaacaaggcttcrattaacatgctgaggattgtggaaccatacattgcatgggggtaccccaacctgaagtcagtmaaygagctcatctacaannnnnnnnnnnnnnnnnnnaataagaagagaattgccttgacagacaattccttgattgctcgatctcttggtaaatacggaatcatctgcatggaggatctaattcatga

SEQ ID NO: 350 - DNA, 483 bp, Cricetulus sp.
  misc_feature (345)..(345): n is a, c, g, or t
atctgagttgcagctggtggcgcagcgcatccgcagtttccccgacttccccatccccggcgtgctgtttagggatatctcgcccctcctgaaggaccccgcctccttccgagcttccatccgcctcctggggaggggaccttaagtccacgcatggcggcgagatcgactacatcgcaggcctagactccaggggattcttgtttggcccctccctagctcaggagctgggcctgggctgtgtgctcatccggaagcgagggaagctgccaggccccacagtgtcagcctcctatgctctcgagtatggcaaggctraactagaaatccagaaagacgccttanaacctggccagaaagtggttgttgtagatgatctcctggccactggaggaaccatgtgcgctgcctgtgagctgctgggccatctacaggctgaggtggtggagtgtgtgaccctggtggagctgacctcacttaagg

SEQ ID NO: 351 - DNA, 532 bp, Cricetulus griseus
caggagcaggccaggtagcccagccttggccccaggagtctgaggagcagagaaccgctggaggcaggccccggcgtcggagggacttgggcagccgtctacaggcccatcgtcgagcccagcgagtggcctgggcagaagtggatgagaatgaggatgaagctgttattccagcccaggaggaagaaggtgttgagaagccagcagaaactcacccaacagggaaaattggagccmagaaaytacggaaactagaggaaaaacaggctcgmaaagcccagcgtgaggctgaggargctgaacgtgaggaacggaaacgcctmgagtcccaacgtgaggctgaatggaagaaggaagaggagcgrcttcgcttgaaggaagarcagaaggaggaggaagaragaaargctcgggaggagcakgcccggcgggagcaygaggartacctraaactgaaggaggccttcgtggtagaagaggaaggygttagcgaaaccatgactgaggarcagtctcacagcttcctgrcaga

SEQ ID NO: 352 - DNA, 680 bp, Cricetinae gen. sp.
gccgcgctccctgagggatggtactgaatttcgccgccacaggagcccggctggagcgcccgccccgcggcctcgcctccctgccgagcttccagcgcctcgggacgcgatgaggacctgggcttgcctgctgcttctcggctgcggatacctcgcccatgccctggccgaggaagccgagataccccgagagctgatcgagcggctggctcgaagtcagatccacagcatccgggacctccagcgactcttggagatagactccgtagggrctgaggatgccttggagacaagcctgagagcccacaggtcccaygccattaagcatgtgccsgagaagcggcctgtgcctattcgcaggaagagaagyattgaggaagccatycctgcagtttgcaagaccagracggtcatttacgagatacctcggagccaggykgaccccacatcggccaacttyctgatttggccyccrtgtgtggaggtkaarcgctgcaccggctgctgcaataccagcagygtcaagtgccagccctcaagggttcaccaccgtagtgtcaaggtggccaaagtggagtatgtcaggaagaagccaaaattgaaagaggtccaggtgaggttagaggaacacctggggtgtacatgtgcgacctccaacctgaacccagaccatcgggagg

SEQ ID NO: 353 - DNA, 502 bp, Cricetinae gen. sp.
ttgctcctttctttgccccgggtccggtcktgtyyrgctctttcagcatgcctgggtcacttcctttgaatgcagaagcttgctggccaaaagatgtgggaatcgttgcccttgagatctactttccttctcaatatgttgaccaagctgagttggaaaaatatgatggtgtagatgctgggaagtataccattggcctgggccaggctaggatgggcttctgcacagatcgagaagatatcaactccctttgcctgactgtggttcagaatctgatggagagaaatagcctgtcctatgactgcattgggcggctagaagtcggaacagagacaatcatcgacaagtcaaaatcagtgaagtctaatttgatgcagctgtttgaggagtctgggaatacagatatagaaggaatagatacaactaatgcatgctatggaggcacagctgcagtcttcaatgctgtgaactggattgaatccagctcttgggatggwmkgta

SEQ ID NO: 354 - DNA, 623 bp, Cricetinae gen. sp.
  misc_feature (525)..(543): n is a, c, g, or t
tctctgtataagaatcagactaaagtagttgaggctccaaaggatgctgtaacaataagcgacacacttactgaagaaaaacaaagtattattctagaaattattcacaaggtctcttttcctccktgyagcwcgrscascgtascsatcaygaatgacacagtaacgatccggaccaggaagttcatgacwaamcgtmtgcttcagaggaaacagatggtcattgatgtccttcaccctgggaaggcaacagtaccaaagacagaaattcgggaaaarytrgccaaaatgtacaaaaccacrccagaygtcatctttgtgttcggattcagaacccactttggtggyggcaaaacgactggcttcrgcatgatctatgattctctagattatgcaaagaagaaygagcccaaacacagacttgcaagacatggcctttatgagaagaaaaagacrtcccgaaaacarcgwaaggaacgcaagaacagaatgaagaaggtcaggggractgcaaaggccaacgtnnnnnnnnnnnnnnnnnnnaaggagtagatctrcggtgacttgatctgctgtggtgtgcagatttccgagaggacaaataaactaaacatttatgtatc

SEQ ID NO: 355 - DNA, 547 bp, Cricetulus griseus
ggtggagaagtctggagacgacgttcakaaatggcacctcgcaagggaaaggaaaagaaggaagaacaggtcatcagcctcggacctcaagtggctgaaggagagaatgtatttggtgtctgccacatttttgcatctttcaacgacacctttgtccatgttactgatctttctggcaaggaaactatctgccgggtgactggtggaatgaaggtaaaggctgacagagatgagtcttctccttatgcagccatgttggctgcccaggatgttgcccagaggtgcaaggagctgggcatcactgccctgcatatcaaactccgagctacgggaggaaacaggaccaagacccctggacctggagcccagtcagccctcagagctcttgctcgttcagggatgaagattgggcggattgaggatgtcacccccatcccctctgacagcacccgaaggaagggtggtcgtcgtggtcgccgtctgtgaacaggacttctcaaattattttctgttaataaattgctttgtataagctaaaaaaaaaaac

SEQ ID NO: 356 - DNA, 466 bp, Cricetulus griseus
  misc_feature (291)..(307): n is a, c, g, or t
ccgggacgcgtgcgagatgggccgcgttcgcaccaagactgtgaagaaggcggcccgggtcatcatckagaagtactacacgcgcctgggcaatgacttccacaccaacaagcgcgtgtgcgaggagatcgccattatccccagcaaraarctccgsaacaakatagccggctatgtcacgcatctsatgaagaggattcasagaggtcctgtgagaggcatctctatcaagttgcaggaggaagacagagagaggagagataattatgttcctgaggtctcagccctagnnnnnnnnnnnnnnnnngtggatcctgacaccaasgaaatgttgaagcttctggactkcggcagtstctccaacctgcrggtsactcaksctacagktgggatgaattkcaaaacaccacgtggagccgtttgaatctgttctgtcagatkttcaataaacctgaaaaccacaaaa

SEQ ID NO: 357 - DNA, 565 bp, Cricetulus griseus
  misc_feature (96)..(110): n is a, c, g, or t
  misc_feature (216)..(241): n is a, c, g, or t
aagtcccgcagagctgagcggccaagatgtgtgacttcaccgaggaccagaccgcagarttcaaggaagctttccagctgtttgaccgaactggcnnnnnnnnnnnnnnntacagccagtgtggggacgtgatgagggccctgggccagaaccctaccaacgccgaggtgctgaaggtcctggggaacccaaaagtgatgagatgaatgtgaaggnnnnnnnnnnnnnnnnnnnnnnnnnncatgctgcagactgtggccaagaacaaggaccaggggacttatgaggattatgttgaaggccttcgtgtgtttgacaaggaagggaatggtaccgtcatgggtgcagaaatccgtcatgtccttgtcacactgggggagaagatgacagatgaggaggtggagatgctggtggcaggacatgaggacagcaacggttgcatcaactatgaagagcttgtccggatggtgctgaatggctgaggacatttccatattgcaagccggtgccttgcccagagtgagatttctatgctatgtggcccctcctaggctcccttatcaca

SEQ ID NO: 358 - DNA, 499 bp, Cricetulus griseus
  misc_feature (497)..(497): n is a, c, g, or t
gcggtagcagcttcggcgtccgcggtttagtcgccaacatgcagctctttgtgcgcgcccagggtactacacacactcgaggtgaccggccaagagacggtcgctcagatcaaagctcatgtggcctcactggaaggcatttccccggaagatcaagtcgtgcttttggctggctcgccgctggaggatgaggccaccctaggccagtgtggcgtagaggccctgactactctggaagtagctggtcgcatgttgggaggtaaagttcatggttccctagctcgtgctggaaaagtgagaggtcaaactcccaaggtggccaaacaagagaaaaaaaagaagaagacaggtcgggccaagcggcggatgcagtataacccgtcgctttgttaacgtggtgccaacctttggcaagawkaarggccctaatgctaattcctaagtccttctgtgattcttgcactctaataaagccactttgcccaraaaaaaaaaanaa

SEQ ID NO: 359 - DNA, 1212 bp, Cricetulus sp.
gcaggaccatggttgagcgcgccagcaagttcgtgctggtggtggcgggctcggcgtgcttcatgctcatcctgtaccagtacgcgggyccggggctgagcctgggcgcgcccggtggccgtgcgccacccgacgacctggatctcttccccacgccggacccacattacgagaaaaagtactacttcccggtgcgcgagctggagcgctcgctgcgcttcgacatgaagggcgacgatgtgatcgtcttcctgcacatccagaagaccggcggcaccaccttcggtcgccaccttgtgcagaacgtgcgcctcgaggtgccctgcgactgtcggcccggccagaagaagtgcacctgctatcggcccaaccgccgcgagacgtggctcttttctcgcttctccaccggctggagctgcggactgcatgctgactggaccgaactcaccaactgtgtgcccggtgtgctagaccgccgcgacccagcaggtytgcgttcgcccaggaaattytactacatcaytytastgcgagacccagtatcccgctacctgagtgagtggcgacatgtacagcgtggagccacgtggaagacctcactgcacatgtgtgatgggcgcacaccaactccagaggagctgccgccctgctacgagggcacagactggtcaggctgcacgctgcaggagttcatggattgcccttacaacctggccaacaaccggcaggtgcgcatgctggctgacctcagcctggtgggctgctacaacctgtccttcatccccgagagcaagcggscscagctgctgctggagagcgccaagaagaacctgcgcggcatggccttcttcggcctcaccgagttccaacgcaagacgcagtacctatttgagcggacgttcaaccttaagttcatccggcccttcatgcagtacaacagcacgcgggcgggcggtgtggaggtggatgaggacaccatccggcacatcgaggagctcaacgacctggacatgcagctgtatgactatgccaaggacctcttccagcagcgttaccagtacaagaggcagctggagcgcagggagcagcgcctgcgcaatcgcgaagagcgcctcctgcatcgctccaaggaggcactgccacgggaggacacggaagagccaggtcgcgtgcccaccgaggactacatgagccacatcattgagaagtggt

SEQ ID NO: 360 - DNA, 2725 bp, Mesocricetus auratus
  misc_feature (2113)..(2131): n is a, c, g, or t
gatatcaagactagccttgtctacatagggagtgcggattaaagaatagccttacatttaagtgtgaaagatcttaaataagtaaataaacagattcatgtatgttttctgttgcttagataaatgggacaactcaaatttcaaagagtctgtgaaattatctcttattaatacaaaaaggcaaattcagatgtatgtatgctttgaacatatatattgaatatggcctctctatgtatccatcatttctgaaatgatttttcaatgtccagtaaagtgatttccctaagggaggtaggttaaaatttggacaagatgttaagtgtctgttcttttaaatacacataaacatctaattttcaataaaagttgcttaggatttaaatatcccaacattaggaagttaaatgtagacttcctgactttaaaattataccaaatattaattttaaaggaaaatgctattcttcatctgtaaacagtcattgtctttcctgaatgaatcttatgagaaaattattgattattttatcaaatatcaaagcaatgagtttattacaattttccaaagttgtgccagatattaacaatccaagactaatgtttgtatggctgaatgaaaacaatccttagcagcaaacagttttcaatcagaaagcacaaaattaacatgtctgatggaaggctatgcatatgccaagataatccaaaatggttcatatgccacaatcagctctgaaaactataatgagcctgaacaggaacttctgcctgctatttataaaagctaatcaggagttgtacaattatgtaattttggtttgccttttcaagttaccagaaattttgataggaggcatcacccaaacaccccacctctcttgattggcatcacactcattaccaaataagataatacggtggtttgtatttctacttttacccctagctccatcgtgggtgtgtgaagtatatgctggcatctagcactttcctacagactcaatgcttagctttttctgacctcactcttgttcaggccttgaacatgacgttcagccttgtatgcaggttccatttgccctcacaagcatttgcttgtaatgataacaattcagactggggtgagatggaatctcaatgtaactttttgtttttatttctctgatccctaaagcttttgaaaagaattttatatatttaatggtcatttgtacttcattttctaagaatcatcagttcacctcatttttccatttgttgatttgagttgtttacatgttttgatttaacctttttgttcttcatgtattcagtcatctagtatgaaattatgggttgatataacattaaccgttgactatttatgcctatctaatggtaaagcaagattaaaattgatatattcattccctgggaaacataactctattgtactttatacttgagaaacagattatgttaagtctactgcatttgtttgtgaacaggtgaacactgaaaataaccttgtgaacgtgtggtgtaatgctttggatttaagccttcctggcactagctcatttgagctttagaaagtcaaaggctgtgtatgttttcccccttgtcctctgagagctgcttctcagcttacagttagaggatatgctctacttaacattgctgtgactttcagttctttatctattgaaaaggcctgccatatgacacaattgtgatgctattggagttcaagaaagttttaaattcttataaggggtaatcctgtatacagaaatacagataaagaagttttgtaaatattcatggaaacttctactgctttgttattccttttcttaaatattatattcattgagaatttcataatacatacacatacataaataaagtgtattctgatcatattcagcccatacttctctcctaaatcctcacctccaagatccatcatcacaccctacctcccaacttcattctcttattttaatagtcacccactgagcctagtttgtgctgctcacatacgtgtatatgtgcagctgtccactagagtgtggttgatgtacaagctgcacccttaaagaaaattgactcaatggcagcacacatnnnnnnnnnnnnnnnnnnntaggcagaggcgggcgagtctctgtgagtttgaggccagtctggtatacaaagcaagttccagaacagtcgcaggtacacagagaaaccatgtctctaaaaacacacataaaacaaaacaaacaataaagaaaagtgtctctacctcttaatcatgaactatcaatatctccccagctaggggtaggggctcatgaccccctccacttccatgctggaatgttaattgagcaggtattatgaagtcttgtgaagacagccacagatgctgtgagtaggtgagtgtagtggtcctgtcctgtctaaaagacactgttagttgaggagatttcacttaaaatcttctcctcatatatgcaagaaaatattctaggaaacgtatttgactggataagatttatttgtctggactattcacctttgtggagttattggatgtatattataaaaggtggaggaaaagttgttaatcaccatcaagcaatgactatcttttttatcactattataggcactgctataaactttgcaaggttttgcattggattggatttcatatactgccttttcagtagcacccaaacttcttactagt

SEQ ID NO: 361 - DNA, 1640 bp, Mesocricetus auratus
ggatcctgggtgtcactgaaacagtctggaaagcagtggggcagccatggyactgctgattggagatggcctgtggtctggggtcatattcacggccctcttcctgcttctggtggacctgatgcaccgacgcaagttctggagggcccgctaccctccaggycctatgccactacctggactgggcaacctgctgcaggtggacttcgagmacatgccatatagtttatacaagttccaacagcgctatggagatgtgttcagcctgcagatggcctggaagcctgtggtggtratcaatggactgaaggcagtgcgggaagtgctggtgaactgtggagaggacaccgctgaccgycctccagtgcccatctttaatcacstgggytwcsggcmyaamtctcaaggtgtggyrtttgcacgttatggaccccagtggagagagcagcgtcgattytstgtgtctaccatgcgagacttcggcgtgggcaagaagtcactggarcagtgggtgacagaggaggctggccacctctgtgacgcyttcacccaggaggctggrcatccctttaatcccaycaccctcctgaataaaagtgtatgcaatgtgatttcatccctyatttatgcccatcgcttcgactatgaagaccctttcttcaacaagctgctcaaraygttacaggaaagytttggagaggacwctggcttcattgctgaggtgctgaacgcagtcccagtgctgcttcggatccctgggctgccaggcaaagccttccccaagctaaccgcattcatggattccctatataaratgytgattgagcacaagacaacctgggatcctgcacagccaccccgaggtctgacagatgccttcctggctgaggtggagaaggccaaggggagacctgagagcagcttcaatgatgagaacctgcrtrtggtggtrgctgacmtgttcattgcaggratggtgaccacstcaaccacactgtcctgggccctgctattgatgatcctgcacccggatgtgcagagccgygtscaacaggaaattgacgatgtcatagggcaggtgcggcgtccagagatggcagaccaggcccgcatgccctacaccaatgctgtcattcacgaggtgcagcgattcggrgacattgccccagtgaatrtaccacatatgacatcccrtgatgtcgaagtacagggtttcctcatccccaaggggacgaccctcatccccaacctgtcctcagtgctgaaggatgagactgtctgggagaagcccctccacttccatcctgaacacttcctggatgcccagggccgctttgtgaagcasgaggccttcatgccattctcagcaggccgcagagcatgtctgggggagcccctggcccgcatggagctcttcctcttcttcacctgcctcctgcagcgctttagcttctcggtgcccgctgggcagccccggcccagcgaccaaggcrtcttcgccttgcctgttaccccgaccccctacgagctctgtgcagtcgtgcgctagcaaggacagcagctccatcctcctccccagctcgtgctgcgtgatgtccaataaaccagacctgtggctgtcamwmaraaaaaaaaaaaaa

SEQ ID NO: 362 - DNA, 1682 bp, Mesocricetus auratus
gcctcctcggattcctgcagggctccagacacctswtsccakstgcctstrytgagcttcwsawygywcyacwcaggaagcctggggagcagtgggacagccatggagttgctgactgggcatggcctgtggcctgtggccatgttcacggtcatcctcatattactggtggatctgttgcaccggcgccaacgctgggcttctcgctacccaccaggccctgtgccattgcctttgctcggcaacctgttgcaggtggacctcaagaacatgcagtacagcgtgcacaagctccaacaacactatggcgacgtgttcagcctgcagatggcctggaaacatatggtcatgatcaatggactgaaggcagtgcgggaagtgctggtgaactatggagaatacactgcagaccgcccaaaaatacccatctatgaacatgggagtttgggtcccaaagcaagaggtgtgattcttgccccttacgggcctgagtggagagagcagcgacgattctctgtgtccaccctgcgcaacttgggcctgggcaagaaatcactggagcagtgggtgacagacgaggctggccacctctgtgacgccttcaaggaccaggctgggcgtcccttcaatcccagcacgctgctgaacaaggctgtgtgcaatgtgatcacgtccctcatttttgctcgccgcttcgagtatgaagacgctaacctcatcaggatgctgagactgctggaggaagctctgaccaacatctctggcttcattcctgagattctgaacacattcccagtgctcctgcacatcccagggttgtttgacaaggtgttctctgggcaaaagaccttcgcggccatagtggataacctgctgactgagaacaggaggacctgggaccctgaacagccaccccgaggccttactgatgccttcctggcagaaatggaaaaggccaaggggaatcctgagagcagcttcaatgatcagaatctgcgcatggtggtgaatgacctgttcattgcagggacagtgagcacctcaacaacactgtcctgggccctgctgttcatgatccagtacccagatgtgcagcgccgagtccaacaggagatcgatgacatcttaggaccggggagaagcccagagatggcagaccaggcccgcatgccctacaccaacgctgtcattcatgaggtgcagcgctttgcagatattgccccactgaacttgccatgcatcacatcccgggacattgaagttcagggattcctcatccccaaggggacgaccctcatcaccaacctgtcctcagtgctgaaggacgagaccgtctgggagaagcccctccatttccatcctgaacacttcctggatgcccagggctgctttgtgaagcaggaggccttcatgccattctcagcaggccgcagagcatgtctgggggagcccctggcccgcatggagctcttcctcttcttcacctgcctcctgcagcgctttagcttctcggtgcccgctgggcagccccggcccagcgaccatgtagtcttaggtgttttgaaaagcccagccccctaccagctctgtgcagttcctcgctagcaggacaccaattcaatccaccctagctttgtctgatcctcccacagtaaaacagttttgtgactgtcaaaaaaaaa

SEQ ID NO: 363 - DNA, 3199 bp, Mesocricetus auratus
  misc_feature (1835)..(1850): n is a, c, g, or t
  misc_feature (2044)..(2072): n is a, c, g, or t
  misc_feature (2184)..(2209): n is a, c, g, or t
gaggctcacctgggcgccgcctccgggccgcaggtggagcgggcrgcsgcscrgscaccatgagcagcggcgccaacatcacctacgccagccgcaagcggcgcaagccggtgcagaaaacagtgaagccagtccccgctgaaggaatcaagtcaaatccttctaagcgacatagagacaggctaaacacagagttggaccgcctggctagtctgctgcccttcccacaagatgttattaacaagctggacaaactctcagttcttaggctcagtgtcagctacctgagggccaagagcttcttcgatgttgcgttaaaatcctcccccgctgacaggaatggaggccaggagcagtgtagagcgttcagagatssactggacctgcaagaaggagagttcttattgcaggcactgaacggcttcgtactggttgtcacagcagatgccttggtcttctatgcctcctctactatccaagattacctgggctttcagcaatctgatgtcatccatcagagtgtctatgagctcatccataccgaagaccgagctgagttccagcgccagcttcactgggctctaaaccccgcacagtgtacagactctgcacaaggaggggatgaatctcatggcctctcacagcctccggcagtctacttcaacccagaccagcttcctccggagagcgcctccttcctggagaggtgcttcatctgccggctccggtgtctgctggataattcctctggttttctggcaatgaatttccaagggcggctaaagtatctccatggacagaacaagaaggggaaggatggaacactactgcccccgcagctggctctgtttgcaatagccaccccacttcagcccccgtccatactggaaatccgaaccaaaaacttcatcttcaggaccaaacacaaactagacttcacacctattggttgcgatgccaaagggcagcttgtcctgggctacacggaagcggagctgtgcacccgaggctcggggtaccagttcatccacgctgccgacatgctctactgcgcggagttccacgtccgcatgattaagactggggaaagcggcatgacagttttccggcttctggcaaagcacagtcgatggaggtgggtccagtccaacgctcgcttgatctatagaaacgggaggccagattacatcatcgcaactcagaggccactaacggatgaagaaggaagagagcacttacagaagcggagtatgacgctgcccttcatgttcgctacaggagaggctgtattgtacgagatctccagccctttccctcccataatggatcccttgccaatccgtaccaaaagcggcaccggtgcaaaggactgggttccgcagtcaacaccaagcaatgattccctccaccccagctcgcttatgaattgcatgatccaacaggatgagtccatctatctctgtcctccttcgagtgctgcgccgctagacagccattttctcacccacgggagtgaaggcgatggttggcaggacagtattgcatcaataggaagtgaagctgagttgaaacatgaacaaatcggacatggtcaggacatgaaccctgcagtctctggaggccccccggggctctttccagataatagaaatagtgacttgtacagcatcatgaaaaacctagggatcgatttcgatgacatcaaacgcatgcagagtgaggagttcttcaggactgagctggctggcgaggttgacttcagagacatcgacataacagatgaaatcctcacttacgtgcaagactctctaaacaggtcgaccttgctgagttcnnnnnnnnnnnnnnnncctgtgactcagcacctgagctgcatgctgcaggaacgcctgcatctggggcagcggcagctgcagcagcacgaaactcaggcagcggagccccagcagcagctgggtcatcagacggcgccccagcaagagctgtgtcaccagacggcgccccagcaacagatgtgtcttcagatggcgccccagcaagagcnnnnnnnnnnnnnnnnnnnnnnnnnnnnnctgtgtcttcagatggcgccccagcagcagctgtgtcaccagacggcaccccagcaacagctgtgtcttcagatggcgccccagcaagagctgtgtcaccagacggcgcccnnnnnnnnnnnnnnnnnnnnnnnnnntcatgcgcaagtcaatggcatgtttgcaagttggaaccccacccctctcgtgcctttcagctgtcctcagcaggaactgaagcattatgacgtcttttcagacttgcagggggcgattgaggagttcccctacaaatctgagatggacagtatgccttacacacagagctttgctccctgtaatcagtctgtgctaccccagcgttccaagtgtgcacagctggacttgcctggaaagggtttcgaaccatccctgcaccccaacacttctaatgtaggagattttgtcacttgtttacaagttcccgaaaaccaaagacacgaggtgcatccacagtcggccatggtcgctcctcagacatactatgctggggccatgtccatgtaccagtgccagccaggacctcagcacgtccctgtagagcagatgcagtacagccctgcagtcccagactcccaggcatttctaaacaagtttcagaatcagggagtgttaaatgaaacctattcgtctgaattaaacagcgttggtcacaggcagaccactgctcatcttcatcaccctgcagaagggaggccgtttcctgatatcacacccagcggattcctgtagctttgggaacaagataccgggactgtctgtccatgttggccatcagcactctttttccaagccagattttaatctttgtgttgggaagaggagtttaaaaactgttatcggttacctataaaatgggaagctctgcagsagcatagggagagaccacaagcctttaagtagctttagcacctcagcgtgcacatgcccacarcggagagctttggggttctggagagctgagcgtctccactcagtgaccagccagaaagacaacttcaggattcccgatggtgtaccaaatacagttagaagactaattgattttaacctctctgtgtctcagatgttagaataaatggtttggtgcttttatcaaaaaaaaaaaa

SEQ ID NO: 364 - DNA, 1759 bp, Cricetinae gen. sp.
tcacsctcatcrcmaccatgctggcctcyggactgctcctggtkwctgtgctggccttcctcgtcrtcctgrtcttgatgtctgtctggaagcagaggrarctctcagggaagmtgcctccdggwcccaccccattgcccttcatcgggaactacctbcagctsaacacagmgsagatrtacaactccctcatgaagatcagsraacgmtayggycckgtgttcaccrtccacctgggkcctcgccgcagaatygtgrtrctatgbggacaggaagcwgtcaaggaggctctggtrgatcawgctkwggarttcagygggcgtggygagmasgccacctttgacwgkytcttcraaggctayggmstdgycttcagcmsyggrgagmgskccaarcmrctrmggcgcttctccatcgccacrctgmgggacttyggcrtgggcaagcgtggyrtcgaggagcgcatccwagargargcgggytttcttctggaggcattccggaagacaaacggtgctctcattgaccccaccttctacctgagcagarcrgtctccaacgtcatkagctccatcgttttcggcraccgctttgactatgaggacmaagagttcctgtcrctgctgargatgatgmyrgraasyttccagttcacagsywcmtccactgggcagctctacgagatgttctcttcrgtgatgaarcrcctgccrggrccccagcaamargcctwtaaggrrctrmaggsrctggargacttcatarccaagaaggtggaacagmaycagmgcaccctggayycyaattccccaagggacttcatygactccttcctcatccrcatgmaggmggagaagaagaaccccaayacagarttytwcatgaaraayytggtgytrackacrctraacctcttckytgctggcacagagaccrtcagyacraccytacgctatggcttyctsytgctcatgaagcacccagaygtggaggccaaartccawgaggagatyracmrggtgattggcargaaccgrcagcccaaatatgaggaccgmwygaagatgccytacacagaggctgtgatycatgagattcarmgmtttgsagaydtratmcccatgggybtgsctcgaagggtcaccaaggacaccaagttycgggrcttcytyatycccaagggcactgamgtgtttcctrtgctgggctctgtgctgarsgacyccaarttyttctccaaccccaaagacttcaayccamagcayttyctdgatgrcaakrkkcagtttaagaagaatgatgcmttyrtrcccttttccwtaggaaarcggwactgcttyggagaaggactggckagaatggagctcttyctctwcctcacrawcatcctgcagaacttycrcytcagatccycacaggcaccccrdgacatcgatgtgtcccctmramtsgtgggrtttgsmacvmtyccaccaaactayaccatgagyttyttgtcccrttrakcmakgkctkgatrwkggwmaarggarkgatggagaccmgsytagtgtgggwvattgkrahttrgadggagtcakagggacargararacagaggacaygaatmracttgstgaagagagactgbcatttccaaggyagkgwgagagaaagrrgaaatktatactatgtkgtgaatartrayratrrtaatwataataatracastagmyaytaytwmtaktaataataataataaaataataatrgcgacatt

SEQ ID NO: 365 - DNA, 2745 bp, Cricetulus griseus
  misc_feature (169)..(209): n is a, c, g, or t
  misc_feature (211)..(224): n is a, c, g, or t
  misc_feature (274)..(320): n is a, c, g, or t
agggagactgcagacacagactgctccctggagttctgttcacagcagcacagcttctcttcaggaactttcactcacaagggaatgctaggtaagtgaactatcacagaacaacactccaaattccccacgggtctttaggagagaaagcagaagaatgctcgcactnnnnnnnnnnnnnnnnnnnnnnnnnnnnnnnnnnnnnnnnntnnnnnnnnnnnnnnggagttcctggacagccagggttgttacacagggaaaccctgccccaccnnnnnnnnnnnnnnnnnnnnnnnnnnnnnnnnnnnnnnnnnnnnnnnaaggtttattttggctgcacactagtgcttagctcacgttgtttctttttgcatgtgtatgtgtgtggggggtggtacctttagtgcagaggtcagaggttcacatcaaatgtccttcatcctgtatccatctcgtcccgactttttgaggcagaccctgtcagcttgctccgggaatcctgtttctggctcctatgggctgggattacagccaccctgcccctggttatgcggaccttcgggatttgtactctagtcctcatgacctttactgctgaaccagctccacggcctcagcccagcatcccatcctgccagtttagggatggaccttcccaccggtcagcctagtagagaaactccctcacagacacgcccagaggtctgtctccagggtgcttctaggtcctctcaagttaaccatcacaggcacactaggcccccacggagctcatctttctgacctccgggatcttttgaaagagaaggtggagtcgggagcaagaggctagggaagtttgacaggatcggcttgggaaaagctgagtcaccgtgagggcttagttgcccttagccaatccctgggatccagacagactgggactcctctgaagatgggaggaagtctgatggatgtcatacccacacttagagcgcctggaatttgttcccgaattcagagtctccttgggagagggttcgcgtcgatgtagagcccttccgacctatgtacatactcgggtacacttgggcaaaaccagacgctgtcgctgggggctcctgtaggtgtccgggatacataaaacggtcctgtaaactggaacctgctctcccacgtgggggcgcaccgagacctccagacgcgcagagctcgcccacacctgttaagtctgctcccgggctctgttccctaaagcaggccgcggggaatccgctctacagcggctctgtgttaagtaatctcagttccgcagaagcaaattttacattctgcagaaatcgacgggctccagcgcaagaaaattacgtagcacttgttttcttccttctgagattcccccaaaatagttgcttcaatccgactgccacgagtcctgctgacgccttgagattcttttgggagcaggtccctgacccacgttcatctccgagccggatcactactccgcaagcctgagggaggaggcggaccttcgcgaacagagggcccctcctcggaggggagggaccgacacccagggccttgttctccagcagttgcagcgccgggtcccaggacttagtcctgcgccacggttctgaccacgggtggcccgctgcccagccggctctgcaagccggtggtccgcgtgtssmtccgatatgtcgtcctgcagccgcgtggcgctggtgaccggggctaacaagggcatcggctttgccatcacgcgtgagctgtgtcgcaagttctcgggggacgtggtgctcaccgcgcgggacgaggagcggggcaaggcggctgtgcagcagctgcaggcagagggcctgagcccccgcttccaccagctggacatcgacgacctgcagagcatccgcgccctgcgcgactttctgcgcaaggagtatgggggacttaacgtgcttgtcaacaacgcgggcatcgcctttagaatggatgatccaacaccctttgacattcaagctgagatgacactgaagacgaacttttttgccactagaaatgtctgcaatgagttactacccataatgaaaccacatgggagagtggtgaatgtcagcagtctgcagggctcaaaggctcttgaaaactgcagtgaagatcttcaggaaaggttccgatgtaacacacttacagagggggacctggtcgacctcatgaaaaagtttgtggaggacacaaaaaatgaagtccacgagagggaaggttggccagactcagcttacggggtgtccaagctgggggtgacagtcctttccagaatcctggcccagcagctgggtgagaagcgtaaagcagacaggattctgctcaatgcttgctgcccagggtgggtgaagaccgacatggcgagggaccagggctccaggactgtggaggaaggggcggaaaccccagtttacttggccctcctgcctccagatgccactgagcctcagggccagctagtctgtgacaaagtcgtgcaaacatggtgaacatctgctttgggacttaatggtttagtaactgytsgagagggakmcaaatggaggctgctgtagtttgattctctttgcacattgagaaggaaggtccgtcatacctgtgaggttctacaatctgaatctgaatgatgtgcaatgtccaaactctctatggcccttggtttttcatccagttcattgtgcctgcttgtttttcaaataaaaaaatagtttttatttt

SEQ ID NO: 366 - DNA, 1324 bp, Cricetulus griseus
gaattcctttctcttgggactatttgagactaccaagcacccagtatatattctacaggcagtcacattcttagtaacaactatattggagtwgctttctagaatattaatatctacttctgtaataaatgataaatgcttctgacatgatgtctcatttcagtttcccgtatttccctgtatgcacaatgcaaccactctcackcarattgtggtcagtgcaactcaaatgtcttactttaatttaaatggccacctgtggctattagcaacctaycaaacacaaacagmatgaaacttgaccttcagatccccatttccagggagttacagggcagtgaggatttcttccccttcatggacacatttgtgascmwstrtsasctttgtgagcacagagcatcctgtaaccttgaaaggggaactawggtgtgactccaagtgctattttgagtacaraggagcaggttccctgaaggccctggcctctgtacacctcagtgctcacatccaggtaaggtaaagcacttagragtttgtaaacacacaacccatgggattagtttggattgcttcctgccaaggattaaccaacactttgctttagcatcctaagtgggaaactcagcaggaatttccattcctcatccttctcaccagttcatcctacaactctacttcctacgataaaggsgccrtgcgttatttttctagacaccagaaagactatggacaaagatccaatctccaagttggggarggaaaacagtgcaacattgataaaagcacagagctgaagattcactcacaygggcaaggtcaatgtctsatttccgggtggacagctgcagcagcctctctgcagacttctcctgcagtctcccctggctggggcttccaaaacyccttgaggaaaaaagacagagatgcccatgagccgaccyagccmtttttctggctggattttaaytgtwcaacacgctttgcttgctctgagcctgcaaaggaactggcctgtttctttattgaacagatttatacacctaagcccgatatcagaaggtgakccatcaccgcgtaaatatacaccattaagacaagaggacagttacagggagtgtaaagctcacaagaacytgtccccgawttaccacgccctcctggaggcggggtcagatgatgcgcatgcgccttgagcccatgccggcttaaccaaacaagctgtccytagaaaaaccctaggagttaggattggctctcctcgtgcgcggggaacctcagrrtccgtgcyctgtaaccgcctcyctstgaacacccagccatg

SEQ ID NO: 367 - DNA, 2718 bp, Mesocricetus auratus
gcgcctgggactttccgcgcacacctccgagcccgcccttcttctctcccacggagactcctgggcagcggggacgccgaaagtcccaggcggagagaacagaccctggacagcgcgctccatggctgcgctcgcctggctagcggccgcgctgctgcygctggccgactggctgctgctgcggcccgggctcccgggattcttttccctgctggttcccggggtgccgctgctccggatctgggcggtgggcttgagccgctgggccatyytggggctgggggtccgcgggatcctcggggtcaccacgggagcccacggatgggtggccgctttgcagccgctgacggcggcgctgggtttagcccagccgggacttgcctcgttccgagagctggcctcctggggagcactccgggrgcgcgacaacgctgaagagctgcactggggcagccgcctcgacgcgttcgttctcagttatgtagcagcactgcccgcagccgccctatggcacaagttggrgagcctctgggcgcccagcgaccgcaggggcgctggagacatggtgcatcggctgctaggcttcctgggttcggagaagcggcgcctccacctggttctggttatcttgatcctctcctgtctcggggaaatggccattcctttcttcacgggccgcatcactgactggattcttcaggacaagacagcttctagcttcattcgaaacatctggctcatgtccattctcaccctagccagtacagcgctggagtttgctggcgatggcatctacaamaccaccatgggccacatgcacagccgtgcgcatggagaggtgtttcgggctgtccttcaccaggagacagggtttttcctgcagaaccmagcaggttccatcacrtctcgggtgactgaggacacatcmaaggtctgtgagtctattagtgacaagctgaacctgctgatgtggtacctggggagaggcctgtgtctcctggcgttcatgttttgggggtcagtgtccctcactctggtcaccctggccgccctgcccctgcttttcctcctgcctcagaagctggggaaggtgtacaagtcgctggaagcgagggtgcaggagtctctagcggagtccacgcaggtggccattgaggccctgtcggcgatgcctacggtgcggagttttgccaacgaggagggagaggcccagaagtttaggcagaagctggaggaaatgaaggcgctcagcaagaaggaggccttggcctacgtcgtcgaagtctggaccacgagcatctcgggaatgctgctgaaggtgggaatcctgtacatgggcgggcagctggtggtcagaggggctgtcagcagtggagaccttgtctcctttgttctytaccarctgcagttcaccactgccgttcaggctctgctctcctactatccctggatgcagagggctgtgggctcctcagagaagatatttgaatacctggaccggagtccttgctctccgctcagtggctctttggcgcccttaaacatgaaaggtctygtcgagttccaagacgtctcctttgcctatccaaaccatcccgatgwccaggtgcttcaggggctgacgttcacgctgcatcctggaaaggtgacggcgttggtggggyccaacgggtcagggaagagtaccgtggccgccctgctgcagaatctgtaccagccgacggggggccagctgctgctggacggacagcccctggtccagtatgatcaccactacctgcacactcaggtggccgcggtgcaacaagagccactgctatttggaagaagttttcgagaaaatattgcctacggcctgacccggaatccaaccatggaggaaatcacagctgtggccaaggagtctggagcccacgatttcatccctggactccctcagggctatgacacagaggtgggtgagtctgggaaccagctgtcaggggggcagcggcaggctgtggccttggcccgagctttgatccgaaaaccgcgcctgcttatcttggatgacgccaccagtgccctggatgccaacaaccagttacgggtccagcggctcctgtatgagaaccccggaccggcttctccaaccgtgctgctaatcacccagcagctcagcctggtggagcaggcgcaccacatcctgtttctcgargaaggctcggtttgcgagcagggcacccacctgcagctcatggaaaagactggaggtcgctaccgggccatggtggaggctctcaaggctccttcagatggacaggcctctggacctgccgaccgccctccagcactgtcctctgctaggtgtggcggagaacccgggagcaaagatattatcacacccattgaccaggctcagttgaggaactgaggtactggtcacaggataaaatgtaacatctaggagacggctggagtttaccatgaatgctattcccaccccggccccttagwtagagtcgatttcaggtacctcaggctgaccttgaactcctgcctcccccctcctggtactgttctggtatcacagcacgggcaaacctggtttatgcggtgttggatgagaagaaatgctcacagtgaagcagtttgggattaacggaaggcataggctggcctatggataacccgtgrgctactgatatttataataaaactggcgttttgkactgcgtt

SEQ ID NO: 368 - DNA, 2436 bp, Mesocricetus auratus
  misc_feature (820)..(837): n is a, c, g, or t
  misc_feature (1544)..(1544): n is a, c, g, or t
ggcacacccaggggatccagtttggggacaggcagatttcagaagcgctgctgagcggctgccccgcagagcccaccatggcgctgkccyacctgaggccctgggcctctctgctgctggtggacatggctttacttgcactgctgcaggggtctccgggaaatctgcttcccctggggcttccaggactrtggctggagggcaccctgcgccttggagggctttgggggctgttagcagtgggggggctgctgggacgtgtggggacctttccgcccttgctctgcctggctaccccgctgtttttctctctaagagcgctggtgggaggcaccatgagttccccagcagtcagagtggyctctgcctcttgggtctggctgctggctgrctatawggcygccgcgctgggctgggccgtgtgggctgtgctgagccctccaggagcccgggagaaggaagcaggccaggagaagaacaagagtctgatgtggcagttgctgaggctctccaggccggacctgcctttccttatggtcgccttcttcttcctggcgtgggctgtgctgggggagaccttaattccccactattccggtcgtgtgattgacatcctgggaagtgattttgacccggatkctttcgccagcgccatcttcttcatgtgcctgttctctgtkgggagctccytgtctgcgggctgccgaggaggctccttcctcttcaccatgtccaggatcaacctgcggatacgggagaggcttttctcctccttgctgcgccaagaccttgggtttttccaggagaacaagacaggrgnnnnnnnnnnnnnnnnnngctcagacacttccaagatgagccgctggctcccttataatgccaacatcctgttgcggagcctggtgaaggtgatcgggctgtactgcttcatgctccaggtgtcgcccaggctcaccttcctctccctgctggacctgcccctcacaatagcagccgagaaggtgtacaacccccgccatcaggcagtgttaacagagattcaggatgccacggctaaggcagggcaggtggtgcgcgaggcggttggagggctgcagactgtgcgcagctttgggrccgaggagcaggaggtcagccgctataaggaggccctggagcgatgtmgacagctgtggtggcgccgggacctggaaagagccttgtatttagccatacggagggtgatggccttgggcatgcaggtactaatcctgaactgcggtgtgcagcagatcctggctggggaggtcaccaggrgaggcctgctctccttcctgctgtaccaggaggaagtgggggactatgtccggaacctggtgtacatgtatggagatatgctgagcaacgtgggcgccgctgagaaggttttctgctacatagaccgtaagccaaatctgccccagcctgggaccctggccccttccaggctggagggccgcgtggaattccaagacgtcaccttttcctacccgagtcgcccggagaagcctgtactcaagggcctnacgttcacgctgcatcctggcaaggtgacggcgttggtgggacccaacgggtcagggaagagtaccgtggccgcccygctgcagaatctgtaccagcccacggggggccagctgcwgctggacggacagcccctggtccagtatgatcaccactacctgcaccgccaggtggttctggtgggacaggagcccgtgctcttctctgggtctgtcaaggacaacattgcctatggcctgaaggactgtgaggatgcccaagtgatggccgctgtccgggcagcctgtgcggacgacttcataggggaaatgcctgatgggatacacacagaaataggggagaaggggagccagttagccgtgggacagaaacaacgtctggccattgcccgggcccttgtgcggaacccacgggtcctgatcctggatgaggcgaccagtgccctggactcccagtgtgagcaggctctgcaggcctggcgatcgaagggggacaggacggtgctggtgattgcccacaggctgcacacggttcagaacgttgaccaggtgctggtgctcaagcaggggcagctggtggagcacagccagctcagggaggaccaggatgtctacgctcacctggtacagcagcagcggctggaggmrtgaggcctccgcacacagagccacccactgagtgctctcaggaccagacccacggggactgtgctggaggctggggtcgggataaagactgggaccatttcggactcttgtatgttttggtgggcttgagtgggtgagagttgggggatggggtggtcgctgggtggagtgagtgttttgtggttctagaaacattattattattttttgctgattatagtaaatatgtatagaaacgttttccctt

SEQ ID NO: 369 - DNA, 718 bp, Cricetinae gen. sp.
gttcctctccgcaagagacttccatccacttgtcttcttgggactgctgctggtgatggccactgccctccctacctcacaagtccggagaggagacttcacagaggacactactcccaacagaccagtgtataccacttctcaacaagtcggaggtttggttacatatgtcctcagggaaatctacgaattgagaaaagagttgtgtaataacaaccctggctgtatggacaatgactatgtgttgttagaaaataatctggaacttccggtgatacaaakaaatgatggmtgcywccaaactggatacaattgggaaatttgcctaytgaaaatcacctctggtcttctggactaccagatctacytggagtttgtgacsaacaatgtacaagataacaagaaagacaaagcmagagtcattcagagcaccaycaaaaccctaagtcagatcttcaaacaagaggtaaaggrtccagataaaatagtcaygcctagcccracytccaaggccatcctratrgagaagctggagtcacaraagsagtggccaagraccaagaccatmraactcatcctgaaagcacttgaagaattcctagaagtcaccatgaggtctactcggcaaaactagtgtgctgtgccttagcataccgatctgtggacattcactgtggtcagaaaacatatcctgtcattggggatctaccttatgttg

SEQ ID NO: 370 - DNA, 583 bp, Cricetinae gen. sp.
  misc_feature (148)..(168): n is a, c, g, or t
tgcattgttagcgtctcttgataaccttaattgtctcctatcactgacggtagagatctattgatgggtctcaggccccagctagctgccatcctgctctgccttctagcatgtaccgggaactggaccctcggatgccaccatggannnnnnnnnnnnnnnnnnnnnattttgaaccaggtcacagaaaaagggacaccatgcaccgagatggtcgtaccagacgccctttcagcaaggaagaactccacggagaaagacctcatctgcagggcttcccaggtgcttcgcaagttttatttccaacatgaggtgaccctgtgcttgaagaacaattccagggttctcaaagacctgaagaaactctacaggggcatcagcagcctgtttccacagaagagctgcaatgtgaatgagtccacgtacacaacactgaaagacttcttggaaagcctaagaaggatcatgcaaaagaaatactggcagtgtggaagttccacgttttaacttatgactttttaatgatttattttttaatatttatatatttataattcataaaataaagtatttgtgtaatcta

SEQ ID NO: 371 - DNA, 469 bp, Mesocricetus auratus
tgaaccggcctttcctgcttctcatggccaccccgctggagagggcccagcatctgcaaagctcccggcaccgccgagccctggacaccaactattgcttcagctccacggagaagaactgctgygtgcggcagctgtacatygacttycgcaaggacctsggctggaagtggatycacgagcccaagggctaccaygccaacttctgyctsgggccctgyccctacatttggagcctggacacacagtacagyaaggtcctkgccctstacaaccarcayaacccgggygcytcggcgksyccgtgctgygtgccscaggcgctggagccgctgcccatcgtgtactacgtgggycgcaagcccaaggtggagcagctgtccaacatgatcgtgcgctcctacaagtgcagctgaggtcccgccccgcccccgctgccttgcccatgggggctgtatttaaggacacc

SEQ ID NO: 372 - DNA, 138 bp, Mesocricetus auratus
tggaaagtgytgccmcargggtttaaaaacagccccactctctttgacgaggcactacaccgggatctggccgtttttcgggtccagcacccctctctgattctgctccagtacgtggatgacctcctgctggcctcc

SEQ ID NO: 373 - DNA, 138 bp, Mesocricetus auratus
tggaaagtgctgccacarggactgtcagatagccctactttatgccagtattttgtgcaaaaacctttggaaataattcacaaacaatttccacaatccataatttaccattacrtggatgacctsctgctggcckcc

SEQ ID NO: 374 - DNA, 138 bp, Mesocricetus auratus
tggaaagtgttgccmcagggaatggccaattatccaactatgtgtcaattgtttgttgtggaggctgtcatccctttaagggaggagattccaaagattatatrtatcaattacrtggatgacatsctgctggccgcc

SEQ ID NO: 375 - DNA, 138 bp, Mesocricetus auratus
tggaaagtgytrccmcargggatggctaatagtccaactatatgccagatttatgtagctgcctgtttagatcccctcagacgtaagttycctgayctttacattatccactacrtggatgacmtsctgctggcckcc

SEQ ID NO: 376 - DNA, 1062 bp, Cricetinae gen. sp.
atgaagggcaatggtagcactctgctcaatgcctcgcagcaggcaccaggcgkyggggagggtgggsgsccgcggccgtcgtggctggcctctacactggccttcatcctyatcttcaccatcgtggtggacatcctgggcaacctgctggtcatcctgtccgtgtaccgcaacaagaagctcaggaacgcaggaaatatatttgtggtgagcttggctrytgcagacctcgtggttgckatttacccttatcctttggtgctgacatccatatttaacaatggatggaatctgggatatctgcactgtcaaattagtgcrtttctgatgggkttgagtgtcattggctcratattcaacatyaccgggatcgccatyaaccgctactgctacatttgycacagtctcaagtacgacmgactstacagtaacaagaattccctctgctacgtgttcctgatatgggtgttgacgctwgtcgccatcatgccyaacytgcaaacyggaactctccagtatgatccccggatctactcctgtaccttcacrcrrtctgtcagctcggygtacacgatagcmgtggtggttttycatttcatcgtgcctatgattatcgtcatcttctgctacttaagaatctggatcctggttcttcaggtccgacggagggtgaaacccgacagcaarcccagactgaagccacargacttcaggaactttgtcaccatgttygtygtttttgtactttttgcyatttgctgggcsccrctcaatttcatcgggctcattgtrgcytcagaccctgccaccatggyccccaggatcccagagtggctgttcgtggctagttactayatggcrtatttcaacagctgcctcaatgcaatyatatayggactcctgaaccagaatttcrgacargaatacaaaagaattmtcgtctcattgttyacagcyaagatgtkctttgtggacagctcaaaygayscggcagataagattaaatgtaagcctgctccactcatagccaataataacttaataaaggtggactctgtttaa

SEQ ID NO: 377 - DNA, 1730 bp, Mesocricetus auratus
acaggatctgcctctacagtagtgtgagcaacactgctgcagcagcaaaggctcaggcccacatcctgggaaggacatggccactccctggggtgctgtcttcttcctgctcatgatagcctgtgctggcagcactgtcttctacagagaacagcagacttggttcgagggcgtcttcttgtcttccatgtgccccgctaatgtcagtgccagcaccttttatggaattatgtttgatgcgggcagcacgggaactcggattcatgtttatactttcgtgcagaaagcagcaggacagctcccctttctggaaggtgaaatttttgattctgtgaagccaggactttctgcttttgcagaccaacccaagcagggtgctcagactgttcatgcactcttagaggtggccaaagactcaattcccagaagtcactggaaaaggaccccagtggttctgaaagcaacagctggactgcgtttactgcctgaacagaaggcccaggctctgctcttagaggtagaggagatcttcaagatgtcacctttcctggtcccagatgacagtgttagcatcatggatgggtcctatgaaggcatattagcttgggtcactgtgaactttctaacaggtcaactgcatggccacagccaggagactatggggacccttgacctggggggtgcctccacccagatcacatttctaccccagttttcgaaaaccctggaacaaacacctagggactacctcacttcctttgagatgtttaacagcacttttaagctctatacacatagttacttgggatttggattgaaagctgcaagactggcaaccctgggagccctggaaacagaagggaccgatggacatacttttcgaagtgcctgtctaccaagatggctggaagcagagtggatctttgggggtgtgaaatatcagtatggtggcaaccaagaaggggagatgggcttcgagccctgctatgcagaagtgctgagggtggtgcaagggaaactgcaccagccggaagagattcggggaagctccttttatgccttctcctactattatgaccgagctgccgatacgcacttgattgattatgaaaagggtggtgttttaaaagttgaagattttgaaagaaaagccagggaagtgtgtgataacttggagagcttcacttcaggcagtcctttcctatgcatggatctcagttacatcacggctttattaaaagatggctttggttttgcagatgggacccttttacagctcacaaagaaagtgaacaacatagagacgggctggcctgggggccacctttcacctgctgcagtctctgggcatctccagctgaggctcagcgtgcccttggaaacctgcacttctgaacttctttttacaggaaggagaggactcgggcattttctgcaactacgctggcgaaagcctggcctgaaacccattgactggctttattaggagggagggggtttataatgagtgttgccccttgagcctagtgatttggtcttaatcagttttgcacatctaatgtgaacagctccctaaccacttggcaggtgcacagctggtgccagagtacaaatcttttgagattctttgtatgtcacagagtctgtgaagaaaaaagagtaggtttggaactccatgttagattgcgagttcagagatgggtcattgggaaccaaagaaaaatctcatt

SEQ ID NO: 378 - DNA, 219 bp, Cricetinae gen. sp.
aacgatgaaattgtgaagatcattaccattagaatatttgatcgtgaggaatatgagaaagattgcagtttctcccttgtgcttgaggaaccaaaatggataagaagaggaatgaaagsysksttcacattgamwgrsswdbvtgdykwcasrwwgrywsaygstagagaccatccgcttccctccactgtaatcagcatttcagacgagtatgatgac

SEQ ID NO: 379 - DNA, 1282 bp, Cricetulus griseus
agcaatagttccaacatggccggtgaggcggacggaccgttcaaacgagtgctggtgccagttctcttacctgagaaatgctatgaccaacttttcgtccactgggacttccttcatgttccctgcctcaagattctcctcagcaaaggccttggactgggcatcgtggctggatcacttctggtaaagctgccccagatatttaaaatcttgggcgccaagagtgccgaaggactgagtctccagtcagtaatgctggagctggtagcattgacaggaactgtgatctacagcatcaccaacaacttccccttcagctcttggggtgaagcgctgttcctgacactacagacaattaccatctgcytcctggtcctgcactacagaggagacactgtgaaaggagttgctttacttgcctgctatgcgacactcctgctggctctgctttctccactcacgcctctggctgtagtcaccatgctccaggcctccaatgtacctgctgtggtggtgggcaagttgctccaggcagccaccaactaccacaacgggcacacaggccagctttcagctatcacagtgtttatgctgtttgggggctccttggccagaatcttcacttctgttcaggaaactggagaccccctcatggctggagtctttgtggtctcttccctctgcaatggcctcattgccgcccaggtcctcttcttctactggaatgcaaagcctccccacaaacataaaaaggagcaatagtgctgagctagcttctagaatcattcattccacttccattcagccactcaacttgagggtcttccccacttgacgtggtctgctggtgcaactcagtcgtcctccattcctgcataactgcaacctcctgagccagggtttgtgtaaagagtaaaaagcttttccaagtcctgtattcactcgtttcaccaatggctgaggtccctcctttataagcagctattttgttattggagcagacgccttgccttgtccacttaccttctttcaggatggaggacagagcctggacaaatgtggttgggagcttgtggctgcgtccctctgccagctggttgggacagtctattggaccctagttctgaaggtgggggaggggagaatgactcaggtaaaggcctcagggtggagtagggaggttcctgctgtggcaggtccacgaagggtgtggagaaggcacaggttgctgttgtagtgggaatacagatgggacaataaagactcggagacgtgctttcat

SEQ ID NO: 380 - DNA, 1471 bp, Mesocricetus auratus
  misc_feature (67)..(81): n is a, c, g, or t
tgccgactgccttctcccgcgatacttggcatccagacgtggtttttcatcagctccaactctgacnnnnnnnnnnnnnnntcgtgccctctgaccttcaattctgtctcctcttacagtactcaccttccctcaataagctgttctgccagctggcgaaaacatgccccgtgcagctgtgggtcagctccacacctccacctggcacccgtgtccgtgccatggccatctacaagaagttacaatacatgacggaagttgtaagacgctgtccccaccacgagcgctcctccgaaggcgatggtgagctctcgggactgactgcgcaattagaaatgcttgcctgggggctccccaaccgttgatgttcttgattgctcttaggtttggctcctcctcagcatcttatccgagtggaaggaaatatgcatgccgaatacctggatgacaagcagacttttcggcacagtgtggtggtgccctatgagccacctgaggtctgttcttttgggttgggttgggttgggttgaagacagggtttagtttgctctaccccagactgatgttgaacttgcagcaactctcttgcctcgggctcctgagtactggacttataggtgtgaactactgtgttcaggctgaagtttaccttaagaagagggtctctgggagaagagagttgggaggggttcaggctgaagtttaccttaaacaagagggtctctgggagaagagagttgggaggggttgtcggtggccactcaggtgggaggtagaggggctgagtcctgtcctgttaccatcagtgtccttactacaggttccctgtggtgggattggagttggccttcacctaggtcctgtgtcctcccttaggttggctctgactgtaccaccatccactataactacatgtgtaatagttcctgcatggggggcatgaaccggcggcctatcctcaccatcatcacgctggaggaccccaggtaggcagcctcttgctgtgttcctgttggcgtgttcctccccagtctgtctctggtccatgccccacccgctgccacatgcctaccctttagctcttgctccgcctgcatacatgaagtctctggtttactcacatttggagtaggaccagagttcttactgtctcgtgctctccctcctctcaccctgggtagtgggaacctgctgggacggaacagctttgaggttcgtatttgtgcctgccctgggagagaccgtcgtacagaggaaaaaaatttccaaaagaagggagaaccttgcccagaactacccccaaagagtgctaaacgaggtaagcaggtgagacaaagagggcagaggaggaggttcagcttcaccggggaaatttactctctttcctttttcacagcattgcctaccaacacaagctcctctccccagccaaagagaaaaacacttgacggagaatatttcacccttaag

SEQ ID NO: 381 - DNA, 1419 bp, Cricetulus sp.
ccgagccgagaatgggagtagagccgactgcttgattcccacaccaatctcctcgccgctctcacttcgcctcgttctcgtggctcgtggccctgtccaccccgtccatcatcccgccggccaccgctcagagcaccttccaccatggccacctcagcaagttcccacttgaacaaarrcatcaagcaaatgtacwtgtscctgccccagggtgagaaagtccaagccatgtatatctgggttgatggtacyggagaaggactgcgctgcaaaacccgcaccctggactgtgagcccaagtgtgtagaagagttacctgagtggaattttgatggctctagtacctttcagtctgagrgctccaacagtgacatgtatctcagccctgttgccatgtttcgggaccccttccgcaaagagcccaacaagctggtgttctgtgaagtyttcaagtacaaccrgaagcctgcagagaccaatttaagrcacwcgtgtaaacggataatggacatggtgagcaaccagcacccctggtttggaatggaacaggagtatactctswtgggaacagatgggcacccttttggttggccttccratggcttycctgggccccaaggtcygtattactgtggtgtgggcgcagacaaagcctatsgcagggatatcrtggaggctcactaccgygcctgcttgtatgctggggtcaagattacaggaacawatgctgaggtcawgcmtgcccagtgggaattccaaataggaccctgtgaaggaatccgcatgggagatcatctctgggtggcccgtttcatcttgcatcgagtatgtraagactttggrgtaatagcaacctttgacyccaagcccattcctgggaactggaatggtgcaggctgccataccaactttagyaccaagrccatgcgggaggagaatggtctgaagcacatcraggaggccatygagaaactaagcaagcggcaccggtaccayattcgagcctacgatcccaaggggggsctggacaatgcccgtsgtctgactgggttccacraaacgtccaacatcaacgacttttcwgctggygtcgccratcgcagtgccagcatccgcattccccggactgtcggccaggagaagaaaggttactttgaagmccgcygcccctctgccaattgtgacccctttgcagtgacagaagccatcgtccgcacatgccttctcaatgagactggcgacsagcccttccaatacaaaaactaattagactttgagtgatcttgagcctttcctagttcatcccaccccgccccagctgtctcattgtaactcaaaggatggaatatcaaggtctttttattcctcgtgcccagttaatcttgcttttattggtcagaatagaggagtcaagttctt

SEQ ID NO: 382 - DNA, 1504 bp, Cricetulus griseus
  misc_feature (845)..(845): n is a, c, g, or t
aagctttggttctgttggtgcctgaggagacacaatgggtgcaggtgtggagctctgagtctctgtgtgtgaggagacatggtaggtgtgagtattagtcgctgtgtccagtctggatcaagggtacaggtgggacaagtctctgggtgtgtcggtgaccaagaagtcatggtaggtacaggcctgagattctgaatctgtcggtacatgaggagacagggtaggtagaggtgtggcctgtcagtgtgtgaggagatgggaagtacggtacaggtgtgaggttttgggtctatcagtggccaaagcgacatcgtaactatgagaatggggctctgggtctgtcagtaaggtcaaggaggcagggtaggtacaggtacaagattcttatctaccaatttctgaagagacccagtaggcacaggtatgagggtctggtctgccaatttctgaggagacgcggtaggcacaggtatgagggtctggtctgccaatttctgaggagacacaataggcacaggtatgagggtctggtctaccaatttctgaggagacccagtaggcacaggtatgagggtctggtctaccaatttctgaggagacgcagtaggcacaggtatgagggtctgggtctgtcaatgtctgaagagacagggtagacacaggtatgaagttctggtctaccaatttctgaggagacagggtaggtacaggtatgaaactctgggtctgtcagtgtctgaggagacagggtaggcacaagtatgaaggttctggtctatcaatttctgaggagttaggacccgggtctctcagtgtctgaacaggtaagttcagcacaggtgagngtgcttggtctgccagtatctgaagagatgaggcatggtcaaggtatgaggctttccatgttccttggcctgaggagtaaggtaggcccaggtgtggggctcttaagtcatgtctgaggcaggtgtgcacaagtttgaggtcttgttccgccagcatctgaggagattgggttgggaactggtatgcatgtcaccatctgaggtttagcccagatcgggagtcctcttcatcagcattgagaaagtagagactggcacaggtcataatgaggtgggtcaagcatggatatgaggccctggttctgccatcaccgagacggcaaaggctagcayaggtatgagactkccttcctgccagtgctgaggaamtgggagccwacagaggtttgaggccttgggtctgccaggaagaaaaggccagctgcggtaacatctttgatttgacgcgtccctcacgtagtctgccttgctggccagcatgragagtcactagttcctggatctgctgtctgaactgggmagagtcgggttgggtccagccctccaggctgttacctgtggaagattggctttctggggacaggtgtggcaggagggaggggggtagggtgtgcctgccctcctccagtgccgtttccttctctcctagtgggtaggtg

SEQ ID NO: 383 - DNA, 790 bp, Mesocricetus auratus
aacaystgtcagattttgacctytgtaagaagcagtgaatccaggctctaccatggtgaagttcctgctgcttgckcttgccttaggtgtgtcctgtgcacakyatcagaatcttgaagtcagtccctcagaggttgacgggaartggyacagcctttacatagcagcagataataaggagtaaggtaagygaaggtggacctttgagagyttacrtcaagmacstggaatgcaktgatgaatgccagacaytcamaatcamattttataccaaggtggaarrcgtgtgccaggaacacasarttgtgggaagaaaaggcraagatgggaagtatattacagacttctctggtcagaattatttccacrttgtagagaagkcagatgacaccatgacctttcacaacgttaatgtcgacgatagtggaaagacaaatgttattttagttgttgggaraggwgagagttcgagcatagaacagaagcagaggtttgagaagacagccgagraatacgatattccaaaggagaatattgagsacttggtgmccacagacamttgtratcaataaagacaccrtatggctttaccgatgacagcaagatcatgaatattccccacatcaacttttgcgtgaaatcagaatcatgacaatgaagataattcaccatttttcttttttccttctaatcttacaaatgaagtcagaatatctgcttcatggattttcttcctatcctcctactatattactgactattctgttggttaaataaattratttctcat

SEQ ID NO: 384 - DNA, 1987 bp, Mesocricetus auratus
cactcgatcattcgagcacattccttccttccttcttactgtctcggccctcacctctacaagcccatggaacgtttctgcaaaggcgctcttgcaccggcagggtggccagtccgctgctgagccctctgcgtgcgcggggagcctgtctgcgcctcgccggccgccgctaaccatgaccatgaccctccacaccaaagcctcgggaatggccttgctgcaccagatccaagggaacgagctggagcccctcagccgcccgcagctcaagatgcccctggagagggccctgagcgaggtgtacgtggacagcagtaagcccgcgatgttcaactaccccgagggcgccgcctacgagttcaacgccgccaccgcccccgcgccggtctacggccagacgggcatcgcctatggctctgggtccgaggcgaccgccttcggttccaacagcctggggctttttccscmsytcaacagcgtgtckccsagcccgctgatgctactgcacccgccgccgccgcagctgtcgcccttcctgcacccgcacggccagcaggtgccctactacctggagaatgagcctagcgcctatgccgtgcgcgacascggccctccagccttctacagatctaattctgataatcgacgccagagtggccgagagagactgtccagcagcagcgagaaaggaagcatggccatggagtctgtcaaggagactcgctactgtgcagtgtgcaatgactacgcctctggctaccattatgaggtggaacagatctggtcctgtgaaggctgcaaggctttcttcaagagaagtattcaaggacacaatgactacatgtgtccagctacaaaccaatgcacaatcgacaagaacaggagaaagagctgccaggcctgcaggctgcgcaagtgttacgaagtaggcatgatgaaaggtgggatacggaaagaccggagaggagggagaatgctgaaacacaagcgccagagagacgacttggaaggcaggaacgacatggggccttcaggagacatgagrgcyaccaasskytggcctagtcctcttgtgattaagcacactaagaagaacagccctgccttgtccttgacagccgaccaaatggtcagtgccttgttggatgctgaaccgcccttaatctattctgaatatgatccttctagacctttcagcgaagcttcgatgatgggattattgaccaacctggcagacagggagttggttcatatgatcaactgggcaaagagagtgccaggctttggagacttaaatctccatgatcaggtccacctcctggagtgtgcctggttggagatcctgatgattggtctcatctggcgctccatggaacacccagggaagctcctgtttgctcctaatttgctcctggacaggaatcagggcaagtgtgtggagggcatggtggagatctttgacatgttgctggctacatcagctcggttccgcatgatggacctgcagggagaggagtttgtgtgcctcaaatctatcattttgcttaattctggagtgtacacatttctgtccagcaccttgaagtctctggaggagaaggaccacatccaccgggtcctggataagatcacagacactttgattcacctgatggccaaagctggcctgacactgcagcagcagcatcgtcgtctggcccagctcctcctcattctttcccacatccggcacatgagtaacaaaggcatggagcacctctacaacatgaaatgcaagaacgttgtacccttctatgacctgttgctggagatgttggatgctcaccgcctgcatacccccgtcagtcgcatgggggtctccccagaggagcccagtcagagccagctgaccaccaccaactccacttcatcacattccttacaaacctactacatcccgtcggaagcagagagtttccccaacacaatctgagacctcccaggctcc

SEQ ID NO: 385 - DNA, 324 bp, Cricetulus griseus
  misc_feature (5)..(24): n is a, c, g, or t
atgannnnnnnnnnnnnnnnnnnnagccagcctctggcctccaagcaggagaaggacgggactgagaagcgaggccggggtaggccacgcaagcagcctccggtgagtcctgggacggcgctggtagggagtcagaaggagcccagtgaagtgccaacaccgaagagrcctcggggccgaccaaagggaagcaaaaacaagggcgctgccaagacacggaaagctaccacagctccagggaggaaaccaaggggcagacccaagaaactggagaaggaggaagaggagggcatctcccaggagtcctcggaggaggagcagtga

SEQ ID NO: 386 - DNA, 2091 bp, Cricetulus griseus
  misc_feature (324)..(342): n is a, c, g, or t
atgaagttcgccgagcacctctccgcgcacatcactcccgagtggaggaagcagtacatccagtatgaggcattcaaggatatgctgtattcagctcaggaccaggcaccatctgttgaagttacagatgaggatacagttaagagatattttgccaagtttgaagaaaagtttttccaaacctgtgaaaaggaacttgccaaaatcaacacattttattcagagaagctggcagaggctcagcgcaggtttgccacacttcagaatgagcttcagtcatcactggatgcacagagagagagcattggtgttactacattgcgnnnnnnnnnnnnnnnnnnnttccacctgtcccacgaggagcgtgtccaacataggaatattaaagaccttaagctggccttcagcgagttctacctcagcctcatcctgctgcagaactatcagaatctgaattttacagggtttcgaaaaatccttaaaaagcatgacaagatcctggaaacatctcgtggagcagattggcgagtgggtcatgtggaggtggccccattttatacatgcaagaaaatcaaccagctcatttctgagactgaggctgtagtaaccaatgagcttgaagatggtgacagacaaaaggctatgaagcgattacgtgtccctcctttgggagctgctcarcctgcaccagcatggactacttttagagttggcctaytttgtggaatattcattgtgttgaayattactctcgtgcttgcagctgtatttaaacttgaaacagatagaactgtgtggcccttgataagaatctatcggggtggctttcttctgattgaattcctttttctactgggcatcaacacatatggttggagacaggctggagtaaatcatgtcctcatctttgaacttaatccaagaaacaatttgtctcatcagcatctctttgagattgctggattcctggggatactatggtgcctgagccttctggcatgctttttcgctcccattagtgtcgtccctatatatgtgtacccacttgccctttatggatttatggtcttctttcttatcaaccccaccaaaactttctactataaatccagattttggctgcttaaacttctgtttcgagtatttacagctcccttycataaggtaggctttgctgatttctggctggccgatcarctgaacagcctgtcagtgatactcatggacctggaatatatgatctgcttctacagttttgagctcaaatgggatgagaataagagcctgttgccaaatgatctacaagaaccagaattttgccacagatatacatatggtgtgcgagccattgttcagtgcattcctgcttggcttcgcttcattcagtgcctgcgccggtaccgtgacacaaaaagggcctttcctcatttagtaaatgctggcaaatactccaccactttcttcaccgtgacctttgcagckctttacagcactcacaaagaacggcagcactcagataccatggtgttcctttacctgtgggtggtcttttgtgccatcagttcctgctacaccctcatctgggatctcaagatggactggggtctcttcgataagaatgcaggagaaaacactttcctccgggaagaaattgtataccctcaaaaggcctactactactgtgccatcatagaagatgtgatactgcgctttgcttggactatccaaatctctattactgctacagcttttcagcctcatgttggagacatcattgctactgtctttgctccccttgaggttttccgacgatttgtatggaacttcttccgtctggagaatgagcatctaaataactgtggtgaattccgtgctgtgcgggacatctctgtagccccactgaatgcagatgatcagacactccttgagcagatgatggaccaggaagatggggttcgaaaccgccagaagaatcggtcatggaagtacaaccagagcatatctctgcgccggcctcgccttgcatcccaatccaaggctcgagacactaaggtattgatagaagacacagatgaygaagctaacacttga

SEQ ID NO: 387 - DNA, 477 bp, Cricetulus griseus
atgggtccgaagctgcttgagtcccgactttgtctccygctgctgctgggatttktcataatggttgcctctttccagatcccacskrrtttaaccccttcccagtggtttgaaatycarcatgtaaataatagdaccawyctccratgyamtcctgmaatgargrkagtyaacrrwtacacargacgatgcaagaacataaatacttttcttaatacaagttttsctgctgtygytmgtgtgtgtggcrrwmmaaatactamttgcrcwakgagtccwsgtacaaattgycataayagttcagctcmrgtatctttaacwtactgyaacctyacaavtysrksaagymattatacacaatgycrataccaaaygacdccagcaasrawgttctacagartkgcttgtracaatmghamsccacargacartsstwmctatscagtggttccrgttcacttggatgggacattttag

SEQ ID NO: 388 - DNA, 597 bp, Cricetinae gen. sp.
cccgggcctgcagctgctccccggtgcaccmgcaacaggcgttttgcaatgcagacgtagtgatcagggccaaagcrgtragcgagaaggaggtggaytccgggaaygacatctacggcaaccccrtcaagaggatycartatgagatcaagcagataaagatgttcaaaggccctgacaaagacatcgagttyatctacacrgccccctcctcrgcartgtgcggggtctcgctggacgttggaggaaagaaggagtatctaattgcaggaaaggcagaaggrgayggcaagatgcacattaccctctgtgacttcattgtgccctgggacacrctgagcaccacccagaagaagagcctgaaccacaggtaccagatgggctgcgagtgcaagatcacacgctgccccatgatcccatgctacatctcctccccggaygagtgtctctggatggactgggtcacagagaagagcatcaacgggcaccaggccaagttctttgcctgcatcaagagaagygayggctcttgcgcrtggtaccgcggrgcggcaccccckaagcaggagtttctygacatcgaggacccrtgaattc

SEQ ID NO: 389 - DNA, 662 bp, Mesocricetus auratus
gggtgggccaacagtcacagtgggggtcccctttatatatgacccccagagagaccccatgccaagaccatcatcaccaccaagagcaggtggggaggcttccgtcctcctcctcatcccatccaggtcagctgcagcctcagcagcccagagcctcttgatctcctggcactatggttcgttaccgaatgaggagccccagtgagcgtccgcaccaggggcctgggcaagaacatggacgtgaagagcaagggcaggggcaagggttgagcccagagcgtgtggaggactatgggaggacacacaggggccaacaccaccacagacgtcgctgctcgcgtaggaagctgtaccgaatccacaggaggcgccggtcatgcaggaggcggaggagacactcctgccgtcacaggagacggcatcgcagaggctgcagaagatcacscargassmssagayscmkggcmrsmkgtgtwgswgkcccmccatctaaaccctgctgcctcccaggtagcctagcaaaccagaactttccttcccaaaggctgcagaagatcacgcaggaggaggagatgcaggtgcaggaggtgtaggaggcaccaccactaagcctccccaggccgtccatcctgtttggagccaaggaaatcacccgcccaagg

SEQ ID NO: 390 - DNA, 420 bp, Cricetulus griseus
tcacagtgggggatcagaccatctcccatccaggtcagctgaagcctcagcccagagcctcttgatctggcactatggcttgttacccagtgaacatccgcgccaggggcctgggcaagaacatgggcatgaagagcaggggcaggggcaagggttgagcccagagcatgtggaggactatgggaggacacactgccaccaccaccaccagacaccatcgttgctcttgcagccatcgcagatgtaagcacccaagaacctcagacccctggccacctgtgttgcccagcaaggcaggagtgctcccatctaccctgctgctcccagacagcaaaccagaacttttcttccaaaggctgcagaagacgcaggtgcaggaggtgtaggaggcactaagcctccaggaagtcacctgccaag

SEQ ID NO: 391 - DNA, 924 bp, Cricetinae gen. sp.
atggtgarccmracaacttcygaagtgcamcccaccatgggggtcaagatcttctcagcsggygtggcggcctgcctggcagayatcatcaccttcccgctggacacrgccaaagtccggcttcagatmcaaggtgaaggccagayctccagtaccattaggtataaaggtgtcctkgggaccatcaccaccctggcaaaaacagaagggttgccgaaactgtacagtggtctkccygctggtatycagagacaaatcagctttgcctcactcaggattggcctctacgatactgtccargagtacttctcttcrgggaaagarackcctcccactttggkaaacaggatctcagctggcttaatgacyggaggtgtggcrgtattcatygggcaacctacygaggtygtgaaagtcagactccaagcacagagccacctacacgggatcaaaccccgctacackggkacctacaatgcttayagaattatagccacaacagaaagcytktcaacactctggaaagggacracccctaayctgttgaggaatgtcatcatcaactgtacagagctggtaacatatgacctcatgaagggggcccttgtgaacaaccaaataytggcagatgacgtgccatgccayttactgtcagctyttgtcgcyggsttttgcaccacattcctggcctctccagcagatgtggtaaaaacaagattcatcaactctctaccaggacagtacccaagtgtacccagctgygcaatgaccatgytcaccaaggaaggaccaacagcttttttcaaagggttygtgccttctttcctgcgrctsgcrtcctggaatgtcatcatgtttgtgtgctttgaacagctgaagaargagytgwykaagtcgaggcagacggtggactgcaccacataa

SEQ ID NO: 392 - DNA, 1021 bp, Cricetinae gen. sp.
  misc_feature (265)..(279): n is a, c, g, or t
  misc_feature (389)..(404): n is a, c, g, or t
  misc_feature (775)..(802): n is a, c, g, or t
tttctgtctaacactgaggttcgccgggtcatggtgccagcctgactgagaagaggacgctcccgggagacgaatgaggaaccacctcctcctgctgttcaagtacaggggcytggtgcgcaaaggggaaraaaagcaaaagacgaaaatggctraattcaagatccgtccagccactgcctctgactgcagtgacatcctgcgactgatcaaggaactggctataatatgaatacatggaagatcaagtaatgttaactgagannnnnnnnnnnnnnnatggttttggagaacaccccttctaccactgcctgattgcrgaagtgcctaaagagcaytggacccctgaaggacacagcattgttggtttcgccatgtactattttacnnnnnnnnnnnnnnnnggcaarttactktatcttgaaracttctttgtgatgagtgattacagagggyktggyatasgatcagaaattttgaagaatctaagccaggttgccatgaagtgtcgytgcagcagtatgcacttcttggtagcagaatggaatgaaccatctatcaacttctacaaacgaagagstgcttctgacctgtccagtgaagagggatggaggctcttcaagattgacaaagagtacytgctaaaaatggcagcagaggagtraggagtgctggtgtagatggtgacaacctccattatactttagaatacattctcaacttatcttgctctctatcttgtttgtagtgaaatagtcgaatgagcacccattcnnnnnnnnnnnnnnnnnnnnnnnnnnnncatgtttgaaatgcagtctgtttaaaatggcactcatgtatgtggtttcgaggcagaattctcgaacatctttcagtgaacaacaaggtgatatgaccttactatatatgaaaaacaaaacttcattcttgtgagtcatttaaatgtgtacaatgtacacactggtacttagagtttctgttttgatccttttttaataaattactctttgatttaatt

SEQ ID NO: 393 - DNA, 1783 bp, Cricetulus griseus
tccaggactatgtcgtgggcgcggacgcacctgcgctcggctctgtccctggcagctgtttctgcgcgtggtgcaacgaccgagggcgcggcgcggcggtggttgagcgcgtggcccgcgcctcaggagcccggcatggagtatcaggatgctgtgcgcatgctcaacaccctgcagaccaatgccagctacctggagcaggtaaagcgccaacggagtgaccctcaggcgcagctggaagccatggaggtgtacttggcacggagtgggctgcaggtggaggacttgaaycagttaaacattatccatgtcactgggaccaaaggaaagggctccacctgcgccttcactgaacgcatcctgaggagttatggcctgaagacaggcttctttagctctccccacctggtgcaggtgcgtgaacggattcgcatcaatgggaaacccatcagtcccgagctctttaccaagcacttctggcgcctctatcaccagctggaggagttcaaggatgacagccacgttkccatgcctgcttacttccgcttcctgacactcatggccttccaygtcttcctccaagaaaaggtggacctggcagtggtggaagtgggcattggtggggcttatgattgcaccaacatcatcagaaagccagtagtgtgtggagtgtcctctcttggcatggaccacaccagcctgctcggagacacggtggagaaaatagcatggcagaaagggggcatcttcaagcctggtgtccctgccttcactgtgctacagccagaaggtcccctggccgtgctgagggatcgagcccagcagacctcatgtcctctgtacctgtgtccaccattagaagccctggaggatggtgggctgccgctgaccctgggcctggagggagagcaccagcggtccaatgcagccttagccttgcaactggcccattgttggctggagcagcaggaccaccaggacatccgggagctgaaggtgtccaggccgagcatgcggtggcagctgcctctggcacctgtgttccatcccacttcccacatgagacatgggcttcgggacacagaatggcctggccggacacaggtattgcggcggggacctctcacctggtacctggatggcgcacacaccaccagcagtgtgcaggcctgtgtgcgctggtattgccagtcattgcagcgcagcaaacaccccagtggtgggcctgaagtatacgtcttgctcttcaactccacgggtgacagggactctgctgccctgctgaagttgctgcagccctgccagtttgactacgctgtcttttgccccaacctgacggaggtgtcatccacagaaaatgcagaccagcagaacttcacagtgactctggaccaggtgctgctccgctgcctccaacaccagcaacactggagctgcctgagtgagaaacaagccagccctgacttcctgagcagccccagcccagagcctggcaggccaggttccctgcagccggcactgcgcccgcctcactctacgggcactaactcccttgtctttagctgtatctcccacgccttgcagtggatcagccaaggccgggatcccatctttsaggccccaagccctccaaggagcctcctcagccaccccacggccagtagtggggcaagcattctccgggaggctggtgccatccatgtactggttactggaagcctgcacctggtgggtggagtcctaaagctgctagagccctccctgtcccagtagccaaggacca

SEQ ID NO: 394 - DNA, 474 bp, Mesocricetus auratus
atggagccctctgcggacgggctggctagggcggctgcccagggccgcgagcaagaggttcgggctttgctggaagcaggggtttcgcccaacgccccgaactgtttcggccgcaccccgattcaggtgakgmwsatgggyawcwcmymwgyagssrgactgstrctgctytwcgktgmrgaammgmmcwgcgwkkactggtgagtttccagtgtgaccccgactgcaatrgcmcgggagggcttcttggaaactctggcgatactacaccaggcgggggcgcggctggatgtgcttgacgcccggggtcgcctgccggtggacctggccctggagcggggccactgcgatgtcgtacagtatctacgtgcggctgggaacaccccccaaggcagcgagccggcaggcgtaacttctgcccagacacccccagaggtctcggatttcgcggaccaccccctagggccctactaa

SEQ ID NO: 395 - DNA, 558 bp, Mesocricetus auratus
atgaactttctgctgtcttgggtgcattggaccctggctttactgctgtacctccaccatgccaagtggtcccaggctgcacccacgacagaaggagagcagaaagcccatggagtggtggagttcatggacgtctaccrgcgcagctattgccatccgatcgagaccctggtggacatcttccaggagtaccccgatgagatagagtatatcttcaagccgtcctgtgtgcccctgatgcggtgtgggggctgctgcagcgacgaggccctggagtgcgtgcccacctcggagagcaacatcaccatgcagatcatgcgggtcaagcctcaccaaagccagcacataggggagatgagcttcctacagcacagcaggtgtgaatgcagaccaaagaaagtcagaacaaagccagaaaatcactgtgagccttgctcagagcggagaaagcatttgtttgtccaagatccgcagacgtgtaaatgttcctgcaaaaacacagactcgcgttgcaaggcgaggcagcttgagttaaacgaacgtacttgcagatgtgac

SEQ ID NO: 396 - DNA, 379 bp, Cricetulus griseus
tacagtcatgagcagagctgaaaattttaaacaagttcagtacctccttattcatggaacagcagatggtgagtttcagttaattagactttttagtatcacagacaggtttgcaatttcactactgacaaaacaaaagcatgaggggcaagactgttacatttacttcaataaaacagtgttgctttccacaactcacttgtcttgggctaaatgggatgctgagtcctagaacttcactcactttcttcttgtgcttcccccctcggtatytgaacactccagaggctattagctacttgtttatggctgtttgttccctttctttcccgcagataatgtccactttcagcagtcagctcagatctccaaagccctg

SEQ ID NO: 397 - DNA, 408 bp, Cricetulus griseus
  misc_feature (323)..(337): n is a, c, g, or t
ccagaytcccccgcagaggcctctggactccgrgcccaagaccgcattgtggaggtcaatggtgtctgcatggagggcaagcagcatggggacgtggtrtctgccatcaaggctggaggggaygaggccaagctgctggtggtrgacaaggagactgatgagttcttcaagaagtgcaaagtgatcccrtcacaggarcacctggatggccccttgcctgagcccttcaccaatggagagatacagaaggagrgcagccgtgaagccctggtagaggcagcctcagagagccccaggccagccctggygagatcygcctccannnnnnnnnnnnnnnagctaaattcccaagacagycccaagagacaggagtcyacagagccctcatctacctcctcctcctcctct

SEQ ID NO: 398 - DNA, 649 bp, Mesocricetus auratus
gcgacgtggagctggcagaggaggcgctccccaaaaagrcgtggggcccccagaactccagccggtgcctatgcctcagcctcttctccttcctgcttgtggsaggggccacaatcctcttctgcctgctgaacttcggggtgatcggcccccaaagggaagagaagttccccaaccctatcatcggctccatggsccagacactcacactcagatcatcttctcaaaattcgaacgacaagcctgtggsccacgttgtagcaaaccaccaagtggaggagcagctggagtggctgagccatcgtgccaatgccctcctggccaacggcatgtctctcaaagacaaccagctggtgataccagcagacgggctgtacctggtttactcccaggttctcttcaggggccaaggctgccccagctacgtgctcctcacccacactgtcagccgcattgctgtgtcctacgaggataacgtcaacctcctgtccgccatcaagagcccctgccccaaggaaacccctgagggggaggagctcaagccctggtacgagcccatctacctgggaggggtcttccagctggagaaaggtgaccgactcagtgccgaggtcaacctgcctaaatacttagactttgcagaatccgg

SEQ ID NO: 399 - DNA, 571 bp, Cricetinae gen. sp.
cgggaccatgaagctgctgccgtcggtgatgctaaagctctttctggctgcagtgttgtctgcgttggtgaccggtgagagtctagaacggcttcgcagaggtctggaggcagcaaccagcaaccctgactctcctactggacccacaaaccagctgctacccacgggagatggtcgtggtcaggaagtccaggacttggaagagacagatccggaccttttcagagttgctttctcctccaagccacaagccctagccacgccaagcaaagaaaagaatgggaaaaaaaagaagaaaggcaagggattgggaaagaagagagacccatgtcttagraaatataargacttctgcatccayggggartgtaaatacctgaaggatctccgggctccatcatgcaactgccacccaggttaccatggagagaggtgtcatgggctgaccctaccggtggagaatcgcttatatacatatgaycacactacmatcttggctgtggtggctgtggtgttgtcatctgtctgtctkcttgtcatcgtggggcttctcatgtttaggtaccatagg

SEQ ID NO: 400 - DNA, 3197 bp, Cricetulus longicaudatus
cacgccttcgcgccgaggccccgccccgggtgaggtaaaatggccgcagccttggcggcgagtggaatgcttcccacagcgggcattataattgattaggtttctgatatccagatctgttcctaagacgtaaattgacaagaccacatttctgtgcaaacattgaggagctagttggcaacatgaaggtcttctgcggtcgtgccaatccaaccacaggatccctggaatggctggaggaggatgaacactatgattaccatcaggaaattgccaggtcatcctatgcggatatgctacatgacaaagacagaaatataaaatattaccagggtatccgggcagctgtgagtagggtgaaagacagaggacagaaggccttggttcttgacatcggcacgggcacaggtctcttgtcgatgatggcagttactgcaggtgctgacttctgctatgctattgaggtttttaagccaatggctgatgctgctgtgaagattgtggagaaaaatggcttcagtgataagattaaagttattaacaaacattccactgaggtgacggttggaccagatggtgacttgccatgtcgtgctaacatcctggtcacagagctgtttgacacggaactgattggggagggggcactgccctcttatgagcatgcgcatagacatcttgtgcaggaaaattgtgaagcagtgcctcacaaagcaactgtctatgcccagctggtggagtccagaaggatgtggtcatggaacaagctgtttcctgtccatgttcagaccagtcttggagagcaggttatcgtccctccctcagaactggagaggtgtcctggtgcaccttcagtctatgacattcagctgaatcaggtgccatctactgacttcactgccctcagtgatgtactaccaatgttcagtgtggacttcagcaagcaagtcagtagctcagcagcctgccatagcaagcagtttgtacctctggcatctggccaagcacaggtggttctgtcctggtgggacattgaaatggaccctgaggggaagatcacatgtaccatggcacccttttgggcacagacaaacccacaggagcttcagtggcgggaccactggatgcagtgtgtatacttcttgccacaggaggagcccgttgttcagggctcaccccgatgcctggtagcccaccatgacgactactgtgtgtggtacagccttcagaggaccagcgctgatgagaatgaggaagtttaccaagtgcgccctgtgtgtgattgtcaggctcacttgctctggaatcggcctcggtttggagagattaatgatcaggacagaactgatcagtatgcccaagccctgaggactgtgctgatgccaggcaccatctgtctttgtgtcagtgatggcagtctgctctctctgctggcccatcaccttggggcggagcaggtgtttacagttgagagttcggcagcttcctatagactgatgaaaaggatcttcaaggctaaccacttggaagataaagttagtatcatcaagaaacggcctgagttgttaacatctgcagacctggagggtaagaaggtctccctcctcctgggtgaacccttcttcgccaccagcctgctgccatggcacaacctatacttctggtatgcccgtacttctgtggaccagcacctggaacctggagctgtggtgatgccccaggctgcttcactgtatgctatgatcgtggagttcagggatttgtggcggatccggagcccttgtggtgactgcgaaggttttgacgtgcacatcatggatgatatgattaagcactccctggattttcgagagagcagagaggcagaaccccacccattgtgggagtacccctgccgcagcctttctgagcctcagcagattctgacctttgatttccagcagcctgtgccccagaagcctgtgcatgctgagggctccatggaactgagaagacctgggaagagccatggtgctgtcctgtggatggaatatcatctgactccagacagcacagtcagcaccggcctcatgaatcctttggaagacaagggggactgctgctggaacccccactgcaagcaagctgtgtacttcctcagcaccacagtggatcccagagtgcctctggatggccctcagtctgtcagctatgctgtggagtttcatcccctcactggagacatcaccatggagtttaggcttgcagacaccttgaactaattccctcattgagaaattaaatggccaataggctgcagactctgaatggcttggggctcaatggggaaagaaggccaagaacttcttttcatgcacctacttggcatctgcacagaggagacctcttatttttgtgtcttagtgctgctggcttgcagcatcaggtgtggcaggcagcatgggctggtgactgattcaagagttctgaagcaaccagggagaatggtttgtggttctgagagttcagaaagctctggtatagtgatgcttcctgtcctatctggaggacaactgaggaagaaccttcactgggactaagggagggcggccctcttagctggaacctacccagcctgtctgctttctaggaatctctaggtctctgcttagagaatggccttctaggaacttccttgggccttcgtgatcctggtaagacctgggttagaggactaggccacatccataaacatttgggtatcttgcctcagtgcataccagcaggtggcctcataagccatgagacttggacaccagggtgctgctcacagattagggaagaggccatcctcaagcagttccctgtgccactggaaagaaaactaggaaagtggccttttcctgtatttatcggatggcccttgctctgatggcctatccttgctgaagcagaaagtgcagagattccccagttggctacagccttgtcccacctctgccacttctctcccatactctttctaatgacctctcagttctgaaaggatttgggagggatccagtagtaaaacctaggtggctaaatcccttgcatttcagggcagacatggactatgtccccatagtcattccccaaatcccataggctggtatcaactctggaaatccataggtcctttcccagtttgttgagcaaataagtacagaaccagaatg

SEQ ID NO: 401 - DNA, 1344 bp, Cricetinae gen. sp.
atgctgaagaagcagtctgcagggcttgtgctttggggtgctatcmtctttgtgggctggaatgccctgctgctcctcttcttctggacacgcccagcccctggcaggcccccytyagayagtgctmtcgatgaygaccctgccagcctcacccgtgaggtgwtccgcctggctgaggacgctgaggtggagttggagcggcagcggggrctgttgcagcaaatcagggagcaycatrctttgtggarmcagaggtggaaagtgcccacygtggcccctccagcctggccccgtgtgcctgygaccccctcaccascygtgatccccatcytggtcattgcctgtgaccgcagcactgtccggcgcygcttggataagttgttgcactatcgrccctcagcygagcatttcccyatcattgtcagccaggaytgygggcacgargagacagcacaggtyattgcttcctayggsagtgcagtcacacacatccggcagccagacctgagtaacatcgctgtgcmsccagaccaccgcaagttccagggttactacaagatcgccaggcactaccgctgggcactgggycagatcttcaacaagttcaagttcccagcagctgtggtagtggagraygatctggaggtggcaccagacttctttgagtacttccaggccacctacccactgctgagaacagayccctccctttggtgtgtgtctgcttggaatgacaayggcaaggagcagatggtagactcragcaaacctgagctgctctatcgaacagacttttttcctggccttggctggctgctgwtggctgagctgtggrcagagctggagcccaagtggcccaaggccttctgggaygactggatgcgyagacctgagcagcggaaggggygggcctgtattcgtccagaaatttcwagaacgatgacctttggccgyaaggrtgtgagccatgggcagttctttgaycagcatcttaagttcatcaagctgaaccagcrgttcgtgtctttcacccagttggayttgtcrtacytgcagcgggaggcttatgaccgggatttccttgcccgtgtctatrgtgccccsctgctacaggtggagaaagtgaggaccaaygatcagaaggagctgggggaggtgcgggtacagtacackagcagagacagcttcaaggcctttgctarggccctgggtgtcatggatgacctcaagtctggtgtccccagagctggytaccggggcrttgtcactttccagttcmggggycgrcgtgtccacctggcacccccacrwwcctgggaaggctatgatcctagctggamttag

SEQ ID NO: 402 - DNA, 902 bp, Cricetulus longicaudatus
caccccttcatccaagaatgcaaaagcacatccaataaaagagctggattataactatttttttttcttttggggctgtggggcgggagtcaggacgagaagtgctgttgatatacctgcagcttttttttcggggaaggatggctcaagctgggagaacagggtatgataaccgagagatcgtgatgaagtacatccattataagctgtcacagaggggctacgagtgggatgtgggagatgtggacgccgcgcccctgggcgccgcccccacccctggcatcttctccttccagcctgagagcaacccaacgcccgctgtgcaccgggacatggctgccaggacatcgccactaaggcccatagtcgccaccactgggcctacccttagccccgtgccacctgtggtccacctgaccctccgccgggctggggatgacttctcccgtcgctaccgtcgcgacttcgcggagatgtccagtcagctgcacctgacgcccttcaccgcgaggggacgctttgctacggtggtggaggaactcttcagggatggggtgaactgggggaggattgtggccttctttgagttcggtggggtcatgtgtgtggagagcgtcaacagggagatgtcacccctggtggacaacatcgccctgtggatgaccgagtacctgaaccggcatctgcacacctggatccaggataacggaggctgggacgcatttgtggaactgtacggccccagtgtgaggcctctgtttgatttctcttggctgtctctgaagaccctgctcarcctggccctggtcggggcctgcatcactctgggtacctacctgggccacaagtgaggtccacagacctgctccccaaaatatgcaaaaggttcactaaagcagtag

SEQ ID NO: 403 - DNA, 310 bp, Cricetinae gen. sp.
gatcagaccagataagttcatacatcctagctccatgtgctcgaggcagagaggcctgaagtgggggtgctgctggtaaccccagaycctcggccaatgcaggggtgggaaaaagacccccgagggccctcctgcataccatgygtgtggagcacagaaagrtgggtagccaggcagatggcggccttgyagccatgttcccttagagcagggaaacacccgtgacggcagctggggcagaracagccccacttggcatgcytcacagacycgraggtggggatagaargggggtgtgtcgtggtggatc

SEQ ID NO: 404 - DNA, 257 bp, Mesocricetus auratus
gtggcaggtgacgggaaaccctaccaagtgcccatgctggcccagctctctgtgttccgttctggatctaccaggaccccaaatggcttatggtacaacttcattgagctgccctaccatggtgaaagcatcagcatgttgatcgccctgccaactgagagctccaccccactctctgccatcatccctcacatcagtaccaagaccattgatagctggatgaacaccatggtacccaagaggatgcagctggtcct

SEQ ID NO: 405 - DNA, 1209 bp, Cricetinae gen. sp.
  misc_feature (467)..(496): n is a, c, g, or t
catcccgagctggggctgccgtgctcaccttggcccccaggtcctccgcccctgagtgtcgggcccgctttctttagggttcccgggccccgctcccgggggcctgagccgccgcattagcgctccatggagaacttccaaaaggtggagaagatcggagagggcacgtacggagtggtgtacaaagccaaaaacaagttgacgggagaagtggtggcgcttaagaaaatccggctcgacactgaractgaaggtgtgcccagtactgccatccgagagatctctctgcttaaggaacttaatcaccctaatattgtcaagctgctrgatgtcatccacacrgaaaataagctttacytggttttygaryttctgcaccaggacctcaagaaatttatggatgcctctgctgtcactggcatycctcttcccctcatcaagagctatytgttccagctgctccaggnnnnnnnnnnnnnnnnnnnnnnnnnnnnnntgcaccgagaccttaagccccagaatctgcttatcaatgcagagggrtccatcaagttggcagactttggactagcaagagcctttggagtcccygttcgtacttatactcatgaggtggtgaccytgtggtaccgagcacctgaaatccttctaggctgcaagtactactccacagccgtggatatctggagyctgggctgcatcttcgctgaaatgcacctagtgtgtacccagcaccatgctaagtgctgtggggaacacagaagaaatggaagacacagtctctgcccgctgtgctcctatctagaagtggctgcgtcacaaggaggggggatgaccgcagtgtctaccccataccccgtgacccggcgggccctgtttccyggagattctgagatygaycaactcttccggatcttycgractctggggaccccwgatgaggtggtttggccrggagtyacttctatgcctgattataagccgagtttcccsaagtgggctcggcaagattttagcaaagttgtgcctccactggatgaagatggrcggagcytgttatcgcaaatgctgcactatgaccccaacaagcggatttcagccaaagcagccctggcccaccctttcttccaggatgtgactaagccagtaccccaccttcggctgtgatgtccttcccaaagccctcctcacccttgggtcttgacttga

SEQ ID NO: 406 - DNA, 2004 bp, Cricetinae gen. sp.
gcgaccgccacctccaatgcacaaggtgtcacatttgaaaagaaacctgagcccgggggagaaggcgctgagagaccctggcctggctagtgcaaactgcgcggcagggcgctgggcagcctggagaacccagagagctccaccgcagaccatcctagcgacctgattctgggatctcggctccacgctcccttcgcaattttcagatttctctccctcgattatttccccaaaacggaacctttataccaagagaaggtgccggagctggggcaaccaggactttcccggrcacccaagatgcgctccattagraaacggtggaccatctgcactataagtctacttctgatcttttataagacaaaagagatagcmagaactgaggagcaccargagacgcaactcatcggagatggtgaattgtgtttgagcagatcacttgtcaacagctctgataaaatcattcggaaggctggctcaaccatcttccaacattctgtacaaggctggagaatcaattcttctttagtcctggagatacggaagaacattctccgtttcttagatgctraacgtgatgtctctgtggtcaagagcagyttyaagcctggtgatgtcatccactatgtgttggacagacgccggacgctaaatatttcccatgatctgcacagcctcctgcctgaagtttcaccaatgaaaaaccgcaggtttaagacctgtgctgttgtyggraaytcyggyattctactagacagtgratgtggcaaggagattgacagtcacaattttgtaatcaggtgyaatctagctcctgtggtggagtttgctgcggatgtggggactaaatcagattttattaccatgaacccatcagttgtgcaragagcatttggaggctttcggaatgagagtgacagagmaaartttgtgcatagactttccatgctgaatgacagtgtcctttggatccccgctttcatggtcaaaggaggagagaarcacgtggaatgggttaatgcattaatccttaagaayaagctgaaagtgcgaactgcctatccatcaytgagacttattcatgctgtcagaggttactggctgaccaacaargtgcccatcaaaagacccagcacaggcctyctcatgtacacactggccaccagattytgtgatgaaattcacctgtatgggttctggcccttccctaaggatttgaatggaaaagcygtsaaataycattactacgatgacttraaatatagatacttttccaacgcaagccctcacagaatgccrttagaattyaaaacmctgaatgtgctacacaacagaggagcrctaaarctgaccacaggkaagtgcatgaagcaataaagcacatattgaaggatcaaaactggatagaaactttttctaaagatgcttctggagatttagaaacaggatccaaaacaaggctggggttcagcatccacactgactgaatagctgaaatggaagtccatgggaatccaccaccagctgatgaaatacctgccaagtgctctaactataaaatattctgacttcaagggtcctagtaagtgccacttccacgaagaatacagtttgaatgtattatcagtagtgtttacaagatccaacagtgcactcatcattaattagcaaagcaaatatgttcgtcactgtggggcagccgctgtaatgccaagcacactggaagaggaactcaggagcatcacgactcggagcttgggaaattaacatccttatccgcagaaatgaagaagaaaaagaattcaaacagtgaaatccatgagatgaagtaacttgaaggaatgtcttcagtcaggacactgagagtgatcatgtgtgtgttttgcttgtgtttttgtttgtcttctgaaacttgttttcttttgggtatggggtgaatagaaattcatctgaggtacagaaatgggaaatacatgacagagaaaaataaacatcaaacag

SEQ ID NO: 407 - DNA, 477 bp, Mesocricetus auratus
ccatcttgtaccagagaccgaccgacaagagctgcctcaacatgaagttggtcatagtcttcatgctggccatcatccccgtttactgccgaaccaatagttctggctgcaatssawtggaygatgctattgcaaagaccattaactcatcwgtgyctatggaagaatatcacgaaacagttmaaaaatacacawytcttccttatatccgamgtactrtggaaaagttcaaggaatgttttgcaaaacagtctaatgakactcagcataatrtttttgtgatggwgtwtgcsrtttacaacagtgacaagtgttcaggatattaaccttccacgagacctttggatcataagccagcagtgataccacaaatcataacttttctttcgtgattgtatctttctgtctataagtgcaagattattgttggaatctcaaaggcatttctttctacttcattaaattaaaagaaatacc

SEQ ID NO: 408 - DNA, 703 bp, Cricetinae gen. sp.
aagaaagaggactactctaccatctggctggatctcaatatgcttctatcccttgggatcgactgctggattgataataccaggtatgtatccatgtgccctacccatcctctagcacatttcccctcgttactcgttgctagatgttcactgtccccagggttgtctacaaccgcagctctgggcaygtgtccaatgctcctggtgtacagatccgygtccctggctttggcaagayctaytctgttgagtacttagaygacaacaagctagcaggtgtgtctactcagggaaaggaaggggctcttggcatcatgctggccatacaagtatgatggacagagattcctatatggctgcctccacaggctacatgcacacactggtacagaatctggttaacaatgggtatgtgccggatgagacagtgcgggccgcaccctatgactggcgtctggaacccagtgagtgtttacaggtggtgggctgggggcatgacaggtggtcccagactctcattgcttctgacctatctcgcccatctccagggcagcaggatgaatactaccggaagctdgcaggactggtagaggagatgtatgcygcytatgggaagcctgtcttccttrttgggcacagccttggctgcytacatgtgctctacttctkactgcgtcacgctcagtcctggaagcacacattc

SEQ ID NO: 409 - DNA, 471 bp, Cricetinae gen. sp.
ggcatccccatcatgtccaaggtaaacgtgaragaggagcmrcgmayaaccacgacctccccctggatgtttccagcccgycahgtatggccwgaagaccatgtrttcatttccacaccaaacttcaactayacaggccaagacttcaarcgkttttttgmrgatcttcattttgaagamggatggtacatgtggctacagtcacgkgacctgctggsaggcctcccagcacctggtgtagaagtatactgtctgtatggtgtgggyctgcccacacycmacacatayatctatgaccacagcttyccctayaaagacccagtgkctgcactctaygargatggtgatgacactgtagccacacgcagcactgagctctgtggccwggtgcawggccgccaatymcarcmtgtacacytgmtgsccatgaatgggacagaacatctcaacatggtcttcagcaataagaca

SEQ ID NO: 410 - DNA, 1846 bp, Cricetinae gen. sp.
  misc_feature (1281)..(1299): n is a, c, g, or t
  misc_feature (1808)..(1823): n is a, c, g, or t
gagcacagacctctcgcagctctttcttcgccgctccacacccgccaccagttcgccatggatgacgatatcgctgcgctcgttgtcgacaacggctccggcatgtgcaaagccggcttcgcgggcgacgatgctccccgggccgtcttcccctccatcgtgggccgccctaggcaccagggcgtgatggtgggcatgggccagaaggactcgtacgtgggtgacgaggcccagagcaagagaggtatyctgaccctgaagtaycccattgarcacggcattgtcaccaactgggacgayatggagaagatctggcaccacaccttytacaaygarctgcgtgtggccccygaggagcaccckgtgctkctsacygaggcccccctgaacccyaaggccaaccgtgaaaagatgacccagatcatgtttgagaccttcaacaccccagccatgtacgtagccattcaggccgtgctgtccctgtatgcctctggtcgtaccactggcattgtgatggactccggagacggggtcacccacactgtgcccatctatgagggctacgctctccctcatgccatcctgcgtctggacctggctggmcgggacctkmcagmctwcctymtkaagwtcctgaccgagcgtggctacagcttcaccaccacagccgagagggaaattgtgcgtgacatcaaagagaagctgtgctatgttgccctggacttcgagcaagagatggccactgccgcatcctcttcctccctggagaagagctatgagctgcctgatggccaggtcatcaccattggcaacgagcggttccgttgccctgaggcycttttccagccttccttcctgggtatggaatcctgtggcatccacgaaactacattcaactccatcatgaagtrtgacgtygacatccgmaaagacctctatsccaacacagtgctgtctggtggyaccaccatgtacccaggcattgctgaccggatgcagaaggagatcactgctctggctcccagcaccatgaagatcaagatcattgctccycctgagcgcaagtactctgtgtggatcggtggctccatcctggcctcactgtccaccttccagcagatgtggatcagcaagcaggagtacgatgagtccggcccctccatcgtccaccgcaaatgcttctaggcggactgttactgagctgcgttttacaccctttctttgacaaaacctaacttgcgcagaaaaaaaatgagacaacattggcatggctttgttttnnnnnnnnnnnnnnnnnnnggttttttaaaattttttttaaaaaaggttttgttttggcgcttttgactcaggatttaaaaactggaacggtgaaggcgacagcagtcttggagcaagcatcccccaaagttttacaatgtggctgaggactttgattgtacatttttttttcttttttaagtcattccaagtacccatgagatggctacaggaagtccctcaccctcccaaaagccaccccaattccctagaggaggatggctgagtccatgccctgagtccacactggggaggtgacagcattgcttctgtgtaaattatgtactgcgaaaattttttttaaatcttccgccttaatacttttttagttttgtttttatttttgaatggtcagccatcgtgaccctcatgggtgtttttttttgtccccccaacttgagtatgaaggctttggtctcccctgggagtgggttgaggtgttgaggcagccagaggggcttgcctgtacactgacttgagaccagttnnnnnnnnnnnnnnnnttacaaaccgtaaaaaaaaaaaa

SEQ ID NO: 411 - DNA, 283 bp, Cricetinae gen. sp.
tcctcagcagattcatgattatctgaatgcatctgactgggagagacaagtagccaatgccaaggaaaaattgactgctttcatggaaaattatagaattacagacaatgatgtactaattgcattagatagtgccaaaatcaacttcaatgaaaaactttctcaacttgagacataygtgatacaatttgatcagtatattagagacaattatgatccacaggatttaaaaaaaactattgctcagattattgatcgaatcattgaaaagytaaaaatkctt

SEQ ID NO: 412 - DNA, 1155 bp, Cricetinae gen. sp.
ccrgtcagctytactayyccataygtwgaagabacccctgagccaccyctgcatagcttctactgcagcaagctgytrgatcttgtmttcytgctggatggytcctccargctgtctgaggctgagtttgragtgctcaagrcttttgtggtgggcaygatggagagrctsyacatytctcagaagcgcatycgygtggcrgtggttgagtaccacgatggrtcccatgcytacattgaccttaargacmggaagcgkccctchgagcttcgrcgcattgccagccaggtkargtacgcaggtagccaggtggcytcyaccagcgaggttttgaagtacacactgttccagatctttrgcarraytgatcgcccygaagcctcccgcatcaytctactcctgactgctagccaggagcccccrcgsttggcmaggaatttggtccgttaygtccagggcctgaagmagaagaagatcattgtgatcccygtgggmattgggccacatgycagcstkargcagrtccgcctcattgaaaarcaggcccctgaaaacaaggcctttctgctcagtggggtggatgarctggagcakagaagggatgaaataatyrgctaystctgygacctwgcccctgagcccmgagcccctactaagcstccycaggyagcwcraatcaccacargyccagggacyttkgsrrtktcatcrcctggacccaagaggaagtccatggttctggaygtggtgtttgtcctggaggggtcbgayraagtkggygaagcyarcttcaataagagcaaggarttcctggaggaggtratwcrgcrcatggatgtsmgycaggatggyayccacatytcvgtgctgcagtattcatacayggyaactrtggagtacaccttcarkgargcccagtccaaggaggatgtgttgcggcatgtgcgwgagatccgttaccacggtggcracagraccaacactgggcaggccctgcagtacctytcygagyayagyttctctcccagccagggggaccgggmmcaggcacctaatctggtctacwtggtcacagggaaccctgcctcsgatgagatcargaggttgcctggagacatccaggtggtaccyattggrgtgggcccccrtgccaac

SEQ ID NO: 413 - DNA, 2018 bp, Cricetinae gen. sp.
  misc_feature (533)..(547): n is a, c, g, or t
  misc_feature (1958)..(1976): n is a, c, g, or t
cagcgttcaagctgctgttagcaggcaccgcgagccccgggcaccccacgagctgagtgtgcaggacgcgcccccagcacagccacctacagccgctgaatgaagcttccaggagtctgcctccggccggctgcgccccgtcggaggtgcacccgctgagagcgccagggcaccagaaagccggtgcgctcacctgctcgtctgccagcgatggggccacccgggaacgacagtgacttcttgctgacaaccaacggaagccatgtgccagaccacgatgtcactgaggaacgggacgaagcatgggtggtaggcatggccatccttatgtcggttatcgtcctggccatcgtgtttggcaacgtgctggtcatcacagccattgccaagttcgagagrctacagacygtcaccaactacttcataacctccttggcgtgtgctgatctagtcatgggcctagcggtggtgccgtttggggccagtcacatccttatgaaaatgtggaattttggcaacttctggtgygagtnnnnnnnnnnnnnnnatgtgttatgcgtcacagccagcattgagaccctgtgygtgatagcagtggatcgctacattgctatcacatcgccattcaagtaccagagcctgctgaccaagaataaggcccgaatggtcatcctaatggtgtggattgtatccggccttacctccttcttgcccatycagatgcactggtaccgtgccacccacmagaaagccatcrmctgctatcwcaaggagacttgctgygacttcttcacgaaccaggcctaygccattgcttcctccattgtrtctttctacgtgcctctagtggtcatggtctttgtctattccagggtcttccaggtggccaaaaggcarctccagaagatagacaaatctgagggaagattccaytcccmaaacctcrgccaggtggagcaggatgggcggagtgggcacggactccgaaggtcctccaagttctgcttgaaggagcacaaagccctcaagactttaggcatcatcatgggcacattcaccctctgctggctgcccttcttcattgtcaacatcgtgcaygtgatccaggamaacctcatccctaaggaagtttacatcctccttaactggttgggctatgtcaattctgctttcaatcccctsatctactgtcggagtccagatttcaggattgccttccaggagcttctatgcctccgcaggtcttcttcaaaagcctatgggaacggctactccagcaacagtaatggcaaaacagactacatgggggaggcgagtggatgtcagctggggcaggaaaaagaaagtgaacggctgtgtgaggaccccccaggcacggaaagctttgtgaactgtcaaggtactgtgcctagccttagccttgattcccaagggaggaactgtagtacaaatgactcaccgctgtaatgcaggctttctgctttttaagacccctccctgacaggacactaaccagactatttaacttgagtgtaataactttagaataaaactgtatagagatttgcagaaggggagcatccttctgcccttttttattttatttttttaagccgcaaaaatagagagggagagaaactgtacttgagtgcttgtttgtttcttgtgcaattcagttcctctttgcgtggaacttaaaagtttctgtctgaagtatgttgggttctagaggactgtctgtatgtttagatgattttccatgcatctacctcactcgtcaagtgttaggggatacgctgctagtaatttgtacctgaaggaaattttccttcctgtacccttacacttgtcaatcctgtgtcttggacctttctgctgtgaatatatactctctcccgctccacttatttgctcaaatggagtgtgtagacagggatcttgagggacagcttcagttnnnnnnnnnnnnnnnnnnnagcaaagtctaaagtttacagtaaataaattgtttgaccacg

SEQ ID NO: 414 - DNA, 4452 bp, Cricetulus griseus
  misc_feature (1828)..(1842): n is a, c, g, or t
  misc_feature (3914)..(3936): n is a, c, g, or t
  misc_feature (3943)..(3983): n is a, c, g, or t
caggaatgtaaagacatcaaaatggagccaagtatggatgtgaattcagtcactatctctgttgagggaatgacatgtatttcctgtgtccggaccattgaacagaagattgggaaagaaaatggtatccatcacattaaagtttcactagaagaaaaaagtgcaactattatttatgaccctaaacttcagactccaaagacccttcaagaagctatcgatgacatgggctttgatgctcttctccacaatgctaatcctctccctgttttaactgacaccttgtttctgactgttacggcgtcactgactttgccatgggaccatatccaaagcacattgctgaagaccaagggtgtgacagacattaaaattttccctcagaaaagaactttagcagtgacaataatcccttctatagtgaatgccaatcagataaaagagctggttccagaactcagtttagaaactgggacactggagaaaaggtcaggagcttgtgaagatcatagtatggctcaagctggtgaagtcgtgctgaagattaaagtggaagggatgacctgccattcatgtactagcactactgaagggaaaattgggaaactgcaaggtgttcagcgaattaaagtctccctggacaatcaagaagctactattgtttatcaacctcatctkatcwcmgyagaggaaatwaaraagcagattgaagckrtgggcttyccagcmttyrtmaaaaagcagcccaagtacctyaaattgggagcyattgaygtmgarcgyctraagaacacaccagtyaaatcyyyagaaggrtcacagcaaaagagcccatcatatcccagtgattcaacagccacattcatcatagagggcatgcattgtaaatcatgtgtgtcaaatatcgaaagtgctttayctacactccagtatgtaagcagtatagycgtttctttagagaataggtcagccattgtaaagtacaatgcaagctcagtcactccagaaatgctkakaaaagcaatagaggctgtttcaccagggcaatacagagttagtattgcaaatgaagttgaaagtacctccagctctccctccagctcatctcttcaaaagatgcctttgaatgtagttagccagcctctgacccaagaaaccgtgattaacattartggcatgacttgtaattcttgtgtgcagtctatagagggtgtcgtatcaaaaaagccaggtgtaaaatccatccatgtttccctcgcaaatagttycgggactgttgaatatgatcctctactaacckctccagaaaccttgcgagargtaattgwrgacatgggatttgatgctgtcttgccagacatgagcgagccattggtagtgatagctcagccctcattggaaacaccacttttgccctcaactaatgatcaagataatatgatgacagcagttcatagcaagtgttacatacaggtctctggaatgacttgtgcttcttgtgtagcaaacattgaacggaatttaagacgagaagaaggaatatattctgtacttgtggccctgatggctggcaaagcagaagtaagatataacccagctgttatccagcccccggtgatagcagagtttatccgagagcttggatttggagccacggtgatggaaaatgctgatgaaggggatggcattttgaaacttgttgtgagaggaatgacatgtgcctcctgtgtccataaaatcgagtctactctcacaaaacacaaagggatcttctactgctctgtggccttggcaaccaacaaagcacatattaaatatgatccagaannnnnnnnnnnnnnngatattatccataccattggaagcttaggttttgaagcttctttggtcaagaaagatcggtcagccagtcacttagatcataaacgagaaataaaacaatggagaagctctttccttgtgagcctgtttttctgtacccctgtaatggggctgatgatgtatatgatggctatggagcaccactttgcaactattcaccacaatcagagtatgagtaatgaagaaatgatcaagaaccattcttctatgttcctggagcgtcagatcctgccaggactgtccattatgaatttgctgtcccttttactgtgtctacctgtacagtttttcggaggctggtacttctacattcaggcttataaagcactgaagcataagacagcaaatatggacgtactgattgtgctggcaaccaccattgcatttgcctactctttgattattcttctagttgcaatgtatgagagagccaaagtgaaccctattacttcctttgacacaccccctatgctgtttgtgtttattgcactaggccgatggctggaacatatagcaaagggcaaaacatcagaggctcttgcaaagttaatttcactacaagctacagaagcaactattgtaactcttgattctgataatatcctcctcagtgaagaacaagtggatgtggaacttgtacaacgtggagatatcattaaagtagttccaggaggcaaatttccagtggatggtcgtgttattgaaggacattctatggtagatgagtccctcatcacaggggaggcaatgcctgtggctaagaaacctggcagcacagtgattgctggttccattaaccagaacgggtcactgcttatctgcgcaacacatgttggagcagacacaaccctttctcaaattgtcaaacttgtagaggaggcacaaacatcaaaggctcctatccagcagtttgcagacaaactcggtggctactttgttccttttatcgtcttggtttccattgctaccctcttggtgtggattataattggatttcagaattttacaattgtggaaacctactttcccggctacagtagaagcatctcgagaacagaaaccataatacgctttgctttccaagcctctattacagttctgtgtattgcatgtccctgttcgctgggactagccactccaactgccgtgatggtgggcacgggagtaggtgctcagaatgggatacttatcaaaggtggagagccactggagatggctcataaggtaaaggtagtggtatttgataagactggaaccattacacatggaaccccagtagtgaatcaagtaaaggttctagtggaaagtaacaaaataccacgaagtaagatcctggccattgtgggaactgcagaaagtaacagcgaacaccctttaggagcagctgtaaccaaatactgcaagcaggagctggacactgaaaccttgggtacctgcacagatttccaggttgtaccaggctgtggtattagctgtaaggtcaccaatatcgaaggtttgctacataagagtaacttgaagatagaagaaaataacactaaaaatgcatccctggttcaaattgatgcaattaatgaacagtcatcaacttcatcgtctatgattattgatgctcctctctcaaatgctgttgatactcagcagtacaaagtcctcattggtaaccgggaatggatgattagaaatggtcttgttataagtaatgatgtagatgattccatgattgaccatggaagaaaaggtcggcctgctgtattggtgacaattgatgatgagctgtgtggcttgatagctattgctgatactgtgaaacctgaggcagagctggctgtccacattctgaaatctatgggcttagaagtagttctgatgactggagacaacagtaagacagctcgatctattgcttctcaggttggcattactaaggtgtttgctgaagttctaccttcccataaagttgctaaggtgaaacagcttcaagaggagggaaaacgggtagcaatggtaggagatggaatcaatgattctcnnnnnnnnnnnnnnnnnnnnnnnggaattnnnnnnnnnnnnnnnnnnnnnnnnnnnnnnnnnnnnnnnnntgtggtttttataaggaatgaccttctggatgtcgtggcaagtatcgacttgtcaaggaagacagttaagaggattcgaatcaattttctctttcccctaatttataatctggttggaattcccattgctgctggagttttcctgcccattggtttggttttccaaccctggatgggatccgcagcaatggctgcttcatctgtttctgtagtactttcttcccttttcctcaaactctacaggaaaccaacttatgacaattatgagttgcgtacccgaagccacacaggacagaggagtccttcagaaatcagcgttcacgttggaatagatgatgcctccagaaattccccgagactgggcttgctggaccgaattgtcaattacagcagagcctctataaactcactactgtctgacaaacgctccctgaacagtgttgttaatagtgaacctgacaagcactcg

SEQ ID NO: 415 - DNA, 936 bp, Cricetinae gen. sp.
ggcttagcgggagatgtcaggagaggasgagttctatctgtttrrraatatctcctcggtggggccctgggatgggcctcagtaccacatygctcckgyctgggccttccgcctccaggcagycttcatgggatttgtcttcttygcagggrycccmctcaacgccacggtgctggtggccacactgcrttacaagaagttgcggcagcccctcaactacattctrgtcaatrtrtccctcgggggyttcctcttctgcagcttctccgtcttcactgtcttcatygccagctgtcayggatacttcctctttggccgccatgtktgtgctctggaggccttcttgggctctgtagcaggtctagtgacwggatggtcrttggctttyctggcttttgagcgctacattgtcatctgtaagccctttggcaacgtccgcttcarctccaagcaygcactgrtrgtggtcctggtcacktggrycatwggtrttggcgtgtccatcscaccyttcttyggctggagcaggttcatcccggagggcctgcagtgctcctgyggcccggactggtacacggtgggcaccaagtatcgmagcgagtmctacacctggttcctcttcctgttctgtttcatygtgcckctytccctcatctgcttctcctactcgcagttgctgaggacyctcagagctgtggcagctcagcagcaagagtcagctacgacccagaaggcrgaacgggaggtgasccwcatggtggtggtgatggtggsrtctttctgtstctgytaygtgccctaygctgccctggccatgtacatggtcaacaatygcaaccacgggctggayttrmgrctmgtcaccatccctgccttcttctccaagagctcatgtgtctacaatcccatcatctactgctwcatgaacaagcagtt

SEQ ID NO: 416 - DNA, 264 bp, Mesocricetus auratus
gatctcatacacacactgtaacagacaatgcagcttgttcaacatcaaagtggacctgttcccagagtgtcaactcagaaccctttcaagatgagcaccattccacgacaggaaaacatcccaagacttatctgacctgtaacacagaccctacaacaccctcaccccacctccatttcctcaggattcctggaatccaatccttatgtgatgggaatagcgtggaagagatggaatctaagattttaaactcggctttggatc

SEQ ID NO: 417 - DNA, 2919 bp, Mesocricetus auratus
  misc_feature (63)..(90): n is a, c, g, or t
  misc_feature (1890)..(1914): n is a, c, g, or t
  misc_feature (2074)..(2087): n is a, c, g, or t
  misc_feature (2089)..(2116): n is a, c, g, or t
  misc_feature (2145)..(2162): n is a, c, g, or t
  misc_feature (2602)..(2630): n is a, c, g, or t
ctttggggtatcctgagagcacacttttagttcagcacctcctcacaaccaacgctgccgtcnnnnnnnnnnnnnnnnnnnnnnnnnnnntaaacttcatgtcagccacagagctactcstggccatcactgtcttctgcctgggattctgggtggtcagagctttaagaacccaggtccccaaaggcttgaagactccaccagggccctggggcttgcccattcttgggcatgtgctgaccctggggaagaacccacacctgtcgctgacaaagctgagtaagcagtatggggatgtactgcagatccgcattggctccacacctgtggtggtgctgagtggcctggacaccatccggcaggccctggtgcggcagggagatgacttcaagggccggccagacttctacagtttcacacttatcactaatggcaagagcatgaccttcaacccagactgtggaccagtgtgggctgcccggcggcgcctggcccaggatgccctgaaaagtttctctatagccttagacccagcttctgcatcttcttgctacttggaggagtacgtgatcaaggaggctgattacctaattagcaagttccagaaactgatggcagaggttggccactttgaccctgataggtatttggtagtgtcagtgaccaatgttatctgtgccatgtgctttggccaacgttatgaccatgatgaccaagagctgcttagcatagtcaatctgagcaatgagtttgggaaagttaccggctctgggtacccacctgacttcatccctatcctccgctacctacctaactcttccctggatgccttcaaggacttgaataagaagttctacagcttcatgcagaagtcagtcaaagagcactacagaacatttgagaagggtcacatccgggacatcacagacagcctcattgagcactgtcaggacaaaagtttggacgagaatgccaatgtccagttgtccgacgacagggtcattaatatcattgttgacctctttggagctgggtttgacacagtcacaactgctatctcttggagtctcatgtacttggtgacaaaccctggggtgcagagaaagatccaggaggagctagacacagtgattggcaggagtcgaaggccccggctttgtgacagatctcagctgccctatctggaggccttcatcctggagactttccggcattcttcctttctccccttcaccatcccccacagcaccacaagagataccagtctgtgtggcttctatatccccaagggacattgtgtctttgtgaaccagtggcagattaaccataaccaggaactgtggggtgacccaaacaagttccggcctgaaaggtttctcacctccagtggcactctggacaaggtcctgagtgggaaggtcactctctttggtttgggcaagcggaagtgcattggggagaccattggccgattggaggtctttctcttcctggccatcttgctgcagcaaatagaattcactgtgtcaccaggggagaaggtggacatgactcctatctatgggctgactttaaagcacgcccgctgcgaatacttccaagcgcagacacggtcctctgggcctcagyatccacaagcttagactgccctgtgtggtcaccagagcagggggctgttccagggatttaacttcactcagaaacacagactctgggcttgtgcttgcctcctgatttggtcttgcttctccgcatgctgatcacagacactgggacacagcagagacccactggaacatcagagtcattcccaagttcaccagcaactaggggggcctgaaagggaaaggaggtccctgggcctcagaaaactcctgcagagastccccnnnnnnnnnnnnnnnnnnnnnnnnngaaaaatgcttagagcatggtcatgccaggatctgtcaggcttagaggagctgtccagaatagagggagaagacatcttaaaatactgccacaggcctgtccacgtttgccaggcattggtggtgcacacctttaattccagcactggggaagcagacgnnnnnnnnnnnnnntnnnnnnnnnnnnnnnnnnnnnnnnnnnncgagttccagaacagcctccaaaacaatnnnnnnnnnnnnnnnnnncaaaaaccaaaataaacatgctgccacagaagtgcttctgccatttactagggctggacagctttcccacatgggtctaggacgatgtctgtggtgatcacctttatttgtccagggtactcctgtccttgcaaaagcccccgttcctgctctggaagtgctgtgtcttgtgtctaggaagatccaagaacagagggacagactttctgggcagtaggaccaggtcaagagtaaagggatgactcttgagacaagagtcttgtgcagctcagattgcctctgagcctgctgtgtattgatcgtgaattacttacttttttaatgcttttactgacataccaagtgctaggatacagtcattggtctctcttctttactgtataaaatgttcatttaaaaaatgtttgtaccagctgggcggtggagatgcgcacctttannnnnnnnnnnnnnnnnnnnnnnnnnnnncgatttctctgagttcgagaccagcctggcctacaagaactagttctaggacaggcctccaaagccacagaaaaaccctgacttgaaaactccccccccccaccgcaaaaaataaatgtttgtacctaagaccttttattttggcccatattttgcttatgcatttgtattagtcatatcttaagagtttagatcaatgcatttactattacagagaaaaccctaactcaagtatccagaaatatataggaactacctacctgagctaaataaaatattacctggaagt

SEQ ID NO: 418 - DNA, 1870 bp, Mesocricetus auratus
tcacaactctgagacctgcagcccctgcccttcagctggtacacatggcactgtcccagtacacctccttgtccacagagctagtactggccactgccatcttctgtatagtattttgggtggccagagctttaagaacccaggtccccaaaggcttgaagactccaccagggccctggggcttgcccattcttgggcatgtgtctgaccctggggaagaacccacacctgtcgctgacaaagctgagcaagcagtatggggatgtactgcagatccgcattggctccacacctgtggtggtgctgagtggcctggacaccatccggcaggccctggtgcggcagggagatgacttcaagggccggccagacctctacagtttcacacttatcactaatggcaagagcatgaccttcaacccagactgtggaccagtgtgggctgcccggcggcgcctggcccaggatgccctgaaaagtttctccatagcctcagacccaacctcagcatcctcttgctacttagaggaccatgtgatcaaggaggctaaccatctagtcagcaagttgcagaagctaacggcagaagttgggcacttcgaacccgtcaaccaggtggtagaatcagtggctaacgtcattggagccatgtgctttgggaagaacttcccccggaagagtgaggagatgctgagaattgtaaagggtagtagcgactttgtggagaacgtctcctctgggaatgctgtggacttcttccccatcctacgctacctgcccaacccagacctcaagaggtttargargcttcaatgataactttgtgctgtttctccagaaaacagtccaggagcactatcaagacttcaacaagaacagtatccaggacatcacaggtgctctattcaagcacagtgagaactccaaagacagcggtggcctcatccctcaggagaagattgtcaacattgtcaatgacctctttggagctggatttgacacggtcacaacagccatcaccykgagcattttgctccttgtgacatggcccaatgtgcagaggaagatccacaaggagctggacacagtgattggcagggatcggcaaccackkctttctgaccgacttcagctgccctatatggaggccttcatcctggagctctaccgatacacatcctttgtccccttcaccatcccccacagcacaacgagggacacctcactgaatggcttctacatccctaaggatcgctgtatcttcataaaccagtggcaggtcaaccatgacgaaaagcagtggaaagacccctttgtgttccgtccagagcggtttcttactgataatgacacagtcatcaacaagactctgagtgagaaggtgatgctctttggcttgggaaagcgcaggtgcattggggagatcccggccaagtgggaagtcttcctcttcttagccatcctgctgcagcagctggagttcagcgtgccaccgggcmmaaaggtggacctgacacctacctacgggctgaccatgaaacctcagacctgcaaatacatccaggcgtggccacgtttttccaaatgaagatggctgaggcaggggaggaggcatccatggggctgtcacctctgtttctttccctttctttttaaataacagcttttttttggagtacaattctttcaccaaataattcacctccaatcaaatagaatattgtctgtcatatacccccaaacctatacccattaagatttatgactattcatcctaacctgtctcccttgctccacmagatgctaatgwagtttttgactcgataaatttgcctactctagtcccatcacataaactcaatgatctatg

SEQ ID NO: 419 - DNA, 1832 bp, Mesocricetus auratus
gagaagggtctccatggatgcakttktggtgttggtgtttattctctccwgtctgkttytcctctcactctggagacagagctctgagagarggaagctccctcctggccctactcctctcccamttattggcaatttcytccaaatwgatgtgaarracatcagyggatccttraccaatttctcaaaagtctatggccctgtgttcaccctrtacttgggcakgaagcccrctgtggtgttgcatgggtatgaarcagtgaargaggcwctgatygaccatggggaggagtttgcwggaagaggarrcttcccartggcwgaaagadwtaataaaggccttggyattgtttttagcaatggaarcagrtggaaagasayaaggmgmttctcactcatgrctctgmgrartctgggcatgggcaaaaggarcatygaggaccgtgtacaagaggaagcacagtgycttgtggaggaactgaggaaaaccaatggstcaccctgtgatcccacgttcatcytgrgctgtgctccmtgcaatgtgatmtgctccattattttccagaatcgttttgattatamagatmaggattttcttaccttyatgraraaastaaatgaraatgycaggattctgagctcdccctggttkcaggtctgcaataattttccttyaytaattgactactgtccaggaagtcatcayavaataacaaaaaatrtcaattatwtbaraarhtacmtttyrgagaaaatrraagaacatcaggaawcattggatrttgmaaaccctcgggacttyattgattaytacctgattaaactaaarcaggsaaacyacaatcarcaatcrgaatttwcacytgaaaatctgrcaaccactgtvagkgatctgtttgstgctgggacagagacaacragcacracgctgagrtatgctctcctgctcctgctgaagcacccacacgtcacagctaaagtccaggaagagattgatcaagtrgttggcagacaccgcaasccctgcatgcargacaggagccacatgccctacacagatgccatgattcatgaggtccagagattcatmgacctcatccccaycarcctgccccatgcggtgacctgtgacattaaattcagggactacttcatycccaagggaacaacgrtaataacwtcactgtcatcagtgytgcaygacarcaaggaattccccaacccagaggtatttgacccwggccaytttctwgataaraatggaaastttaagaaaagtgactacttyatgccyttttcrrcaggaaaacggatrtgtgcaggrgagggcctggcacgcatggarctstttctattcctgaccaccattttrcagaactttaagctgaaatctmtgrttcacccwaaggacatygatacaaccccagtrstraayggatthgcctctctgccaccctcctatcagctctgcttcattcctgtctaamgaagatwmgastttctggccyaggmtgygwttdttttytcgcaatccmctytagaccttcawtccrtcwgggacaaagtgtcctyyctmccctctcatgtattcycattcwrtsaaktcycargaaacasctgtcaaycattttgcaawwtctggartcastgcayaaatrtatttctatttkytattctttgyaacagtsttrytatyccttrtgctaatatrtatstkktcytgarmwaaamtayaamtttacyrytatatwactaatayaataagataattcattgtyatttttctkcytcatgttttcartaataaatrtatttgatttgtgtaaaaaaaa

SEQ ID NO: 420 - DNA, 2352 bp, Cricetulus sp.
  misc_feature (2)..(21): n is a, c, g, or t
  misc_feature (592)..(609): n is a, c, g, or t
  misc_feature (1149)..(1156): n is a, c, g, or t
cnnnnnnnnnnnnnnnnnnnngtaggatccgggtaccatgggcggaggaacggctgttggtgtctggccggwggccmgcyagagrcccggggttttgctggtcgccgagcctsttcttcaggaggagccatggcgctcagrgtcactaggaacacgaaacttaacacagaaaataaggccaaggtcagcatgrcaggcgccaagsstgtgcctgtgrcrmttgctgcrgcctccaagcccgggctgagaccragaaccgctctaggrgatattggtaacaaagtcagcgarcaggcacaggcaagastgcctctgaaaaaggaactaaaaacytcagttactggaaaagtttcagctaaaatcccrccaccaaaacctcwggagaaggttcctcctgtgagtgarccagaggtggaacttgctgagmctgaacmtgarcctgaacctgttatggasgaaaagctttctcctgaacctatyttggttgataatccctctccaagcccaatggaaacatctggatgtgcccctgcagaagaatacctgtgycaggctttctctgatgtaattcttgccgtgagcgatgtggatnnnnnnnnnnnnnnnnnnccaaacctctgtagygaatatgtgaaagacatatatgcytatctcagacarctggaggaagarcartcagttagaccaaratayctactgggycgtgaagtcactggaaacatgagagccatcctaattgactggctgatacaggttcaaatgaaattyaggytgytgcargagacyatgtacatgactgtytccattattgaycggttcatgcaggataaytgtgtrcccaagaagatgctgcagctagttggtgtgacwgccatgtttattgcmagcaaatatgaagaaatgtaccctccagaaataggtgacttcgcttttgtgactaayaatacttacactaagcaccaaatcagacaratggaaatgaagattytaagagttctaaacttyagtttgggtcgccctctgcctctgcacttcctccgtagarcstctaagattggagaggttgacgttgaacagcatactttggccaaatacctcatggagctcactwtgttggactatgacatggtssactttgctccttctcannnnnnnnctggagctttttgcttagcactgaaaatycttgacaayggtgaatggacaccraccctgcagcactacctgtcctayactgaagaatcccttctgcctgtcatgcagcacctggctaagaatgtagtcatggtgaaccrtggccttacaaagcacatgactatcaagaayaagtatgcaacatccaagcatgctaagatcagcactctggcacagctgaattgtacactagttcagaatttgtccaaggctgtgkcaaaggcrtaactcaagtggaccacwacactacatcgscaaatgyrattggcaccatgtgccrcctgtacatagtatmcagtgtttacttgctcttcaataaaggytgttttacttttcatagcttacctcatwtgrwwsyyggwtsytctgactctaggataacaagggttgtctaaaacatttaggattatttttgaaactgcttttagtttaacagagaatccaagtaatgtacgtaattgtagcctatatgtttatgtacttccttctttaatgtgtcctggtcatatcttttaagtcatcctgcaaagccctctgcctagctcttgtttaaactgtcaatttaccagcttgtccttagttcccttttctatttcttcaggtggttgctgtccttcactgtgtcttgagctatggactttcagatctgaaccccagttttcttgtgaattatttatttgttaattggcttgggaaatagcatgttttaaaattaaaggtataaaaagaatttgccccttaatctcaatgtcctatataaatgtaatcatgcatatgttgtcaaggagatatggactcatttttttcaacaatattccttttaatgcctatattgcatttcctaagtgtacatttcatactgtatgtaatgtattcagtgatcctttacaatacattcaaattgcattctctcattgcctctaaacaatactgctaaaatgttgttttatgccttgcttggctgtatgcatagtagctttcccagggggtatatgctttaaattctgatgaagccagatgagacttttggttgtgggcactataccaaggtgccatttcctctatctttccactgtcttatgacacttaactggcaaaaatcctgtctctgtttgttttaatttatacatctgatgtcaagttgaataaaatttatta

SEQ ID NO: 421 - DNA, 2190 bp, Cricetinae gen. sp.
  misc_feature (497)..(526): n is a, c, g, or t
  misc_feature (1333)..(1351): n is a, c, g, or t
attgtcaagggctgagctttgcttgcgttccatccmgagctggggctgcsgtgctcaccttggcccccaggtcctccgcccctgagtgtygggcccgctttcttyagggttcccgggccccgctcccgggggcctgagccgccgcaytagygctccatggagaacttccaaaaggtggagaagatcggagagggcacgtacggagtggtgtacaaagccaaaaacaagttgacgggagaagtggtggcgcttaagaaaatccggctcgacactgaractgaaggtgtgcccagtactgccatccgagagatctctctgcttaaggaacttaatcaccctaatattgtcaagctgctrgatgtcatccacacrgaaaataagctttacytggttttygaryttctgcaccaggacctcaagaaatttatggatgcctctgctgtcactggcatycctcttcccctcatcaagagctatytgttccagctgctccaggnnnnnnnnnnnnnnnnnnnnnnnnnnnnnntgcaccgagaccttaagccccagaatctgcttatcaatgcagagggrtccatcaagttggcagactttggactagcaagagcctttggagtcccygttcgtacttatactcatgaggtggtgaccytgtggtaccgagcacctgaaatccttctaggctgcaagtactactccacagccgtggatatctggagyctgggctgcatcttygctgaaatggtgacccggcgggccctgtttccyggagattctgagatygaycaactcttccggatcttycgractctggggaccccwgatgaggtggtttggccrggagtyacttctatgcctgattataagccgagtttcccsaagtgggctcggcaagattttagcaaagttgtgcctccactggatgaagatggrcggagcytgttatcgcaaatgctgcactatgaccccaacaagcggatttcagccaaagcagccctggcccaccctttcttccaggatgtgactaagccagtaccccaccttcggctgtgatgtccttcccaaagccytcctcacccttggtctgacttgactctgggccttttggacacaggtcagccttctactcttttctggctgtcttagcactcactttttctcttggccagccagttcccgggactcagaggtgcagggaaagatgaggtgacaggaaaaagttttggtatcagatgcacttaacccagcttccactaccttctctccctcttagtcatcactgagggttggtatgcaaaacaaaacaaaactgaccattctctacccacccccnnnnnnnnnnnnnnnnnnncagtcttataaattattgtgtcccatgtttaggaagacacaccccagacctcctggtgccactgttttataaaggccaactgataagttgggacatttaggaaccaagccacagaggtctattttaatgaattagatgaaaaaaaaaatagatccaaacagtttataccttagttgtagtgtctggcctcgcccgacaatcaaggaggcccagctggagaagcagaagaaatgttccctttcagcactctgtctaccttctgcagggcaagaagtcaggagggggatagggattggtctgttcaccataattcacaaggcaaggtgaaagacactggaatctttcttttagtaattttgttttctggtgctaacgactgaacacaggacctcgccctcactaagcaaatgcaccacccgtatgccagattttctagctcctctttttggcgttttagctcttcagtttgtcagaggtccctgttgccatcttcttcctctgagagtcacccctgactccatagtggaagtgaagctttagatgtcactttgaaaggctttgacctggtcaggtcatcgggggacattttctataaaagagttaacaattatatttatatttcaagttatagtagtttggatattttagtgttttgatttttgtttttttggggggcggggcagtgtggatggatttgttgccatgtgcactttggaattttgtaatgcaattgttgaaagaaaatatttcttttatgatcttctccctctaccccttgtcctccagtgttctgttaatatttatttgtaatttagtttgtaattcattaaaagaaatta

SEQ ID NO: 422 - DNA, 983 bp, Cricetinae gen. sp.
  misc_feature (80)..(104): n is a, c, g, or t
agaaggcgagtctctttccgttcccagcgcasscatggctcgtggtcccaagaaacatctgaagcgtgtwgccgctccannnnnnnnnnnnnnnnnnnnnnnnnccggcgtgtttgctcctcgtccrtccactggccctcacaagctgagggaatgtstgcctctgatyattttcctraggaacagacttaagtatgccttgrctggmgatgaaktmraraagatbtgcatgcagcgyttyattaagattgawggcaaagtyaggactgaymtaacctaccctgctggattyatggatgtsatcagcattgacaaractggagagaacttccgcctgatctatgacaccaagggycgctttgctgttcatcgtatyacayctgaggaggccaagtayaarttgtgcaaagtgagaaagatctttgtgggcacaaaaggaatcccacatctggtgacccatgatgctcgaactattcgmtaccctgatcccctcatcaaggtgaatgacaccattcagattgattkggagacaggcaaaawaactgacttcatcaagtttgacaccggtaacctgtgtatggtgactggrggtgctaacttgggaagaattggtgtgatcaccaacagagagagacatcctggctcttttgatgtggttcatgtgaaagatgccaatggcaacagctttgccacccggctttccaacatytttgttattggcaagggcaacaarccatggatttctcttccccgaggaaaaggaatccgcctyaccattgctgaagagagagacaagaggctagcagccaaacagagcagtgggtgaaatggtctctaggagacatgctggagaaatrtytgtactcttgccyttytaggcaactgtgctcaattaaacagcatgatraaattacctatgattttgtgttgcctttttcaaaaaattttttggcatcttataacgaataaattctggggctggc

SEQ ID NO: 423 - DNA, 1244 bp, Cricetulus griseus
atggctggcagagagaagacaaagagtgcaaacagagtgctgaggataagtcagctggatgcacttgaactgaacaaggctctggagcagcttgtgtggtcccagttcacacagtgctttcatgggttcaagccaggcctgttagctcgatttgaacctgaagtgaaagcatgtctgtggcttttcctatggaggttcaccatctactccaaaaatgccactgtgggccagtcagtcttgaatattcagtacaaaaatgatttctcttccaactcaagataccaaccaccaagtaaaaaccagaaactgtggtatgctgtgtgcaccattgggggtagatggttagaggaacgatgttatgatttgtttcgaaaccgtcatttagcatctttcgggaaagtcaaacagtgcatgaatgttatggttggacttttaaaattaggggaattgataaacttcttaattttcttgcagaagggaaagtttgcaactttgacagaacgcctccttggcattcattctgtattttgcaagccccagaacattcgtgaagttggctttgactacatgaatagggagcttctctggcatggctttgctgagtttctgatttttctcttaccactcatcaatatccagaaattcaaagccaaattgtcttcctggtgcatacccctcactggtgctgctagtagtgacagtgccctagccagcagtggcaaagaatgtgctctctgtggagagtggcccacaatgcctcacaccattggatgtgaacacgtcttctgttattactgtgttaaaagtagcttcctatttgacatgtactttacctgtcctaagtgtggcatagaagtgcacagtgtgcagccactgaagtcaggaattgaaatgtcagaagtgaatgctctttagacagcacattgtttcctctgagggaggatgtattgtgtcccagtccttggtattagtcatcctcagtatcatggggaggcagctgggaaaagccatgtgtggctcagccgctgtcctcttcttttccaagcacaactaaattctaatcactggaaactaaatgatacgagagactcttacaaatgttcacggtactctttaaaatcatctattacatcttttaatgtcaagaataatggaaaatttttgtcagatgaatactgagaatgactaagaatcctttatagaaaaggtcaagctctaaaaataaaagatttttgagacgctgg

SEQ ID NO: 424 - DNA, 1354 bp, Mesocricetus auratus
agggctggctaggctggagcagctatggcagcgacactcacttggattcttctctttgtgggtcttctggcagggctgagggacaccaaggcccagcagaccaccttatacccacttgtgggtcgtgtttttgtgcatcccttggaacacgccaccttcctgcgcctcccagaacacattgcggtgccacctactgtccgactcacctatcaggcccacctccagggacatccagacctgccccggtggctgcgctacacacagcgcagtccctatagccctggcttcctctatggtactcccactccagaagatcgtgggcgccaggtcattgaggtcacagcctacaatcgagacagctttgacaccacaagacagcgactgctgctgttgattgaggaccccgaaggtccccggttgccataccaagccgagttcctggtgcgcagccatgatgtagaggaggtactgccctccacacctgccaaccgcttcctcaccgccttggggggactctgggagctaggggaactccagttgctcaacatcacatctgccttggaccgtggaggtcgtgtccctcttcccatagagggccggaaggaaggggtatacatcaaggtgggctctgccacacccttctctacctgcctgaagatggtggcatcaccagacagctatgcccgttgtgcccagggacagcctccattactgtcctgctatgacagcttggcaccccacttccgtgttgactggtgcaatgtatctctggtggacaagtcagtgccagagcccttggatgaggtgcctactccaggtgatgggatcctggagcatgacccattcttctgcccacccacggaggccacaggccgagacttcctggcagatgccttggtcaccctcttggtgcccctgctggtggctctactgctcaccctgctgctggcttacatcatgtgctgccggcgtgaaggacaactgaagagagacatggccacctctgacatccagatggttcaccattgtaccatccatgggaatacagaagagcttcggcagatggcagccaggcgcgaggtgccccggcctctctccaccttgcccatgttcaacgtgcgcacgggagagcggttgcctcctcgagtggacagcgcacaggtgcccctcatcctggaccagcactgagagctctgccagttccagctgcaccactcagagttgcggcccgtgaccacacccaccgctgagaccagctcccggtcttcttcacctccggcaccagacaggcggatggatggggtagggaggcctgaggggtcagcaccaagaataaatacctgctgctctgwtc

SEQ ID NO: 425 - DNA, 1680 bp, Cricetinae gen. sp.
actggccaccatgctgggctcagrgctgmtcctggtggccatactggcctacctgagtgtcatggtcttggtgtytgtctggaagcagaaaktcagggggaarctccctccaggacccactcctttgccttacattgggaattacctgcagctgaatacmaaagacatstacagctccatcacagagctcagtgagcgctayggccccgtgttcaccatcyacctkgggcctcgcccmgtcgtggtgctctatggatacgaygcagtmaaggaggctytggtggaccaagcrgaggarttcagtggacgaggcgarcaggccacctataayacactcttcaaagrctatggtgtgrcsttcagcagcggggaacgagccaarcarctcaggcgcttctcyatygcracactgagagactttggwgtgggaaagcgcrgtgtggaggagcgtatccaggaggaggcggcctrtttgrtcaagatgttacrgagcaccmgyggagcacccatygaccctamygwctacctgagccaaacagtstccaatgtcattarytccrttgtcttcggggacsscttcgactaygaggacaaagagttcctggarctgctrcryatgatgrrtsagatraacaratttgcagcttctcccrywggacagctctatgacatgttccaytcagtgatgaartacctgcctggaccacagcaacagatcatcaagaatacraaggaactggaagacttyatgrtcaggaaagtgaagcagaaccagagcaccctggacctcaactccscacggaacttcattgaytcctttctcatccacatgcawgaggagaagaagaaccccrmttccgagttcaacatamagaacctggtgatgacatcactgaacctcttcttygctggttctgagacmgtcagctccacgatrcgytatggcttcctgctgctcatgaagtacccagargtggaggccaaggtccatgaggarattgaccgggtgattggcaggaaccgacagccccagtttgaggaccgcatgaagatgccytacacsgaggctgtcatcaatgagatycagagatttgctaaycttgctccctkkggcattcctcggaagactatcmagaayaccacattccgtggcttcttcctccccaaggacacygamgtgtwcccyatactaggttctctgctgackgacccaaagttcttcmccagtcccaaasatttcaacccccagaacttcctggatgacarrgggcagytgaagaagawtgctgcttttgtgcccttytcygtaggaaagcggttctgtytgggggacggcctsgcyaggatggagctctttctcttcytcaccacyatcttgcagaacttccgsttmaagttcccaaagaagctggaagacatcgacgcgtcccccaaaccgttrggrtttkccaggatcataccacrttacaccatgagcttcctgcccatctgattcyggrrycaaccaaggtggagcaarakggrggkrgagtctggagtgagrccagagrcagagygaagggagaaggtgaaaaytggggtttcagaagggaccacatgsctggaagaaaatttayryrccyrcttaaattgkgaygctaatwaaacraatarcrykcagtggacagtggtcaaaaaaaa

SEQ ID NO: 426 - DNA, 6645 bp, Cricetulus griseus
  misc_feature (4002)..(4019): n is a, c, g, or t
ccgttcaggatcccggttacttatttattcgttaccccttttcttcttcttyctccctcccaaaacctcctcctttcctcccttcttttgtttccytyttgggagccgacaagtctccggaaagggagawaaggctttcyttctgccctyttcgtttccccgcctcctcccctcccccacctttccytcctccggcctytycctccctgctcsgggagatctttccyggcggccgccckgacggggtctgagcwcttargcggcggtggcgcaggctttttgtagcgagmtttgcgcctgcgcagcgcgcctgcctcrccatgcacgggggtggccccccctccggggacagcgcatgcccgctgcgcaccatcaagcgagtgcagttcggagtcctgagtccggatgagytgaagcggatgtctgtgacagagggtggcatcaartacccagagacracygagggaggtcgccccaagcttgggggactaatggatccaaggcagggggttattgagcggactggccgctgccaaacatgtgcaggtaacatgacygagtgtcctggccaytttggtcacatcgaactggccaaacctgtgtttcatgtgggtttcctggtgaaracaatgaaggttttacgctgtgtctgcttcttctgctccaaattgctygtggattctaataacccaaagattaaggacatcctggccaaatctaagggacagcccaagaaacggcttacacatgtctatgacctttgcaagggcaaaaacatctgcgaaggtggagaggagatggataacaagtttggtgtggagcagccygagggkgatgaggatctgaccaaagaaaagggtcatggtggctgygggcgktaccagccycgsatycgrcgctctggcctggagctgtatgcygagtggaaacatgttaatgaagactctcaggagaagaagatcttrctgagtccagaacgagtccatgaaatcttcaaacgcatctcagaygaggaatgttttgttctgggcatggarcctcgctaygccaggcctgagtggatgattgtcacagtgytgcctgtgcctcctctctctgtgcgacctgctgtggtgatgcagggttctgcccgcaaccaggaygatctgactcacaarctggctgayatcgtgaagatcaayaatcagctrcggcgraatgagcagaayggtgcagctgcccatgtcatcgcagargaygtgaarctcctccagttccatgtggccaccatggtggacaatgarcttcccggcttaccccgmgccatgcagaagtctggccgtcccctcaagtccttgaagcaacggttgaagggcaaggaaggacgggttcgagggaatctaatgggcaagcgagtggacttctcagcccgmackgtcatcactcctgaccctaacctatcyattgaccaagttggtgtkccccgctccattgctgccaacatgacctttgcagagattgtcacccctttcaacattgacagacttcaggaattagtacgmaggggaaacagccagtatccwggagccaagtacatcattcgagacaacggtgatcgaattgacttgcgtttccaycctaaacccagtgacctacacctgcagactggctataaggtggaacggcacatgtgtgatggrgacattgttatcttcaatcgtcagccaactttgcacaaaatgtccatgatggggcatcgggtccgcatcctcccctggtctactttycgcttgaatcttagtgtgacaactccatacaatgcagactttgatggggatgaratgaatttgcatytgccacagtctctggagacacgggcagagatccaagagttggccatggtrcctcgmatgatygtcacccctcagagcaatcgaccwgtcatgggtattgtgcaagacacactcacrgcagtacgmaaattcactaagagagatgtcttcctggagcggggtgaagtgatgaaccttttaatgttcctktccacrtgggatgggaargtyccacagccagctatcctcaagcccaggcccctgtggacaggcaagcagatcttctccctcatcatacctggtcacatcaattgtatccgtacccacagcacccaycctgatgatgaagacagtggcccttacaagcacatctcacctggagacaccaaagtggtggtggagaatggygagcttatcatgggcatcctttgtaaraagtcyctgggcacctcagcaggctctytggtycacatctcctacctagagatgggtcaygacatcactcgcctcttctactccaayattcagactgtcattaacaactggctcctcattgagggtcataccattggcattggggactccattgctgattccaagacttaccargacatccagaacactattaagaaggctaaacaagatgtaatagaggtcattgagaaggcycataacaatgagctggaacccaccccaggaaacacrttgcgtcaracatttgagaatcaagtgaaycgcattctcaatgatgctcgagacaaaackggctcctctgcacaraartccctgtctgaatacaacaacttcaagtccatggtggtatctggagctaaaggktccaaratcaacatctcccaggtcattgctgttgtyggrcaacaaaacgtggagggcaaacggatcccatttggatttaagcatcgracgctycctcactttatcaaggatgattatggtcctgagagtcgaggyttygtagagaactcatacttagctggtctcacrcccactgagttcttcttccatgccatgggaggacgagagggcctcatygacacagckgttaagactgctgaracygggtatattcagmgaaggctgataaaatccatggagtcagtgatggtgaaataygatgcaactgtgcggaactccatcaaccaggtggtacagctgcgctatggagaggacggcctagcaggcgagagcgtkgagttccagaatctggctacacttaaaccctckaacaaagctttygaraagaagttccgctttgattayaccaatgagagggccctgcgkcgcacwctrcaggargayctggtraaggacgtgytgagcaatgcacacatacaraaygagctggarcgkgartttgagcggatgcgagaggaymgggaagtgctsagggtcatcttcccaactggtgacagcaaggtggtcctcccctgtaacctycttcgtatgatctggaatgctcagaaaatcttccacatcaaccctcgmcttccytctgacctgcacyccatcaaagtggtagagggagtcaaggaattgagcaagaagytggtmattgtgaatggggatgacccactaagtcggcaggcccaggagaatgccacwttgctcttcaacatccacctaagatccacactctgctctcggcgcatggctgargagtttcggctaagtggagaggcctttgactggctgcttggggagatagagtccaagttcaaccaagccattgcccatcctggagaratggtgggagctctggctgcacagtctcttggagaacctgccactcagatgactctgaacactttccactatgctggtgtgtctgccaagaatgtgacactgggtgtacctcgacttaaggagctyatcaatatttccaagaagccaaagacyccttcactcactgtcttcctattaggccagtctgctcgagatgccgagcgggctaaggacattctttgccgyttggaacatacaacmttgagaaaggtgactgccaacacagccatctattatgaccccaacccccagagcacagtggtggcagargatcaggartgggtgaatgtgtactatgagatgcctgactttgatgtggcccgaatatcyccytggctgctkcgtgtagagctrgaccggaagcacatgactgaccggaagctcaccnnnnnnnnnnnnnnnnnnaaaatcaatgcaggttttggygatgatttgaattgcatcttcaatgatgataatgcagagaagttggtccttcgtatycgaattatgaacagtgatgaaaacaagatgcaagaggaggaagaggtggtggayaagatggatgaygatgttttcctgcggtgyattgagtccaacatgctgacagatatgaccctgcagggyatcgagcagattagcaaggtrtacatgcacttacctcagactgacaacaaaaagaagatyatcatcacagaggacggagagttcaaggccctgcaagagtggatcttggagactgatggtgtgagcytgatgcgggtgcttagcgagaaggatgtggaccctgtrcgcaccacgtccaatgatattgtggagatctttacggtrctgggcattgaggctgtgcggaaggccctggagcgggaactgtaccatgtcatctcctttgayggttcctatgtcaattatcggcatttggctctcttgtgtgacaccatgacytgtcgmggccacttgatggccatcactcgtcacggagtcaaccgccaggacactggaccrctcatgaaatgctcctttgargaaacggtggacgtgcttatggaagcagctgcccayggggagagtgaycccatgaagggmgtctctgagaatatcatgytgggccagcttgctccagckggcactggctgttttgacctcctsctygaygctgaraagtgcaaatatggcatggagatycccaccaatatccctggcctgggggctgctggacctactggratgttctttggctctgcacccagtccratgggmggaatatctcctgcaatgacaccctggaaccagggtgcaaccccagcctatggtgcytggtcyccaagtgttgggagtggratgacyccaggagcagctggcttctcgcccagtgctgcatctgatgccagtggcttyagcccaggttactctcctgcmtggtctccsacaccaggctctccaggctcccctggaccctcragcccatayatcccctcaccrggtggtgctatgtctcccagctactcaccaacwtcacctgcstatgagccacgctcccccgggggctatacaccccagagcccttcatactctcctacttcaccytcctactccccaacctcgccatcttattccccaacyagtcccaactatagccctacrtcacctagctactckccracctctccatcctactcsccaacctctccwwsctactcmccracctctccatcctactccccracytctcccagctactccccracmtctccyagctactcmccracatcaccyagctactccccracttctcccagctactccccracatcwccyagctactcaccmacmtctcccagctactccccmacytcmccaagytaytctcccacctcccccagttactcaccgacwtcyccmagctaytctcctacatctccaagctactcgccaacttctccaagttattcwcccaccagccctaactattctccaactagtcccaattayacsccaacatcmcccagctacagcccaacatcacctagytactcrcctactagtccaaactacacaccaaccagyccyaactayagcccaacctckccaagytattccccaacttcacccagytactccccsacctcgccaagctaytcmccctccagcccacgstacacaccacartctcccacctacacmccmagctctccmagctacagccccagctcwccaagctacagccccacytcacccaagtataccccaactagtccttcytacagtcccagctcwccagagtataccccaacctctcccaaatactcacctacaagccctaaatattcacctacwtctcccaagtattctcctaccagycccacytactcacctaccacmccaaaatactcgccaacctctcctacatactcrccaacctctccagtctacaccccaacctcccccaagtactcrcccaccagccccacctactcccccacctcycccaagtactcrcccaccagccccacctactcccccacctcccccaagggctccacttactcyccyacytcccctggytactcwccyactagccccacctacagcctcaccagcccagccatcagccckgaygacagtgatgaggaraactragggygagcagggcgcagcagcagcaggttagggtcrgacagcctyagtggcctgtgcagtcacttcccttgrgctgtgaccctrgcctggrccccttgtacataactccttgtgacagaaccctcyggaggttctagatcccatttttgatgggcttttygtcttgycctrcactcrtgctktctkkskwsksactsacagctgcaggrytttrttaccccacctgttccrtgcctgactccacagtgaaggtctttgcttgcctgtgacttgattgggattmaaggcattttmacytctgaaggctmrttcctgctttgggtcayacaaatgacctctggaagaacaaagcttaagctgccttttgtctgttatttttttgaaatttaaataaagtttactmattttgacc

SEQ ID NO: 427 - DNA, 2138 bp, Cricetulus sp.
cttgatctccagccgcgggtttcatggggctcctcaggatcatgatgccgcccaagttgcagctgctggcggtggtggccttcgccgtggcgatgctcttcttggagaaccagatccagaagctggaggagtcccgggcgaagctagaaagggcaatcgcaagacatgaagtccgggaaattgaacagcggcatacaatggatggccctcggcaagatgcggctgtagatgaagaagaagatatagtcatcatttataacagagttcccaaaactgcaagcacctcgtttaccaatatcgcctatgacttgtgtgcgaagaatagataccatgttcttcacatcaacactaccaaaaacaacccagtgatgtcattgcaagatcaggtacgctttgtaaagaatataaccacttggaacgagatgaaaccagggttttatcatggacacatttcttatctggattttgcaaaattcggtgtgaagaagaagcccatttacattaatgtcatcagggaccctatcgagaggcttgtttcctactattactttctgaggtttggggatgattacagaccaggattaaggagacggaaacaaggagacaaaaagacctttgatgaatgtgtggctgagggcggctcagactgtgctccggagaagctctggctccagatcccatttttctgtggccacagctcagaatgctggaatgtgggaagcagatgggctatggatcaagctaagtataacctcattaacgagtactttctggtgggagttactgaggagctggaagacttcatcatgctactcgaggcagctttgccccggtttttccggggtgctacagacctctatcgtacaggaaagaaatcccacctgaggaaaaccacagagaagaaacttcccaccaagcaaaccatcgcgaagctgcagcagtctgacatttggaaaatggaaaatgagttctacgagtttgcactagagcagttccagttcatcagagcccacgctgtccgtgagaaagatggagacctctacatcctggcccagaactttttctatgaaaagatttacccgaagtcgaactgagtggaagtgtgaccagagcagtcttgaacctggacttggctgtgttgtcaccgttgttctcagcttctgcacctgttctgctaatcgagtccaagccgagccagttcttgttgggccgagttggggaacagacaggagtgtcaagaaattagatgctgaatgggatgtcagtgttctaaggagttcttaagttcttaagtgtgatgaattgttatttcttttgttactttgttttcattttcatgatagctataatctcccagtgaggagaaatctcatgtcacttaaaatacacacatggaggtttaatcagaaggctgaataccatttcagaagaggttctgtgattctcttgcttttgatgaagcatttttatcacctctctttggatgcagatgagtctgtatggcacttggagttttgtgttgcacacccctactggatagtgctaataactatttgccagtagctgatttgtttatgtggatcacgtctcacagagtttattggaatgtttgatcatgttttctcagaactgtttttgctgtagttgagtttgcccatatttatgtaggctttattttattttttggatgatcattagtgttaaagaaatcaactgaaaaccatgaataatactgtaaaaagacaaaacagttaaaagcagtattcctgatttctgtctccccagtatctaatattggggtggtatttctaagaatgttgacaacattatctgaggctttcttaaggatttccacacattcatataaaaaaaatgagtttagtatttgtttctccatggcttctctataacccagtacactgaagtatcggtgactgcatatggcaactccatcagtgagctgtgatggtaggattttcctacctctgtacttttacctgtagactatttttactacggtgctttataatgtgttttaaagcattgcatttacaaaagaaaaatgctgtaaatattgcatattttatgtatttggaccaaaaagttacaagtcagtagataaaaagtggttttgcacc

SEQ ID NO: 428 - DNA, 603 bp, Cricetinae gen. sp.
  misc_feature (508)..(536): n is a, c, g, or t
gcaagagagagagcaagccaccaccacagcagcctggcccatcaattctgtgacatggatctccggaaggtgctgtcccgggtggttctgttcctgctttttctctatctgtcaccgctgggaagtcactcccaccctctgggcagtcccagccagtctccggaacaatccaagatgcagactctgctagacctgctgagggaaaaggcagaggcggtggctcgggggcagctcctgaaggaccaagacgtcatcacaaaagcacctctccaaagcacccttgggtctcaagacagcaccctccatgtcctgcagaaacttcgaaactccaagaagatgcataattcgggctgctttgggcagaggatagacagaatcggctcattcagtcgtctgggctgcaatgtgctgaagcggtattaggatgagctcccagctgcagacaccggctcctgactccacctggggctccttccccaatgctgggacccccttttgaagtgatccnnnnnnnnnnnnnnnnnnnnnnnnnnnnntggttgttttctacaagactgtttcttacctttgagcacagacttttcatggtgtaataaacacagc

SEQ ID NO: 429 - DNA, 2378 bp, Cricetus cricetus
  misc_feature (1953)..(1975): n is a, c, g, or t
cgcagcggccgccgccgtccgcccgccctcagccagctgctcggtgccactcgggcagcgtctgcggcggctcgacgaggcgctgacggggcggcggcggacggccggagctcctcggggttcttcggcggcgactagttctcatggggctggccgagtcattgcgtccgtgcgctgtgaggacgttcacattcaaggagttcggaagttcctggatagtgtgcttgggaggaactgccataactggattccatctctagagtttttgtagcacaccgagagccatgaacagcttcaataaggacgagtttgactgccatatcctcgatgaaggctttacggccaaggacattctggaccaaaaaattaatgaagtatcctctgatgacaaggatgctttttatgtggcggaccttggagacgttctgaagaagcacctaagatggctaaaagctctccccgtcactcccttttatgcagtcaaatgtaatgacagcagagcgttagtgaacaccctagctgccattacagttgactgtgcaagcaagactgagatacagttggtacagggccttggagtgcctcccgagagagtcatctatgcaaatccatgtaagcaagtgtctcagatcaagtatgccgccagcaatggagtccagatgatgacttttgacagtgaaattgagttaatgaaggtcgccagagcacatccaaaagttaccaagttggttttgcggatcgccactgacgattctaaagcagtgtgtcgmctcagtgtaaagtttggtgccacactcagaaccagcaggcttctcttggaacgggcaaaagagctaaatattgatgtcattggtgtcagcttccacgtggggagtggatgtactgaccctgagaccttcgtccaggccttgtcggatgcccgctgtgtctttgacatgggaacagaagttggtttcagcatgtatctgcttgatattggtggtggctttcctggatctgaggatacsaagcttaaatttgaagagatcaccagtgttatcaacccagctctggacaagtacttcccgccagactctggagtgagagttatagccgagccaggcagatactacgttgcctcagctttcacactggcagtcaatatcatagccaagaaaatcgtatcgaagggctctgacgatgaagatgagtccagtgagcaaaccttcatgtattatgtgaatgatggagtgtatgggtcatttaactgcattctttacgatcatgcacatgtgaagcccctgctgccgaagagacccaagccagatgagaagtattactcatccagcatctggggaccaacatgcgatggccttgaccggattgtggagcgctgtaatctgcctgaaatgcatgtgggtgattggatgctctttgagaacatgggtgcatacactgttgctgctgcatctactttcaacgggttccagaggccttctatctactatgtgatgtcgaggccaatgtggcagcttatgaagcagatccagaaccatggcttcccaccagaagtggaagagcaggatgttggcactctgcccatctcttgtgcccaggagagcgggatggaccgtcatccagcagcctgtgcttctgctagtatcaatgtgtagatgccattcttgtagctcttaccttcaagtttagcttgaattaagggatttggggggaccatttaacttaattactgttagttttgaaatgactttgtaactacagagtagggcttggcacagatgaagtatggaaggctaggagatgggtcacacttacctgtgttcctatggaaactttgaatatttgttttatatggatttttatcacttttcagacatactaacgtgtgcccctcagccactgagcaagcatttgtagcttgtacatttggcagaatgggccaaaagctaatgttgnnnnnnnnnnnnnnnnnnnnnnntcttgaaataattgggcatcagggaatgtttgcaatgtcccttaaagaagggacacacttcctgcacaggctgctgtagtcatacgagtgagtccaaacatagcagagaaggaaaaggtggatgggacaaggctataccctctacacagcatcagtttgcctagccagtccttaaagtgtgtacttggctgtgaagttggtgaggaacgtcatctgcctagcgacctgatatcctggccacaccccagggaaggcatctaaggctttttgaaccttgcctgcagaagccttgaatgttcctcaacccttgacttcgcctgcatcaccacctagtaacagttggaagtatcatacagcacttggcaatcaacttcctgtaataaatctcaacagcagcaactac

SEQ ID NO: 430 - DNA, 487 bp, Cricetinae gen. sp.
  misc_feature (306)..(325): n is a, c, g, or t
ttttttacgagaagccgtcaaaatggccgaagtggagcagaagaagaagcggaccttccgcaagttcacctaccgcggcgtggacctggaccagctgctagacatgtcctatgagcagctcatgcagctttacagcgccaggcagaggcggcggctgaaccgcggcctgcggcggaagcagcactcgctgctcaagcgcctgagaaaggccaagaaggaggcgccgcccatggagaagcccgaggtggtgaagacgcacctgagggacatgatcatcctgcccgagatggtgggcagcatggtggnnnnnnnnnnnnnnnnnnnnttcaaccaggtggagatcaagcctgagatgatcggccactacctgggcgagttctccatcacstacaagccggtgaagcacggccggcccggcatcggtgctacccactcctcccggttcatcccgctcaagtaactgcccaataaagactctagagtgcga

SEQ ID NO: 431 - DNA, 377 bp, Cricetinae gen. sp.
  misc_feature (228)..(260): n is a, c, g, or t
cactcaagtttcgacttttcctcggtcctcagccggtctycaaccgycgycttcactcgccatggaccccaactgctcctgtgcyacagatggatcctgctcctgckctgggtcttgcaaatgcaaagagtgcaaatgcaccacstgcaagaaaagctgctgctcctgctgcccggtgggctgtgcgaagtgctcccagggctgcgtctgcaaagaggcttcggasannnnnnnnnnnnnnnnnnnnnnnnnnnnnnnnntcagctgyctgtaaatagagcaatgtgtagaaacgtatttttttttacaaccccgkcctattckccacacccctttctataaagcatgtaattgataataaaaggggtgtggcgaat

SEQ ID NO: 432 - DNA, 2460 bp, Cricetulus sp.
  misc_feature (499)..(517): n is a, c, g, or t
cgagagtgtccacttatcttttcttcggttgagtttccaaaactctaatgatgccgctcctctccaacaaaagtttagtttaaaaataacaccactcgtccggctctggtgcccgttttaaaaatggtgcctcggtcttcagcagcgatagttcttttgcaattaagatccgggcggaaacaatgggtaggtgtgcagcggggcagagccgaggttgcttcacagaacctcttgcaggtcaggagggagggtcaggtcatagttgggttttgttcctgctggcgcggaatactcttgcgtgtaggaagcggctctaccgactgccgaggcctctgggattgtgccgggttgctagttagctcagttggcggcggassggcggcccctggcgggtcaccatgtgggccttcccggagttgccgctgccgctgctggtgaatttgttcggctcgctgctgggatttgtggctactgtgaccctcatccctgccttccgtannnnnnnnnnnnnnnnnnncctctgtggccaggacctcaacaagctcagccggcagcagatcccagaatcccagggagtgatctgcggtgctgttttccttatcatcctcttctgcttcatccctttccccttcctgaactgctttgtggaggagcagtgtaaggcattcccccaccatgaatttgtggccctgataggtgccctccttgccatctgctgcatgatcttcctgggcttcgctgatgatgtactcaatctgcsstggcgccataagctgctgctgcccacagctgcctctctacctctcctcatggtttacttcactaactttggcaatacaaccattgtggtacccaagcccttccgctggattcttggcctgcatttggacttgggaatcctatactatgtctacatgggactgcttgcggtgttctgtaccaatgccatcaacatcctagcaggaattaatggcctagaggctggtcagtcactagtcatctctgcttctatcattgtcttcaacctggtagagctggaaggtgattatcgggatgatcatgtcttttccctctacttcatgataccatttttttttaccaccttgggattgctataccataactggtacccatcacaggtgtttgtgggagataccttctgttattttgctggcatgacctttgccgtggtgggaatcttgggacacttcagcaagaccatgctactcttctttattccacaagtgttcaatttcctctactcgctgcctcagctccttcacgccatcccctgccctcgacaccgcatacccagactcaatccgaagacgggcaaactggagatgagctattccaagttcaagaccaagaacctctctttcttgggcacctttattttaaaggtagcagagcgcctccagctagtgacagttcaccgaggcgagagtgaggatggtgccttcactgaatgtaacaacatgaccctcatcaacttgctactcaaaatctttgggcccatacatgagagaaacctcacactgctcctgctgcttttgcagatcctgagcagcgctgtcaccttctccattcgataccagcttgtccgactcttctatgatgtctgagttccctgaagactgactgcccatagcctccgttggacctcacccaggaccaacctgtctggtccaagactgccttctggtccaggcctctccaactgttggttttttcagttttgttttcagcttctcccatcacctgtaatgattattggcctggaccttattggactttaaagtccattagttgcactttgcccctggctttcttcagcttgctactcttyccctttctgtcccatctgcagcaccataagggggatgtagcagctcttatgcaaatacagctcaactttcagagccctgcatttgctggaccttgagagagaacctgggctatgtgctagagttagggccctatactccaaggtaacctcacatttgactttaaaattaagtgttctgattaggaagatcagaggcagggmtgacatttcagtttgcctcaaatktkactrarggwttggtctttttgcgttccactctaccttgtagcagtagtatgaattcacatgatcccgtaacatgtcaacagtagtcatacagtacatggccttgcaattacttttcaatgcaactttatgataattttttctaactgcttctttatatagaaaatacattatttccttcaggcaggtaaaataactttccaaaaagaaaatactgagaaacaacaaataaaaatatttataccaaacacaaaatgttggattcaagtctaatgagtcctttgcataagaacaaacaatgtgttgtactgtttttttttttaataataagtagacattcagacaggaagataactttaaagttaaaaaaattaatgactttctcc

SEQ ID NO: 433 - DNA, 1964 bp, Cricetinae gen. sp.
  misc_feature (1716)..(1733): n is a, c, g, or t
agccccctcttctcctccccctcccgccttcctcacttctctctgggtgcccattggttggcgcgccccgcggctaggatggcagtgggaggggaccctctttcctaacagtgttataaaagctgcgcccttggcggggtccggtcctctgccactcttgctcsgggacyccagagacarcagcrctcccrcggttcgcmtscaccgygccctygctctcctwtcggagccagtccttgyagctgcagcagcccagyccaccttcgcyctcsaaaccatrtcyaccaggtccgtgtcctcgtcctcttaccgcargatgttcggtggymccggcacctcgarccggcmgagctccaaycggagctatgtgaccacgtccacccgcacctacagcctgggcmrcgcrctgcgccccagcaccagtcgcagcctctattcctcatcycccggtggcgcctatgtgacccgatcctctgcggtgcgcctgcggagcagcatgccsggcrygmggctgctgcargaytcggtggacttctcgctggcsgacgccattaacaccgagttcaagaacacccgcaccaacgaraaggtagaactgcaggagctgaaygaccgcttcgccractacatcgacaaggtgcgcttyctrgagcagcagaacaaaatcctgctagccgagctcgagcarctcaagggycagggcaagtcgcgcctgggcgacctctatgaggaggagatgcgggagctgcgccggcaggtggatcagctcacyaacgacaaggcacgcgtcgaggtggagcgtgacaayctrgcwgaggacatcatrcggctgcgagaaaaawkgcmkgassagmkrstsswgrswgwggragcsgagagsaycctgsagycctkcmgacaggatgttgacaatgcctctctggcacgyctygaccttgaacgtaaagtggaatccttgcaagaagagattgcctttttgaagaaactgcatgatgaagagatccaggagctacaggcccagattcaggagcarcatgtccagattgaygtggatgtttctaagccygacctcactgctgccctgcgcgatgtccgccagcagtatgaaagtgtggctgccaagaacctccaggaggcrgaggaatggtacaagtccaagtttgcygacctctctgargctgccaaccggaacaatgatgcyctgcgccaggcaaagcaggagtcaaatgagtaccggagacaggtgcagtcactyacctgcgaagtggaygcacttaaaggaactaatgagtcyctggaacgccagatgcgtgagatggaagagaattttgcccttgaagctgctaactaccargacactattggccgcctgcaggatgagattcagaacatgaaggaagagatggctcgtcaccttcgtgaataccaagacctgctcaatgtyaagatggctcttgacattgagatwgccacctacaggaagctrctggaaggcgaggagagcaggatttctctgcctcttcccaacttttcttcmctgaacctgagagaractaatctggagtcactccctctggttgacacccactcaaaaagaacactcctgattaagacrgtggaaacyagrgatggacaggtgatcaatgaaacctctcagcatcaygatgaccttgaataaaaattgcacayactcygtgcaacaacgcagtaccagcnnnnnnnnnnnnnnnnnnttygtatcttaaggaaacagctttcaagtgcctttactgcagtttttcaggagcgcaagwwasatttgggatagaaataagctctagtttctaacaactgacaccctaaaagatttagaaaaggtttacaacacaatctagtttacgaagaaatcttgtgctagaatacttttcaaagtattttgaataccattaaacgctttcccagtatacgaccaactgacgcttata

SEQ ID NO: 434 - DNA, 2945 bp, Cricetulus sp.
  misc_feature (1388)..(1407): n is a, c, g, or t
  misc_feature (1683)..(1714): n is a, c, g, or t
  misc_feature (2298)..(2312): n is a, c, g, or t
aatttcgcgccaaacttgggggaagcacagcgtacaggctgcctaggtgatcgctgcyscygtcatggttcgaccgctgaactgcatcgtsgccgtgtcccagaatatgggcatcggcaagaacggagayyttccctggccaatgctcaggaacgaattcaagtacttccaaagaatgaccaccacctcctcagtggaaggtaaacagaacytggtgattatgggccggaaaacytggttctccattcctgagaagaatcgacctttaaaggacagaattaatatagttctcagtagagagctcaaggaaccaccacaaggagctcattttcttgccaaaagtctggacratgccttaaaacttattgaacaaccagagttrgcagataaagtsgacatggtttggatagttggaggcagttccgtttacaaggaagccatgaatcagccaggccatctcagactctttgtgasaaggatcatgcaggaatttgaaastgacacgttcttcccagaaattgatttggagaaatataaacttctcccagagtacccargggtccttyctgaagtccargaggaaaaaggcatcaagtataaatttgaagtctatgagaagaaaggctaacagmmmgatacttgctgattgacttcaasttctactgctttcctcctaaaattatgcatttttacaagaccatgggacttgtgttggctttagatctatgasttattctttctttagagagggatagttaggaagatgtatttgttttgtggtaccagagatggaacctgsgatcctgtgcatcctgggcaactgttgtactctaagccactccccaaagtcatgccccagcccctgtataattctaaacaattagaattattttcattttcattagtctaaccaggttatattaaatatactttaagaaacaccatttgcyataaagttctcaatgcccctcccatgsrgcctcaagtggcyccccagcagatgcatagggtagtgtgtgtacaagagaccccaaagacatagagcccctgagagcatgagctgatatgggrscycatagagataggagcyagatgaataagtacaaagggcagaaatgggttttaaacagcagagctagaactcagacyttaaagaaaattagatcaaagtagagactgaattattctgcacatcagactctgagcagagttctgttcactcagacagaaaatgggtaaattgagagctggstccattgtgctccttagagatgggagcaggtggaggattatataaggtctggaacatttaacttctccgtttctcatcttcagtgagattccaagggatactgcagwgacagaacaagaataggctgcttctaccnnnnnnnnnnnnnnnnnnnntaagtaatggcaagcataatagctactgttaagaattcagagataatgaattgagaatggatattgcttgaaatgaaaattaatgaacatgaaaaaaatgaaaattaaaatgcctttcctatctcagcagggtttgtagcatcaggtcaaaaaaagtagtaaattaatacaatcttttcgtaaaagaatctttttttatcttttacttgacaatttcatatatgtagatccaaatccccctcccattccctccactaccttcatatcctcttttgnnnnnnnnnnnnnnnnnnnnnnnnnnnnnnnngcaacccactgaaaccagtaaggctttcttcatgttcctaggtgtggacaatccacyggagtatgggcaacctacagtggccacacctacacacacccagccaccatcagttaccagtggctcttcaactataggtggagcctaatgagcctctcctatgcatggtggaatattgactggattgatctacagacaaccatagctgctgtgagcttgtgagtgtaatggccatrtcctgtccagaagacagcattatatatacaacactcttccctatccttcaggcttttcactgtgtccaccacttcttcgtcaatgttctctgaaccataggcagggttcttgatataaatggtctattccgaattgagtaataaacaatcgtttattccatgcactttgatcagtcgtgagtctscatgctgactgctgtccacagcaaaaaggaacttcttctctgaccagagttatgagcagcactaatccagggtatgaacatagatatttagaaggtactttgaaaacccatccattttagcaaaacaacagtagtaagttcacccttagagcccatgaattccacnnnnnnnnnnnnnnnaccagttttacagtaccatacataagaattctctcttgtggagcaggctctcagatacaattagaaagaagttggttacactatagtagacaagccactactgcaccagtagactaatattgtarcattcgrggcctaccactaggtaagtccattaatgacttttctcccccagtgatatgcatagcaccttctgtcactgtgaaagctatccagtaagggggaagtttacaagtcaactccagatttaattctctatgtcctgcaaccacaatgtcttttgcctttaccatctagctgtggtgaccatccaagagcaatggcaataacctgtgttgtttgggaaacctctataaccaattgctcctaaggaggtagcccataccttgcactgagattttcatttaatgacctatgtcttcatttaataaccattgcccaccagtgtgcagggtactgcaattcagacttttttttttttagttataattaccttacaaagtagtggaatgctttgttttctcatacaggctcagatttagttaacccatagatacaaaagactatagatacagtcttttgaatgtgagtagtcaattcaaattcataatattctagatttggatccgtcga

SEQ ID NO: 435 - DNA, 1769 bp, Cricetinae gen. sp.
  misc_feature (200)..(225): n is a, c, g, or t
  misc_feature (748)..(763): n is a, c, g, or t
  misc_feature (765)..(796): n is a, c, g, or t
  misc_feature (801)..(823): n is a, c, g, or t
  misc_feature (844)..(885): n is a, c, g, or t
  misc_feature (1660)..(1688): n is a, c, g, or t
gatcacgagttcgaggccagcctcgggctacacatttttttctcctcgcctggggcctggctgcactttttcgtctctcccgtctgcgctcggctcctttgcttcggcctcttttgctccggcctcgtcttcagccccgctgcccgcttgccacaaccccccgttgccgttgccattgtccctgcctctgccccgtgcannnnnnnnnnnnnnnnnnnnnnnnnnactccaccgacgcggcctctccgcacgcttgcacaagcagcaaccagctcctcccgcttccctcgctctccgcgtcccgcgctcaaccgtggcccgccctcgggagaccccaccgtgcccttcagccctttctccggcgcctgcctcgccctgcctcgcctccccggctccaccagcaagcgctcccgccagaccgatgcgccgcaagccacgcctcctcgtcctcgcaagccgcacgccgaggtyyggcctcggtttccccgagcctcccgcgctccggctccgacttgaaggagacgccgccctctccgggggtgcgagtgccaccggggtcctccccgacgacgcccacgtcctctttggccctgcctgtgcgtcgcccccagtggcacagccactcctttggccttgcttggccttggcctcttcggggctctcattctcaccccaggccgtctccaacttttaggaaacaccacgccctcgccttagttcggaccacctcctccctcccttccttctnnnnnnnnnnnnnnnnannnnnnnnnnnnnnnnnnnnnnnnnnnnnnnnccctnnnnnnnnnnnnnnnnnnnnnnngtctttctttctctcttctcnnnnnnnnnnnnnnnnnnnnnnnnnnnnnnnnnnnnnnnnnnagtcgtgggagtggaataacattattaatagcaaaagtactcctagcaatagcaatactggtcctacaagaagaagaacattttcattttcgggcctactcccaggcaggtatttttcagcttgccttgcctgccttcattcggacatagggacaggaaccacggggagtcggtagaatgggatagcctggccagagggagcacgcagcgcgaccaaaaggcagcccgagtcacagcagctaacagggattgagataggttgcaaacctccgaggcttggcatcctttgaatacagactcaactgagacgtcgtgttcggttgaatgacagactgaatgatggtttgtttgtttgtttagtgtccttccgcagaaagaagccttggctttcgttccctgatggaatttggagttcagcgggccaccaagggtccctgccagtgctgccaggtgctgagaccctcggtggaaagaagccggttcagtgtctgtggctctgcactggtcgtgcccagtgtggattcccttggtggttgttcctgggctccatggccttgagggttgcacgcagggggaggcgtcgggtcgggtgcggagcaatatccagcctcgaccccagcaggcttgcgggcaccctctgagccgggtccttgccctcctattgctccccgagtttgtcctccagctcccggtgtatttcatggaggagcgacggctgttttgtaaccttccttgtgctgagtgcactttcttaggtgggcttgtcgggagaccnnnnnnnnnnnnnnnnnnnnnnnnnnnnngagatggatggaagcgtggatggatggttggttggatggatggttggttggatggatgggtgtgtgggtggatggatggat

SEQ ID NO: 436 - DNA, 5673 bp, Cricetinae gen. sp.
  misc_feature (4908)..(4927): n is a, c, g, or t
ggatcccctatcgcccgcgagggtggcgtccttgctggcgccccgcacggctcagggaccaataagaaggccgcgatgctggacctcgaccagctattggttggctcggccgtggtgagagatggtgcggtgcccgttctccgcccggggtgcgagcagtgggcggttgttaaggcgaccgttcgtgacgtaggccgtcaggccgagcagccgcccggcgattggctaggcgatcggacgatcctttctgattggcggccgctggcggccggagcgtgcgtaagcgcagttccttccgcccgaggctccgttgactggagacggcggctgggccggcttggggacctccattgagatccggaggtgagcgggcagactctggggaccggccgggcagtggccgcggggctggcgggcggcggagcccgcgctccgccagggctcacgaggtggctggggaccgaggggaccgcgagacgtccttgaggcccggcggcagggcgggggcctggggatccgggggccgtctaggccgctgagccagtgcagcatcgggacgtccgtgggtccagttcagagggctgtgtgccgaccgggcggtcacgtccttaccggtaggacgagtgtcaggcaggggggaccgcgggagcggatattcgtggagccctgggggacaagtgttcacgcccaggcgttgccttgaagcaggacctctttatagtgatagagaaggtcccggtgtaggctgcagattgacccaaagccagaatccgcgtggaaacggcaggttatgcctctcctagtgggccgggaggatgcgaggtcagtgcagcaaagccagccctcaaaagtctgtctcgctgcctgtatgtcttgtctttctcctaaggggcgtaggctcattgatactcatgtccttactttgcactccttttggaattacttggtttgagtgaggaagaccggaccttggaggttcgcaagttaaacaatagacttstgaggtaggaggaggttaatgtatyccatcttaagtartcatatggratattaacttacttgaggatgtgccttttcgggctaggtyctgtaaagccataggraacstttgyttctggkctttrctrctaagtcttygtgtacaattagagcatctcayagagaagagaatacgttcgtttacttgtgagttttaattttgggcaaagactcggatatactgtgaggttggactgcactttgtggacttgctttgttgtatgtgcctttctagaattggaataatttgtcaggaagcagacatggaaattagtgcgtgaaaagtagaaagaatccgtgcataaactatccgattaacataacaactggtgtgtatgtcatggctatttcaaggaaaagtgtgagcctgtgggggaacgtggcacttacacacacactatatttttgtctatagtctgggatcaacatctgtgctgttaaacccatatgaaattgttggtatgtgaaatcggactattttttaactcgaaaaatagtaattctttacggttgcacttaatactttggtcaaagaacttcaaaacaaagaaaagatggacttacaaaggggtaatgtataacgaggtcgggtatagaacctgttttctaatgcaagatgatgatcttgtgtgatggtaggttaagaaagcagaatgttacatcctattagataaagtaactgcagcataggttaggctcttaccctcaaaggacagcatgcatatattaattaatttgaggtcagtgtagatactattcaatcaaagattggaatgtgtgacacaggcagagtgctgagtgcattggaagaatcagaatcctttctgtaattggccgtgctgggtgggtctagtcatagattgagttggaatttaagaattccaacacatttagctaggcaaggtctacaaatgtacgggttcaaaggccaacttggtcaactaagtaatttgcaggacagccagagctgttacacagagaaatcctgtctctgaaaaaaaaaaagaaagaattccagtaaatttaaaatttcaaacctttgaagagtttgaaatgtttgctgtatactttatttggataagtaggcataatataccttgttttagttattttattttattgttcgaatacagcacaaaggttatttactgagcttttgtaaactgccacatagcccactggtgtcacctgtaaatcgtttgtagtcacagaatggaggtgcttgttagaggagatataatgtggttacttttgacacacctttgtagcattgctcagtttttatttccaggtaggtgctgttctctgtgtttggattgggttttctgtaacttctcccctgcccccaatataaaaaatatgaatttacagctagcaggggaaagtggtaggattgacagtgttccaggaatccagctggatgaaaaatcagatatatatgtgtgtaggtttgggattactaatttgtaattagttggggcccatttctgatagcctttcagattttaatttggccagaatcaactttaatgatgaatggatactactcagtaaggaagcatattcagctttggcggcaaatgaggggtggagaattggaagtgatttgacttagatttgaaactaatttaccttctgaagtcttgaagccaatccttcagaccagtttgcagtgtttcttaaaaaacaaacaaaaaaacccagagattatatgagagaagtcagtggacatgtttaaagttttcttactctaaatctaggccccaattaaaagcattttgtagttgtcatttttcagatatttattgatcagtgcaaaatgctggaaaggcaaatggtacagttcactgtgcaagactgaaaaaaatgaataaatacagataaatgtctattatatctttatgccttatgaataattgctgtcttttcaaaattgagacccacagtaagaaacacaaatctcagcgggactgtcatgaataatttcatgacaggtgaatgtatatattactcactcatgcttcctgtcttatctagcaactgcttttatgtcattttctattttgaattaattaaaactgttcttattgagaaaattgattcatgattaaattaatgtgttgtgaccaccttgaaccagtttactggcatgtctggtatgattgaaatgtagggggaaaatggagtgtttcagtttagagataatatttgctaatttgcttcattcttaaaagccaggcctctacctacccccccatacattattgccttcttttaactaaatttgttttttactgtcatcagtaagatagtggattcttaatatgtttgaattcttgctgacagtcagtggactcaatggttggttttcattttgtcttttgcattaaattgtgtgtgttagtgtgtgtgccagggcatgagtgtgaagatagagtacaggcctttggatgtgaggaatagtgaggcttagatgcaaatacgtttcccactgaatcatctcacaggccctagttgtgaaatcctaattgtgattgatttttatgggtaatattcttcatttttgttatgtaagaaataaatacggcttacacgtatccctgtaggccatcggaggccttataggtactttcaaataggaatgtcaaaattattaattagtcggcaagcatgggaaaagtggtagtcattaactcagttcttcttgctattattctgttgagaatccttttgtcagacaagttgttaggtttgttgttgttttgtctaacagagggcctttccctgagcagtatcttttctccccgtgggtctttgtacatgatatggacatacattttagccagtcatctgtttctactgactttccagtcttggttagctgtaaaagtttaggaacctttcctaaacttaacacatttaaattggttttatagccctgtagtttgcctgggagaaaagccagccatcctagcaaaatgcaggccacttctttactaatgtagaaggcatctatcagaaaagacttatggggatagtcatcttagggcagtttattagtttattagacattgtgccagtgatgttctgccaagtgttttatagaataaaatgggtaacagggtcttgcttataaatcaccatgatttatggcaagaaatcaagaaacttcattgatgttacctttttttaaccatatggatagtgaagagggtgtttatgggttttctatttgaataagtagaaaatatgaatacttgtttggggttatgcttgaaacttacttttaaagaaacaattgtatagaagttggttgccagtgagtaataaaagatttaagtgtttgaagaagtagcaagagccgttttaaaagaatattacaattacttcccagaaatatgtggaacactgaaatagtcctctgtgtaagatgctccacatggggcttacagcatccttttgttttcctgaaagtgagctgtatgctaaatgttcatatgtggtgtttccttcaggatcsrgggaccgagtggctacaatgttgtcacgacttttccgtatgcatggcctctttgtggcctcccatccctgggaagttattgtggggacggtgacacttaccatctgtatgatgtccatgaacatgttcactggcaacaacaagatctgtggttggaattacgagtgcccaaaatttgaggaggttagtgagattcatttgattctgactaaagtaaattacattgcaatttctaaagaatgtctgctttttagagaacatataagctaagaattctgagtgaagtcttagctggtgggcttacctcagattctcagctattcacatggtatggattgcatttaaaaatnnnnnnnnnnnnnnnnnnnnactagttagagtgggtggctctgggaaatacaccttttgtaaggactatcaggggaaaatgactgaagaattacagattgcttaataattgtattcaatttttttatttctgtgttggctattttgatttggttgtactatgctggcatttatattcttgtggtaacatgtaaaccaatgatacagaataaaagtcttgcttttgagaacttctttgaaagtgctctctctgccaataggatgtattgagcagtgacatcatcatcctcaccataacacggtgcatcgccatcctgtacatttacttccagttccagaacttacgtcagcttgggtcgaagtatattttaggtaatactgattttcccctttgcatgctgtctgatttgctgtgggaatttctaattacataatgccgttaaaagtgttgggacgttcagtagttaccagattctccttagtaaatattctcaaatctaaagcctcagtaacatggaggaaagtgaaattgttcttatcagaacagtgtatgagtctaaatgttggcctttgtgcaataaagagttctgagtgttgaattttgccattttaggtattgctggcctgttcacaattttctcaagttttgtctttagtacagtcgtcattcacttcttagacaaagaactgacgggcttaaagtaagtatttaaagctcaagtgtatgttctctaaaatacattttaagaacctttatttcctgtgtt

SEQ ID NO: 437 - DNA, 1016 bp, Cricetulus griseus
cgggacgggtccatacggcgttgttcttgattcccgtcgtaacttataagggaaacttacacaatgtccggagccctcgatgtcctgcagatgaaggaggaggatgtcctcaagttccttgcagcaggaacccacctaggtggcaccaacsttgacttccakatggagcagtacatctacaagaggaaaagtgatggtatctacatcatcaatctgaagaggacgtgggagaagctgttgctggcagcccgggccatcgttgccattgagaaccccgctgatgtcagcgtcatctcctccargaacactggscagcgagctgtgctgaagtttgctgctgccaccggarccactcyaattgctggccgtttcactcctgggaccttcaccaaccagatccaagcagccttccgggagccacggcttctagtggtcaccgaccccagggctgaccaccagcccctcactgaggcgtcttatgtcaacctgcccaccattgctctgtgtaacacagactctcctctccgctacgtggacattgccattccgtgcaacaacaagggagctcactcggwgggtctgatgtggtggatgctggcccgggaagtackccgtatgcgtggcactatctcccgtgagcacccatgggaggtaatgcctgacctttacttctacagagacccagaggagattgagaargakgagcaggctgctgccgagaaggctgtgaccaargaggaatytcagggtgaatggactgcgccagctcctgagttcactgctgctcagccagaggtggccgactggtctgagggtgtgcaggtgccctctgtacccatccagcagtttcctactgaagactggagtgcccagccagccactgaggactggtcagcagctcccacagcacaggccactgagtgggttggagccaccactgagtggtcctgagctgctctgcagacagctcagcaaagggaaaaaaggtggaaggaaaataaagttcttacaagttg

SEQ ID NO: 438 - DNA, 5965 bp, Cricetinae gen. sp.
  misc_feature (3616)..(3808): n is a, c, g, or t
  misc_feature (4690)..(4729): n is a, c, g, or t
cccttttggttaacagattagtaattcattaatttatgatgaagactgtaagcagctggttaacctattctttgaattttatgatattcattgattaacaccttaacctgtaattacatatcccctgggttcatattaaactctaccctcagcttctatttatagcattacctagtcgttttactcaattatattataccatgtgttgctactaaactctacgtcaaaaaaatctaaacctggaatagtggcaatggttcaatagattaagtgactgctgttcaagcataaaaacctgagttcatatatccagcacccacataaaagctaggcatggtataacacttctaggacagccggtgttgggtgtaggctatgaaaagggtcaactaagtcaaagatgcaagctctagatccactgagtgactttgtttcaaaaaataaggtagaggccacagaggaagccatgggataatgacctctggcatctttgatattaaccttattgtagtgacttgaatgagaatgaccccaataggtttgtgtatctgaatacttgtacctcagctgatagaactgtttgagaaggataaggaggcaagaccttgctagaggaggtctgtccctgggagtgggctttgagatttcacaggactcatgctgttcccagtctcccattacctgtctgtcttatagttgtgcctcaatatatgggctcccactactcttccagggtcagtcatgccttcctacctgctaccatgcaccccaacatgatagccatcaactctaactctctgtaactgtaaacctaaacaaattcttctactagttaccttgaatatggtgtcttatctcagtaataggaaaataactaagattttttaagagtccaaaaaagtgaaaataatgtatagttgggccttcagaaaagttttataaaggagatcacttttgagattaattttgaagaacatttaggatgtgaataaaaaatataaaagagaatttgaaggcaatgaatagaagtaacaaaatcaggaaagctagtcataagtgaagagcaacaattagagatgtttgatttgagaatagggtttattaggagatcataggcagtttaggatgattctggaggtagcattgactttcaagtggaaggactgggatttaatctaggagataatgtgatgtacaaccccaactaactctagtattcacccatagtgtgcaagtcagataagactctacaaccttatattcaacttagattagaaaaatagtagaaatagctattgcctagagatgaggacttggagaataatgagagaactggagagagtcaattacccatggtagttactatgtcattgaaaaggttaattaacctgaggtgagctgagaggaaagagggtaaataataagaagctagacaaaaaagaatgggaataaagattctatagactttagaggwragarwgrraawcargmaagcagamaskskmarwarytrwgtwtgwyakcwwaracagcywagtcrtgatgagaagtragaaagtttaggrtaagaaagcatsatgagtcattaaggaaaggctgaatgacaatagtagaaaacyaktaagcttcaaagcaaacagaaaattttgcttcacaactgyytttatcctcttagtaatgccygratacgtycattcctcmatawttaattaatmaaatacaaagggacraatagacwttttagagtttaaccgaaaatagatactasarkktmctwyscaggtwrctttmswwggtatgcaattgccctrttcccatatccctttctggmraagyayrgggtcatgmgatggararccagywgcaaaatsgaacaaggccktmctcatgttgccaasctgrccccttgytycatcytgtaggaccttgtagctctgcagctcccctcttmcyagaaataaaatctgggtcayrggrgttagaactcyagcattgacttgtgtctaatgaataacttccatygayttcccacctaggrgaatcagcattcytwttccaacaacagctrtgattattggcagaaagraggrggaacctgggaaggctkctctccacccctcaacatcatcaaaggcacatataaaacctgaatrcttggagccttmagastggtagtgggcagcyryctttctgtctccyactcragtagactgctgctgtcatagccctggacwragagcatggacaagmtgctgyysctgcttggggtgtctatacttgcagkcctsctttyagaagyctttgctcagacaggtaagaaatttaggctacagtcagggagagaartcgatyttgagctattgtttctctgaatttgytgaaactyactatrtctwwctyatakcctcacagacctcacaggaaaggtatttgtgttccccagasagtctgaaastgattatgtgaagctgatmccacgwytggamaaaccwctgsagaacttyacastgtgttttcgarcctatastgacctttcccgccctcacagtcttttctcctacaatrcwragwacrragamaatgagctgctaatttataaggaaagaatkggagaataygraytgtacattgraaatswgggarccawagtycrtggggtggaagaatttgcttctccrgtrcatttctgyacyagttgggagtcctcttctggcattgctgawttttgggtcaatgggawaccttgggtaaaaaagggtytgmagaaggggtacactgtgaaaamcmaacccagtattatcytaggacaggarcaggataattatggaggagggtttgataaktmccagtccttygtrggrgagatkggggatttgaacatgtgggactctgtgctgaccccagaagaaattaaatctgtataysaaggtgtccyscttgagcctaacattctrgattggcrggctytgaactatgaaatgartggctatgcagtyatcagrccycgatgtgtggcattaagctcttacaacaaaatctcatgaaaatgaaatgayyaatgtccaagaggtcaartcagcacaackyracacttaatcctgaatctgcagccttttctyccttgtgarcttcctgyctacttatctgsctaataaaawattrtcmarttctgcctgyatwytttgccacttgayrtaatctcaaatgctttctttkagatytwctmswaaacttgagttgtaaaatggggaggtggaaaattaacagaggaaaatggcaacacttacagcttcgataatcaatttaataataactcaaaatatgtataaaattgcagtagaaatcattccatttgtttatccaaacacaagtcaataaaatgcctgatattactcaagggacacacaactataataagataggtaaatgacagttgaggactagacagcaaataatgagatgggaaatccaggataagaatgaaaatgaaataaaagaaacagattgttttgtacaaagaaaaacatgattgatgtctcagaatcccagggtgattgatgaagagcacctggctttgtaatgctaccagatgtcatcagagcagaacatagctctnnnnnnnnnnnnnnnnnnnnnnnnnnnnnnnnnnnnnnnnnnnnnnnnnnnnnnnnnnnnnnnnnnnnnnnnnnnnnnnnnnnnnnnnnnnnnnnnnnnnnnnnnnnnnnnnnnnnnnnnnnnnnnnnnnnnnnnnnnnnnnnnnnnnnnnnnnnnnnnnnnnnnnnnnnnnnnnnnnnnnnnnnnnnnnnnncaattataagccacaatggaaccaatcgtacagcaaagataatacataaaaatctcagcaagcatatgagtttaaaatctacaaaaaacacatttgtgcattttatgttggcttctactgctggcacggggccttgtaagtgtcatttatatacctagtgactccactggtgaaaactgatttttcctttgagagatagctccctagttatggatggaaacttatgtccacttcctcatttcagttcttggacctcatatggcttgaacctgtactggccctgaacatgctaccatagtctctgtggttcatatttgtgtcagtctctgtgaatggaaggccttgtttccttggtgccctttgtacccactggcttttctttgtgtccttctcccctcctgtaatagttccctgacctgagggaggatttgatgatgccttcccatttagactgagtggtatctgtattagtccctagctgctgcaggaggaagcatctctgatggttgaattaaatacccatattatagttcaggtttgctttatggtttttaatgttaagaaacctttctagggcctcagaggtggttccacaaataagaacactgcctgagcaagcatcaggacctgagttcagatcccagcacctacatcaaaagccagatgctgccatatagacctggatctccactgttgggcctggaaagtggagacagaaaatcactgggaactcactggtcagagagttcatctaaaaaattggtgagttccaggttcagttagaaatcctgtctcaaagggatatggcagagaacgacagagcaaggcaccacatctttcttttcctcctcacatacatacacagatacatgcacgtgcatnnnnnnnnnnnnnnnnnnnnnnnnnnnnnnnnnnnnnnnntgtacacagatgatatacagagagaaattttcgatagacatgtactaaaaacgcctatctattcttggtaattggtatttctaccaaaaacatcgaaacgacattgtttgccttaatcttgcatctccatagtaggttgtttttgttagcatgccctctgcaaataacataaaacaaatttgagaaatgaacccgatactcaaattgtagcatccatttttttaatatttattgagacacaattccattccagcatgatggccagctactggaaatgttatactggtgaataatcatgcacttgcctttttggggttatattctggtaagtttgtgttgtctagtatggatcccttccaacaataatcagcctgtgccataatccatccttcacatcttcaggcctctcttctgagtaacatgctcctgttcccctcaactccatctatcatttgtaatatcgattatgtctggtagatccaattcggacccagtctcttgcacataaaacccctgcctcttagatagctctttttagtagaatccaagataatgatgcatcagttctttcagttgtgtggcccaaacttcatctcaaagaaacactcatgcatcctttagtcctgtaaattctaggagtccatgatgatcttaattcagtatactatctgctccacaatggaccctgtcctcctcaaggttctgtgaggtccttcaaataccaagaaggcatgttgcagctttgcggttccatggactgtctcactaagcctgaagtgaaagaagctgaaagacaaataaccatcttctcaagaagccaggtatatgacccatgactccatcaagcaacaactcaaagcagtacctctctctaaacaagttcttccccttccctgtagtctgtcacaccttgttctggctgaggaatacaagcatcacagattcttaatcatctcctttgtcaattcttgtatgtggaattgtgtggttattattatatcattattatctaatttatattattcattattcattcaagactaaagaaaaagtgtccctccaagagtcaaaagccatctaacaaaaactcaaacaccaagcacaaggaagaccctctttttaattgtttgtcagagttgtccaagaaactctcaagacattataggctattgctattgccattggttgttccagcaggggtagaaattaagtcactaatgctgaagatatgaattc

SEQ ID NO: 439 - DNA, 3298 bp, Cricetulus sp.
  misc_feature (1820)..(1842): n is a, c, g, or t
  misc_feature (1932)..(1959): n is a, c, g, or t
  misc_feature (3238)..(3273): n is a, c, g, or t
cgtgactggtcggccgtgtgggtgctgcagccaacgaacccggcggcggcggcggcaagggaagcgagcgggaccccgggctccgaggaactgcggcccgcgccgccgcgtcacgcaccctctgggcgccgcgagacacacataacgataatagatttgcattgcattttgggattcatctacacttaaaatgccacctgcaattggaggaccagttggatatacccccccagatggaggctgggggtgggcagtggtagttggagctttcatttctattggcttctcttatgcatttcccaaatccatcaccgtcttctttaaagaaattgaaggtatattcaatgctactaccagtgaagtgtcatggatatcatccatcatgttggctgtcatgtatgctggaggtcctatcagcagtgtcctggtgaataaatatggcagccgtccagtaatgatcgctggtggatgcttgtctggttgtggcttgattgcagcttctttctgtaacacagtgcaggaactttacttgtgcatcggtgtcattggaggtcttgggcttgctttcaacttgaacccagctctgaccatgattggcaaatatttctacaagaagcgaccattggccaatgggctggccatggcaggcagccctgtgttcctctctaccctggctccacttaatcaggctttctttggtatttttggctggagaggaagcttcctaattcttggtggcctcctactaaactgttgtgtagctggatccctgatgcggccaatagggcctaagccaggcaagatagaaaaactaaagtccaaagaatctcttcaggaagctggaaaatctgaggcaaacacagatctcatgggaggaagccccaaaggagaaaagcgatcagtcttacagacaattaataagttcctggacctgtccctgtttgcccacagaggctttttgctgtacctgtctgggaatgtagtcatgttttttggactgtttacccctttggtctttcttagtaattatggtaagagtcagcattactccagtgagaagtcagccttcctcctttccattctggcctttgttgatatggtagccagaccttccatgggacttgcagccaacaccaagtggatcagacctcggatccagtacttctttgctgcttctgtggttgccaatggagtgtgccatttgctagcacctttgtctacaagctacatcgggttctgtatctacgcgggagtctttggatttgcctktggttggctcagctccgtattatttgaaacattgatggaccttgttggtccccagaggttctccagtgctgtgggcttggtgaccattgtggaatgctgtcctgtccttctagggccaccacttttaggccgccttaatgacatgtatggagactacaaatacacgtactgggcttgtggcgtgatcctcatcattgcaggtatctatctcttcattggcatgggcatcaattatcgacttgtggccaaagaacagaaagcagaagagaagcagaaacaggaagaaggtaaagaggacgacaccagcactgatgttgatgagaaaccaaaggaattaacaaaagcaacagagtccccgcagcagaatagctccggagaccccgcagaagaggagagtcctgtctgaactgaagcatgaatagagcagtgtgtgacccaagacatctgaaaccattctgctggcctctagtctaccagtggtgctcaatgcagacagtggacatttgtgtggaaaacctaccaggtgttcattggtggaattttgttttgtnnnnnnnnnnnnnnnnnnnnnnncactccttaccaatgccagagtttaaaatttactatgctttaggtagggattggttggcaaaggatatgggaaagaagtgtagggatttnnnnnnnnnnnnnnnnnnnnnnnnnnnncttagcttttaacagtgtcatgaagattatawtrwrwgcctyawgttkwarttttagaactctttagagagccttaacttttaaaatcattctgctgaattcatctattwkwaatgttttaaaaggaaaaataacaactaacttgcttgaggtaactctaaccttaatcttgttttgttgttgtttgtaatgctttgtcagagattgttactggaacatttatggataaaaatactagttaaaagttggaggtttataaaatactgactaaagtatttttctagcatcatagttgcctckagtaggtgcctgctargtatatmtttaasaaatttaaagcatgaaattctggaaacatcttggctgttatagccacagtctgtctgtctgtcatctgctggrgacttctcaratgcttactgcaagcctagtgctasaatgttgtcactaaattgctaccttgctcctcttcagagacattgagtggttacaggtcattgccatttttgaaatctactgcaaaaaagttagtattaaaatctacaaaacttttaacacagtctgatttaatatagacaggtatttcaggcatctgctaaattcaktttarttttccaaaaccctasttatggtatgaaamtcttgyaatctttgagtatgtgtgggttttggggggcctggtggttctgakgattgaacccagggccacaagcatgctaagcacatgctgtaccactgagccacatcccaccagcaccctggaatcctccttaaccccgagacctttgctctttgatttttgatagttccatttatatcctagtttagagctgtatgcgagatatcagtatggactaaatgtgtgtgctagttttgttttttacattgtttttcagtatttgcaaaaccaagagggccagagtttggccccggggaagccaataaagataaaatagggagggagtttgctgagttcacttgatttcagtaagtacccacctccctgccacatacaccaaggcttaaagagaaacttatatcatgcttagaattattggacatagccttacctctacaaaccttagctttcgtgacccttttcacttacctgaaatatagaaaatgggttcaatgtaaggataggaggaaggatgggcaggattggaattgtagtattttttaaaaccaatatcttctaaatagagacagaaaagatatatgacactaaattgtactcaatgcatctaaaataccattgtaattgacggggtgaaaatannnnnnnnnnnnnnnnnnnnnnnnnnnnnnnnnnnnaataaaacatttattttatttttag

SEQ ID NO: 440 - DNA, 2972 bp, Cricetinae gen. sp.
  misc_feature (1666)..(1667): n is a, c, g, or t
  misc_feature (2516)..(2534): n is a, c, g, or t
  misc_feature (2775)..(2791): n is a, c, g, or t
ctggcagtcgggagctgactccagccggtggaacctgcagccctcgctcactcaggacagcagcacgctgggcagacgcctgggacaggaaagcgcagcccaatcagcagagccggcccgcagctccgcgcaacccgcaactccgacccgcgcagcccgcggagctcccgccgccggtctgggcagcatgagrcgcgcggcgctctggctctggctctgcgcgctggcgctgcgcctgcagcctgtyctcccgcaaattrtgrcygtcaatgtgccycctgaggatcaggatggctctggggatgactctgacaacttctctggytcaggcacaggtgctttgccagacatcactttatcacggcagrcttctyccactttgaaggatgtgtggctcctgacagccacacccacrgctccagagcccaccagcagggacrccsaggccaccwycacctccatcctgccagctgsagagaagcctggggagggagagccrgtgctcayrgcagaagtggacmctrgctycaccrctygggacaaggartyggaggtmacyaccaggcccagggagaccacacagctcctgrtcacccatygggtytcaacagccagagccaccacagcccaggcacctgtcacatctcatccccacagagatgtgcaacccggcctccatgagacctyggckcccacagcrcctggccaacctgaccakcarcctccaagtggaggtacttctgtcatcaaagaggttgccgaggayggagctaccaatcaacttcctacaggggagggctctggagagcaggacttcacctttgagacatctggggagaacacagctgttgctgccgtagagcctgaccagaggaaccagcctccagtggatgaaggagccacaggygcctctcagggccttttggacaggaargaagtrctgggaggtgtcattgctggaggcctggtgggrctcatctttgctgtgtgcctggtgggtttcatgctgtaccggatgaagaagaaggaygaaggcagctactccttggaggarcccaaacaagccaatggcggtgcctaccagaaacccaccaagcaggaggagttctacgcctgatggaggaacggttctccccccacccccagcccctgccactcactaggctcccactcgcctcttctgtgaaagacttgggccccggcctccacactgcgttgcctcctcagcacccagacccttccagctgttcctgcctcagcagtcccagggtgtgctgggactacattctacttctttgacttctgcctagaagcttgggtgcaaagggtttcttgtatctgaccttgctaccacagccacacctgatgtccactattcygacttggtttctccmaatgggaggagacccagctytggagagaaaggggacccaactgctttggacctagatggctggaggaatcgggggacaggagagggkcttcggctgacgtgccatagcacttaycyrttgagaccgytagggtyggccatgctgtgggtaggggatggagtccagrgctccttggaattcacttcacattgtggggaaktctactttagatrtcaacttgtttttgcacatgtttcctctagtttctctgttcagagccccaggcgactttnnttctggggtaaggcaagtcagttgactggggtccytcacctcgcttcccyaatctacattygggcracmgcatcggggtcacttaagactttctgtttttgtttttaacctagaagaaccaaatcckgatgccaaaacgtargcttagyttgtgtgttgtctctaagtttgtcgctcatgcgtgcaacagggtatagactattctgtatggtgccccatttttttggtgattcataagtaggctggctagtccaggacgccatggggtagccacctcctgaccagtcatgcctgtgtgcataaactcagggccatgaccgtggcctgggccactgtgacatcagaagagcctgtgtgagaacttaactcctatagcacagtctagggatggaggggaagaagactgtggggtgggggaggggtggcaaggatgcccaagactctcctgcctttggtaccatctctggtcacctttctcccggaagttgacaagacacatcttgagtacagctggcgctggctcctccaagaaccaagttcaccttcagctcctgcggccctgccccaggctggagtcagaaatgcttcccaaagactgagagtcttttgcttttggcaaaacgctacttaatccaatgggttctgtacagtagattttgcagatgtaataaaccttaatataaaggagtcctatgaactctactgctttcgtttcttctctgggctggtggtgtagatatagccagccttctctcaaaccctggtagctcagggaagcttggctcaaggctgcgtgcctccaattgtattctctgaggggtaggatcctgggtccaggattcctcttannnnnnnnnnnnnnnnnnntgttttcttttggccaaacttcttttgaaagttggtaggatcagccaaggttttacagggcctgatgtctgctcttgtaaataagtggtataagtaactgggactctagcataacttgacctggggccaccagagtcacacttggtttgcagagcagacacctgggacagcgttcctcccgtgtgtttgccgggacacttttccgaggactccttgcttatttagcacaacaatgttccannnnnnnnnnnnnnnnnccgttggcccagctagacaagagacctgtgccccgtgttccatcccagaacttgttgccagcatataatggctggcggggggtggggtgggggtggggtcagatctgagacagcttgtgagaccctcaggctgggcccattcgtgtaattgcaataaatggtacgtgtccatttggacagc

SEQ ID NO: 441 - DNA, 761 bp, Cricetinae gen. sp.
ctgcacccaagattctttcctgtcacctcagctcggagtccgtgtctccgtctacgcagcagccatgccgccrtacaccattgtctacttcccagttcgaggrcgctgtgaggccatgcgcmtrctgctggctgaccagggccagagctggaaggaggargtgrttacygkagawwcctggrkgaaaggytcgctcaagtccacctgtttrtatgggcagctccchaaatttgaggatggagacctcaycctgtaccaatctaatgccatcttgaggcacctgggycgatccttrgggctttatgggaaagaccagarggaggctgccctggtggatatggygaatgatggggtggaagaccttcgctgcaartacrtcaccctcatctacaccaaatatgaggagggcaaggatgactaygtgaaggccctgcctggacacctgaagccctttgagaccctgctgtccmagaaccaagggggcaaagccttcatcgtgggygaccagatctcctttgysgattacaacttgctwgatctgctgctgatccaccaggtcctggcccctggctgcctrgacaacttccccctgctctctgcytaygtggcwcgdctyagtgcccggcccaagatcaaggccttcctgtcctcycctgaccatgtgaaycgtcccatyaatggcaayggcaarcagtaatggacagaagaaacagcatctgtctgtccccttttctatggctaataaagtgtgtagacaaaga

SEQ ID NO: 442 - DNA, 2370 bp, Mesocricetus auratus
  misc_feature (1048)..(1065): n is a, c, g, or t
  misc_feature (1219)..(1236): n is a, c, g, or t
  misc_feature (1615)..(1629): n is a, c, g, or t
ggcacgagcacagccacagcacctgccttgagtctgtctcggcccccttcccgcctgctcaccaccatcatgaccccaggcatccgggctcctttcctcctgacgctacttctagcgcttgtaacagatccaaacagtgtcgccttatctcaggacaccagcagttcctcaaccttgaacaccacccctgtccacagtggttcctcggctccagccaccagctctgcagtggactcggccaccactccaggccacagtggttcctcggccccacccacaagctctgcagtgaattcggccaccactccaggccacagtggttcctcagccccacccaccagctctgcagtgaattcggccaccacccccgtccacagtggttcctcagccccagtcaccagctctgcagtgaattcggccaccactcctgtccacagtggttcctcagccccacccaccagctctgcagtgaattcggccaccactcctgtccacagtggttcctcggccccagtcaccagctctgcagtgaattcggccaccacccccgtccacagtggttcctcagccccagtcaccagctctgcagtggactcggccaccactcctgtccacagtggttcctcagccccacccaccagctctgcagtgaattcggccaccactcctgtccacagtggttcctcggccccagtcaccagctctgcagtgaattcggccaccacccccgtccacagtggttcctcagccccagtcaccagctctgcagtgaattcggccaccactcctgtccacagtggttcctcggccccacccaccagctcagtagtgaattcggccaccacccccgtccacagtggttcctcggccccacccacaagctctgcagtgaatttggccaccacccccgtccacagtggttcctcgactccagccaccaactctacaacagactcagccaccactccagtcccccctggttcctccatgcaaaccaccgaggctatatcaggctcagctaacactccaatccacaatggctccttgnnnnnnnnnnnnnnnnnngcactggtccccactaccagtgcagcccacagtggtgcctcagctatgactaatagctctgaatcagacttggctaccactccaattgacagtggcacctctatctctactaccaaggcccctgccaccaccccagtccacaatggctccttgnnnnnnnnnnnnnnnnnngtgttgggctcagccaccactctgatccataatgacacctctacaatggctactacaactccagttggcaatggtacccaatcttcagtcccaagccggcaccctgtgactcccacccctcctgccgtctccagcaacagcaccattgccctaagcacttactatagcacggccctctcccctgccttctccagccatgctgcaccgcaggtgtctgttggagtctctttcttcttgttgtcttttcacatttggaaccaccagtttaattcttccctggaagatcccagctccaactactatcaagaactgaagaggaacgtctctggattgtttctgcaggtttttagccgagctttcctggggatctctaccatcnnnnnnnnnnnnnnntccgtggtcgtagactcgactgtgattttccgggagggtgctgtcaatgcctctgaggtgaagtcacagcttttacagcatgagcaggaggcagaagagtataatctggccatttcaaaaatcaacgtgggtgagatgcagtttccttcctctgcccagtcttggcctggggtaccaggctggggcattgccctgttggtgctggtctgtattttggttgctttggccatcgtctatctcattgcattggcggtgtgtcagtgccgccggaagaactatgggcagctggacatcttccccayccaggactcctaccatcctatgagtgaataccccacctaccacactcatggacgctatgtgccccctggcagtaccaaacgtagcccctacgaggaggtctcggcaggcaatggcagcagcctctcttacaccaacccagtagtggcaaccacttckgccaacttgtagggcaagccacccgcgcagggcagctgtgtagtctgccctcagtcttcactgccagccccccccccccctgcactctgatctgggctggtgagccagagttctgataggctgttcccagccttcctgacacgcgcctggtgaagcccagccctgccctgggggacaccctggggcaggggttcagtggtgactctcaggaggactgacctagaaaggctggggacggagatgggaacccaagcctggctgaataaaagctggcctcctgtt

SEQ ID NO: 443 - DNA, 1628 bp, Cricetulus griseus
  misc_feature (587)..(601): n is a, c, g, or t
  misc_feature (726)..(739): n is a, c, g, or t
  misc_feature (741)..(753): n is a, c, g, or t
acctcattgcgttacttacctcgactcttagctgtcgggaacggtaaccgtgacccgctgtctgcttttgtcaccttcgccttctaacccgtmgmyaccaygcgtgrgkgcmtctccatccacgttggccaggctggtgtccagatcggcaatgcctgctgggagctctactgcctggaacatggsatccagcctgacggccagatgccaagtgacaagaccatcgggggaggagatgactccttcaacaccttcttsrgkgrgacargcgctggcaagcatgtgccccgggccgtgttcgtagacctggaacccacagtcatcgatgaagttcgcactggtacctaccgccagctcttccaccctgagcagctcatmmcaggcaaggaagatgctgccaataactatgcccgtggccactacaccatcggcaaggagatcattgatcttgtcttggacagaattcgyaagctggctgaccagtgcacaggtcttcakggcttcttggttttccacagctttggtgggggaactggctctgggttcacctccctgctgatggagcggctctctgtcgattatggaannnnnnnnnnnnnnnagttctccatctacccagccccccasgktttccactgctgtggktgagccctacaactycatyctyaccacccacaccaccctggagcactctgattgtgccttcatggtagacaacgaggccannnnnnnnnnnnnncnnnnnnnnnnnnncattgagcgccccacctacactaaccttaaccgcctcattagccagattgtgtcttccatcactgcttccctcagatttgatggagccctgaatgttgacctgacagaattccagaccaacctggtaccctaccctckcatccatttccctctggccacatatgcccctgtcatctctgctgagaaagcctaccatgagcagctttctgtagcagagatcaccaatgcctgctttgagccagccaatcagatggtgaaatgtgaccctcgccatggtaaatacatggcttgctgcctgctgtaccgtggggatgtggttcccaaagatgtcaatgctgccattgccaccatcaagaccaagcgcagcatccagtttgtggactggtgtcccactggcttcaaggttggcattaattaccagcctcccactgtggtacctggtggagacctggctaaggtccagagagctgtgtgcatgctgagcaacaccacagccatcgctgaggcctgggctcgcctagatcacaagtttgatctgatgtatgccaagcgtgcctttgtgcactggtacgtgggtgagggcatggaggagggggagttctctgaggcccgtgaggacatggctgccctagagaaggattatgaggaggtgggtgtggattctgttgaaggagagggtgaggaagaaggagaagaatactaatctattctttctgcccctggatcatgtcaaactcctagaacttcagcttcaacattagctgataggcattgattcctctaattgtgtcatcttcattctgtgatcatgtatttgtctgtggccctgtatggtctttccatgatgtctcaaagtaaaaagctttaagacactt

SEQ ID NO: 444 - DNA, 2474 bp, Cricetinae gen. sp.
  misc_feature (1416)..(1430): n is a, c, g, or t
  misc_feature (1555)..(1579): n is a, c, g, or t
  misc_feature (2001)..(2018): n is a, c, g, or t
cgtccggaaaaagtaaccaaaccgcccgtggaccagcaacatggcgtggtccgctaataaggcagctgttgtgctrtgtatggatgtgggcrttgcyatgggtaactcttttcctggcgaagaatccycgtttgaacaagcraagaaagtgatgactatgtttgtccaacgacaggtgttttctgagagcaaggatgagattgcyttrgtcctctttggaacagacarcactrasaaygcccttgctagtgaggaccagtatcagaacatcacagtgcrcagacacctgatgctaccagattttgatttgctggaagacatcgaaagcaaaatccaactaggctctcgacaagcygacwtcytggacgccctgatygtgtgcatggatttgattcagcgtgaaacyatagggaagaagtttgrgaagaagcatattgaagtgttcactgacctcagcagcccattcagccaagatcaactggatgttatcatttgtaacttgaagaagtctggcatctccctgcagttcttcctgccttttccaatcagcaagaacraygagactgggsacagmggagatggtgacttgggcttggaccacygtggaccctcctttcctcaaaaaggarttactgagcagcaaaaggaaggcatcygcatggtggagagggtgatggtgtctttagaaggtgaagatgggctggatgagatctactccttcagtgagagtctacggcrgctgtgtgtctttaagaagattgagaggcgctcyatgccctggycctgccagctgaccatcggcccygatytgtctataaagattgtagcctataaatcgatcgtacaggagaarsttaaaaagasctggrtagttgtggatgcaagaacyctraagaaggaagatatacagaaaagaaactgtctattgcttaaaygaygatgacgaaactgaagtttccaaagaggacactattcaagggttccgctacggaagtgatataattccyttttctaaagtggatgaggaacaaatgaaatataaatcrgaggggaagtgcttctctgttttgggattctgtagatcttctcaggtccacaggagattctttatgggatatcaagttctraaggtctttgcagcaaaagatgatgaggcrgcggctgttgctctytcttcccttattcatgctttggatgaattaaacatggtcgccatygttcgatayrcttatgacaaaagagctaatcctcaagttggtgtagcctttccttatattaaggattcctatgagtgtttagtttatgtgcagctgcctttcatggaagacttgcggcaatacatgttttcatcactgaaaaacaataagaaatgcactcccacagaggcacagttgagtgctattgatgatctgattnnnnnnnnnnnnnnngtaaagaaaagcgaggaagaagataccattgaagacttgtttccaacctccaaaattccaaatcccgaatttcagagatttttccagtgtctgctgcacagagtcttacatccccaggagcgtcnnnnnnnnnnnnnnnnnnnnnnnnngaatatgctgratcyccccactgagrtgaaagccaaatgtgagattcctctctckaaagtgaggacccttttccckctgacagaagccgtcaagaaaaaggaycaagtgactgctcaggacattttccaagacawtsaygaagaggggccygctgccaaaaartgtaagayrgagaaagaagarrgtcacatcagtatctctagcstggctgaagggaatgtcaccaaggttggaagtgtgaatcctgttgaaarcttccgtgttctagtgaggcagaagattgccagctttgagsaggcragtctccagctaataagtcacattgagcagtttttggataccaacgaaacgctgtattttatgaagagtatggagtgcatcaaagctttccgggaggaggccatccagttttcagaagagnnnnnnnnnnnnnnnnnnctggaagcccttcgagagaaagtggaaattaassaattaaatcatttctgggaaattgttgttcaggatggagttactytgatyaccaaggatgaaggcyctggaagctctgtcacaactgaggaagccacaaagttyctggctcccaaagacaaagcaaaagaagatkcagcaggacttgaagaaggtggcgatgtggatgatttactggayatgatatagacyrtggatgtgttgggaatcyaagcatgccatctccgttgctgagagctcagaaagagcatcctggaagccattcagggggacctgaagccctggtgatcattccagcagacagctcaggagcgaatcactccaagtctctacagaatgaccacatccacatatattacaaggggtaacttagaccctatccaaatttataaagactcactattttttgattgaaaaaaaaaa

SEQ ID NO: 445 - DNA, 748 bp, Mesocricetus auratus
  misc_feature (578)..(611): n is a, c, g, or t
ccagctcagccctgtttgtgtttctcttttcttagctcagtgagtactgggtatgtgtcaccctgccaaatccctgatcacaagtctccatgaactggcggtgagctgggataataaaacccctgacatcaccattccagaagcttcacaagactgcatatataaggggctggctgtagctgcagctgaaggagttgaccggccaactgaccmtacattcacctagccaccatggacatcgccatccaccacccctggatccgccgtccctttttccctttccactcccccagccgcctctttgaccagttcttcggagagcacctgttggagtctgacctcttctcaactgccacttctctgagtcccttctacctgcggccaccttccttccttcgggcacccagctggattgacactggactctcagagrtgmgkmtsswswakgrcmswtyctssgtcaacctggatgtgaagcacttctccccggaagagctgaaagtcaaggtgctgggggacgtggttgaagtgcatggcaagcacgaagagcgccaggacgaacacggcttcatctctannnnnnnnnnnnnnnnnnnnnnnnnnnnnnnnnntgtggatcctctgaccattacttcatccctgtcatctgacggcgtcctcactgtgaatggaccaaggaaacaggcctctggccccgagcgtaccattcccatcacccgtgaagagaagcctgctgtcactgcagccc

SEQ ID NO: 446 - DNA, 1445 bp, Cricetinae gen. sp.
tggtcctgcgaggggaggttgcttatatcgatggacaggtgttggtacccccaggctatggacaagagctacggaagtggcctcagggggctgttccccagccccctccttcagctcccgccaccaccgaagtaaccacgacacctgagagaccacgccgagtcatcccaggccttcctgacggccgcttccacttgccaccccgaatccaccgagcctctgacccaggtttgccagctgaggaacccaaagagaagccatccaggaaagtagtggagccaggtgagcccacctttctgaacagtcaccagggggcctctgtcgtcagggccaagttggggatcctctgactcacatcttctgcactgccccccactgcaaagctgatggggaccccygacggcycctgctaccctgcaccrccggtmcctagacaggcatcacctcagaacctgggstcttctggcctactgcacccacagacttcacccctgctgcactcyttagtgggccaacacatcctgtctgtcaagcagttcactaaggatcagatgtctcatytgttcaacgtsgcrcacacactacggatgatggtgcagaaagagcggagccttgacatcctaaagggcaaggtcatggcctccatgttctacgaggtgagcacccgcaccagtagctcctttgcagcagccatggcccggctcgggggcgctgtcctcagcttttcagaagccacgtcctccgtccagaagggggaatcccttgccgactctgtgcagaccatgagttcgtacgctgatgtcgttgtgctccggcaccctcagcctggagctgtggagctggcagccaaacactgtcgcagaccagtgatcaatgctggggatggagtcggagagcaccctactcaggccctgctggacatcttcactatccgggaagagctggggactgtcaatggcatgacgatcaccatggtaggtgacctgaagcatgggcgcacagtgcactccctggcctgcctgctcacccagtaccgtgtgagcctacgctacgtggcacctcccagcctgcgcatgccacctagcgtgtgggactttgtggcttcccggggcaccaaacaggaggagtttgagagcattgaggaggcgctgcccgacacggacgtgctctacatgactcgcatccagaaagagcgatttggctccacccargaatacgaagcttgctttggtcagttcatcctcactccccacatcatgacccgggccaagaagaagatggtggtgatgcatccgatgccccgagtcaatgagataagcgtggaggtggactcagacccccgagcagcctacttccgccaagctgagaacggcatgtacatccgcatggcgcttcttgccaccgtgctaggccgtttctaggccagcctcctgctggcctggtct

SEQ ID NO: 447 - DNA, 250 bp, Mesocricetus auratus
accttcaacaaatgaacagcacagattaagcataatgctgcctgaccatcattttattactactaaaatcccctttgctctctatttcatggtggggtagtcattatgggaatggaggtaaaacagcttatmtmtcmtctattktskawgtaaaaactaaattcatgaagaatattcatttttaagagcatagatttctgaattagaaaaaagttgtttttgttctgttttggataaaatcttgctacat

SEQ ID NO: 448 - DNA, 683 bp, Mesocricetus auratus
  misc_feature (470)..(489): n is a, c, g, or t
aaaaatgacgtaacggttaaagtccacaaaaaacacccagaaaaccgcacgcgaacctacgcccagaaacgaaagccaaaaaacccacaacttcctcaaatcttcacttccgttttcccacgatacgtcacttcccattttaaaaaaactacaattcccaatacatgcaagttactccgccctaaaacctacgtcacccgccccgttcccacgccccgcgccacgtcacaaactccaccccctcattatcatattggcttcaatccaaaataaggtatattactctcatctattgtctaagtaaaaactaaattcatgaagaatattcatttttaagagcatagatttctgaattagaaaaaagttgtttttgttctgttttggataaaatcttgctacataacccaggttaaactcaaactcagggtcctcctgtctcagcctccagctgttataaaatctaaattctnnnnnnnnnnnnnnnnnnnnagtgggggcgcacacagggatggtggaccctaggtagctaacatactatgaccagccacatttgtacagtggggtcacagctgtagtatcttaaagaaaacttgtcaagggactcatggcaaaaaacaccccacaaacttcaattagttccttcgactttttgaaacagttactttgtttttctgacactttaa

SEQ ID NO: 449 - DNA, 2984 bp, Cricetulus sp.
  misc_feature (480)..(498): n is a, c, g, or t
aaaagcataacgtcaaccgttgacccagggtctggaaggacgcgggtcgtcctttgaacatttgcaacaacttagatgcaaagtgcggtgggatggggaggccggagttgcgggagcttcaagggttaactgttcggccgtgtcacatcggccgttcgaagctcctccccgggccgtgaggtgaagacttttgaaaatcacaccactgcagactcctcccccgccgggaagcctcgcccgcaagagctgggaatgcctctggatgcgcgcgtgtagtcggcggccggctgagcccagcgcaggtttgtagcggggaagccgccgggtccgggatccttggtctttggcgcggacacagtggggtctgtgaaccatcggagacgcgacgcaggctctgaggatgagcaccgcggatctcaggctgcgctgggccatcgccctgctcctggccgctgccggggctgcagcagaagacacatnnnnnnnnnnnnnnnnnnngtgcagggacgggaaatgtatcgccagcaagtgggtctgtgacggcagccctgaatgcccggatggctctgatgagtcctctgagacatgcatgtctgtcacctgtcaatccaaggaattcagctgtgggggccgtgtcagccgctgcattcctaactcctggcgttgtgatgggcaaacagactgtgagaacggctcagatgaacaaggctgtgcccccaagacgtgctcccaggatgagttccgctgccaggatggcaagtgcatctcccagaagtttgtgtgtgaccaggaccaagattgcgtggatggctctgacgaggcccactgccaggccgccacttgtgggcccgcgcatttccgttgcaactcctggccctgcatccccagcctgtgggcctgtgacggggatgacgactgtgaggacggctccgatgagtggccacagaactgtgggggccgcgacaccgccgctgcctggagtagcagcccctgttcctccctggagttccactgtggcagcagtgaatgcattcatcgcagctgggtctgtgatggcagcgctgactgcaaggacaagtcagatgaggagcactgcgtgacagccacctgccggcctgacgaattccagtgtgcagatggcacctgcatccatggtagccgccagtgtgaccgtgaatatgactgcaaggacatgagtgacgagcttggctgcatcaatgtgacacagtgtgacgggcccaacaagttcaagtgccacagtggcgaatgtatcgccttggacaaagtgtgcgactccatgcgggactgccgggactggtcagatgagcccatcaaggactgcaggaccaatgagtgcttggacaacaatggtggctgttcccacgtctgcaaggacctcaagattggctacgagtgcttgtgtcccaatggcttccagctggtggaccagcacaggtgtgaagacattgacgagtgtcaggagccggacacctgtgaccagctctgcgtgaaccttgaaggcagctacaagtgcgagtgccgggctggattccacatggaccctcacaccagggtctgcaaggctgtaggctccgtagcctatctgctcttcactaaccgccacgaggtacggaagatgaccctggaccgaagcgagtacaccagcctgatccccaacctgaagaacgtggtggccctggacactgaagtggccaacaatagaatctactggtccgacctgtcccagggaaagatctatagtgccctgatggaccaagcacctaccttgtcctatgacaccatcatcagtggggatctgcaggccccagatgggctggccgtagactggatccatggcaacatctactggacagattcagttccaggcagtgtttctgtggctgacaccaagggtataaggagaaggacactgttccaagagaaggggtccagacccagagacattgtggtggaccctgtgcatggcttcatgtactggacagattgggggacacctgccaagatcaagaaagggggcctgaatggtgtagatatctactcgctggtgactgaggacatccagtggccawatkksatsaywytagatattcccagtggccgcctctattgggttgattccaaactccactctatctccagcattgatgtcaatgggggcaatcggaagaccattttggaagatgagaagcagctggcccaccccttctccttggccatctatgaggwsamwgtattttggacggatgtcataaatgaagccattttcagtgccaatcgcctcacaggctcagatgttaatttggtggctgaaaacctcttgtccccagaggacattgtcctgttccacaacatcacacagcctagaggggtgaactggtgtgagagaacagccctccccaacggtggctgccaatacctgtgcctgcccgccccacagatcaatcctcactccccaaaattcacctgtgcctgccctgatggcatgctactggccaaggatatgcgaacgtgcctcacagaagtggcacctgtactgaccacccagggaacatccaccatcaggcctgagatcactgcaggagccgaaggctgcccgaagcacaaggaggatcagtcggcttccagtacttccaggcagcctgcacttagcacagtggagtcggtgacaatgtcccaccaagtccagggtgacagaaggaacgaggagcggccacagggtgtgggggtcttgtccatcaccctccccatcgcactggtcatcctccttgtctttggggccatcctgttgtggaggaactggcggctgaggaacatcaacagcataaactttgacaacccagtgtaccagaagaccacagaagatgaactccatatttgccgaagccaggacggctactcctacccctcacgacagatggtcagcctggaggatgatgtggcatgaacagctgtgagaaccttcc

SEQ ID NO: 450 - DNA, 2947 bp, Cricetulus griseus
  misc_feature (1100)..(1141): n is a, c, g, or t
  misc_feature (1239)..(1258): n is a, c, g, or t
  misc_feature (1260)..(1278): n is a, c, g, or t
  misc_feature (1303)..(1330): n is a, c, g, or t
  misc_feature (1340)..(1359): n is a, c, g, or t
  misc_feature (1396)..(1401): n is a, c, g, or t
  misc_feature (1403)..(1420): n is a, c, g, or t
  misc_feature (1427)..(1444): n is a, c, g, or t
  misc_feature (1480)..(1491): n is a, c, g, or t
  misc_feature (1493)..(1497): n is a, c, g, or t
  misc_feature (1508)..(1524): n is a, c, g, or t
  misc_feature (1528)..(1541): n is a, c, g, or t
  misc_feature (1544)..(1573): n is a, c, g, or t
  misc_feature (2504)..(2507): n is a, c, g, or t
tccgccgcagccgcagccatcgtcggcgcccctcgctcttctcctgtgcccgtgagaatccgtcgccatccgccactatggtgaacttcacggtagaccagatccgtgccattatggacaagaaagccaacatccggaacatgtcagtcatcgctcacgtggaccacggcaagtccacactgacggactccctggtgtgcaaggcgggtatcatcgcctctgcaagagccggtgagacacgcttcacagacacccgcaaggacgaacaggagcgctgcatcactatcaagtccacggccatctccctcttctatgagctctctgagaatgacctgaacttcatcaagcagagcaaggatggatctggctttctcatcaacctcatcgactctccaggccatgtggatttctcctcagaggtgacagctgcacttcgtgtcaccgatggagctcttgtggtggtggactgtgtgtctggtgtgtgcgtgcagactgagaccgtgctgcggcaggccattgccgagcgcatyaagcctgtcctgatgatgaataagatggaccgtgccctgcttgagctgcagctggagcctgaggaactataccagaccttccagcgcrttgtggagaatgtcaacgtcatcatttccacctatggcgagggcgagagtggacccatgggaaatattatgattgaccccgtcctgggcactgtgggctttggctctggcctgcatggctgggccttcactctgaagcagtttgcggagatgtatgtggctaagtttgcagcaaagggtgagggccagctggggcctgctgagcgggccaagaaagtggaggacatgatgaagaagttgtggggagatcggtattttgatcccgccaatggcaaattcagcaagtccgctaacagccctgatgggaagaaactgccacgcaccttttgccagctcatcctggaccccatcttcaaggtgtttgacgccatcatgaacttcakaaaggaggagacggccaagctgattgagaagctggatatcaagctggacagcgaggacaaagacaaggagggcaagcccctgctgaaggctgtgatgcgnnnnnnnnnnnnnnnnnnnnnnnnnnnnnnnnnnnnnnnnnncacacgwcckcccttcccccgtcaccgcccagaaataccgctgcgagctgctctacgaggggccacctgatgatgaggcgrccatgggcattaaaagnnnnnnnnnnnnnnnnnnnntnnnnnnnnnnnnnnnnnnnatggtgccaacctscgacaaaggcnnnnnnnnnnnnnnnnnnnnnnnnnnnnccggggtagnnnnnnnnnnnnnnnnnnnnccgcatcatgggccccaactacacgcctgggaataannnnnnannnnnnnnnnnnnnnnnncagagtnnnnnnnnnnnnnnnnnnccggtatgtggagccaattgaggmcttgccctgtannnnnnnnnnnnannnnnwtggtgtagannnnnnnnnnnnnnnnncagnnnnnnnnnnnnnnttnnnnnnnnnnnnnnnnnnnnnnnnnnnnnntgttcagcgtcagccctgtsgtsaragtggctgtggakgccaagaacccagctgacctgcccaaactggtggagggcctgaagcrgctggcaaaatctgaccctatggtgcagtgcatcattgaggagtctggggagcacatcattgctggagcaggtgagctgcacctggaaatctgcctcaaggacctggaggaggaccacgcctgcatccccatcaagaaatctgaccctgttgtctcataccgggagacagtgagcgaggagtcaaatgtgctgtgcctgtccaagtcgcccaacaagcacaaccgattgtatatgaaggcccggcccttccctgatggcctggccgaggacatcgacaagggtgaagtgtctgctcgccaggagctcaaggcacgcgcacgctatctagctgaaaagtacgaatgggatgttgctgaagcccgcaagatctggtgctttgggcctgatggcactggccccaacattcttaccgatatcaccaagggtgtgcagtacctgaatgaaatcaaggacagtgtggtggctggcttccagtgggccactaaggagggcgctctctgtgargagaacatgcgtggtgtgcgcttcgatgtccatgatgtgaccctacatgctgatgccatccaccgaggaggtggtcagatcattcccacagctcgtcgttrtctgtatgccagtgtgttgactgcacagccccgcctcatggagcctatctacctggtggagattcagtgtcctgaacaggtcgtgggtggcatctacggtgtcctgaacaggaagmktggccatgtgtttgaagagtcccakgtggctggcacccccatgtttgtagtcaaggcctatcttccagtcaacgagtcctttggttttacagctgacctgcgctccaacactggtggccaagnnnncccccagtgtgtgttcgaccactggcagattctgcccggggacccgttcgacaacagcagccgtcccagccaagtggtggctgagacccgcaagcgcaaaggtctaaaggagggcatcccagcactggacaacttcctggacaaactgtaggcaggcttgcacagccacacactgcacagtgcccacccatcagaagacaccttgagactgtccccataatgctgctctggaggtggctggggccaccctgccattgagcactaacacttgatgccgactctatttatttcggaatttccgaggcagtggagtcgccctctgcaggctggactggctggcgggccatggggtgggcaggacacagctctttatcattttcagagggaaaaatgctcagatatcaaacatctaaataaatgcattcagaggaaaaaaaaaa

SEQ ID NO: 451 - DNA, 1880 bp, Cricetulus griseus
  misc_feature (111)..(142): n is a, c, g, or t
aagcttaatctttgcactgcattaaaatacagtagatagctaaagccagtctacaccaaccttcttcatcctcagtctgggaaatcacagagtccagacctaaggcactcnnnnnnnnnnnnnnnnnnnnnnnnnnnnnnnnggaaaattaaccaggaacttcagggactgctcaccttgggtctgcacttgtgcactatcactatggggtttgggttttgttttgttttgctttatctatttgaaaggctgcaagcaacagggagtagccaaccaatagacaacggaagctgcacagaagaatgttctggcacagtgatctgaaatattgagcagtgcttctgaattctgaaaaactagccttaaagacagacagctttgttctagtcagccaggcaagcatatgtaaataaagttcctcagggaactgaggttaaaagatcgtatcctggacctgccagacctggccattcacgtaaacagaagattccgcctcaagttccggttaacaaccaggaggcaacgagatctcaaatctattacttctaatcgggtaattaaaacctttcaactaaaacacggacccacggatgtcacccacttttccttccccggctccgccccttctcagtactccccaccattaggctcgytactctacctccacttccgggcgcgacacccacgtgccctctcccacccgacgctaaccccgcccctgcccgtctgaccccgcccaccacctggccccgccccgttgaggacagaagaaaccccgggcagccgcagccaaggcsgacgggtagacgctgggggcgcttgaggagtcgtcctctaccttctctgctggctcggtgggggacgcggtggatctcaggcttccggaagactggaagaaccggctcagaaccgcttgtctccgcggggcttgggcggcggaagaatggccgctagacgcggacttggtgcgaggcatcgcaggatgcagaagagcaagcccgccgggagcgcgcggctgtactaccccgcgcctggagcggccacgccggactgggcggggccggcctggtggaggcggagtctgacctcgtggaggcggggcctctgatgttcaaataggatgctaggcttgttgaggcgtggcctccgattcacaagtgggaagcagcgccgggcgaatgcaatttcgcgccaaacttgggggaagcacagcgtacaggctgcctaggtgatcgctgctgctgtcatggttcgaccgctgaattgcatcgtcgccgtgtcccagaatatgggcatcggcaagaacggagaccttccctggccaatgctcaggtactggctggattgggttagggaaaccgaggcggttcgctgaatcgggtcgagcacttggcggagacgcgcgggccaactacttagggacagtcatgaggggtaggcccgccggctgcagcccttgcccatgcccgcggtgatccccatgctgtgccagcctttgcccagaggcgctctagctgggagcaaagtccggtcactgggcagcaccaccccccggacttgcatgggtagccgctgagatggagcctgagcacacgtgacagggtccctgttaacgcagtgtttctctaactttcaggaacgaattcaagtacttccaaagaatgaccaccacctcctcagtggaaggtaatttggggttaagatgaggatttctagggtttgtatgaagcaagatttccaatgcagacgtggaagtgcgaagtctcccgtgggaatctgggaactttgcttcttggcagaaatttttgtgctgttcccagagtttattaagcatcctctttatatacaaaatatttgaaattttgttagcaagagcagtt

SEQ ID NO: 452 - DNA, 4282 bp, Cricetulus griseus
  misc_feature (82)..(102): n is a, c, g, or t
  misc_feature (762)..(778): n is a, c, g, or t
  misc_feature (1698)..(1756): n is a, c, g, or t
aggtcgtgatggagtttgaagaggactttagcgcaagagcagacaaggacttcttgaagatgggcagaaagagtaaaaaggnnnnnnnnnnnnnnnnnnnnncccaaacgttggtatatttgggatgtttcgctatgcagattggctcgacaagctgtacatggtcctgggaactctggctgctgttctccatgggacttcacttcctctcttgatgctggtgtttggcaacatgacagatagttttacaaaagcagaaaccagtatttggccaaacatgactaatcaaagtgaaatcaacaacacagaagtcatcagcggcagtctggaggaagacatggccacgtacgcctattactacacggggattggtgctggtgtgctcatagttgcctacattcaggtttcattttggtgcctggcagctggaagacaaataaacaaaattagacagaagttttttcatgctataatgaatcaggagataggctggtttgacgtgcacgacattggggagctcaacacccggctcacagatgatgtctccaaaattaatgatggaattggtgacaaaattggaatgttttttcagtccatagcaacatttttagctgcttttatagtaggatttataagtggttggaagctaacccttgtaattttggctgtcagcccccttattggattgtcatctgctatgtgggccaaggtattgacttcattcactaataaggaacttcaggcatatgcaaaagctggagnnnnnnnnnnnnnnnnnttagcagccatcagaactgtgattgcatttggaggacaaaacaaagaacttgaaaggtacaataaaaatttagaagaagctaaaaatgttggaataaagaaagcggtcacagccaacatttccataggtattgcctacttattggtctatgcatcatatgcactggcattctggtatgggacctccttggtcctgtcgaatgaatactctgttggacaagtgcttactgtcttcttttccatactatttggaacttttagtattggacatatcgccccaaacatagaagtctttgccaatgcaagaggggcagcctatgaaatcttcaagataattgataatgagccaagcattgacagcttctcaacacagggacataaaccagacagtgttatgggaaatttagaatttaaaaatgtccacttcagctacccatctcgaagtggaattaagatcttgaagggcctcaacctgaaggtgcagagtggacagacagtggccctggttggcaaaagtggctgtgggaaaagcaccactgtccagctgctgcagaggctctacgaccccacagagggcgtggtcagtatcgacggacaggacatcaggaccatcaatgtgaggtatctgcgggaaatcattggggtcgtgagtcaggaacctgtgttgtttgccaccactatcgctgaaaacattcgctatggccgagaaaatgtcactatggacgagatcgagaaagctgtcaaggaagccaatgcctatgacttcatcatgaaactgccccataaatttgacactcttgttggtgagagaggagcacagctgagtggaggacagaaacagagaatcgccattgctcgtgccctggtccgcaaccccaagatccttttgttggatgaggcgacatcagccttggacacagnnnnnnnnnnnnnnnnnnnnnnnnnnnnnnnnnnnnnnnnnnnnnnnnnnnnnnnnnnngtgatagcccaccgcttgtctacagttcgtaatgctgacgtcattgctgggtttgatggtggtgtcattgtggagcaaggaaatcatgaagagctcatgaaagagaagggtatttactgcagacttgtcatgatgcagactagaggaaatgaagttgaactgggaagtgaagctgatggatcccagagtgacaccattgcctctgaattgacttcagaagaatttaaatccccttcagtgaggaaatcaacttgtagaagcatctgtggttcccaagaccaagagaggagagtcagtgtgaaagaggcccaggatgaagatgtgcctctggtttccttttgggggatcctgaagctaaacataactgaatggccttatttagttgttggtgtactttgtgctgttataaatggatgtatgcaacccgtcttctccatagtattttcagggatcataggggttttcacaagagatgatgaccccaaaaccaaacaacagaattgtaatttgttttcactgttttttctggtcatgggcatgatttgttttgttacatatttcttccagggcttcacatttggcaaagctggagagatcctcaccaagcgactccgatacatggttttcaaatccatgctgagacaggatataagctggtttgatgatcatagaaatagcactggcgcattgaccaccaggctagccagtgatgccgctaatgttaaaggggctatgagttcaaggcttgctggaattacccagaatgtagcaaatcttgggacaggaatcatcatatccctagtctatggctggcagttaacacttttacttgtagtgattgctccactcattatactaagcggcatgatggagatgaaagtgttgtctggtcaagctctgaaagacaagaaagagctagaagtctctgggaagattgctactgaagcaatagagaacttccgcactgtcgtctctttgactcgggagcagaagtttgaaaatatgtatgcccagagcttgcagataccatacagaaatgctctgaagaaagcacacgtctttgggatcacattctccttcacccaggccatgatgtatttttcgtatgctgcttgtttccggtttggtgcctacttggtggcacatcaaatcatgacttttgaaaatgttatgttggtattttcagctgttgtcttcggtgccatagcagctgggaatgccagctcatttgctcctgactatgccaaagccaaagtgtctgcatcgcatatcatcaggatcatggaaaaaatcccttccattgacagttacagcaccagaggcctgaagcctaattggttggaaggaaatgtgaaatttaatgaagttgtgttcaactatcccacccgacctgacatcccagtgcttcaggggctgagcctggaggtgaagaagggccagacgctggccctggtgggcagcagtggctgcgggaagagcacagtggtccagctgctcgagcggttctacgaccccatggccggaacagtgtttctagatggcaaagaaataaagcaactgaatgtccagtggctccgagcacacttaggcattgtgtcccaagagcccatcctgtttgactgcagcattgctgagaacatcgcctatggagacaacagccgggtcgtgtcccaggatgagatcgagagggcggccaaggaggccaacatccaccagttcattgagtctctgcctgacaaatacaacaccagagtaggagacaaagggactcagctgtcgggtgggcagaaacaacgcatcgccatagcacgcgccctcgtcagacagcctcacattttgctcctggatgaagcaacatcagccctggatacagagagtgaaaaggttgtccaggaagccctggacaaagccagggaaggccgcacctgcattgtgatcgctcaccgcctgtccaccatccagaacgcagacttgatcgtggttattcagaatggcaaggtcaaggagcatggcacccaccagcagctgctggcacagaaaggcatctatttctccatggtccaggctggagcaaagcgcttgtaaactgtgactgtttgaaatgctaagtgtttttaatattgttgcttaaatatggcacttaaccaaagtttaaaaaggtgaacactgttgatggtaatttcatcaagatgacagtcttcagaaacttcgtaatttaattaataaaaactgaaaaaaatgtcattgatgggggcattgtgtttaattgcattatctgagacataaaagaaacttaaagaatttttaaaaataaaatgtgtaattttgtttcagtttttaatttcaaccctactttgttaaatgattataaaggttgtaaaatgtacttaaatattccataaagtgcctataaaaactaaatgttcatataattggagtcatcttgtctgttgtgtgtattaatttatatatttttccaaataggatgctgtaaataattttagctttcataaaatggattttaag

SEQ ID NO: 453 - DNA, 3961 bp, Cricetinae gen. sp.
ggatccggacaacacccacaccggcccctccaggtccagaaagctggccctgcgagaagcgggactgaaaaggsgtgcgggagccagaaatccaaaagggtgccaaggcatgcgtcctttttccacccagaaataaccccaggctttcaatttgaggttatttcaatatccagcaaatgcgttacttcctgccaaaagccagcctccccgcaacccactctcccagaggccccgccccgtcccgccccctcccggcctctcctcgtgctggatcgctccctaaggacgccccgctccagaagccccacctaccaaggacgccccacccttgttcccggactggtatgaccccagcctgctgacatccctccgccctttctcgtgcacgcggctatggcggaatctgagttgcagctggtggcgcagcgcatccgcastttccccgacttccccatccccggcgtgctgtttaggtgagatcacgagccagcaaggcgttggagccctgttcctgggctcccggcgaggcgcatgggcagtctcggggatcttgtggggtctccgcccccctttccccggccaccagcctctccttgttcccagggatatctcgcccctcctgaaggaccccgcctccttccgagcttccatccgcctcctggccagtcaccttaagtccacgcatggcggcaagatcgactacatcgcaggcgagtggccatgccaggccgtgctggtcccccactgtgcaggctcccctcccttcccttatgtcaccctcagtccatcccacacccatcccttctttcttcaacccctaatcctcttttagcactctgtttctcttgccttggtccctcgttgaccctggatgagtactgcgtctcccacccctgctaggtctctgacctccgccctcagtgcctgttctactagagatgaactctgctcggtccttgttcagggccagcccttctctcttggggtgtgaagttggctagcagcctggaggcaggactgtaagaagcatacgtgtgctttgagaactttgaggaaggccctggaacctccttgctaggagtagcacctaagatgaactagatgctaaaaaatgctgtatctttggggcacacgagggcatgcctgggcaggcttagagcctggtagtctcaggggctgcaccaaagtgtaattcttgtgctaaataactttcacttaccagtgccaagcacgggcttcagaaacaccctagggtcgctgaatgtccaccaggggagtcagacatgtccagagggtgagaaccccagagaattcggtagccctgacatgtgctacaattactgatgcccacttcctactggttcctcctggccatacctcaggaattagggcatgctttctgcctgctacagtagctcatcctccctggaagtgaccccagacatataccctgaactgtaaccgataaagtgcgcctgggcagatgtatttgagaggtggcaaaagtaaaccataggtgtccccgagctagatacagaaggcagataacatccccaaggctaagctgctgccccaatagccatcagccttctagttatagctagtaagacctagtattcctggtcaatactattcactcaatccttacacctcagccctaacacgccccctctctcatcctaacaggcctagactccaggggattcttgtttggcccctccctagctcaggagctgggcctgggctgtgtgctcatccggaagcgagggaagctgccaggccccacagtgtcagcctcctatgctctcgagtatggcaaggtaagcaggcagtgggtagctgtctaggagtaaatgtgggggctcagagaggttaagtcatcaggccaggtttataccaccaggaaacatggagaagctaggggtggtggtcacttgttagctactagactctcactctacttcctgtctgcaggctgaactagaaatccagaaagacgccttagaacctggccagaaagtggttgttgtagatgatctcctggccactggaggtaagagccactctgtagcataaagaggtttcaaagggataagccctatccggggtgctgactaagcaagagccttactacctgtgtctttcctcgtcccttcaccccaggaaccatgtgcgctgcctgtgagctgctgggccagctacaggctgaggtggtggagtgtgtgagcctggtggagctgacctcacttaagggcagagagaagctaggatcagtaccattcttctctctcctgcaatatgagtgactggaatggttgctgcatccctgccctcagcatctacggttgaacagtggctcagccttaccaaagtgacctttgtgagccaccagctgcactttctctaactctattcactcatttctttggtcagctgatggccatgcctatggaccacctgggtccttgcattttatatatgtgctgagtcctggagcagagcagagctactgtgggttatgacacagcagatcaataaatagtttggtacatatggtgcttcctgttgtcttgttgcatggatcacgttccatagctgccaggtgacagtccctgtcccttgggattccctgtgcaaatgttctccacagagtcaatcccacacactgccccggccgtagggtcttatagaaccagaatccgttttaagcaaaaggctttcatcagtagtctctagagtgacatgatgggaacaggggctcagtgtcaccttgcagacctcttcaaaacaggtggaaaccagtaggcacagctctgtatagatttcacagcctctaggaagttttctgggccattcctttaggaccaaaatggagagagtagcccaagggaataccttattcatattttgttgaacatcaataccaggttgtttgtagggatgctgagccacacccccagcaagactgttcccatccagacttttactggcctggtcttgctagccatagaagaaaacattgcaacaacagcagggcatcatttataggtattttatggtgacccattcagtttaatttctgtattacttttatttaaatcttacgtgactttattaaaagccaagattaacagtcacatccaaggtacagaaggttaaataaaaattttgatctcaaaacctatagttatttccattatatacagaaggcccaatttcactcttgccattcagaactctctgtccttatgaaagctggccagaagcccaagttctctgtgtgggtcttaaggctctaagcaagacagcagctttcatgagcatggagaacaggctaggctttggcctaaggctcccaactggaccttgccagtacctagatgagtagtttgtgggacgggcatctaacatactctgctctccaagtctacttccccaacacccacacaagtgctgggtctggggtacccaaagcctcaggaaccaatttagcactttatgggcacaattgctgcccatactggcagtaagcccttgggcctgtgacactgcgagggatgctcaagtgcattgtactgataaagggaacagactatcaggtaaagaaatgagtcacaacccctcagtgtggatctggtgggtcagcctttcagtgaggccagctaagtcagcagctttgtccagcttgatgtaggtgtccatgcgaatccgatgcaggctcagccagtctggcagcaactcagataggagcaacacatgtttctccatctcccctgtggaagtgcattgtggttaactgaagcacagtgcctggatgacttgcttaactcacttacccagcctggtgccttacacccctcaaggcttaacctgtgtgcagtggatccaagcagagcctgggccctgctctcaaacaccagggggatgaacagcaagggcaagacacatatacgccaagctt

SEQ ID NO: 454 - DNA, 6215 bp, Cricetinae gen. sp.
  misc_feature (180)..(201): n is a, c, g, or t
  misc_feature (1290)..(1306): n is a, c, g, or t
  misc_feature (2405)..(2462): n is a, c, g, or t
tcaggcccctggcaccagaggtttctattaagaccccacgggtattcaatgcagggggtgcccctcggatctgtgccttggactgcggcctcaagtataatcagatcagatgtctctgccagcttggggctgaggttactgtggtgccctggaaccacgaattagacagtcagaagtatnnnnnnnnnnnnnnnnnnnnnngacctggcgatcctgcctcttatcctggtgtggtagccacactgaaccgcgtcttgtctgagcccaatccccgacctgtgtttggaatctgccttggacaccagctgttggctttagccattggggccaaaacttacaaaatgaggtatggaaaccgaggccacaaccagccctgtttactggtgggcaccgggcgctgctttctgacgtctcagaatcacgggtttgccgtggatgcagactcgctgccagcaggctggactccgctcttcaccaatgccaacgactgttccaacgaaggcattgtacatgacagcctgccctttttcagtgtccagtttcacccagagcaccgagctggcccttcagatatggaactgctttttgatgtatttctggagactgtgagagaggctgtagctgggaaccccgggggccagacagttaaagagcggttggtgcagcgcctctgtccccctgggcttctcattcctggttctgggcttccaccaccacggaaggttctgatcctaggctctgggggcctctccattggccaggctggagaatttgactactcaggctctcaggccattaaagccctgaaggaggagaacatccagacgctgctgatcaaccccaacattgctacagtgcagacctcgcaggggctggcagacaaggtctacttccttcccattacacctcactacgtaacccaggtgattcggaatgaacgcccagatggtgtgttactgacttttgggggccaaacagcccttaactgcggtgtagaactgaccaaagccggagtgctagctcggtatggggttcgggtcttgggtacacctgtggagaccattgaactgactgaggaccgacgagccttcgcggccaggatggctgagatcggagagcatgtagcccccagcgaagcggcaaattctcttgaacaggctcaggcagctgctgagcgactgggctaccctgtgctggtgcgtgcagcctttgccctgggtggtcttggttctggctttgcttccaccaaagaggaactctcagctcttgtggctccagctttcgcccatnnnnnnnnnnnnnnnnnagacaagtctctgaagggctggaaggagattgaatatgaggtggtgagagacgcctatggcaactgtgtgacggtatgtaacatggagaacttagacccactgggcatccacactggtgagtccatagtggtggcgcccagccagacgctgaatgacagagagtaccaacttctgcgacggacagctatcaaagtcacccagcacctggggatcgtcggggagtgcaacgtgcagtatgccttgaacccggagtctgagcagtattacatcattgaagtaaatgccaggctgtctcgaagctctgccctggccagtaaggccacaggctatcctctagcctatgtggcagccaagctggcgttgggcattcccctgccggagctcaggaactctgtcactgggggaacagcagcctttgagcctagcctggactactgtgtggtaaagattcctcgatgggacctcagcaagttcttgcgtgtcagtacgaagattgggagctgtatgaagagtgttggtgaagtcatgggcattggacgctcatttgaagaggccttccaaaaggccctgcgcatggtggatgagaactgtgtgggcttcgaccatacagtgaagccagtcagtgatgtggagttggagacaccaacagataagcggatctttgtggtggctgctgctctgtgggctggctactcggtggagcgcctgtatgagctcacacgcatcgactgctggttcctgcatcgaatgaagcgtatcgtgacccacgcccagttgctggaacaacaccgaggacagccgttgtctcaagacctgctgcaccaggccaagtgcctcggcttctcagacaaacaaattgcccttgcagtcctgagcacagagctggcggttcgaaagctacgtcaggaactgggaatctgccctgcagtgaaacagattgacacagttgcggctgagtggccagcacagaccaattacctgtacctgacatactggggcaacacccatgacctcgactttcgaactcctcacgtcctggtccttggctctggtgtctaccgcatcggctccagtgttgagtttgactggtgtgccgtnnnnnnnnnnnnnnnnnnnnnnnnnnnnnnnnnnnnnnnnnnnnnnnnnnnnnnnnnnccagagacagtcagcacagactatgacatgtgcgaccgactctactttgatgagatctcctttgaggtggtgatggacatctatgagctggagaaccccgacggcgtgatcctgtccatgggtggacagctgcccaacaacatggccatggctctgcatcggcagcagtgccgagtgctgggcacctccccggaagcgatcgattcagctgagaaccggttcaagttctcccggcttctagataccatcggcatcagccagcctcagtggcgtgaactcagtgacctcgagtctgctcgccagttctgccagactgtggggtacccctgtgtggtgcgcccctcctatgtgctcagcggtgccgctatgaatgtggcctacactgatggggacctggagcgcttcctgagcagtgcggccgctgtctccaaggagcaccccgtggtcatctccaaattcatccaggaagcaaaggagattgatgtggacgctgtggcctgcgatggcgtcgtgtcagccattgccatctccgagcacgtggagaatgcaggtgtgcattcaggggatgctacgctggtcacccccccacaagacatcacccccaaaactctggagcggatcaaagccattgtgcatgccgtggggcaggaactacaggtcacagggcccttcaatctgcagctcattgccaaggatgaccagctgaaagttattgagtgcaatgtgcgtgtctctcgctccttccccttcgtgtctaagacgctgggtgttgacctagtggccttggccacgaggatcatcatgggagagaaggtagaacccatcggactcatgacgggctctggagtcgtgggagtaaaggtgcctcagttctccttctcgcgcttggcgggtgctgatgtggtgctgggcgtggagatgaccagtactggagaagtagctggctttggagagagccgttgtgaggcctacctcaaagccatgcttagcactggctttaagatccccaagaagaacatcctgctgaccatcggcagctacaagaacaaaagtgagctgctcccgactgtgcggttgctggagagcctgggctatagcctctacgccagcctgggtacggcggacttctacactgagcacggggtcaaggtgacagctgtggactggcactttgaagaggctgtggatggcgagtgcccgccacagcggagcatcttggatcagctggctgagaatcactttgagttagtgattaacctgtcaatgcgtggggccgggggtcgacggctttcctccttcgtcaccaagggctaccgcacgcggcgcctggctgctgacttctctgtgcctctcatcatcgacatcaagtgcaccaaactcttcgtggaggccctgggtcagattggccccgccccgcctttgaaggttcatgtagactgcatgacctcccagaaactggtgcggctccctgggttgatcgacgtccatgtgcaccttcgggagccaggtgggacacacaaagaagactttgcctcgggcacagctgctgccttggctgggggtgtcaccatggtctgtgccatgcctaatacccggccccccatcattgatgcccctgctctggccctggcccagaagctggcagaggccggtgcccgctgtgactttgccctgttccttggggcctcatctgaaaacgcggggactctgggtgctgtagccgggtctgcagcaggactaaagctctacctcaacgagaccttctccgagctgcggctggacagtgtggcccaatggatggagcattttgaaacgtggccttcccacctccccattgtggcccatgcagagcggcagagtgttgccgcagtcctcatggtggctcagctgacccagcgcccagtgcacatatgtcacgtggctcggaaggaagagatcctgctgattaaaactgcgaaggcacaggggctgcctgtgacctgtgaggtcgcaccccaccacctcttcctgaatcgggaagacttggagcgcctgggacctgggaggggagaggtccggcctgagcttggttcccgagaggatatggaggctctgtgggagaatatggctgtcatcgactgctttgcctcagaccacgctccccataccctggaggagaagtgtgggcccaagcctccacccggcttcccagggctggagaccatgctgccgctcctgctgacagctgtgagtgagggccggctcagtctggatgacctgctacagcgcctgcaccacaacccgcgccggatcttccacctgccccttcaggaggacacctatgtagaggtggatctggagcatgagtggacaatccctagccacatgcccttctccaaggcccgctggaccccttttgaggggcagaaggtgaagggtaccatccgccgtgtggtcctgcgaggggaggttgcttatatcgatggacaggtgttggtacccccaggctatggacaagatgtacggaagtggcctcagggggctgttccccagccccctccttcagctcctgccaccacagaaataaccacgacacctgagagaccacgccgagtcatcccaggccttcctgatggccgcttccacttgccaccccgaatccacagagcctctgacccaggtttgccagctgaggaacccaaagagaagccatccaggaaagtagtggagccagagctcatggggacccccgacggtccctgctaccctgcaccgccggtgcctagacaggcatcacctcagaacctgggctcttctggcctactgcacccacagacttcacccctgctgcactccttagtgggccaacacatcctgtctgtcaagcagttcactaaggatcagatgtctcatctgttcaacgtcgcgcacacactacggatgatggtgcagaaagagcggagccttgacatcctaaagggcaaggtcatggcctccatgttctacgaggtgagcacccgcaccagtagctcctttgcagcagccatggcccggctcgggggcgctgtcctcagcttttcagaagccacgtcctccgtccagaagggggaatcccttgccgactctgtgcagaccatgagttgctacgctgatgtcgttgtgctccggcaccctcagcctggagctgtggagctggcagccaaacactgtcgcagaccagtgatcaatgctggggatggagtcggagagcaccctactcaggccctgctggacatcttcactatccgggaagagctggggactgtcaatggcatgacgatcaccatggtaggtgacctgaagcatgggcgcacagtgcactccctggcctgcctgctcacccagtaccgtgtgagcctacgctacgtggcacctcccagcctgcgcatgccacctagcgtgtgggactttgtggcttcccggggcaccaaacaggaggagtttgagagcattgaggaggcgctgcccgacacggacgtgctctacatgactcgcatccagaaagagcgatttggctccacccaggaatacgaagcttgctttggtcagttcatcctcactccccacatcatgacccgggccaagaagaagatggtggtgatgcatccgatgccccgagtcaatgagataagcgtggaggtggactcagacccccgagcagcctacttccgccaagctgagaacggcatgtacatccgcatggcgcttcttgccaccgtgctaggccgtttctag

SEQ ID NO: 455 - DNA, 3958 bp, Cricetulus sp.
  misc_feature (152)..(172): n is a, c, g, or t
  misc_feature (743)..(758): n is a, c, g, or t
  misc_feature (773)..(792): n is a, c, g, or t
  misc_feature (1970)..(2014): n is a, c, g, or t
caggctgagatggatcttgaggcagcaaggaacggaacagcgcggcgccccgggacagtggagggcgactttgaactaggcagcatcagcaaccaaggcaggaataaaaagaagaaagtgaatttaattggaccactgacactgttccgctnnnnnnnnnnnnnnnnnnnnntgttcatgctcctgggcaccatcatggccatagctcacgggtcaggtctccccctcatgatgatagtctttggagaaatgacagataagtttgtgaataatgcggggaacttttccttgccagtgaatttttcattgtcaatgataaatccagggaggattctggaagaagaaatgactagatatgcatattactactcgggactaggtggtggagttcttgttgctgcctacatccaagtttcattctggactttggcagctggccggcaaataaagaaaatcagacaaaatttttttcatgccatcctccgtcaagaaatgggctggtttgacatcaagggtaccactgaactcaatacacggctgacagatgacatctccaaaatcagtgaaggaattggtgacaaagttggaatgttctttcaagcagtagccacgttttttgcaggattcatagtggggttcatcagaggatggaagctcaccctggtgatcatggccatcagccccatactcgggctgtctgcagctgtttgggcaaagatactctcaacattcagtgacaaagnnnnnnnnnnnnnnnnaaaagcaggtgctgnnnnnnnnnnnnnnnnnnnnagccatcagaaccgtgatagctttcgggggccagaacaaagagctagaaaggtatcagaaacacttagaaaatgccaaaaaaattggaattaaaaaggctatctcagcaaacatatccatgggcattgccttcttgttaatatatgcatcctatgcattggccttctggtatggatccactttggttatatcaaaagaatatactattggaaatgcaatgacagtgttcttctcaatcctcattggggctttcagtgtgggccaggctgccccctgtattgatgcttttgccaatgcaagaggagcagcttatgtgatctttgacattattgataataatcctaaaattgacagtttttcagagagaggacacaaaccagacagcatcaaaggaaatttggacttcagtgatgttcacttttcctatccatctcgggctaatatcaagatcttgaagggtctcaacctgaaggtgcagagtgggcagacggtggcccttgttggcaacagtggctgtgggaaaacgaccactctccagctgctgcagaggctctacgaccccacagagggtacgattagcattgatgggcaggacatccggaacttcaatgtcaggtaccttcgggaaatcattggcgtggtgagtcaggagccggtattgttttctaccacgattgctgaaaacattcgctatggccgtgggaatgtaaccatggaggagataaagaaagctgtcaaagaagccaatgcttatgagttcatcatgaaactaccacagaaatttgacaccctggttggtgagagaggggcacagctgagtgggggacagaaacagagaatcgccattgcccgggcactggtccgcaaccccaagatcctcctgctggacgaggcgacatcagccttggacacagaaagtgaagctgaggttcaggcggctctggataaggccagagaaggccgaaccactattgtgatagctcaccgattgtctacagtcagaaatgcagatgtcattgctgggtttgaggatggagtcatcgtggaacaaggaagccacagtgagctgatgcagaaggaaggggtctacttcaaactcgtgaacatgcagacatcaggaagccagatcctatcacaagaatttgaagttgaactaagtgaagaaaaggctgctgatnnnnnnnnnnnnnnnnnnnnnnnnnnnnnnnnnnnnnnnnnnnnnaccaaaaaaagtcttaaaagttcacgagcgcatcatcacaggctagatgtagacgccgatgaactcgatgcaaatgtgccaccggtgtcttttctgaaagtcttgaaactgaataaaactgagtggccctactttgtggtgggaacggtctgtgccattgtcaacggggccctccagccagcgatctccatcatcctgtcagagatgatagctatctttggtcctggggatgatgcagtcaagcagcagaaatgcaacctgttctcgctggtcttcttgggcctgggagtcctgtccttctttactttcttccttcagggcttcacatttgggaaggctggcgagattctcaccacaaggcttcggtccatggcctttaaagcaatgctgcggcaggacatgagctggtttgatgattacaaaaacagcactggagcactttctacaagactcgccacagatcgtgcgcaagtccagggagccacaggaaccaggttggctttaattgcacagaacacagccaacctaggaaccggtatcattatatcatttatctacggttggcaattgacacttttgctgctatcagttgttccattcatcgctgtatcaggaattgttgaaatgaagatgttggctggaaatgccaagagagataaaaaagcactggaagctgctggcaagattgcgacagaggccattgagaatattcggactgttgtgtccttgacccaggaaagaaaatttgaatcaatgtatgttgagaaattgcatgaaccttacaggaattcggtacagatggcacacatctatggcatcacttttagcatttcacaagcgtttatgtatttttcctacgctggctgttttcgatttggtgcttacctcattgtgaatggacatatgcgcttcagagatgtcattctggtgttttcagcgattgtgtttggcgcagttgctctagggcatgccagttcctttgctcctgactatgcaaaagccaagctatctgctgcacacctattcagcctgtttgagagacagcctctcatcgacagctacagtggagaagggctgtggcctgataagtttgaaggaagtgtgacatttaatgaagtcgtgttcaactatcccacccgggccaacatgccagtgcttcaggggctgagcctggaggtgaagaagggccagacgctggccctggtgggcagcagtggctgtgggaagagcacagtggtccagctgctcgagcggttctacgaccccatggccggaacagtgctcctagatggacaagaagcaaagaaactcaatatccagtggctccgagcccaacttggcattgtgtcccaagaacctgtcctgtttgactgcagcattgccgagaacatcgcttatggtgacaacagccgggttgtgtcccaggatgagatcgtgagggcagccaaagcagccaacatccaccccttcattgagacactgccccaaaaatacaaaacaagagtaggagacaaggggactcagctctcaggaggyyagaarsagaggcttgctatccgtcgcgccctcawtagwsarcytcgkrtcttgytgctrsatgwwsycacgtacarmyctskmtactgagwgttsaamaggttgtccaggaagctctggacaaagccagagaaggccgcacctgcattgtgatcgctcaccgcctgtccaccatccagaacgcagacttgatcgtggtgattcagaatggcaaggtcaaggagcatggcacccaccagcagctgctggcacagaaaggcatctatttctccatggtcaatattcaggctggtgcacagaactcatgaactcttgttacagtgtatttttaaaataaattcaaatcattttacactttgtgacatgtagaagaagtttctcattgaagccataaaatataaatctacc

SEQ ID NO: 456 - DNA, 770 bp, Cricetinae gen. sp.
gtcgaccagaagccttttaaaagtccttcacgtcccgtaactgtaactaaccctcggtccccggcggtggtctcggcgacccgaggccgagaggaagcgctgttcccggattcactagcgggccgggacccgggattctctgggtgcctcggaacattttatcttgtgtgcgtgcggtagccaccctcggtcgatccccggcggtggtctcggcgacccgaggccgagaggaagcgctgttcccggattcactagcgggccggggcccgggattctctgggtgcctcggaacttttccttctgcggaagccctcggtccccagcggtcgtctcggcgtctcgaagccgagaggaggcgctgtttccggcctcactgcctgctagttcccggttccttgtagggtcagacttttgtttttcttcgacgtgtcctcccatcccgggctcctgcctccgggtccttgcccgagaggatgccggtgtgtgccgatcttttctgcatgtctacctcgctcttggtcctatcacggttatgaggtcgaccagttgttgctttgatgttcggttctctcgttgattgggacaatatttggggcacttcgccggtcccgacttccagaatttccgtgtggtctgtgaatttatcaccgctacactgtcatcatattccagttttgcaatctgctctctttgtacctgcagataggtactgacacgcttgtcttgtgagtgggtgacattagtaaaggactgctctcgggctttttctg

SEQ ID NO: 457 - DNA, 642 bp, Mesocricetus auratus
tccagtgggatttgttactggacttcaaggagtgctcaacattactgaagcaacttcaccccaagaarkggcmtmtwsasycwstswyytcctggcatacagcaggatgaagcctttysttkccatcattttttgcttcttgrwcctgggagttgacagccaaaggtggttccagttcatgaaagaagctggccaagggastasrgacatgtggagagcttacwctgacatgagagaggccaactggaaaaactcagataaatacttccatgcmcgsgggaactatgatgctgccmaaaggggaccaggaggagcctgggctgctaaagtgatcagtgatgccagagagggtwttmagaggwtsasaggacgtggaryagmggactcaagagctgaccagtttgccaayraatggggccggagtggtaaagaccccaacywcttycgacctsctggcctrcctagtaaatactgagtttyatcttcatgytrttcccagccatgyagtccccaaggwyrsakkyactwgaywgaagttagttcchrarctctggaygtgtaagcaccccacaatggagaataaatacttgtgaaatgcyaaaatgtcactgcttgatgtatgaagcagcacggaacgtgtaa

SEQ ID NO: 458 - DNA, 1771 bp, Mesocricetus auratus
  misc_feature (522)..(556): n is a, c, g, or t
  misc_feature (1632)..(1649): n is a, c, g, or t
cttyccactgccaccatgctggtgtccgggatgctcctcgtggttgtgctracctgcctcagcgtcatgatcataatgtctgtgtggaggcagaggagactgttgaggaagatgcctccaggacccaccccactgccctttattgggaactttctggagctggacacagagaagttttatgactgcctttcaaagatgagggagcggtatggccctgtgttcaccatccacctggggcctcgacctgctgtgatgctgtggggttacgatgctgtgaaggaggctctcattgaccaggctgaggagctcagtgaccgaggagagcaagctttcttcgactggttcttcaaaggctatggtgtggtgttcagctccggggagcgcgccaagcaactcaggcgcttctccatcgccacgctgagggacttcggctttggaaaacgtggcattgaggagcgcaccatagaggagaccagctttctcatacaggccctgcgggacacaaacggtgccacaatagannnnnnnnnnnnnnnnnnnnnnnnnnnnnnnnnnntcatcagttccattgtgtttgggaaccgctttgaatatgacgacaaggaattcttgtcactgttgggcatgataatgcgaagtttccagttcatgtctacttcaacaggacagctctttgagatgttctattcagtgatgaagcacctgccaggatgccagcaccaggcctataaggaaatgcagggactggaggacttcatagccaggaaggtggaagagaaccaacgcaccctggaccccaactccccccgggacttcatcgactccttcctcatccgcatgcaggaggagaagaagaaccctcgaactcagtttcacatgaggaacctgctcatgaccacactgaaccttttcttcgcgggtacagagaccgtcagcacaaccacgcgttacggcttcctgctgctcatgaagtaccctcacattgcagccaagatgcatgaggaaattgaccaggtgattggcaggaacaggcagcccaagtatgaggaccatttgaagatgccctacactgaggctgtcatctacgagatccagagatttgtagatgtggttcctttgggtctgccccgtagcaccaccaaggacatcaagtttcgggacttcctcattcccaagggcactgacgttttccctgtactgagctctgtgctgaaggaccccaagttcttctccaaccccaacgactttaacccccagcacttcyyggatgacaagggacagtttaagaagagcaatgcttttatgcccttctccgttggaaagcgatactgttttggagaaagcctggctaagatggagctcttcatcttcttcacaaccatcatgcagaatttctgcttcaagtccccacaggcaccccaagacatagatgtgaccccacaatatttcagctttgccgcaatccctccaaaattcaccatgagcttcctgcctcgctgagcgggaactctgatgggtggagacaatgagcatgtccagaaacagggcggggctaatggggtggggccaatccgggtagggctaaaggagagcatgaaaattagagggaagtctggggcctgaagtattacnnnnnnnnnnnnnnnnnnctgagcagagtgatcaccttcctgaagacgggttcttcaaagttgggaagagaggctgggatgccttcccgtcgtatctgaacaccgatcgtaataattaaagctattgttgattgtgcaag

SEQ ID NO: 459 - DNA, 2937 bp, Cricetulus sp.
  misc_feature (348)..(365): n is a, c, g, or t
gaattctatctccacaatatgttacaatgtaaaatacaagaacaatgtgaccatgctactgtgtaacaatatacctgtttctagtgctaaactcccactctgtctaatctgtgattcttaatgccacacattagaatcgctcacaaagcctatcacacatttcagagattaaaaaatgctggatgtatttctccggttatgactgatgagatactaaaatactgccagtctacacccaaacaccgtggaaggctcctaaacagagcttctgagtagctatcataggtcaaatcgacaaaagcagcagcagtttaattcttatttcgattactgtatacaaatctaagnnnnnnnnnnnnnnnnnnaatttgagtaaactccccgcaaactgtatctggtcttttcaagcactcccaggtgtggatggattgagaaattttgttgccgttgtatggaaataacatttaaatgtaacgaatttaagtgaggctcctacgggtaaacgtttaaaatgtaacaagtaggttttacactgtttcaagtagaaggaaaaagaggatatcggaattactctttacttcctaggtatcaaaaacgcagtttccagcattcctaaaaggaaaaccttctcatacacaaggaggttcttaactcaggccttcttggaggcaaggcacatttcgccagcttcctgaccagcagagagcgcgagcaggccgggcgacccgctgagtgtcgcaacaacggccgcacgcaaatgaggccgccgagcacgcgcgtcgtgattcgcgcgttccaaggcgacgctggggccagggagccgggcttatgtaaatgagaggattctgtctctgcgctcctattggccgcggcgccaggacgcgtgtgggccaatgagagcgtcgggcggacaatcgggtgtctgtctataaaagggtgaggcgtcggcgttggcgcacagtttcctggttgtgaccgtccgtctgtttgcgctctcgtgatgtccggccgtggcaagcaaggaggcaaggcccgcgccaaggccaagtcgcggtcgtcccgcgccgggctgcagttcccagtgggtcgcgtgcaccggctgctgcgcaagggcaactacgcggagcgcgtgggcgccggcgcgccggtatacatggcggcggtgctggagtacctgaccgccgagatcctggagctggcgggcaacgcggcccgcgacaacaagaagacccgcatcatcccgcgccacctgcagctggccatccgcaacgacgaagaactcaacaagctgctgggcaaagtgacgatcgcgcagggcggcgtcctgcccaacatccaggccgtgctgctgcccaagaagacggagagccaccataaggcgaagggcaagtgaggcggctgctggcaccggcccgcgtctctacgaacccttcccccccccccagagaactctcaaaaaacggctcttttcagagccacccacagaatcagataaagagttgtgtcacggtaacccgtctcttggcctttcccggcccttccccaacagtaagaatgtcgtgtgccctactcttcccctgggtccctctggtagtgcctgttgctgttctttggtatccttcctcggcggagtggaggcagcgacctcaccgactgtcccaagcatttagcgcttagcgccgtctataaccctgctactatccccgtccccctccactgtatcgctcactcagcaccccgccaccaacctactcttcctgaccgaaggcctctcccttcccaggaccggaactcgactaggtctaggccagtcccgatataagtcgcagtcagccgcccctcttcccccacccccctcgttcttcgggccaagtctaggacgtgtccctcgaggatagggcgcggccagctctaggaatcatggggacctgggtaccgggctggggctggggctggggctgggcctgggcctgggaaacattagctgagtagctgagttctgtccctgggactttggacggcgagcggggtcgcgccgagcstccctcgggcagtcgcttgggacccsccctcttaaagggctaagcctaaccaagaccgggctccaccctcgcagaaccttggcgagtcagccagccgcggggctggacaagggggcgggcggggagggggagtggcgggtccaasccaatgggcgaggcgggatgggtgacgcccgggccaatgaccggacagcgcgggagtttcaagtcgctgtctccgccccgccgtggtggggggggaagactggtcctataaagacggtcggctgcgacctgggtctagtccccgtgtgctcctcgtcttggtgacttcckkctccgccatggcccgtacgaagcagaccgcccgcaagtccaccggcggcaaggccccgcgcaagcagctggccaccaaggccgcccgcaagagcgccccggccacgggcggcgtgaagaarccgcaccgctaccgacccggcaccgtgacgctgcgggagatccggcgctaccagaagtcgaccgagctgctgatccgcaagctgccgttccagcgcctggtgcgcgagatcgcgcaggacttcaagacggacctgcgcttccagagctcggccgtcatggcgctgcaggaggcgagcgaggcctacctggtgggtctgttcgaggacaccaacctgtgcgccatccacgccaagcgcgtcaccatcatgcccaaggacatccagttggcccgtcgcatccgcggggagcgcgcttgagctctctatcttctccctgtcccccacaaaggctcttttcagagccacactacaccttcccggaaagagctgtttgactttagtttcctctgctcccctgtgagttactgtgtaatgaaactttttctcatgaacaccttcctagtaaagttgcaggatcc

SEQ ID NO: 460 - DNA, 1893 bp, Cricetulus sp.
  misc_feature (183)..(201): n is a, c, g, or t
gatgcgagctctgggccccggcgacggcctccgcgtagagatctgcacccctcggcccgacccctttcccagtcctgccctgcgcgtccgggtcggagaaggcgccgcggacgaccgacggccgaggagcggggatgcacatgcactagcggcaccccctaactcactccctccacaccccgnnnnnnnnnnnnnnnnnnntccaccttctccgcctccgcctcctcctcctccgcctccggcagccgcggcagaaggacccaccctgccccccaccccaccctccgccggctccggctgcggatccagcctctactcyyattttatttattttgggtcgtgcactagcctcagtgcctgcagcccgcgcctcccgggcccgcgggcacctcctccctcggctccggagscccagaccccggccaccctcacctcgacaccctcagaccccggccagtcgccgctagtctccgccgctggaatcttgatagaggctgtcattttttgggggttctggccttttcgacaattttgttcccagccaaggagaggatatcgtgattttctcccctttgagcccaggctctgctctgtgggggggtggggggcgcgccgacccggggagtcgtgccagccgagtcgtgcgggctgtggcagggaaggggccaccatgggatgtactctgagcgcagaggagagagccgccctcgagcggagcaaggcgattgagaaaaacctcaaagaagatggcatcagcgccgccaaagatgtgaaattactcctgctgggggctggagaatcaggaaaaagcaccattgtgaagcagatgaagatcatccatgaagatggcttctctggagaggacgtaaagcagtacaagcctgttgtctatagcaacaccatccagtctctggcagccatcgtccgggccatggatactttgggtgtggagtatggtgacaaggagagaaaggcggactccaagatggtgtgtgatgtggtgagccgtatggaagacactgaacccttctctgcagagctgctttctgccatgatgcgactctggggtgactcagggatccaggagtgcttcaaccgatctcgggagtatcagctcaatgattctgccaaatactacctggacagcctggatcggattggagccgctgactaccagcccactgagcaggacatcctccgaaccagggtcaaaaccaccggcatcgtagaaacccacttcacattcaagaacctccacttcaggctgtttgatgttgggggccagcgatctgaacgcaagaagtggatccactgctttgaggatgtcacggccatcatcttctgtgtcgccctcagcggctatgaccaggtgctccacgaggacgaaaccacgaaccgmatgcaygagtcyctsawgctyttygacwscatctgyaacaacaagtkkttcaymgayacstcyatcatyctsttyctcaacaagaargacmtmtttgrsgagaagatyamsargtcmccmytgaccatctgcttycctgaatacmcaggcyccaryrcctatsacagawgcwgctgsctcacatccarrsrcagtwtgaragyaaraacmrmtcasctmacaargaaatctaywsycaywtsacytgtgccacmgacacsaayaayatccagktkgtmttygaygctgtsacsgacrtcatcatygccaamaatctscggggctgyggmytstactgascyctkgcctcctgymyagcmwsctkytsactkctycmctggacycwkwgctytgmtryyactcgatgctctgtgcactgagggaaaacccagaggctggccctgggggaggaggaagcaccctctgagcatccccaccctaccccactccagagg

SEQ ID NO: 461 - DNA, 1930 bp, Cricetinae gen. sp.
agttaaaccttttcatatatctatcacgtcccagcctgtgacaggttccatccatcctccttgcccctgctccctgcgaccctttttaagaggcgactagattcctcggttctatgccgcacaccatggacaagttttggtggcacgcagcttggggactctgcctcttgccgctgagcctggcgcassagcagatcgatttgaacataacctgccgctatgcaggtgtattccacgtggagaaaaatggccgctacagcatctcacggactgaggcagctgacctctgccaagctttcaacagcactctgcccaccatggaccagatggtgatggccctgagcaagggctttgaaacatgcaggtatgggttcatagaaggccacgtggtgatcccgaggatccagcccaatgccatctgtgcagccaaccacactggggtgtatatcctcacatccaacacmtcycactacgatacatattgcttcaatgcctcagcaccccttgaagaagactgtacatctgtcacagacctgcccaattccttcgaaggaccagttaccataactattgtcaaccgtgatggtacccgctacagcaagaagggcgagtatagaacacaccaagaagacattgatgcctcaaataccacagatgatgatgtcagcagcggatcctccagtgagaagagcacctcagggggctatgttttccacacctaccttcccactatacactcaactgcagaccaggatgatccctacttcatcgggagcaccatggccaccagagaccaagactcatccatggatcccagggggaattccctcactgtgactgatggatccaaattaactgracactcaagtgggaatcaagacagtgggsywaacwcaacttctcgtcctgggaggaaaacctcgagattccagaatggctcatcgtcttggcatctctcctggcgctggctctgattcttgctgtttgcattgctgtcaacagtaggagaaggtgtggrcagaagaaaaagctggtgatcaacagtggcwrtsgammsryggwssacwggaagccaagtgagctcaacggggaggccagcaagtctcaggaaatggtgcrtkkggtgaacaaggaaccmtcagagactccwgaccagtttatgacagckgatgaracccggaatctgcagaaygtrgacatgaagattggggtgtagtgcctataccagyaayttggaaagacaccaaaatcgcaracwtgtcaatactgggagctgggacccttaacagatgcaatgtgctactgattatttttattgggggtagtttctgyryaaaattttctattcmytttkcattttgttaawagtcyrttccaatttatraaaacagcattgctttctgmaatgagggcccaaagaataytccattaagawttygaytcttccagctccttcctagaggtcttgcattcccaakggatgctatggayggcttckatcamwtgcawattcytggtccctattgaaycttttccctaamctaagtcccargtaacagycacccagccagggacttaccccagggctwmgaggkattggtctctgggaggaaatttgaatgggtccatattgcctctcmrcaagyccartccttgggyattgttttccagttgggtgggagatcaggtgtactggttacacacctttttatagactcccctttctgctggaaaattttcagatgcttctgagagatccccaaagggtgaagctatttatctgtagtaagctatttatctttgtttttgaaatatcaaaccctggaggtcctttgtgcagtatgacttttgactttttttaggttactttgtcagaagcataacagggtataagttgattcataataaacacctgtcaatcttccatctt

SEQ ID NO: 462 - DNA, 2341 bp, Mesocricetus auratus
gaattccagcttcctcgcctctcacacacaattgagatacctgcttttggcagacttcatggaatcctgaaaatccagtctcccctctttatattagatgcaaatgccaacatacagaatgtaactactttagagaacaaagcagagattgtggcctccatcgctgctacaggagagtccgaaattgaagctctcaattttgattttcaagcacaagctcaattcttggagctaaaccctaatcctctgatcctgaaggaatccatgaacttctccagcaagcatgcgagaatggagcatgagggtgagatactattttctggaaagttcattgagggaaaattggacacggtcgcaagtttacagacagagaaaaatatggtggagtttaataatggtatgattgtcaagataaacaatccaactcatccttgacagtcacacaaagtattttcacaagttgagtatccccaggctggacttctccagtaaggcttcctttaacaatgaaatcaagatgctattagaagctggacatgtagcatggacttcttcagggactgggtcatggaattgggcctgtcccaacttctcagatgagggcacacattcgtccaaaattagcttcactgtagaaggacccattgctttttttggcttgtctaataacatcaacggcaaacacctgagggttatccagaaattggcttatgaatctggcttcctcaactattccatgttggaagttgagtcaaaagttgaatctcagcatgtgggttccagcattctaactggcaagggaacggtactgctcagggaggcaaaggcagaaatgactggcgagcacaatgctgacttgaatggaaaagttattgggactttgaaaaactctctttccttttcagcacaaccatttatgattactgcatccacaaataatgatgggaatttgaaagttagttttccactaaagttgactgggaaaatagacttcctgaataactatgcactatttttgagtcctcatgcccagcaagcaagctggcaagtgagtgctaggttcaatcagtacaaatataatcaaaatttttctgctataaacaatgaacataacatrgaagcccatgtaggaatgaatggagatgccaacctggatttcttaaccatacctctaacaattcctgaagtgaaactaccttacatagggctcacgactcccttgctgaaggatttctccatatgggaagaaacaggcttgaaagaatttttgaagacaacaaagcaatcgtttgatttaagtgtaaaagctcaatataaaaagaacagagacaggcattccattgcgattcctctgaatgggttttatgagtttattctcaacaatgtcgactcctgggatagggaagattgggaaagtcagagacagcgcattagactatcttatttcatcctataatgaagcaaaaaacaagtttgaaaattcccttattcagccctccaggacctttcaaaagcgtggatacactatcccatttgtcaacattgaagtgactccattcactgtagagacactggcctccagccatgtgatcccaaaagcaataaatacccccagtgttcacattctgggccctaatgtcattgtgccttcatacaggttagtgctgccctccctggagctgccagtccttcgtgtccccaggaatctactcaagttttccctcccagatttcaaggaattgagaacaattgacaatatttatattccagctcttggcaattttacctatgatttttcctttaaatcaagtgtcatcacgctgaataccaacgttggactttataaccggtcagacatcgttgctcatttcctttcttcctcttcatttgtcacggatgccctgcagtacaaattagagggtacttcacgtctgactcggaaaagaggattgaagctagccacagccgactctctcactaacaaatttgtaaagggcaatcatgatagcacctttagcttaaccaagaaaaacatggaagcatcagtgaaaacaactgcaaacctccatgctcccattttaacaatgaacttcaagcaggaacttaatggaaatgccaagtcaaagcccattgtctcatcatccattgaactaaactatgacttcaattcctcaaagctgtactctactgctaaaggaggtgttgaccacaagtttagcttagaaagtctcacttcctacttttccattgagtcatccaccaaaggaaatatcaagggatctgtcctttcccaggaatattcaggaagtgttgccagtgaggccaacacatacctgaattc

SEQ ID NO: 463 - DNA, 3002 bp, Cricetinae gen. sp.
  misc_feature (102)..(117): n is a, c, g, or t
  misc_feature (685)..(702): n is a, c, g, or t
  misc_feature (733)..(750): n is a, c, g, or t
gaattctggggaatgtggtctacatatgtggataacagttctccttagtatagagacacacacccacaggacccagagtccttgatagcagccttctgagtnnnnnnnnnnnnnnnnccacaagatcatacccagttccaaattccactgatctccagaagcccaaagccagggcacacccatcatgcactgcttttctcccagacaagactgggcgcaattcttgtttccagagaatagagagagagacatttgtcaattttgccctacgagaatgagaatgagttgtgtatctttgctttacagttacttttctcctaaatgctgtcaaggaataggcctgggagggaggggtggctgatgccatgacygtcacccatttgttctgcaaaaaatgtcaagtrgcttcagcctgcgtgctggacartgwygtgttgytggagtayamtgaygccttgttcttcattttgcagatyagccatcatggcraaccttagctactggctgctggcactctttgtggctaygtggactgatgttggcctctgcaaraagcggccaaagcctggagggtggaacactggyggaagccgataccctgggcagggcagccctggaggcaaccgttacccacctcagggtggyggcacmtgggggcaaccccatggtggtggmtggggacagnnnnnnnnnnnnnnnnnnggacarccycatggtggtggytggggtcagnnnnnnnnnnnnnnnnnnggtcaaggaggtggcacccacaatcagtggaacaagcccartaagccaaaaaccarcatgaagcayrtggcmggygckgctgcggcwggggcvgtggtggggggccttggkggctacatgctggggagygccatgagcagrcccatgmtscattttggcaatgactgggaggaccgctactaccgtgaaaacatgaaccgctaccctaaccaagtgtaytaccggccagtggaccagtacaacaaccagaacaacttygtgcacgaytgtgtcaayatcacsatcaarcagcayacagtcaccaccaccaccaagggggagaacttcacggagaccgacrtcaagatratggagcgcgtggtggagcagatgtgtrycacccagtatcagaaggagtcccaggcctactaygayggaagaagrtccagcgcggtgctsttctcctcycctcctgtgatcctcctcatttccttyctcatcttcctgatrgtgggatgarggaagcctccctgcttgtacttcctcgttcttgtgstctargctgggggaggggttatccaccgtagctcttttaattgaggtggtgtctcattcytgcttctctttgtcccccataggctaatgcccttggcactrgtgggccctgggaatgtayagtagaccagatgctattcsatccagagcctttkrattgagtccatcacgggccagcactaacaccaggcctatctgaatataacagcaagtaatggctggctagtcagggctttgttttggtctagtgagtaaatactgatgtgaccctctgacttccacacagagtacgcagtgacagacacacctaactgttaaaataggcgaagggttctacagccaaagaagtcactgtttggcatggtccctaagaaacagcctcccatttgggatatttaaagcatccatatgaggcattcctccttcactaacaaactctagctgagtaaggcaacgggaaaaaaacaaaattaccctactaacatggaaagcaaacctgtgttcatttcctaggaactagaatgatgttttagccttgcttggattgaaccaggagattttggctctgaagagccaacactgtaaaaatgtggtcctcctgcaaagggagagatggttaggacacaaagtcacggcgcttggcgtttcttcatttctgtctcataattgtcaaaagtcacaattaggtcatgcccttagttaatatacttgtatttgaatcggacgacaagagacaatctaaaaattctcctaggttgtagatgaaataggctccattcaaggtgaaaagacagtttgttagcgttgcttatgtaaggcaaactttgttccttaagttgctccgtgtttccctgascagacataaccactctgcaacagcattgccctgctgtagaatatataaagtgtaactacaagcttagaccttctgttctgatgcatccgaagtacgtaatgcactgaccatttcacccggtatcagatgttttctgtgtggcccctagctttccttcaacatgcattcggttccatatatgaatccaaagtggaccccctaactggtctctgaaatctgcatgtacttcacattttctatatttgtaactttgcatgtccttgttttgtcatataaaaagtttataaatgtttgctatctgactgacattaaataggagctatgatgagcacccctgcagggtttgttctctgttctctgcttctggcccttgtgtttgttgccagggtaacttgggctcacacaaggtaggtaatggctaatttcacatgccttcccctgatgggcctcagttcttacctctggtcatagattactttttttctactgccttttcatttttcccttatatgtactcagccctgctgaaccacaaaggcatccctggggggaggttgtatgtaggtagggctcatgttctgaaagaggttttcccccaccccctccctcccccctcccccttcctccctccctcccttctttaatgtgtatcaggagtttgcctgcatgtacttgtctgtgtaccacatgctttgccctcgagtcaaaagaggggctcagatcccctgaaattgaagttacaaatgtttgtgagccattatgtggagtctggaactcaaacccaggtcctctgcaagaagagctagtggtcttaaccagtgattcactgcaccagccccagtggaaatgtcttcctgaattc

SEQ ID NO: 464 - DNA, 4809 bp, Mesocricetus auratus
  misc_feature (1031)..(1060): n is a, c, g, or t
  misc_feature (1587)..(1645): n is a, c, g, or t
  misc_feature (2451)..(2478): n is a, c, g, or t
  misc_feature (2742)..(2793): n is a, c, g, or t
  misc_feature (3085)..(3109): n is a, c, g, or t
atggagcatcaacggcagcagcaagaggaccacgcgaacgaggcaaactatgcaagaggcaccagaccccctatttctggggaaggaccaacttcccagccgaacagctccaagcaaactgtcctgtcttggcaagctgcaatcgatgctgctagacaggccaaggctgcccagaccatgagcacctccgcacccccacctgtaggatctctctcccaaagaaaacgtcagcaatacgccaagagcaaaaaacagggtaactcgtccaacagccggcctgcccgagcccttttctgtttatcgctcaataaccccatccgaagagcctgcattagtatagtggaatggaaaccttttgacatatttatattattggctatttttgccaattgtgtggccttagctatttacatcccattccctgaagatgattctaattcaacaaatcataacttggaaaaagtagaatatgccttcctgattatttttacagtggagacatttctgaagattatagcgtatggattgttgctgcaccctaacgcgtatgttaggaatggatggaatttactggattttgttatagtaatagtaggattgtttagtgtaattctggaacaattaaccaaagaaacagaaggcgggaaccactctagtggcaaatcaggaggctttgatgtcaaagccctccgtgccttccgagtgttaagaccacttcgacttgtatcaggagtgcccagtttacaagttgttctgaactccattataaaagccatggtccccctccttcatatagcccttttggtattatttgtaattatcatctatgctattataggattggaactttttattggaaaaatgcacaaaacatgtttttttgctgactcagatatcgtagctgaagaggacccagctccgtgtgcgttctcagggaatggacgccagtgtgccgtcaatggcacggaatgcaggagtggctgggtgggccccaatggaggcatcaccaactttgataactttgccttcgnnnnnnnnnnnnnnnnnnnnnnnnnnnnnntggagggctggacagacgtgctctactggatgaatgatgctatgggatttgaattgccctgggtgtattttgtcagtctcgtcatctttgggtcatttttcgtactaaatcttgtacttggtgtattgagcggagagttctcaaaggaaagggagaaggctaaagcgcgaggcgatttccagaagcttcgggagaagcagcagctggaggaggatctcaagggctacttggactggatcacccaagcagaagacatagatcccgagaacgaggaggagggcggagaggaaggcaaacgaaacactagcatgcccaccagtgagacggaatctgtgaacaccgagaacgtaagtggcgaaggcgagacccagggaagctgtggaagtctctgtcaagccatctcgaaatccaaactcagccgacgctggcgtcgctggaatcgattcaatcgcaggaggtgcagggctgccgtgaaatctgtcacgttttactggctggttattgtcctggtgtttctcaacactttnnnnnnnnnnnnnnnnnnnnnnnnnnnnnnnnnnnnnnnnnnnnnnnnnnnnnnnnnnncaaacaaagtcctcttggctctgttcacctgtgagatgctggtgaagatgtacagcttgggcctccaggcgtattttgtctccctcttcaaccggttcgactgctttgtggtgtgtggggggatcaccgaaaccatcctggtggagctggagctcatgtctcctctgggggtctctgtgttccggtgcgtgcgcctcctgaggatcttcaaagtgaccaggcactggacttccctgagcaacttggtggcgtccttgctgaactccatgaagtccatcgcctccctgctgctgctcctcttcctcttcatcatcatcttctccttgctggggatgcagctgtttggggggaagttcaattttgatgagacccaaaccaagcgaagcacctttgacaactttccccaagcgctcctgactgtgttccagatcctgacaggtgaagactggaatgcggtgatgtatgacggcatcatggcctacggaggcccatcctcttctgggatgattgtctgcatctacttcatcatcctcttcatctgtggcaactatatcctactgaacgtcttcttggctattgctgtagacaatttggctgatgctgaaagcttgaacactgctcagaaagaggaagctgaagaaaaagagaggaaaaaaattgccagaaaagaaagcctagaaaataagaagaacaacaaaccagaagtcaaccagatagccaacagtgacaacaaggttacgattgatgattatcaggaagagacggaagataaggacccttacccaccctgtgatgtaccagtaggnnnnnnnnnnnnnnnnnnnnnnnnnnnncccgaggtccctgctggcccccgtcctcgcagaatctcagagctgaacatgaaggagaagattgtacccatccccgaaggaagtgctttcttcatccttagcaagaccaacccgatccgcgtgggctgccacaagctcattaaccaccacatcttcaccaacctcatcctggtcttcatcatgctgagcagcgccgcccttgcggccgaggatcccatccgcagccattcattccggaacactatactgggttactttgactannnnnnnnnnnnnnnnnnnnnnnnnnnnnnnnnnnnnnnnnnnnnnnnnnnnggagctttcttgcataaaggggctttctgcaggaactacttcaatttgctggacatgctggttgtcggagtgtctctggtgtcctttgggattcaatccagcgccatctccgtggtgaagattctcagggtcctgagggttttgaggcctctcagagcaatcaatagagcaaaaggactcaagcacgtggtccagtgtgtctttgtggccatccgaaccattggcaacatcatgattgtcaccaccctgctccagttcatgttcgcgtgcatcggggtccagttgttcaagnnnnnnnnnnnnnnnnnnnnnnnnnaagccaaaagtaaccccgaagaatgcagggggctcttcattctctataaggatggggatgtcgacagtcccgtggtccgtgagaggatctggcagaacagcgattttaattttgacaacgtcctttcggccatgatggcactcttcacggtctcgactttcgagggctggcccgcgttgctgtacaaagccatcgactccaacggggagaacgccggtccagtctacaaccaccgcgtggagatctccatcttcttcatcatctacatcatcatcgttgcctttttcatgatgaacatctttgtgggctttgtcatcgtcaccttccaggagcagggagaaaaagagtataagaactgtgagctcgacaaaaaycagcgtcagtgtgttgagtatgccttgaaagcacgccccttacggagatacatccccaaaaacccctaccagtacaagttctggtacgtggtgaactcctcgcctttcgaatacatgatgttcgtcctcatcatgctgaacacgctctgcctggccatgcagcactacgagcagtccaagatgttcaatgatgccatggacattctgaacatggtcttcacgggggtgttcactgtcgagatggttttgaaagtcattgcgtttaagcccaaggggtattttagtgacgcctggaacacgtttgactccctcatcgtaatcggcagcattatagacgtggccctcagcgaagccgacccaactgaaagtgaaagtctccctctcccaaccgctactccagggaactctgaagagagcaatagaatctccatcacctttttccgtcttttccgagtgatgcggttggtgaagcttctcagcaggggcgaaggcatccggactctgctgtggactttcattaagtccttccaggcactaccatatgtcgccctcctcatcgccatgctcttcttcatctatgcggtcatcggcatgcagatgtttgggaaagttgccatgagagataacaaccagatcaacaggaacaacaactttcaracgtttccccaggcggtgctgctgcttttcaggtgtgccacaggggaagcctggcaggagatcatgcttgcctgcctcccggggaagctgtgcgacccagactcagactacaaccccggagaggaatacacttgcggaagcaacttcgccatagtctatttcatcagcttttacatgctctgcgctttcctgatcatcaacctcttcgtggctgttatcatggacaattttgactacctgacccgggactggtctattctggggcctcatcacttggatgaattcaaaaggatatggtcagaatacgaccctgaagcaaagggaaggataaaacacctcgatgtggtcactcttctccgacgaatccagcctcctctggggttcggaaagttatgtccacaccgagtagcttgtaagagattagtcgccatgaacatgcctctcaacagtgacgggacagtcatgttcaacgcaaccctgtttgccttggtccgtacggctctcaagatcaagactgaagggaacttggagcaagccaacgaagagctccgtgcagtgataaagaagatctggaagaagacgagcatgaagctgctggaccaagtcgtccctccagctggtggtcagtgtggcctctgcttcctaagtccgtctcggtcgaggagctag

SEQ ID NO: 465 - DNA, 4305 bp, Cricetulus sp.
  misc_feature (857)..(873): n is a, c, g, or t
aagcagcggttccaggagcctgctcccatctccccaggcccgctaaactcggaatcgcttcttcccaattctacgactgggcggactttgcgaaggaaagcggaggtcgtgatggagtttgaagaggactttagcggaagaaaagacaagaacttcttgaagatgggcagaaagagtaaaaaggagaagaaagagaagaaaccagtggtcagtgtgtttacaatgtttcgctacgcaggttggctggataggttgtacatgctggtggggactctcgcagctattatccatggagttgcactcccgcttatgatgctggtgyttgragayrkgacagamagmktwrmaagkrkargaaasawmsmaacmartgstastrwkwwtrcmactcaagtcaatgcttcagacatctttggcaaactggaggaagaaatgaccacgtacgcctattactacacagggattggtgctggtgtgcttatagttgcctacattcaggtttcattttggtgcctggcagctggaagacaaatacacaaaattagacagaagttttttcatgctataatgaatcaggagataggctggtttgacgtgcacgacgttggggagctcaacacccggctcacagatgatgtctccaaaattaacgaaggaattggtgacaaaattggaatgttctttcaggcaatggcaacattttttggtggttttataataggatttactcgaggctggaagctaacccttgtgattttggccatcagccctgttcttggactgtcagctggtatttgggcaaagatattatcttcatttactgataaagaacttcaggcatatgcaaaagctggagnnnnnnnnnnnnnnnnnttagcagccatcagaactgtgattgcatttggaggacaaaagaaagaacttgaaaggtacaacaacaatttagaagaagccaaaagacttgggataaagaaagcgatcacagccaacatttccatgggcgcagctttccttcttatctatgcatcatatgctctggccttctggtatggaacgtccttggtcatctcaaaagaatattctattggacaagtgctcactgtcttctttgctgtattaattgsgscattcagtattggacaggcatctccaaatatcgaagcctttgccaatgcaagaggagcagcctatgaaatcttcaacataattgataataagcccagtattgacagcttctcaaagaatgggtacaaaccagacaacattaaaggaaatttggaattcaaaaatattcacttcagttacccatctcgaaaagacgttcagatcttgaagggcctcaacctgaaggtgcagagcggacagacagtggccctggttggcaacagtggctgtgggaaaagcaccactgtccagctgctgcagaggctctacgaccccacagagggcgtggtcagtatcgacggwcaggacatcaggaccatcaatgtgaggtatctgcgggaaatcattggggtcgtgagtcaggaacctgtgttgtttgccaccactatcgctgaaaacattcgctatggccgagaaaatgtcactatggacgagatcgagaaagctgtcaaggaagccaatgcctatgacttcatcatgaaactgccccataaatttgacactcttgttggtgagagaggagcacagctgagtggaggacagaaacagagaatcgccattgctcgtgccctggtccgcaaccccaagatccttttgttggatgaggcgacatcagccttggacacagaaagtgaagccgtggttcaggctgctctggataaggctagagaaggccggactaccattgtgatagcccaccgcttgtctacagttcgaaatgctgacatcatagctgggtttgatggtggtgtcattgtggagcaaggaaatcatgaagagctcatgagagagaagggcatttacttcaaacttgtcatgacacagacagcaggaaatgaaattgaattaggaaatgaagttggtgagtctaaaaatgaaattgataatttagacatgtcttcaaaagattcagcatccagtctaatcagaaggagatcaactcgcagaagtatccgtggaccacatgaccaagacaggaagcttagtaccaaagaggccttggatgaagatgtacctccaatttccttttggcgtatcctaaagttgaattcatctgaatggccatattttgtggtkggtatattctgtgccatagtaaatggagccttgcaaccagcattctcaataatattttctaaggttgtaggggttttcacaagaaatactgatgatgaaaccaaacgacatgatagcaacttgttttccttattgtttctgatccttggggtcatttcttttattacattttttcttcagggcttcacatttggcaaagctggagagatcctcaccaagcgactccgatacatggttttcaaatccatgctgagacaggatgtgagctggtttgataaccctaaaaacaccactggagcattgaccaccaggctcgccaacgatgctggtcaagttaaaggggctacaggagccagacttgctgtcattacccagaatatagcaaatcttgggacaggaatcatcatatccctaatctatggctggcagttgacacttctactcttagcaattgtccccatcattgcaatagcaggagtggttgagatgaaaatgttgtctggacaagcactaaaagataagaaggagctagaaggttctgggaagattgctactgaagcaatagagaacttccgcactgtcgtctctttgactcgggagcagaagtttgaaaatatgtatgcccagagcttgcagataccatacagaaatgctctgaagaaagcacacgtctttgggatcacattctccttcacccaggccatgatgtatttttcgtatgctgcttgtttccggtttggtgcttacttggtggcacgggaattaatgacatttgaaaatgttctattagtattctcagctattgtctttggtgccatggcagttgggcaggtcagttcatttgctcctgactatgccaaagccaaagtgtcggcatcgcatatcatcatgatcattgaaaaagtcccttccattgacagctacagcaccggaggcctgaagcctaatacattggaaggaaatgtgaaatttaatgaagtcgtgttcaactaccccacccggcctgacatcccagtgcttcaggggctgaacctggaggtgaagaagggccagacgctggccctggtgggcagcagtggctgcgggaagagcacagtggtccagctgctcgagcggttctacgaccccatggccggaacagtgtttctagatggcaaagaagtaaaccaactaaatgtccagtggctccgagcacacctaggcattgtgtcccaagagcccatcctgtttgactgcagcatcgctgagaacatcgcttatggagacaacagccgggtcgtgtcccaggatgagatcgagagggcggcgaaggaagccaacatccaccagttcattgagtcactgcctgacaaatacaacaccagagtaggagacaaagggactcagctgtcgggtgggcagaaacaacgcatcgccatagcacgcgccctcgtcagacagcctcacattttgctcctggatgaagcaacatcagccctggatacagagagtgaaaaggttgtccaggaagctctggacaaagccagagaaggccgcacctgcattgtgatcgctcaccgcctgtccaccatccagaacgcagacttgatcgtggtgattcagaatggcaaggtcaaggagcatggcacccaccagcagctgctggcacagaaaggcatctatttctccatggtcagtgtgcaggctggagcaaagcgctagtgaactgtgttaaatatttttttaatatttgtattaacacatagcatttaaccaaagttaaaaagaaagtacgtaccagaataaccagttatctatttcctgtcattatgagaagcatttagtccagtttagagttttcagagactttgtaattaaagkgacagaaatagatatatcatcaaatggaaaggaatcatttaaattgcactataaaattatacaagaattaaaagtaaatgtttcataatatatacttttatttatactttctcatttgtaactataactgatttccttgctaaacaaatcatgtgtgtatcaaaaattaatgaaatgtttgtataaagtatatatagtgaaact

SEQ ID NO: 466 - DNA, 2855 bp, Cricetulus sp.
  misc_feature (2610)..(2631): n is a, c, g, or t
  misc_feature (2733)..(2764): n is a, c, g, or t
ccgcgggcgcccggccgcgcgggcagcctcgggacaatggggccgcagcgcttgctgctcgtcgccgctggcctcagcctgtgcggtcccttgctgtcttcccgtgtccccgtgcgccagccagaatctgagatgacagatgccactgtgaacccccgctcattttttcttaggaatcccggtgaaaatacatttgaactgattcccctgggggatgaggaggagaaaaatgaaagcaccttgccagagggcagggcaatctacttaaataaaagccactctcctgcaccacttgctcccttcatctctgaagatgcctcagggtatctgaccagcccctggctgaggctcttcatcccctcggtttacacctttgtgtttgtcgtcagccttcctctgaacatcctggccatcgcagtgtttkkcttgaagatgaaggtcaaaaagccggctgtggtatacatgctgcacctggccatggctgacgtgctgttcgtgtccgtgctycccctgaaaatcagctactacttttccggcagtgattggcagtttgggtctgggatgtgtcgcttcgccactgcagcgttttattgtaacatgtacgcctccatcatgctcatgactgtcataagcattgaccggttcctggcagtcgtgtaccccatccagtccctgtcctggcgcactctgggcagagctaacttcacttgcctggtcatttgggtgatggccatcatgggggtggtgcctcttctcctcaaggagcagaccacccgggttccagggctcaacatcaccacctgccaygatgtcctcaatgagaccctgctgcagggcttttactcctactacttctcggccttctccgctgtcttctttcttgtgccattgatcatttccacgatatgctacatgtccatcattcggtgtctcagctcctcctcagttgccaaccgcagcaagaagtcccgggctttgttcctgtccgctgctgtgttctgcgtcttcatcgtctgctttggacccaccaacgtcctcctgatcatgcactacctgctcctgtctgacagccctgccacagagaaggcctacttcgcttacctcctctgcgtctgtgtgagcagcgtgagctgctgcatcgatcccttgatttactactacgcctcctccgagtgccagaggmmcctctacggcatcttgtgctgcaaagaaagctccgaccccaacagttacaacagcaccggccagctgatgccgagtaaaatggatacctgctctagtcacctgaataacagcatatacaaaaagctattagcttaggggaggattgctagaaggtcacatagaaaaggttggaaaagtggacagcccgggatcctggcaagaactatatttacttcacaagccatgactgacttgcatgtctacttcttatwagtgctatcaagcataattatcagaaaggtaatgggaaccagagagagatttccagtgctgcggtagcaaccgtcacttcttgtatatctaggtgacttaattatataggtggtgtgcgcacacatatttgcaatgcagtatgaaatcaatgctttgacactttcttgtttattccctagcaattactatggaaataattggattctctgagttataataaacaaagtctgttaacaytgaacagctgaaggtatctaatgatagggaaggagtccatagtttakacttcacacagcttttgcccatatgtatttttttcagttatttgatggtaatgtttaaagwatagaagggtgaaacagtattatctgtataggggaagatctagtgcttttcatcttgaattaccaaagccgttggaaagcctattttgatatggggtatcatttttgcaatttacatactgaatacatggaccaagactgagcataaaactcaccaggatcataagaaaccttacaaagcagccaagggggcctctgacagcagatgcatacttaaccagctgtgcctcccasagagtggtgatggggaccaccaggcccactccttcctccaaggcwtcccattagctatgagttgactgtatctggattgaagctggcaagataggatatgacatccasggagggaatagccacaaaagtcgtctgcacatctgaggagcagagaaggtgtgtttatatccagtagctgtcctgcaaggctggctcttgcacagacacacccatgtgccctgggtcactctggtggatactgggcctgcagactgaccactgcaggagattaactgagtcttgcctttactctagcaaagcagatagctgacatggccaatgtgatgtatacactgcaaatacaccattgtacatagaagtgtgtcagccacacatcgccaagcatatttcacataagcaaggcctaacagctaaacagctttggagatctgagtttctgcatcagtagctgtaggttaggataaaaacacagtttaagatgtatatttttaagaaacaaacccttaagtctacaataattagacactatttatttacaaatgttttattaaaaattgcccaaatcagacaggcattgaggcacatgcctttaagnnnnnnnnnnnnnnnnnnnnnntaggcagatctctgtgcattcaggtcagcctggtctacatgatgacttctaggtcatctagggctatatagtgagaccttggcttaaaacaataatgacatnnnnnnnnnnnnnnnnnnnnnnnnnnnnnnnnaaaacccacatttttagaaagcaagaaaacacaaaaagttacctgaatccagttttaagaaatacataggtcagtctggttaaaaaaaaaa

SEQ ID NO: 467 - DNA, 2182 bp, Cricetulus griseus
  misc_feature (1556)..(1588): n is a, c, g, or t
ccatggagtggggggtggggtagggaaagtttatgtgggggcttttcttccacgtgttccagaacactaccatctggcccatctgctaggcaaacacctcattgccctcaggcagaaagtcctggtgtgtatccttccagactggcctgctcccctgctcttgaatttcacctcccatagagacaccttcaacactttccctcttcaaaagctctagctgcccccaagaataagtgtccttagaacaaggcttgtgtcttcccagtctctagtctctggctacgtgctagcgctagcgactcagcggattctaatcctaccctcatgttaggcaagtgactaagtgactgagcctccgtttccacatttataccgaacccacacccccaccccaccccccgccccgcgttgtaaagcaaaaatgagaggtctaacataatgcctggcagcacgggatacgcagtggggacatcaccaacagcgactaagtctgggctagaactgtttttttgtaacctggtcccacttccaacttaattttcctgtaagcagggtctccacaacccgctttcatccaggttggcacacacgataagcacgggatgctgtacccgcgcaggggaaactgggtagccccctctgcacccggcccctccgccccagggcgcggcaaagcgcgggtggacaagcttccgggaactgtcccggtccgagcgcagatcctttgcgctcagtccgtgggccgtgcggagaggggcgtgactcagagcggaggcgtgtgcaggcggtatcccacgtgcaggaagagggacgcttgcagtctgcgggacgtgtgcagtctgcgggggcgtatgcaggtggtgggcaacctgggcggaccttttgcgctcgccccaaatccttccctctataaaggcagcgctctgcacgcttctctccatcacgccttctcctagcgctcgggtttctgtgtttcatcgctcctcagccggtctccaaccgtcgtcttcactcgccatggaccccaactgctcctgtgctacaggtaagggggactgctgacgggcctccgcagcctaagtttctccgagagcwwggcaaggtgtttggggtcccttctctagtcactttcagggtactacctgctgccctttcccaacgaattctggagaaccccttttaaccagtcttcacccaagctgggtcggggatttgcacttgagttcctatgggaactcctgcgtccaggtgcgtcaggtcgcgctaactgccttgtccctgcagatggatcctgctcctgcgctgggtcttgcaaatgcaaagagtgcaaatgcaccacctgcaagaaaagtaagttggatcctctctatccctttacccttcgctctgcatcagcccctagtccgccctaccatcccgggagcatccaggtgtggtgcctctgactcagtttttccgctcacggtcaactcttctcctctaggctgctgctcctgctgcccggtgggctgtgcgaagtgctcccagggctgcgtctgcaaagaggcttcggacannnnnnnnnnnnnnnnnnnnnnnnnnnnnnnnntcagctgcctgtaaatagagcaatgtgtagaaacgtatttttttttacaaccccggcctattcgccacacccctttctataaagcatstaattgataataaaagcgttgacttgattaactcagcttgtctttgtgtgcattggaaataagggactgggcggagtttgaaatggaactgcagaggcttgagttctggactcaaatactagtttgtggcttgggctgctcaggttacctctcgggcttttatcctggaagtggtgggcaagaagatggcactagtcacacaaatgtgccagtccccactgtgcatgtgtatattggggattaaacctagggcttccggcactaatgagtcacacccctaccccctagatacaagatactctttctctctccaaattcagttggattttaggcttcacattgacttaagtatggaatgccagtacctaaacttaagtaaataaaacaaaaagtaagaattagaggggctggctattggtgcctgcctttaatccagcagaggctggtgaatcctgagttgggaggctagcctcatctacagaacaagttctggggtggccagggat

SEQ ID NO: 468 - DNA, 646 bp, Mesocricetus auratus
ctctccagcgccccgctcagcgagccacgtggaccaacttcggcgcgcggtgttcgcttggttccagtggggctcgccgcgcctcccgcttctcggtgctcgcctcgtctsagctccgaccccatggcggctctggtgttggaggacgggtcggtgctgcagggccggccctttggggccgctgtgtcgactgctggggaagtggtgtttcagaccggcatggtcggctacccagaggccctcactgacccttcctacaaagctcagatcctggtgctcacgtaccctctcatcggcaactacggcattccctcagatgaagaggacgagttcggcctgagcaagtggtttgaatcctcggagawccacgtggcaggactggtggtgggagaatgctgtcccacgcccagccactggagtgccacctgcaccctgcatgagtggctgcagcagcatggcatccccggcctgcaaggagtagacactcgggagctgactaaaaagttgcgggagcaagggtctcttttggggaagctggtccagagtgggacagagccttcaaccctgccgttcgtggaccccaatgccaggcccctggcaccagaggtwtckattaagaccccacgggtattcaatgcagggggtg

SEQ ID NO: 469 - DNA, 4062 bp, Cricetinae gen. sp.
  misc_feature (405)..(419): n is a, c, g, or t
  misc_feature (1911)..(1952): n is a, c, g, or t
  misc_feature (2375)..(2419): n is a, c, g, or t
  misc_feature (2527)..(2551): n is a, c, g, or t
  misc_feature (2634)..(2651): n is a, c, g, or t
  misc_feature (3090)..(3106): n is a, c, g, or t
tgagccatggggccggagccgcagtgaacaccatggagctggcggcctggtgtggctgggggctcctcctcgccctcctgtcccccggagcctcgggcacccaagtgtgcaccggcacagacatgaagttgcggcttcctgccagtcctgagacccacctggacatcgtccgccacctctaccagggctgccaggtggttcagggtaacctggagcttacctacctgcctgccaacgccaccctctcattcctgcaggacatccaggaagttcagggatacatgctcatcgctcatagccaggtgaggcacgtcccactgcagaggctgcgcatcgtgagagggacccagctctttgaggacaagtatgctctggctgtgctagacaaccgagatcctttggacnnnnnnnnnnnnnnnacaggcagaaccccagaagggctgcgggagctgcagcttcgaagtctcacagagatcctgaagggaggagttttgatcagagggaaccctcagctctgctaccaggacaccgttttgtggaaggatgtcttccgcaagaataaccagctggctcctgtagatatagacaccaatcgctcccgggcctgcccaccctgtgccccagcctgtaaagacaaccactgctggggtgcgagccccgaggactgtcaaaccttgaccggcaccatcgcaccacgggctgtgcccgctgcaagggcccggctgcccactgactgctgccatgagcagtgtgctgcaggctgcacgggccccaagcattctgactgcctggcctgcctccacttcaaccatagtggcatctgtgagctgcactgcccagccctggtcacctacaacacagacacctttgagtccatgcccaaccctgagggtcgttacaccttcggtgccagctgtgtgaccacctgtccctacaactacctttctacggaagtgggatcctgcactctggtctgtcccctgaataaccaagaggtgacggctgaggacggaacacaacggtgtgagaaatgcagcaagtcctgcgcccgagtgtgctacggtctgggcatggagcacctgcgaggggcaagggccatcaccagtgccaatatccaggagttcgctggctgcaagaagatctttgggagcctggcgtttttgccagagagctttgatgggaacccctcgtccggcattgcccctctgacgcccgagcagctccaagtgtttgaaaccctggaggagatcacaggttatctatacatttcagcatggccagacagcctccatgacctcagcgtcttccagaaccttcgagtcattcggggacgagttctccatgatggtgcttactcattggcgctgcaaggcctggggatccgctggctggggctgcgctcactgcgggagctgggcagcgggctggtactcattcaccgaaacacccatctgtgctttgtacacactgtgccttgggaccagctcttccggaacccccaccaggccctgctccacagtgggaacccatcagaggaggaatgtggtctcaaggactttgcctgctacccactgtgtgctcatgggcactgctgggggccagggcccacccagtgtgtcaactgcagtcacttcctgcggggccaggagtgtgtgaaggagtgtcgcgtgtggaaggggctccctagggagtatgtgaatggcaagcactgtctgccatgccaccccgagtgtcagcctcaaaacagcacagagacctgcactggatcggaggctgaccagtgtaccgcctgcccccactacaaggactcgcccttctgcgtggctcgatgccccagtggagtgaaaccagacctctcctacatgcctatctggaagtacccagatgaggagggcatgtgccagccctgcnnnnnnnnnnnnnnnnnnnnnnnnnnnnnnnnnnnnnnnnnnggctgcccagcggagcagagagccagcccggcgacttccatcatcgcaacggtggwgggcatcctgttgttcctggtcataggggtggttgtcgggatcctgatcaagagaaggcggcagaagatcagaaagtacacaatgcgaaggctgctgcaggaaactgagctagtggagccgctgacgcccagtggagccatgcccaaccaggctcagatgcggatcctaaaagagaccgagctaaggaaggtgaaggtgcttggatcaggagctttcggcactgtctacaagggcatctggatcccagatggggagaacgtgaaaatcccggtggccatcaaggtgttgcgggaaaacacatcccctaaagctaacaaagaaatcctagatgaagcatatgtgatggctggtttgggttctccctannnnnnnnnnnnnnnnnnnnnnnnnnnnnnnnnnnnnnnnnnnnnggtgacacaacttatgccctatggctgccttctggaccatgtccgagagcaccgaggtcgcctgggctctcaggacctgctcaactggtgtgttcagattgccaaggnnnnnnnnnnnnnnnnnnnnnnnnngctcgtgcacagggacctggctgcccggaatgtgctggtcaagagtcccaaccacgtcaagattacagactttgggctggcannnnnnnnnnnnnnnnnngagacagagtaccatgcagacgggggcaaggtgcccatcaaatggattgcattggaatccattcttcgacggcggttcacccatcagagtgatgtgtggagctatggtgtgactgtgtgggagctgatgacttttggggccaaaccttacgatgggatcccagcccgggagatccctgacttgctggagaagggagaacgcttgcctcagcctccaatctgcactatcgatgtctacatgattatggtcaaatgttggatgatagattctgaatgtcgcccgagattccgggagttggtgtcagaattctcccgcatggccagggacccccagcgctttgtggtcatccagaatgaggacttgggcccttccagccccttggacagtaccttttaccgttcattgctggaggatgacgacatgggggacctggtagacnnnnnnnnnnnnnnnnncccccagcagggattcttcttcccagaccctgctccaggcgccgggagcacggcccaccgtaggcaccgtagctcgtcaaccaggagtggaggcggcgagctgacactgggcatggagccctcgggagaagagccccccaggtccccactggctccctcggaaggggctggctctgatgtgtttgagggtgaactgggaatgggggctaccaaagggccgcagagcatctctccacgtgacctcagccctctacagcggtacagcgaggatcccacattacctctgcccaccgagactgatggctacgttgctcccctggcctgcagcccccagcctgaatatgtgaatcagccagaggtgcggcctcagcctcccttgactccggagggccctctgcctcctgtgcggcctgctggcgctactctggaaagacccaagactctctctcctgggaagaatggggtcgtcaaagacgtctttacctttgggggtgctgtggagaaccccgagtacctagtacccagaggaggctctgcttctcaaccccatcctcccgccttgtgcccagcctttgacaacctctattactgggaccaggacccatcagagcgggggtctccaccaaatacctttgaagggacccctacagcagagaaccccgagtacttgggcctggatgtgcccgtgtgacgtcacgtttgtagaggccctgttctgccttcagagtgagggaggcctggtctccttcaccccaaagcagggggaggtcctctggccacattatttccagggcagcctgcttgccaggagcccaccctgcggaaccttccttgctgcttgagtcctgagtggttgacaggggccccctggttggaagaggtggcacactgaacagcctcattggatcacagaccctgccctgacaccctgtagggtccaggggcatcacagtcat

SEQ ID NO: 470 - DNA, 1400 bp, Cricetinae gen. sp.
ggtacctgaatacgcacagaaaagagtgcagagcaccccccccccatctaagcaaattgtgagccagacctgtatttcaaggaaatgagaaaaccttcatcctgggtcactgagaaaagtcaacacttgtccaagtgttacaaatgttgattgtgtgtcagttcatataacaggagcrarwtmaacataggtagttgtaagcattatctacatttatttgttgaaaatgagttttaactgtaattatcctactccagtaaatccacaagcaaaagttgtaatatttgattgttttgttttccttgwcytrgggaaccatggacattgamgcrtactttgaaaggattggttaycagaaytccaggaacaaactggacttgcaaacattaactgaaatccttcagcaccagatacrarctattccctttgagaacttgaacatccattgtggggaatccatggarctgrgcttagagacyatctttgatcaaattgtgmrgaagaagaggggtgggtggtgtctycaggttaatcatctcctgtactgggctctgacmaaaatgggctttgaaaccacaatgttgggagggtatgtctttaacactccagctaataagtayagcagtggtatgattcaccttytagtacaggtgaccatcagtgayaggaactacattgttgatgctggrtttggacgttccctccaratgtgggagcctctkgarttagymtcaggraaggaccakcctcaagtkcctgccatcttccgtttgacagaagagaatgaaacctggtacttggaccaaatcagaagagaacartatgttccaaaycaagmatttgttaactcrgacctccttgagaagaacaaatayagaaagatctattcttttactcttgaaccccgtactattgaggactttgagtcyatsaatrcctaccttcagacrtcrccagcatcygtrtttacaagcaaatcattttgttctttgcagaccccagaaggggttcactgtttagtgggctgcaccctcacctatagghrattcagttayaaggacaatgtagatcttgtrgagttyaagagtctgaaggaggaagaaatagaagatgtrctsaaaactatatttggcatttctttagagaaaaaacttgtgcccaarcatggtgatagrttttttaccatttagaataagcagcagtagaagttttcagtgtccctccawrkacytggatttttaatgataaattttcaaacagatttacagtgcatgtaatcacatgagcctttttgcattcattccgcagctgactagttattggtaaataataatttcttgtctcctctctacccctatattttcattagcagtaatcacaccttggataaacctcattgg

SEQ ID NO: 471 - DNA, 3036 bp, Mesocricetus auratus
  misc_feature (2414)..(2484): n is a, c, g, or t
  misc_feature (2819)..(2843): n is a, c, g, or t
gctggtttagtttggctctcaagatgaaaacttccttgattttccttcttgaatgaaacacatttcttaaaagaccaaaaactgtagcccacctgtgtttaatcattaatagtcagccctcccatgaacttaggtcctgattttggagtttggaatctgacctttcccctatagataaacactgttgtcgcagattctgaggagggtcacttccttgctgcctgccaccagaagagtccgcttctcagagattcctgggaagtggatgccttagagggtagccaggcagcatgattctcctggcagtgcttttcctctgcttcttctcctcgtactctgcctctgttaaaggtmaswswactgktckytywytaaaywrtgakcggctgtacaagctcacatactccacggaagtgtttcttgatgggggcaaaggaaaactgaaagacagcgtgggctaccggatctcctctgatgtggacgttgtgttattgtggaggaaccctgatggcgatgatgaccagctgatccaagtcacgataacggccgtcaatgttgaaaatgtgaatcaacagagaggagagaagagcatcttcaaaggcaaaactacgcctaagatcataggaaaggacaacctggaggctctgcagagacccgttcttcttcatctggtccgggggaaggtcaaagagttctactcatatgaaaatgagcctgtgggcatagaaaatctcaagagaggcttggctagcttattccagatgcagttaagctctgggaccaccaacgaggtagatatatctggggattgtaaagtgacctaccaggctcagcaagacaaagtggtcaagactaaggccctggacacatgcaaaattgagaggtctggatttacaacagtaaatcaggtattgggtgtcagttcaaaagccacatctgtcaccacctataagatagaggacagttttgtcacagctgtgcatgcagaagagacaagggatttctccttgaacttcctacaagccattgcaggaaaaatagtatcaaagcagaaattggagctgaagacgactgaagcaggtccaagaatggtgcctgggaagcaagttgcaggtgtaatcaaagcccttgattcgaagtacacagccattcccatagtggggcaggtcctccagagtgcctgccaaggatgtccttctctggcggagcactggcagtctatcagaaaacacctggagcctgagaacctgtccaatgccaaggcggtcagcagcttcctggccttcattcagcacctcaggactgcaaggagagaagagatcctccagatcctgaaggcagagaagaaggaagtgctacctcagctcgtggatgccgtcacctctgctcagactccagactcgttggaagccatcctggactttttggattttaaaagcgacagcagtattgttcttcaggagagattcctgtatgcctgtggatttgcctcccaccccgatgaagaactccttcgagccctccttagtaagttcaaaggttcgtttgcgagcaacgacatcagggaaaccgttatgatcatcattggagcccttgtcaggaagctgtgtcagaatgaaggctgcaagctcaaagccgtggttgaagctaagaagctaatcctgggagggcttgaaaagccagagaaaaaggaggacaccacgatgtacttgctggccctgaagaacgccttgcttcccgaaggtatcccgctccttttgaagtatgctgaggctggagaagggcccgtcagccacctggctaccactgtactccagagatatgatgtctccttcatcacagatgaggtgaagaagaccttgaacaggatataccaccagaatcggaagattcatgaaaagactgttcgcacgactgccgctgctgtcatcttaaagagcaacccatcctacatggatgtgaagaacattctgctgtccattggggaacttcccaaagaaatgaataaatacatgctgacctttgtgcgagacatcctgaattttgaaatgccctcgagcaaaatgatccgccgggtcctcaaggagatggttgcccacaattatgaccgtttctccaagagcgggtcctcttccgcctatactggctacatcgaacgtagtccccacgcagcatccacatacagcctcgacatgctttattctggctctggcattctgaggaggagtaacctgaacgtcttccagtacctcgggaaggcaggccttcatggcagtcaggtggtcattgaagcccaaggcctggaaagcctaatcgcagccactcctgatgaaggagaggaaaacctggactcctatgctggcatgtcagccatcctgtttgatgttcagctcagacctgtcacttttttcaannnnnnnnnnnnnnnnnnnnnnnnnnnnnnnnnnnnnnnnnnnnnnnnnnnnnnnnnnnnnnnnnnnnnnnttctgctgatagatcattctcaggatattcagctgcaatctggactaaaggctaatatggagatccaaggtggtctagctattgatatttcaggttcaatggaattcagtctgtggtatcgtgagtccaaaacccgagtgaaaaatcgggtggctgtggtaatagacagcgctgtcacagtggactcttctttcgtgaaagctggcctggagagcagggcggagacagaggcgggtctggagttcatctccacagtgcagttctctcagtacccgttcctggtctgcatgcagatggaccgggctgaagctcccttcaggcaatttgagacaaannnnnnnnnnnnnnnnnnnnnnnnnggctatgtctctcggagaagaaaagaaagcctagtgtctgggtatgaactcccactccatcaagagaactctgagatgtgcaacatggtgttcccccctcagccagagagtgataactcgggaggatggttttgaaactgatgagtggtgtttccctcagatccatttctttgagagtgatatacttcgacgt

SEQ ID NO: 472 - DNA, 1341 bp, Cricetulus griseus
  misc_feature (317)..(335): n is a, c, g, or t
  misc_feature (552)..(566): n is a, c, g, or t
gacccctacattaacattgatgcaggaacattctctccttatgagcatggagaggtctttgtactggatgatggtggagaagttgaccttgacttgggaaattatgaacggttccttgatatccgcctcaccaaggacaataatctgaccacagggaagatataccagtatgttattaacaaggaacgcaaaggagattacttggggaaaactgtacacgttgtccctcacatcacagatgcaatccagcgctgggtgatgagacaggccttaatacctgtagatgaagatggcttggagcctcaagtgtgtgttannnnnnnnnnnnnnnnnnngggagacattgaaagcatgccsttyattgargccttccgscagttccagttcaaggtcaagagggaaaacttttgtaatatccatgtcagtctggttcctcagccaagttcaacaggggaacaaaagacaaaacctacccagaacagtgttcgggagcttagaggacttgggctttctccagacttggtggtgtgcaggtgytcaaatcctctggannnnnnnnnnnnnnntaaaatatcaatgttctgccatgtkgaacctgaacaagtgatctgtgtycatgatgtttcatcyatctaccgkgtacccttgttgttagaagagcaaggggttgtagactattttcttcggagmcttgascttcctattgagagacagtcacgaaaaatgctgatgaaatggaaggagatggcagacagatatgatcgcttgttggagacctgctctatcgctcttgtgggcaaatacaccaaaytctcagactcctatgcatctgtcattaaagctctagagcattctgcattggctattaaccacaagttagagataaagtacattgattccacagacctggagcctagcaccctgcaggaggagcctgtgcgttaccatgaggcatggcagaagctctgcagtgctcatggagtgctggttccaggaggatttggtgttcgaggaacagaaggaaaaattcaagcaattgcctgggctcggaaacagaagaagccttttttgggtgtgtgcttaggaatgcagctagcagtggtagaattctcaagaaatgtgctgggatggcaagatgccaactctacagaatttgaccctaagactagtcatcctgtggtcatagacatgccagaacataaccctgggcagatgggtggaaccatgaggctgggcaagagtagaaccctgttccagaccaagaactcagtcatgagtaaactctatggagacacagactacttggaagagaggcaccgccaccgatttgaggtgaatcca

SEQ ID NO: 473 - DNA, 2858 bp, Cricetinae gen. sp.
  misc_feature (129)..(191): n is a, c, g, or t
  misc_feature (366)..(400): n is a, c, g, or t
  misc_feature (405)..(423): n is a, c, g, or t
  misc_feature (481)..(501): n is a, c, g, or t
  misc_feature (1020)..(1034): n is a, c, g, or t
aagcttatctccacagtctggcggtttcatgtgtcggcactgtggaccagatgttcttttcgatctgaccttgttccctgcctaggggaccttggggaattttccactggggcgatcttctgagtctcnnnnnnnnnnnnnnnnnnnnnnnnnnnnnnnnnnnnnnnnnnnnnnnnnnnnnnnnnnnnnnnctgtgaaatgccacaaagagaaaaataccgttagagtatggagaaaaacaattgagttttgtgccaaggaacaaagtagtgcagagtgggaagtgatttttagatgtgggtttcacatcttccagagcacacagaggccttaaaggaagagagccttgctggacgttggtggcgnnnnnnnnnnnnnnnnnnnnnnnnnnnnnnnnnnnaggcnnnnnnnnnnnnnnnnnnnaccagcctggactaccgagcgagttccaggacagagtccaaaacaatacagagaaacnnnnnnnnnnnnnnnnnnnnntcaaaggaagagggccttgcatagacaaagattagtagctatagttttgttgtatggacttaatgtttttggaaagagaacagccacggacacaactgcaaataagaagaaagtagttccaatcaatatgagtttctgaaagaacaaatataggcagaatgtaagctcaaagttcagattaggtgaattcatgaaccttttggcattttaaccaataccagttacccaagttcctggaagcgtgcaagaggcccttctactggctgcagccctgacacctccttctttcccagcacataaactctgcagtctggactcactgggtctcagctgagcacagcaggggagccctgcaagactctcagttgggagggaaacttggagccagacctgctgaaggctgaagaaaagctgcaatggagctgatccccaacctttctatagaaacctgggtgctgctggctatcagcctggtgctcatctacatrtrwggtasctattctcatgggacttttaagnnnnnnnnnnnnnnnggaccaaaacccctgcctttttttggcaccattttaggctatcatgatggtacatggaaatttgacgaaacgtgctataaaaagtatgggaaaatatgggggttttatgacggtcgagtgcctgtgctggctattgcagatccagagatcatcaaaacagtgctggtgaaagaatgctactcaaacttcacaaaccgtcggtcttttgggccagtgggatttatgaaaaagtcaatcaccatatctaaggatgaagaatggaagagacttcgaacactactgtctccagctttcaccagcggaaaactcaaggagatgttccccatcattggacagtatggagatacgttggtgaaaaacttgagacgagaagaagagaaagggaagcccgtcaatatgaaagaaatccttggagcttatagcatggatgtgatcactggcacatcatttggagtgaatgtcgattccctcaacaacccagaggatccctttgtgcagaaggccaggaagattttaaagtttaatttttttgatccctttattctctccataatactgtttccattccttaccacaatatatgacttgttaaggttctccatttttccaagacaatcaacaaactttttcaaaaaatttataacaacgatgaagaaaaatcgccttcattcaaaccagaagacccgaatggatttttttcagctgatgatgaacactcagaattccaaaggcaaagagtcccagaaagctctttccgatctagaaatggcagcacaagccattattttcattttcgctggttatgaatccacaagcacctccatttgtctcgtattgtatgaactggccacccaccctgatgtgcagaagaaacttcacgatgagattgacagcgctctgcccaataaggcacctgtcacctatgatgtcctgatgggcatggagtacctggacatggtgataaatgaaggtctcagattgtacccaattgctaacaggctagagaggatctcgaagaaggctgtagaaatcaatggactgttcattcctaaagggattacagttatggtaccaacctatcctcttcatcgggaccctgagtactggccagagcctgaggagttccgccctgaaaggttcagcaaagagaacaagggcagcattgatccttatgtatacatgccctttgggaacggacccaggaactgcattggcatgaggtttgccctcctaagcatgaaactggctgtcgtcagtgtcctgcagaacttcaccctccagacttgtgagcaaacagagaaccacctgaagttcgccaggcaaataattctccagccagaaaaccccatcatcctgaagatcatatcaagagataaacccataaccggagcatgaatttccctcaggaattatgctatattcttcaatgggactgtgtcacagaacaccagcaaatttaatttagcacagaatgtagcacagatgaaattggcttactgaactttcattgatgattgagaactcagtacttcactgaatgtgttcagtgtctatagggagtattatctattgtgtaattcaatggaaataattaagtcaatgatagttgtggagattcatcttctgattctcttgtaaccatctacactaattgcaattagttccatcaattctgagctccaactgtagtaactgtttctttatagttctatcaataatttttatgaaaatagaaactattgtgttgactgttagtaaaaatatatcaaactgtttctttgtaaaattttatgatattgaggatataaataaatatctccttca

SEQ ID NO: 474 - DNA, 440 bp, Cricetulus griseus
gatccggactttggaactaaaacatggttattgcatacttatggatgattccataaacctagtttccttcatttcattttatccggtcattagaatacaacagagtttttggttgttaggaaagattccataaacccagttttgtgtatttcgttgtatctggactttgaactacaacagaattaatgcatagttatgaacgaatccataaaactagttttgtgtatttcgttgaatccggactttggaactaaaactcagttagtgcatcattatgaacgcttccataaacctagttttgtgtatttcgttgtatccggactttggaactaaactctgttagtgcatcatcatgaacgattccatcaacctagtcttgtgtatttcgttgtatctggactttgaactacaatagagttagtgcgtagttatgaacgatt

SEQ ID NO: 475 - DNA, 357 bp, Cricetulus griseus
gacaatccataacctagttttgtgtatttcgttgtatctggactttgtaatacaacagaattaatgcgtatttatgaatgattccataaacctattttgtgtatttcattgtatacggactttggaagtgaaacacaattagttcttatttatgtaaaattccataaacctagttccttgtatttcgatgtatcctgacgttggaactacaacagagttattgagttgtttgaaattttccataaacctggttttgtgtatttcgttgtatatggactttggaactacaacagtgttattgggttgttataaacgattccaaaaacctagttttgtgtatttcgatatatctggatc

SEQ ID NO: 476 - DNA, 902 bp, Cricetulus migratorius
atgagggcccctactgtgtatcctgtgctcttgtttctttggtttacaggtgccatatgtgacatmcagatgacscagtstccatcmtcactgcctgcctccctgggagacagagtcactatcaattgtcaggccagtcaggacattrgcaattatttrarytggtaccagcagaaaccagggaaagctcctmarctcctgatctattatayaaataarttggcagatggagtcccatcaaggttcagtggcagtggttctgggagagattmttctttcactatcagcagcctggaatcygaagatattggatcttattactgtcaacagtattmtaactwtccryksacgttcggwsmtggcaccaagctggaratmaaacgggctgatgctaagccaaccgtctccatcttcccaccatccagtgagcagttgggcactggaagtgccacacttgtgtgcttcgtgaacaacttctaccccaaagacatcaatgtcaagtggaaagtagatggcagtgraaaacgagatggmgtcctgcagagtgtcactgatcaggacagcaaagacagcacctacagcmtgagcagcaccctcwcgytgaccaargmmgaktatgarmgrcataacmkstatacctgtgaggyyactcayaagacatcaactkcasccattgtcaagascytsaacaggaatgagtgttagagccagaggtcctgaggcaccaccacctgctccctaggaccattctcagtcttccctggtaaggtcttggagctttcttcatagacaacctaccactgttgcagtcctccaaacccccaccacctcatctccctccctttccttggcttttatcatgctaatatttggggaagatattgaataaagtgaatcatggg

SEQ ID NO: 477 - DNA, 1223 bp, Mesocricetus auratus
  misc_feature (333)..(350): n is a, c, g, or t
agtgcattctagccagagtaagccaactccaggatgtccaggaggagctgttgtaatgtataattggtttcatgttgtttgtckyakgsgatcatggacatcgaagcctatttcgaaaggatcggttataacaacccagtctatacattggayttggccacactaaccgaagttcttcagcaccagatgcgaacaattccttttgagaatctcaacatgcactgtggagaagccatggacctgggcttagaggctacttttgatcaaattgtgcggaagaagcggggcgggtggtgtctccaggttaatcatctcctgtactgggctctgacnnnnnnnnnnnnnnnnnncaccatgttgggaggatatgtttacatagtgcctgtcagtaagtacagcagtgagatgattcaccttctagtgcaggtgaccatcagtgacaggaactacattgttgatgctgcctatggaggctcctaccagatgtgggagcctgtagaattagcatcaggraaggaccagcctcaggtgcctgccatcttccgtttgacagaagagaacgaaacctggtacttggaccaaatcagaagagagcagcatgttccaaaccaagaatttgtcaactcggacctccttgagaagaacacatatcgaaagatctattcttttactctccaaccccgcactatcgaggattttgaatatgcgaatacctaccttcagatatctccagtatctgtgtttgtaaacacatcattttgttccttgcaaacctcagaaggggtttgctgcttaataggctccactattgcgaggaggaaattcagttataaggaaaatgtagatctggtggagtttaagaatgtgagtgaggaagaaatagaagatgtgctgaaaactgcgtttggtgtttctttagagagaaagtttgtgcccaaaaatggtaacctatcttttagtatttagggtaaagcgcaaaactgcwwttcattattatttcatgttcttaaacatttgagacatatgcaaatatattcataggagtccttaaagagtcatcacccagctcgatgttgatcagctgatgacttgtatcttctacttcctacattttatgaaaaagcaattgtagctgtcctgttatttcaccaataaaaatataatgtggctaagtgaatgctaggacctgtacagccagtggtctttaccattgagctgtctct

SEQ ID NO: 478 - DNA, 207 bp, Mesocricetus auratus
  misc_feature (198)..(198): n is a, c, g, or t
tcaactcatatatggattttagacataggatggatcaggatagtgccagtctgcacttccactgatcgcgcgtcagggaaacaggaaagaacctaaaagatatgcatatatgcatagtacccaagagaagaggattgagacaagatcctctgaatggatggggaacacggcgagggctggggaggagtaggagctggnaagaagaga

SEQ ID NO: 479 - DNA, 248 bp, Mesocricetus auratus
aataaggcaggctttgtagtcttcacttatcattaaaaatgcaatttaacacacaacagctgaaaaataacatgctcttagaacatgtttaccattaattaattagcaagtaaaaattatacttttagatctgataatgaattgtggatcgatatctgccttgcaaaataaattgctttgttttcccaagctttgttcctccaaatgagaagacatgacagatagtttcctctatgctcgaagactcc

SEQ ID NO: 480 - DNA, 255 bp, Mesocricetus auratus
  misc_feature (76)..(93): n is a, c, g, or t
  misc_feature (183)..(183): n is a, c, g, or t
  misc_feature (236)..(236): n is a, c, g, or t
  misc_feature (240)..(240): n is a, c, g, or t
  misc_feature (242)..(242): n is a, c, g, or t
  misc_feature (245)..(245): n is a, c, g, or t
  misc_feature (250)..(250): n is a, c, g, or t
agcagaaaaaacacaataaaatgaaagtagaaaagaaaaaaatacaaagaagtaaaaataatcacgcactctcacnnnnnnnnnnnnnnnnnncacacaccgataccaaagcacaatctccagtgttaatagtgattaaaaaaatacagagtaagtgaaacagcgcaagaaaaatgtgtgatngtctgtgccagccttcctttgtcctgtttgtcccagaactttattctaggtcnagtngntcncactnagact

SEQ ID NO: 481 - DNA, 193 bp, Mesocricetus auratus
aggtatttaatagctcaagacacagatgtgaacactgaggctccagtccaacccaagctctcagtcaaaaccttaagtgccacctggctagttagcaaaacttcctaagcctctctctctaccacaccaaacagaaacccacgacagaaaggtgcacacctaggaggttgccccagctacagcagaggccatg

SEQ ID NO: 482 - DNA, 185 bp, Mesocricetus auratus
catatctctgtagaagtcaacatgcattaagaaaacccattccctgcatgaatgccaggctccatcttaaataaaaaataggcaacagcaccagctatactaagaataaaaggaagttggttaatggctaacttgagttacagtatacgtctggagatagctctatatattctctaggcgcttaa

SEQ ID NO: 483 - DNA, 238 bp, Mesocricetus auratus
ttaataaatggaccacctgaactgcatagctaatgttaggcaaaggtacattgcaaagaaaaacagcagcccacaaatgtgacagacttcaacaaccccaaatctgacagagggctgatctacaaacttacaaaaaagtccagaatctagtctccaaacactaaatgattcctttaaaattagggtacagaactaaatagagaattctcaatagaggagtctaaaatggctgaatagg

SEQ ID NO: 484 - DNA, 257 bp, Mesocricetus auratus
  misc_feature (234)..(234): n is a, c, g, or t
  misc_feature (237)..(237): n is a, c, g, or t
  misc_feature (252)..(252): n is a, c, g, or t
gaatctctgtgcttaacttcatgaaaactaacgatacaacactgtgtgagaatctccctgcttaacttcatgaaaattaacggtacaacactgtgtgtgatactatgtgctaaacttcatgaaaactaacgatacaacactgtgtgtgaaaccctgtgctcaacctcatgaaaactaacgatacaacactgtgtgtgatcctatgtgctcaacatcatgaaaactaacaatacngcnctggggtaccgagcncgaat

SEQ ID NO: 485 - DNA, 265 bp, Mesocricetus auratus
ctacataaacagctgatctgaacaagtgggagctcacggactccagaatgacaacacagaaaccagcataggacagaaccaggtccctgaatgtgggtgtagttacgaagcctgggaagtctatgggacctctggtagtggaacattattatgcctagtatatgaatggacactgggaacccattgcccatagagggatactctctcagtctattccttgccccaaattgtttgcacagaatttaattgatctcctatctggaaa

SEQ ID NO: 486 - DNA, 272 bp, Mesocricetus auratus
atgttaactctccccaacaattacgtatccgtcttctaggatcacttctgcccataattaggcaatctcatctttattaaaaggcatcataatttctgccgagtctattcctactaactgatgaagtctcagttttcattttataattaactcaaagatactttgcacataattttaatagtttactcagtttatgttgtaaatatatccatttaatgataatatcttctgtctacattaaaattcctgtaaggaattcttgcacgtataga

SEQ ID NO: 487 - DNA, 2429 bp, Cricetulus griseus
tgcgctctaggaggactcttggcctcccgaagttagcaacctcaaattttgtttatctaaaatatttctgcaaaagaaaagtaccctagagcccattctccacaatrgcyatggatgrgtatytgtggatggtyattttgggctttattattgctttcatcctggcgttttcagtgggtgcaaatgacgtcgccaactcgtttggaaccgccgtgggctctggtgtggtgaccttgagacaggcatgcattctggcttcgatatttgaaaccactggctctgtgctwttgggagcgaaastwggagagactatccggaagggcatcatcgacgtgaacctctacaatgacactgtggtgaccctcatggctggggaagtgagtgcaatggttggttcagctgttkggcagttgatcgcatccttcttaagacttccaatctcgggaacgcactgcatagtkggytctactataggtttctcacttgtggcaaatggwacaaaaggagtgcagtggatggagctcgtcaagattgttgcttcctggtttatatcgccactgctttctggcttcatgtctggagtgctgtttgtgctaatcagaatgttcatcttaacaaaggaggaccctgttcccaatggtcttcaggcacttcctctgttctatgccgccactatagcaataaatgtcttttccatcatgtacaccggagcaccagtgctgggtctgtcgcttcccatatgggctatagcactcatttcctttggcgtggctytgctgtttgcsttctttgtgtggctcttcgtgtgtccgtggatgaggaggaaaatagcaggcaaattagaaaaggagagcgctctgtcacgcacttctgatgaaagcctcagtaaggtccaggaggtggagtcccccttcawggagctccctggtgccaaagccagcgatgacagcgctgtccccctcaccaacccgactggggaggctgtggggccctcagaaggcacatcgacagggaaccacccccggacagcytatggacgcgcactttccatgactcacggctctgcaaagtcacccatctcgaacggcacgttcagctttgaaggccacatgaggaatgacggtcatgtttatcatactgtacacaaagactcrgggctctacaaagacttgttgcacaaaatccatgtagacaaaggccctgaggaaaagctctctcaggaaaacaactacaggctgcttcggcggaacaatagctacacatgctacacagccgccatatgtggcatgccagtgcataccaccttcagagccactgatgcctcctctgcccctgaggacagcgagaasstcgtgggcgacaccgtgtcctattycaaaaagaggctccgctatgacagctactccagctactgcaatgcagttgccgaggcagagatcgaggctgaagaggggggcgtagaaatgargctggcctcggagctggcggatcccgaccagcctcatgacgaccccacagaagaagagaaggaggagaaggacacggcagaggtccacctgcttttccactttcttcaagtgctcactgcctgctttgggtcctttkctcatggtggcaatgatgtaagcaatgcaattgggccccttgtggctttgtggctgatatatgaacaaggtggagttatgcaagaagccgccaccccagtctggctactgttttacggaggagttgggatttgcacaggtctctgggtttgggggagaagagtgatccagaccatggggaaggacctcactccaatcacaccatccagtggcttcactattgagctggcctctgccttcaccgtggtgattgcctccaacattggacttcccgtcagcaccacacactgcaaggtgggctcagtagtagctgtgggctggatacgctctcggaaggctgtggactggcacctcttccggaacatatttgtggcctggttcgtgactgtcccygtggccggattattcagtgctgctatcatggctatcttcatgtatggratcctwycatakgtgtgattttgtttcttccagtcgggaaatggctatggggacggtctaacgtgggtatgcgtattcacacctctccacccccactgtttgacacaagcacacccctcccacataccttcccagatggtttgacgccacacactgcttacccaggccacagaagttcatcttccagaattaacctaactactgtacatagtaggtgtatatcaaactgatattgtgatgacataatgtggtgcagttacttatattaaatatatattgtgtacctagaatattgtagcatttattccaaacaaactcagaatgaaagtggagagtaccgcctggaattgcaaatattcttgttaagtgtattttaatgatttc

SEQ ID NO: 488 - DNA, 2514 bp, Cricetulus griseus
  misc_feature (180)..(203): n is a, c, g, or t
  misc_feature (934)..(949): n is a, c, g, or t
  misc_feature (2019)..(2075): n is a, c, g, or t
  misc_feature (2285)..(2363): n is a, c, g, or t
tctgctccgtgcttttagccctccagagccaaagaaaccccagacaacagacgcccatacgcagcgtatagcagtaacttcccagctcggtttctgtgccgtagtttacagtatttaattttatataatatatactatttattatagcattttgatacctcattccgtttacacatcttnnnnnnnnnnnnnnnnnnnnnnnnttaattaaagaaccactacactaaaaaatggcatctacartggcaccgattacyartactmyagctrctryygcyrctkctgstscwtyggtggaykacmaagtatggatgstcatcctgggcttyatyattgcatttgtcttggcattctccgtgggagccaatgatgtagcaaattcktttggtacagctgtgggctcaggtgtagtgacyctgaagcaagcctgcatcctagctagcatcttygaaacwgtgggctcygycttarctgggggccaaagtgagygaaaccatccggaagggcttgattgaygtggagatgtayaackmractcaagrsytrctsatggcyggctcmgtcagtgctatgtttggttctgctgtgtggcaactmrtggcttcgtttttgaagctsccyatttctggracccattgtattgttggtgcaactattggtttctccctcgtggcaaaggggcarragggtgtcaagtggtctgarctgataaaaatygtgatgtcttggttcgtstcyccactgctttctggwattatgtctggaattttattcttcctkgttcgtgcattcatcctccrtaaggcagatccagttcctaatggyttgcgwgctttrccrgttttytatgcctgyacarttggaataaacctcttttccatyatgtatactggagcaccgttgctgggctttgacaaacttcctctgtggggtnnnnnnnnnnnnnnnntgggatgtgcagttwtctgtgcccttwtcgtctggttctttgtatgtcccaggatgaagagaaaaattgaacgagaaataaagtctagtccctccgaaagccccttaatggaaaagaagaacaacttgaaagaagaccacgaagaaacaaagatgtctcttggggatgttgagaatgggaattccgtgtctgaggtagcttgtgccactgggcctctycrggctgtggtggaggagagaacagtstcattcaaacttggrgayytggaggaagctccagagmgagagmggcttcccagcctggacttgaaggaggagaccagcatagatrgtaccatcaatggtgcagtgcagttgcctaatgggaaccttgttcagttcagtcaaactgtcagcaaccagatcaactccagtggccactatcagtatcacactgtgcacaaagattctggcttgtacaaagagttgcttcataaattacatctggccaaagtgggagattgcatgggagactctgggkataagccgttgaggcgcaacaacagctacacttcctacaccatggcaatatgtggcatgcccctggattcattccgtgccaaagagggtgaacagaagggmgaagaaayggagamgctgacatggcctaatgyagaywcyaagaagcgrattcgaatggacagttacaccagttactgcaatgctgtktctgaccttcactcwgmatctgagatrgacatgartgtyaaggcwgagatgggtctaggtgacagraaaggaagtaatggctctctwgaagrrtggtrtgaccaggataagcctgaagtctcyctcctcttccagttyctgcagatccttacagcctgctttgggtcattygcccatggtggcaatgacgtmagcaatgccattggkcctctggttgctttrtatytkgtttatgacaacwsragatgtktctwcaaarrtrgcaacaccaatatggcttctrctytatggtggtgttggyatctgyrtwggkctgtgggtttggggaagaagagttatccagaccatggggaaggatctgannnnnnnnnnnnnnnnnnnnnnnnnnnnnnnnnnnnnnnnnnnnnnnnnnnnnnnnntgattgcatcaaayattggccttcccatcagyacaacacaytgtaaagtgggctctgttgtgtctgttggctggctccgrtccaagaaggctgtygactggcgwctstttcgyaacatttttatggcctggtttgtcacagtccccatttctggrgttatyagtgctgccatcatggcaatcttcagatatgtcatcctcagaatgtgannnnnnnnnnnnnnnnnnnnnnnnnnnnnnnnnnnnnnnnnnnnnnnnnnnnnnnnnnnnnnnnnnnnnnnnnnnnnnngaagacagacaaggtcaaagtttggagccatggggagtgtaattacactataatgcttttgtgctaaaatgactgtctcaaaatagctatgaaaatagccagtttccatggtcacctaagtcccttttcttctggcatgatcgaacaactt

SEQ ID NO: 489 - DNA, 5529 bp, Cricetinae gen. sp.
  misc_feature (1246)..(1274): n is a, c, g, or t
  misc_feature (1877)..(1910): n is a, c, g, or t
  misc_feature (2817)..(2846): n is a, c, g, or t
  misc_feature (3348)..(3389): n is a, c, g, or t
  misc_feature (4679)..(4699): n is a, c, g, or t
  misc_feature (4769)..(4789): n is a, c, g, or t
gaattcttcagttatccaagtaacgtacatcagtaaatatctttccctgtaagaataggctaagcactaaagaaaagactcgaaatgccagtggatgtgtcatagaagcagtggcttttttttttttttgctgttttaaaacaagaactgaaggaataaaattgtgaacaaatgggcacagcacactgattttctatttaattcttatttgatcaaccactatgtatgcagaatcagagttgccaggtttttggcattgtcactcctggattaggcagagctcattgatggcaaccattgttctgtctttgctctctcagcatccaagctactgctgtggatgtggagagatgaggtgcagattgttaggtaaagtatactggcagcagtgtgatttgaagggtacaaatgtcaatcatgcataaaatcttgaaaggcaggagtcacagaagtagaggtcaacatttcataaagtattaaaagggaaccagtagagtatcaggccatgagagagcctgacaagactgaggccccagaaaccaaccttagtaccagtaatttccagatcaccttgcaagtcatagattcaataacaagaattggggcacatgggcagtgactgagaaaagcatggtcattagagtcgaacatcgggagtcgtttaattattgccttgggaggcttgctgatcttctgatttaggttaacagtagcccaaagaatgaagcatgtagataggactcaaaggaccccagggatgatgcagagcaggaaggggccctggggtttgtttgataataaagccaatgatttcttactgcaaccattgttgctttccaagaactatctctctctctctccttcatttgcctttgttctttgatattagtataaaaatgagtttcttgcttagttcatcacataagtgaaggtcagatgctcaacagatttgaccgctgggcactaatttctctaaaccctttctacacatgtgcagcagcatctgtctcagagagagggcacacggttgaaaccatctggaacaggaaaagagaaaacacatggattaaagcaacagctgatgtacagactttttaaaaatctttcattgttgcatttctttaaaattgacttctgggtgtccataatcatattcatattcctgaggctcaggtgccattctcatggctggctcatatacttgcccaaatgttttctagtttcagggttttgtttgtttgcatgnnnnnnnnnnnnnnnnnnnnnnnnnnnnncgtgagaaagtaatggctctatcaactccaggcccactcgccatgcaggacaaccaataactgctattcaagtgtactatcccctactttaccaatctctcctgaccgaagggcttcatgtcagttgacagtgaaaggtcagaggaagcagaggagagggactagtgcgatagttctccagtcagactgcacactggacaccgggtctgaactctgtttgtgtagagaatgcgctgtttcagggtgtttactccacctgttgacttgagctgcttggtgagtgtcagggtttgagtttgagcattctgctcttctagccagcttcctaattaacatctgtaatgaattaagctcttgtttttatgcaagccgcaatttcacactatctcttcagttcctgtatattcctgggagataagaatgagctattagctcgagaaaaacagacttttctttgtgtgtggaaacttcaggggctcaataactcatccaaaattataaaacgtgtaagtggtgtaacaagagtgctaccttggctctgaagccagaatccaaagctgaagcaccaaagcttcatgacactgcttttctgataatctatgnnnnnnnnnnnnnnnnnnnnnnnnnnnnnnnnnntcagctgtggggagttgggtaccaggaaatggggccaattgccagacaaggctacggaacactgcccttgtctttgttatagcctagggtgaacactgactccctgctagcgtcaggccacggatgtggctttgttggccctgagaactacagctgttcctgagagggagtaggagtatttctgaggtcactgtgacttgtttctggcatggcatgtgtgtgtactgggctctccccatgctgcacatgggccagctcctattaaagggtcttgagctcccgccccattgctgccagacagctgagatggggaggctgctgctgtgggttggtgagtatggcggatcctagcagtgccacacagttcaggagatagcagtttgttgcttctctggtgcccagtaagcagcctgggactcggagtctggatgaggcagatatgagacagacacaataaagaatcagaggtactcggaggaaggggccgggcagcagttctccaacctagctgctttcatgcttgggctttatcttgagccagtttattcagaatttctggggagagggctttgatatgagtgcttttgagtttatagctggattgagaatcaccggccgagagcttcagcttggacatctatcattgtccctatgcaaagcatgagcaggtgcaattgatgattgtagaaaagaggcttagactagctccactgttaactttgaaatagaggaaaccagtgactgatgtgtgtcaccaagtgtgcatctgcatgcatatatggtgctgagctggagggggcacccgctaactaaggggtgtactggggcaagccacactgcgtgtgtatattaattcctccatttcctgcagggctggttcttctgatgaaacccaacgacggtaagnnnnnnnnnnnnnnnnnnnnnnnnnnnnnnagattttctggctaggaaatctccatccagtgtctcctggacttctgcctgtcttggctccttggtcagaggttgctgatccaatataattcagcacaggacgctggccacttgctgtttgtatggctcagtgtgtgccggcatctagatggataagacattctttcttctcttgggccttagcagcaagggtgagaggtctaggggcttgtggaggaggcgccggtgtatgtgggaggagtgggctgttacagtggcttgctctctttggctgtgctgtctctacckccrgaagcygagtkssswssytgcscyrtgrkytskgctgrytmwtctswtgwwryccaaygmcggtactgcctacaagctggtctgctatttcaccaactgggctcacagtcggccagtccctgcctccatcttgccccgtgacctggatccctttctttgtacacacctgatatttgcctttgcctcgatgagcaacaatcagattgttgcnnnnnnnnnnnnnnnnnnnnnnnnnnnnnnnnnnnnnnnnnncaaactcaaggagaggaacagagccctgaaaacactactgtctgttggaggctggaacttcggcacatcacgsttcaccactatgctgtcyacccttgccagccgtgaaaaatttattggttcagttgtatccttcctgagaacacatggctttgatgggcttgrtctcttcttcttgtaccctggactacgaggcagccccattaacgaccratggaattttctcttcttaattgaagagctccagtwtgcctttgagaaggaggcactgctcacccagcgcccgaggctgctgctgtcggctgctgtctctggcatcccatacatcattcwaacatcttatgatgtgcaccttttaggaagacgtctggatttcattaatgtcttgtcttatgacttacatggaagttgggaaaagtctacaggacacaacagtcctctgttctcccttcctgaagacccaaaatcttcggcatttgctatgaattactggagaaatcttggggcacctgcagataaacttctcatgggcttccctgcctatggacgaacctttcacctcctcagagaatccaagaatggattgcaggctgcctcaatgggaccagcatctcctgggaagtmmaccaagcaggctggcttcctggcttactatgaggtttgttcctttatccagagagcagaaaaacactggattgatcatcaatatgtcccatatgcctacaaggggaaggagtgggttggctatgatgatgccgtcagcttcagttacaaggcaatgttcgtgaaaaaagaacattttgggggggccatggtgtggacactggatatggatgacgtcaggggcactttctgtggcaatggccctttcccccttgtccatatattgaatgagctcttggtgcgggcagagttcaactcaacccctttgccacaattttggtttacattgcctgtgaattcctcaggacctggctctgagagtcttcccgtgacagaggagttgaccactgatactgtaaagattttgcccccaggaggagaggctatggccactgaggtccacagaaagtatgaaaaggtgactacaatccctaacggtggatttgtgactcctgcgggaacgacatctcctacaacacatgctgtagctctagaaagaaacgctatggctcctggggcaaaaactacaacctcactggaccttctgtctgagaccatgactgggatgacagtgacagtccagacacagacagctgggagagagaccatgaccacagtgggtaatcnnnnnnnnnnnnnnnnnnnnnagaccatgaccacagtgggtaatcagtctgtgacccctgggggagagaccgtgaccacagtgggtaatcnnnnnnnnnnnnnnnnnnnnnagaccatgaccacagtgggtaatcagtctgtgacccctgggggagagaccgtgaccatagtgggtaataagtctgtgacccctgtgggagagaccgtgaccatagtgggtaataagtctgtgacccctgggggacagaycacagccacagtgggtagtcagtctgtgacccctccagggatggatacaactcttgtctatcttcagactatgactctcagtgagaagggaacttctagcaagaaggctgtggtccttgaaaaggtcactgttcctcctagagagatatcagttatgcccaatgaacagaatacagctctaaatcgggagaatttgattgctgaggtggaaagttattcccaggatgggtgaattggcccttatgtaaaagcggagaacaggatgctctcctccagctttatcgtcctgttcccaggatatgtgcctttttcttttgaaaatggcttcactcttactaatggaaaccactcctttgtcaactcaatagtccttctaacaaatctcttcctcttaaaaaaaagaaaacctaggacaccctgttatggatcaagaatgttgagctccattagtggcaaatcctagagaaaaactcttgttttttcttctatgtggtatgacagaagccatctcatattgccacccatgaaccatttgtgggacaaggttggcaccaaagccatggggcaatctcctttctgtcgaataaattggaagcatgag

SEQ ID NO: 490 - DNA, 2840 bp, Mesocricetus auratus
gggcccccagattagaggagacaaaggcaagacgaaagtaaagatgccaggctctcttctgttttcagtaactttgtagtgggtgctctttaggaaaagcggtttctaagtgccttgctacttttcaaagaatccagtcattcatccgtgtggtcacctcagtcagctacaggatgctgtctctaaacaggactcgcagtcaagcagagagaccacatatccattgttaggagtgtgttggtgacagaatgagacttttgtggggactcactgcacacattcctgtatttatattcagttatttcttcagcccggctggcattatgtcctgaccccagtttaatcccgtgtcactataaagtcccgtccattgttagcctcctcccgtagtgcttagtggttgtcttctgtagttttgggttgcatctggtccaagctggcctctctggattcgtcagcctttctcgtctccatcttctgacccatcaaggaagggcgcacgagtccctcccctcccatctttccccctaagccatgccgcgggcctgtcttccccttctcagtctctgctgtgccccacagcactggctaggaatgtttgagctgttgtgttactggataccatcttgctgtggccagatgccctccgcagcaatgcagtccagggaagcagggcgggctaagggatctgtcctgcggaagctagccgcaggcggaggaaaggaagccactctataatttttttttcccagcagcctccttaagtctatgggtgacagcttgggcaccttgtctgggacgaggaaatgagctcagagctgaggaaacttgccccaggtcgcaaattaaatccgtgctgatgcagaagtgaacacagcctcagactggaagctgtccaaatagctgcaagagaaaaatcacagctctttgaaagcctcgaagcgtcccaccacgggctctgggcagttactggaagctgtgccagactcgcccgtcctctctgtcctgtaaacacgctgcacggtggattactcattttctctcttgcctgtgactgaggctgttttctcacaccctacccctggtttcatggtcccaaggatttcatttgaagggcggggcattcttcacatccctccaccccaaccggagcctgaagtctggaccaatgaaagcacagtacctcatttactggcactaaggcctggcactatttaagtggtagcaggaacgggctgtgagtcgcgtctgctttctccagaaacaggcacaccgttgtctgatccggacatctctgagctgaagagagggaagggcgaaagcctgtagggccccgactgccaccatgtgctccagcaagtgtacaagatacatcggacactccctggtggtgtttgctgtcctctgcatcgtagctaatattttgctctactttcctaatggggaaacaaagtatgcttatgaggaccacctcagccgctttgtgtggttctttgcyggcatcgtaggcggaggcctgctgrtmmgtyactcgcaackgytttctstgywccttsksctsgarkgagwrgastgctktkkctscyggrgctgtgagaactatggcaagagatgcacaatgctttcttccataatggctgctctcattggcattgcgggatccggctactgcgtcatcgtggcggcactgggtttggcagaagggccaaagtgcggtgattcccacggcatgtggaactacacctttgccaacactgacggacagtaccttctggatcccactacgtggtccaagtgccatgagcctaataatattgtggagtggaatgtgacgctattttctatcctcttggcacttggtggacttgaattcatcttgtgtcttattcaagtcataaatggagwgyttgaagkmatrystarctawwkytsmtyyymyywacagcaatatgactgctgaaaggacacaagacagcactacatgctccctttgtttccctgtaacttgtatatttcactcgagttatgaaactttgtcctggtgtatcatattccatacattctgcttttataaagaaatgtgctgacatcatcacatgatgtcagtgtttgcatttatcaggcaaactttgtttaaaggatgaggcaacagactgcactcactctgaaggtattttgcagactgaatgaatgttcaactcttcaacatttaagataaaaatcacctttaactactgtgcatatgtgtattttaaataaaagatctccagtttcccttttaagatccagaaggacaggaaaacttcgaagagatgttgtttaaactgtttacatggtgtttcccatctctaagaggcccctctgaagtgagagagaagcgcttgcctggatttggaaagctcactgagaaagcgctaatccaagtacgtgagaagaaatacgcgaagcggccagtggctgtggacacaaccagaggctgaagccttctatcgtgtagaaagctttttgcccttcaaagacagagactgtgtagagaagaaggatagttggacgagaacgaagatgggaaatggaataaaacagttgatcaccgtggttgggaaaatcggttggtggagtggggactgaagaccacaaagggaatgcccccaaactcccttgttgagcataaaacraaatattctctaccgctgagctgttgtttttggttttatatgagaagaggcaacctctctggtcagacaatttatccgagtcgtgtagagaggacgtcttcctaactcttaggaagatctattaccttttgtggaagacaaagggtcctttcagggtgcaagctt

SEQ ID NO: 491 - DNA, 2074 bp, Mesocricetus auratus
  misc_feature (1345)..(1379): n is a, c, g, or t
ccggcgccggtccgcgcccccgccctgccccggccccggccccgggggcagtcactccagcaagcggtggggcaggagttcccggagtggcagcctctatagaagcgatgacagaatacaagctcgtggtggtgggcgctggaggcgtgggaaagagtgccctgaccatccagctgatccagaaccattttgtggacgagtatgaccccaccatagaggtgagctctggctacctgcctgggctctggcagtggtcatggaagagtcaggaaaggcccacacagctaggtcttgcaggtggtacgagtctgtttccacctgatctaacagggcatgagaggtgcaagggtaggcgggctcttggcatctctgaggagaggtggaacccctaagctctgttcttctgcaggattcctaccggaaacaggtggtcattgatggggagacatgtctgctggacatcttagacacagcaggccaagaggagtacagtgccatgagggaccagtacatgcgcacaggggagggcttcctctgtgtgttcgccatcaacaacaccaagtcctttgaagacatccatcagtacaggtgagttgcctatggctagcacagatgaggaaggtctgtgtacacatcgagggtttatgtcttctgagtgtcctgggtacagccatgtgtgtagcctgctggccagctcacatactccccatccccttctagggagcagatcaagcgggtgaaggactcagacgatgtgccaatggtgctggtggggaacaagtgtgacctggccgctcgaaccgttgagtcgcggcaggcccaggaccttgcccgcagctatggcatcccctacattgaaacatcagccaagacccggcaggtgagcttgctcccctctccacagctagtcagggactcaccccaccccacccccagccaggagcagagctcatcgcccctctccctcaacacagggcagccgctctggctctggctccagctccgggtccctctgggaccccccgggacccatgtgacccagcggcccccatgctgtaagtctcccagacggcagggctgtgagggaggcaagggccagggtctgggcttatgctgcagttctgggttgacacagcgccaggacaggagggggtcatggagagagctgccctgagccaggccggagcggtgacccaggggcttagtccttcctgtcttcatagtgtcctatggctacctgatagttttgagcccttaagtatggtcagggtgttcatatctgagccatactggggatctgggagagttctgagtcaggttgctctgaagaatattccagagtgannnnnnnnnnnnnnnnnnnnnnnnnnnnnnnnnnntgtgcgagtcccagctccctatttgtgttggttatgcagctgaggaagggttgttttccagggttggggtgttacctgatgcaggcagggagtttcttacccagacagtacaccttcctcctcagagttccctctgacccagtccctctgttcccagggtgtggaggatgccttctacacactagtacgtgagattcggcagcataaactgcggaagctgaacccacccgatgagagtggccctggctgcatgagctgcaagtgtgtgctatcctgacagcaggtgaggcagggaccagccgacatctggcagtggccccagctagccagatgaacttcatatccactctgatgtccctgctccccccatcctgccaattcccctgctgcggtcagtggtgtcctttgtgcccgtctcggcacaggctcacgacgtggaggtgccggatgcagggaggaggtgcagacggaaggaaggaaagagaagggaaggaaggaaggaaacgatgctggagccagtccagtccagggatggtggacagaggtgaccaagaccttcgcatggacaatttgaacagactgtcatgaactgtccctattgccactggcaccccagtcctcaacccctctcagttcctttgggcgcctatggggcacaggttgaatcacagtaaattatttgatggtcaaaaaaa

SEQ ID NO: 492 - DNA, 1888 bp, Cricetinae gen. sp.
atgggctgcaaaaacctgctcggtctgggtcagcagatgctgcgtcggaaggtggtggactgcagccgggaggagagcagactgtctcgctgcctcaacacctttgacctggtagctcttggggtgggcagcaccttgggtgctggcgtctacgtcctggctggtgcagtggcccgtgaggatgctggtcctgccattgtcatctctttcctgatcgctgccctggcctcagtgttggctggcccgtgctatggagagtttggtgcccgtgttccgaagactggctcagcctacctctacaggtacgtgacagttggggagctctgggccttcatcaccggttggracctgattctstcctacatcattggtacytcaagtgtgscaagagcytggagtgcgacttttgacgagctgatagscaaacccattggagagttctcwcggaaacacatggccctgaatgcccctggggtgctggcccmaaaccctgacatattagctgtgattataattctcatcttaacaggrttgttaacgcttggtgtraaagartcagccatggtcaacaaratcttyacctgtattaatgttctggtcttatgcttcatcatggtgtcgggrttcgtgaaagggtccattaaaaactggcagctcamggaggaggacttcttgaatagatccagccctctytgtggsaayaatgacacaaatgtraagyatggtgagggagggttcatgcccttyggattctctggcgycctgtcrggggcagcsacmtgcttttaygcctttgtgggctttgactgcatygccaccacaggtgaagaagtcaagaacccccagaaggccatycccgtgggcatcgtggcgtccctcctcatttgcttcgtagcttacttcggggtgtcygcagccctcacgctcatgatgccttackcctgcctggacacygacagcccrctgcctggtgccttcaagtacagtggctgggaaggagctaagtatrcagtggctgtcggctccctctgcgcactctcyrccagtctcctaggctccatgtttcccatgcccmgagtwatctaygccatggctgaagayggactactgtttaaatatttggscagagtcaacragaggaccammmccaccagtaattgctacactgacctcaggcgccattgytgctgtgatggccttcctctttgaattgaaggacctggtagacctmmtgtccattggcackctcctggcttactctttggtggctgccysygtrttrgtcttrargtaccagcccgarcaacctaayctggtataccagatggccagaaccaccgatgagttagatcatgtagaccagaatgagctggtcagtgccagtgactcccagacaggctttttaccagtaactgagaacttttctctgaaatccaaactctcacccaagaatatggaaccaacccaattctcaggcctaattgtgaactgttcaacaaccctcctaactaatcttatcatcatcgtgtgcattgtggccgtgctcccaagagagcctctggctgaagggacgctgtgggcagtctttgtaatgacagggtcagtcctcctctgcatgctggtgacaggcatcatctggaggcagcctgaaagcaagaccaagctcacatttaaggtaccctttgtccccgtacttcctatcttgagtatcttcgtgaatgtctatctcatgatgcagctggatcaaggcacatgggtccggttcgcagtgtggatgctgataggcttcagcatctacttcggttacggactgtggcacagtgaggaggcgtccctggctgctggccaggcaaggactcccgacagcaacttggaccagtgcaaatga

SEQ ID NO: 493 - DNA, 741 bp, Phodopus sungorus
ggtaacttgtttgtggtgagtctggccttggatgacctggtggtagccttgtactacccttacccactcgtggccattgtccatgatggttgggccattggagaggcccactacaaagccagtgcctttgtgatgggcctgagcgtcatcggctctgtcttcaacatcacagccattgctatcaaccgctactggtgcatctgccacagtgcaacctaccaccacgtctgcagtcactggcatgcccccttctacatcggcctcatctggctcctcactctggtggccttggtgcccaatttctttgtagggtccctagagtawgacccacgcayctattcctgcaccttcawccagacagccagcacccagtatactgcggctgtggtggccatccatttcctctttccaatcgctgtggtatccttctgctacctgtgaatctgggtgctggtgctccaggcccgaaggaaggccaaggctgacagtaagctgcacctaagacccgttgacttgcccagtttcctaaccatgtttgcagtgtttgtggtttttgccatatgctggggccccctcaactgcatcgcccttgcagtagccctcaacccagaggtgatggctctccgggtaccagaagggcttttcgtcaccaactacttcctagcttacttcaacagctgccttaacgccattgtctacgggctcctgaaccagaacttccgccaggagtacaagaggatc

SEQ ID NO: 494 - DNA, 1399 bp, Phodopus sungorus
  misc_feature (348)..(391): n is a, c, g, or t
tcctcaggttgagccacagagtggacagctgctaaccatggagaaccgagactctgtggcctccttgctacttctgctcttgctgctgccgccacctcacacccaccagggacaggtcctgagacatgttgtccctacccagaattcccaggattctccagctagatacctcagcaatggcccaggacaagagcctgtcgctgttatgacaattgacctcacccaaatgagcaaaccctattcctcctttgagtttcgaaccttggatccagagggagtgattttttatggggacaccaacaccaaagatgactggttcatgctgggacttcgggatggccagcttgnnnnnnnnnnnnnnnnnnnnnnnnnnnnnnnnnnnnnnnnnnnnggccctcggctgaatgatgggagatggcaccaggtggagctgaagatgagtggggactcactgcagctgtgggtggatgggaaagagctgctgtgcctgagacaaatctctggaaccctggctaacaattcctggcccagcatgaggattgcgctagggggactcctcctccccacctccagtcttcggttcccgctggttcctgccctggatggctgtttacgtcgagatacctggctgggccaccaggttcatctctcaccctctgcccctaaccttggaaactgtgatgtggacttgcaacctggactgttcttccctcaaggaacccatgcagaattcagtctccaagacattccccagcctcgcacagacccctggagcttttctctggaactgggattgaagctggtggatggctcaggatgcctccttgctcttgggacaagaacaaattcttcttggctttcccttcacctccaagaccaaaaggtggtgctgtcttctggartagaaccaaaattagttttagccttggacatggggctccctcttcagctgaagctggatatactcaaagtggttttaagccaaggaccaaagacggaggtccttgkcgcgtctgcttcaagacttgctgctctccggacactctggtctcaccctcagggccttctctcccttggggctttagcaggggacaactcttccgcttccttttgcttgagtgatctttgggtacaaggacagagactggacatagaccaggccctgaacagaagccagaacatctggactcacagctgccctcacagcccaaacaatgtctctcacatttcacactaaaccacctttgagaaggcatggtggtacatgcctgtaaatccagggcaggtggagttgggagaatcaggacctcagtgtcatccttgactacataacatgtttgaggccagcatgggcttatctgaaaccctgtcgttaaaaataaaaaggaactttgaatgc

SEQ ID NO: 495 - DNA, 1255 bp, Mesocricetus auratus
  misc_feature (106)..(123): n is a, c, g, or t
cttgcccactctggattctttcgggggcgtggcggggtgtggccagcgagggtatgagccccacccccgtgccagagcgcaaggaaggctgcagcggaccaagatnnnnnnnnnnnnnnnnnnagcggcggcgacagagcagcaaagttccaatgggccagtgaagaagtccatgcgggaaaaggctgtggagcgaaggaacgttaacaaggagcataacagcaactttaaagctgggtatatccctattgatgaagaccggctccataagaccggattgagagggagaaagggcaacttggccatctgtgtgattgtcctcctgtttatcctggctgtcatcaatctactcattactcttgtcatctgggctgtgattcgaattgggccaaatggctgtgacagcatggagttccatgaaagcggtctactgcgattcaagcaagtgtccgacatgggtgtcatccacccgctctataagagcacagtgggaggaaggaggaatgaaaacctggtcatcactggcaacaaccagccaattgtttttcagcaagggacaaccaagctgagtgtagaaaagaacaaaacgtctatcaccagtgacattggaatgcagtttttcgacccgaggacacaaaatattttattcagcacagactacgagactcacgagtttcatttgccaagtggagtgaaaagtttgaatgttcagaaggcgtccactgagaggattaccagcaatgctaccagtgacttaaatatcaaagttgatgggcgtgcgattgttcgtggtaatgaaggcgtgttcatcatgggcaaaacyattgaatttcacatggggggcaatgtggagctaaaggccgaaaacagcatcatcctcaatggaactgtgatggtcagcccaackcgcctgcccagttcctcaagtggggaccagtygggaggtggtgactgggtgcgctacaaactctgcatgtgtgccgatggcacgctcttcaaagtgcaagtaacgggccacaacatgggctgccaggtggcagacaacccctgtgggaacactcattagaagctccagccccagggtcaatatgatccgatctcagcttgaccttttcttttcatgaatgcatgtgaaccaggttttgcagtttgtgataacttgtatttgaactggggagcaccactgtatctgttacgtgctctccatatttaagggatttttgagtgcctaaattctaatatgctttattaagtt

SEQ ID NO: 496 - DNA, 1550 bp, Mesocricetus auratus
  misc_feature (1293)..(1310): n is a, c, g, or t
cagaaatcagtgtccacctcacactacacaaatgggattttaaatctttccagccgcgcagagctcggtccctcgtcaggaatcagttcctcagtggggtttctgagtcgctaagaagatggcacgagaacagtacaccacagtcacagagggcacccacatagagaggcccgagagccagcttgtccacaggatcgggatttatggctggaggaagcgctgtctctacctatttgttcttctcttgctcatcatccttgttgtgaatctcgctctcacaatctggattctgaaagtgatgtggttttctccaataggaatgggtcacttgcatgttacgcaagatggacttcgcctggaaggggaatcagagtttttatttccactgtatgtcaaagaaatacgctccagagtggactcatctctgcttctgcagtcaactcagaatgtgacagtcaatgctcgcaactcagaaggggaggtcacaggcagggtgaaagtgggtgcccaaatggtagaagtccagagccagcacttccagatccgttctgaagacggcaagccactgttcaccgccgaggagcggggtgtcatggtcgataccggcagactgcgagtaaccgggccagaaggcgctattttcgaacactcagtggagacaccccttgtcagagctgacccatttgaagaccttcggttagaatccccaacccggagtctaagcatggatgccccaaggggagttcacattaaagctcacacggggaagatggaggccctttctcaaatggacatcatcttgcagagtagtgatggagtgctggtgcttgatgctgagactgtgggtttgcccgagttggagcaagggacaccgggtccctctggcagttctaagggattctatgagatttgtgtgtgtcccgatgggaagctgtacctgtctgcggctgatgaggccaccacctgcgaggaacacagccacatctgtctctgaccactacctcttctgcagaacagatgttgtcttggtgagctgtggcctcagccttcatgtccctggcagctggacgggagctggtagattcactgctaagcacttagaagcttgcagggggagtgtgcccatggaaccattgggctagagtgcctgctttcagcatggcacaaagaaatgtcaagaacttagtcactggattttcatctttctagcctccttccacatctctcgtgttgaactgctgtctgcaagcagtttatagtactcaacagcagacatctatacacacacacaannnnnnnnnnnnnnnnnnctgactagtggattctaaaatgccccaactctgcacaacccttcctttacgttaagcctcaagtgctcccttcagtcaagtgcagtgtgtcaggttttactaagagatctccagagtttgaagggagtctgaagttgatagattttcaatatgtagttaggggaagaaattacacaaaattagtcatgctttttatacacataccaatgagcaataaaatgacattgcttttcagaccag

SEQ ID NO: 497 - DNA, 964 bp, Cricetinae gen. sp.
  misc_feature (854)..(869): n is a, c, g, or t
cccggtgtcgccgcgcctctcaggccccagatggaccttgggaaagacgagggaagcctgccgcagcccaccaggaagaagtttgtgatcccactggaagacgaggcccctcctgcaggggccaagcccttattcagatcctcacggaaccccagcaccacggccccctcggtcccagcggcccctcagacgtacgccgagtatgccattgcccagcctccaggaggggctgggcccacagggcccacaggctctgaacctgtgaagggagagaaccccggccagacggtgaaaacgggagcgaaatccaatagcatccttgtgagcccccggcagaggggcaaccctgtgttgaagttcgtgcgcaacgtgccctgggaattcggcgaggtgacccctgactatgtgctgggacagagcacttgcgcccttttcctcagcctccgctaccacaatctccatccagactacatccacgaacggctgcagagcctggggaagagctttgccctgcgtgtgctgttggtccaagtggatgtgaaagatcctcagaaggccctgaaggacctggctaaaatgtgtatcttagcggactgcaccctggtcctggcctggagtgccgaggaagcaggacggtacctggagacctacaaggcatatgagcagaagcccgctgacctcctcatggagaagctggagcagaacttcctgtcccgggccaccgagtgtctgaccaccgtgaagtcagtcaacaaaaccgacagccagaccctcctggctacatttggatcccttgaacagctcttgacggcatcacgggaggacctagccttgtgccccggcctgggcccccnnnnnnnnnnnnnnnnctttgacgtcctccatgaacccttcctcaaagtgccccgatgacccgaggtcgctgaggctacagygtcataataaagcattttccaggctgcgt

SEQ ID NO: 498 - DNA, 1527 bp, Cricetulus griseus
ctgggctacaagagacccttctgaaattttcaaatgaccatgaatggtaatggtggcacctcacgttcctattattcccctctctttgtaggactaccaggccatggatgtaccccgagcagccaagggacagtgtccctggcgtccgtgcctcatagggctgttgctgcagctgctgtttgctctgtgcttcttctcctacatccgagtatcccatgaccaacctggcccccctgctcctgatagctccacaggaccagcctccaccccaactacccctgtccccagacccttcctcatcttactgtggacatggsccttccacagsccactgactctgtacccctgttccaagatgctcccaggcaccgccgactgccagatgactgtcaaccggagcttgtacccccaagcagatgcagtcatcttccaccaccgagaaatcagccccaaccccaggtcactgctgccaagtcagccgaggccgccaggccagcgctgggtgtggttcagcctggagtcacccagccactgcagcaggctgtcagccctggatggatacttcaacctaaccatgtcctatcgcagcgactctgacatcttcacaccctatggctggctggagccgtgggcagagcctccagtccaaacccaggtcaacatgtctgccaagactgacctggtggcctgggctgtgtccaactggaaccccaagtcggctcgggtgctgtactatcagaagcttcagagtcacctccatgtggacgtgtatggccgaggacatatgcccctttcccgaggggacatgatggggacgctggccagatacaagttttacctggcgtttgagaactcacttcacccagattacatcacagagaagctgtggaagaatgctctggaggcctgggctgtgcccgtggtcctggggcccagcaggaagaactatgaacgcttcctgccccctgatgccttcatccacgtggatgactttgagagcccagcagacctggctcagtacctgcagaagctagacaaggacagccagagctaccagcgctacttccgctggagggagacgctcaggcctcgcttgtctagcatggcccttgccttctgccaggcatgcaggcagctgcagtgggaccagaggtaccagacggtccacagtgtggcctcttggttccactgaggtggctggccagagtcctgcaggcagtgtcccactcgaaagtcatcctctgtcgcccctggtgctagacactcccttgatgagcatctcagctgctcagagccttgattctggggtcttcatctttgctcactggggatgtgagttcccagaagcctgagctgtatcgagagaccctgctgctgacacactctacttcccagagccccaccctctcccactggtgggtggtgggtctgcctcaattgctcctggtgcacgacataagtaacgtctgaggtgcttgcagggatgtggtactgtcacagtgatccagatgagaccttattctgtca

SEQ ID NO: 499 - DNA, 709 bp, Cricetulus griseus
  misc_feature (178)..(195): n is a, c, g, or t
  misc_feature (263)..(284): n is a, c, g, or t
tagaattcmgcgkccgctgwayyskaggcagccatggcgcccagccggaatggcatgatcctgaagccccacttccacaaggattggcagcggcgagtggacacttggttcaaccagccggcacgcaagatccgcakacgcaaggcccggcaggsgaragcgcgccgcatcgcccctnnnnnnnnnnnnnnnnnnatcaggccgatagtgaggtgccctacagtgagataccacaccaaggtccgagctggcaggggcttcannnnnnnnnnnnnnnnnnnnnntggtatccataagaaagkggctcgaaccatcggcatctctgtggacccaaggagacgaaacaaatccactgaatcactacaggccaatgtgcagcgcctgaaggagtaccgctccaagctcatacttttccccaggaagccytctgctcccaagaagggagacagttctgctgaagaactgaaactggccacccagctaacgggacctgtgatgcgcatacggaatgtctacaaaaaggagaaagccagagttatcacagaagaagagaagaacttcaaggcttttgccagtcttcgtatggcccgggccaatgcccggctctttggcatccgagcaaaaagggcaaaggaagctgcagagcaagatgttgaaaagaaaaagtgatgtgctattggagtactgcaataaaactttgcataaagcg

SEQ ID NO: 500 - DNA, 1959 bp, Cricetulus sp.
  misc_feature (1041)..(1065): n is a, c, g, or t
gcgagagcgagcgctcttgggaggaacttgggcccgcggcggtcgattagtcaggcctcaggaagatggcgtcctcggagcaggcagagcagccgagccagccaagctcttctccaggaagtgaaaatgtggtgcctcgagagccattgattgccacagcagtgaagttcctacagaattctcgggtccggcagagcccacttgcaaccaggagagcatttcttaagaagaaagggctgacggacgatgagattgacctggctttccagcagtcgggcactgctacagaagagcctccatccttgggcctggctacgccagtggctcctgtccagaccccccacctcatcgcacagccatgcagccccggaagttcccgatggcgagattacggtgccttggccatcatcatggcaggaattgcatttggctttcaccagctctacaagaagtacctgctgccccttatcctgggaggcagagaggacaggaagcagctggagaggatggcatcgagtctctccgaactgagtggcagcgtggcccagacagtgactcaggtacagacaacgctggcctctgtccaagagctactgagacagcagcagcagaaggtccaagagctggcccatgagctggccgctgccaaggccaccacatcaaccaactggatcctggagtcccagaatatcaatgagctcaagtcggaaatcaactccttgaaagggcttctcttgaataggaggcagttcccgccctccccatcagccccgaagattccctcctggcagatcccagtgaagtcgccctcgccctccagccccgcggccgtgaaccaccacagcagcagcgacatctctcctgtcagcaacgagtccacatcatcctctcctgggaaggagagccacagccccgagggctccacggccacctaccacctgctgggcccccaggaggagggggagggggtggtggacgtcaagggccaggtgaggatggaggtgcagggggargaggagaagagggaggacaaggaggagnnnnnnnnnnnnnnnnnnnnnnnnngtgagccacgtggatgaggaagacgtgcttggggtgcagagggaggaccggcggggcggtgacgggcagatcaatgagcaggtggacaagcttcggcggccagagggcgccagcaacgagagcgagcggcactaggtgggcgcttgcttgcccgccttcccagcgccccaggacatcagtggcaggtgggcatgagcgtggctctgcctccatgagggtggctggcaacccaggtaggggtgaggctgtcctcagctgcagcagtgtggggttcctccgttcaccakcctcccaaacacctcccccagccctggtggctctggctgttggaggccaagcggaggactccagagccctgtgctcacacccctgcctacccctcctggacaggtgtcctgtccaggtgtgtcctctgaggatcttgactacctgacaccatgcatggccagagctcatgtcatctcctgcctcctgtcaccttagtgcagggggctgtggcccccatggtcttgctgtctcctactgtgccctggcttggcctggggcttcttttttgcctgttccaaaagccagagccctggacctgctcttcatctgtgggcctgccaggacccagcctccctacaaccaggtcctggctgacagatgctcccacctgccctgttgtcctgtataccacacaagaccatcctcgcttgctgtgtcatggtttggctactcagtggtgaggtgtgcttctccctcctgcagtggagccaggcagcagggccttcctgaccaacagccacatctgtcctgcccactgagaaacatgttcatttatgtgatcatgtatagatttcagaatataagatatgactgtacatattgtaataaatatgagttgccatattt

SEQ ID NO: 501 - DNA, 1152 bp, Cricetulus griseus
  misc_feature (1129)..(1147): n is a, c, g, or t
ccttagaaaaaccctaggagttaggattggctctcctgctgcgcggggaacytcagrrtccgtgcyctgtaaccgcctcyctstgaacacccagccatgycgtccwscagscgcgtggcgctggtraccggggctaacaagggsatcggcttcgccatcackcgtgasctgtgtmgcaagttctckggggacgtggtgctcaccgcgcgggacgaggcgcggggyaaggcggctgtgcagcarctgcaggcagagggcctgagtccccrcttccaccagctggacatcgacgacctgcagagcatycgcgccctgcgcgactttctgctcaaggagtatggggggctcgacgtgctgatcaacaatgcgggcatcgccttcaagaatgctgacccaactcccttccacattcaagcagaagtgacaatgaaaacaaacttttttggtacccaagatgtctgcacsgagctactccctctaawaaaaccccaaggcagagtggtgaatgtatcaagyatgswsagyctcakggccctgaaaaactgcagtcyggagctgcagcagaartttcgaagtgacaccatcacagaggaggagctggtggggctcatgaacaagtttgtggaagacacaaagaraggratgcatgagaaggaaggctggcctaatagtgcttatggggtgaccaagattggggtgacagtcctgtccrgaatccatgcccggraactcagccagcagaggagagmwgacaagatcctcctcaatgcctgttgcccagggtgggtgagaacagacatggcaggaccaaaagccmccaagagyccagaagaaggagcagagacccccgtgtacttggcccttttgcccccagrtgcagaggggcctcatgggcagtttgttcaggagaaaaaagtagaacaatggtgaactcaactcttccccyctccccayagcaccctctcyctagytgtawcctgtcttggtgaggactgtggacatttatratctgctgacacaatatactaatttaactctcattaattacwtgagtcattgacccttgtrattctrtgaawtaytttatgattctgtctgtgwtacaggaaagagaaaaagtaaattctcnnnnnnnnnnnnnnnnnnnctggt

SEQ ID NO: 502 - DNA, 1924 bp, Cricetulus griseus
  misc_feature (775)..(799): n is a, c, g, or t
  misc_feature (972)..(995): n is a, c, g, or t
atggcaatgagggagctggtggagggcgaatgtgggggtgccaacccgctcatgaagctggccactcacttcacccaggacaaggcccttcggcaggagggactgaggcctggcccctggcccccgggagcctcagctgcagagacggtttccaagcctttgggagtaggttctgaagatgagttggtggcagaattcctgcaggaccagaatgcaccccttgtatcccgtgcccctcagaccttcaagatggatgacctcttggcagagatgcaggagattgaacagtcaaactttcgccaggctcctcagagagcccctggtgtagcagacttggccttgtctgagaattgggcccaggagtttcttgcggctggagatgctgtggatgtagctcaggattataatgagactgactggtcccaagaattcatcgctgaagtcacagacccattgtctgtgtcccctgcccgatgggctgaggagtatctggagcagtctgaggagaagctgtggttgggagagccggaaggatcatccaccactgatcgatggtatgatgactatcatcccgaggaggatctgcagcacacagccagtgactttgtgtccaaggtggacgaccccaaattggctaactccgagttcctgaaattcgtgcgacagattggcgaggggcaggtgtccctggagtctgctgcagggtcgggccgagctcaggcagaacagtgggcagcagagtttatacagcagcagggcacatcagaggcctggnnnnnnnnnnnnnnnnnnnnnnnnnacacgtctgccctggatgtagaatttgaacgagccaagtcagctatagagtctgatgtcgatttctgggacaagttgcaggcagagttggaggagatggcaaaacgggatgctgaggcgcacccctggctttctgactatgatgacctcacatctgcttcctatgacaagggnnnnnnnnnnnnnnnnnnnnnnnncctgcgtgaccaccctcaggctttcgaagaagggcttcgtcggcttgaggagggggacctgcccaatgccgtgctgctttttgaggctgcagtgcagcaggaccctaagcacatggaagcttggcagtatctgggtaccacccaggctgagaatgagcaagagctcctggctatcagtgccctgcggaggtgtctggagctgaagccagataaccggacagcactgatggccctggctgtaagcttcaccaacgagtccctgcagcggcaggcctgcgagaccctgcgagactggctgcgctactcaccggcctacgcccatctggtgactcctggtgaagaaggggcgagtggggcaggactgggtcccagcaagcgtgtcttgggatccctgttgtctgactccctgtttcttgaagtgaaagagctcttcctggcagctgtgcgtctggaccctacatccattgaccctgacgtgcagtgtggcttgggagtcctcttcaacctgagtggggagtacgacaaggctgtggactgttttacggctgccctcagtgttcgtcccaatgactatttgttgtggaacaaacttggggccacactggccaacgggaaccagagtgaagaggcagtggctgcgtaccgtagagcccttgaactacagcctgggtatatccggtsccgctataacctargcatcagctgcatcaaccttcggggctcaccgtgaggctgkkgaacactttctggaggccctgaacatgcaraggargagccggggccctcggggtgaggggggcgccatgtcagagaacatctggagtaccctgcggttggccttgtctatgttaggccagagtgacgcctatggggcagctgatgctcgggatctgtctgccctcctagctatgtttggcctgccccagtga

SEQ ID NO: 503 - DNA, 1779 bp, Cricetinae gen. sp.
  misc_feature (277)..(295): n is a, c, g, or t
  misc_feature (1474)..(1479): n is a, c, g, or t
  misc_feature (1680)..(1694): n is a, c, g, or t
atggaagggaagtggttgctgtgtatgttactggtgcttggaactgctattgttgaggctcatgatggacatgatgatgacatgattgatattgaagatgatcttgatgatgttattgaagaggtagaagattcgaaatcgaaatcagattccagtactcctccatctccaaaggtcacctacaaagctccagttccaacaggggaagtttattttgctgactcctttgatagagggtctctatcagggtggattttatctaaagccaaaaaagatnnnnnnnnnnnnnnnnnnnccaaatatgatggaaagtgggaggtagatgaaatgaaggacacaaagcttccaggtgataaaggacttgtactgatgtctcgagccaagcatcatgccatctctgctaaactgaacaagcccttcctgtttgacaccaagcctctcattgttcagtatgaggttaattttcagaatggaatagaatgtggtggtgcctatgtgaagctgctttccaagacctcagaactcaacttggatcaattccacgacaagactccctatactaaaatgtttggtcctgataaatgtggagaahactacaaactgcacttcatttttcgccacaaaaaccccaagacaggtgtatatgaagaaaagcatgctaagaggccagatgcacatctgaagatgtattttactgacagaaaaactcatctttacacattagtcttgaatccagacaatagttttgaaatattagttgaccagtttattgtgaacagtggaaatctgctaaatgatatgactcctgctgtaaacccttcacgtgaaattgaggacccagaagaccagaagcctgaggattgggatgaaagacccaaaataccagatccagatgctgtcaagccagatgattgggatgaagatgcccctgctaagattccagatgaagaggccacaaagcctgaaggctggttagatgatgagcctgagtayatyccagacccygatgcrgacaagccagaggattgggatgaggatatggatggagaatgggargctcctcagattgccaaccctaaatgtgartcagcccctggktgtggagtcyggcagcgacctkwgattgacaaycccaattataagggcaaatggaagcctcccatgattgacawtcctaactaccagggagtctggaaaccaaggaaaataccaaatccagatttctttgaagayctagaaccttttaagatgackcctttyagtgctattggtttggagctstggtccatgacytctgacatyttttttgacaactttatcattagtggtgaccgaagrgtrgttgatgattgggccaatgatgggtggggcctgaagaaagctgctgatggggctgcygakccaggtgtagtggggcakatgctggargcagctgaagagcgtccgtggctstgggtggtctacattctgactnnnnnnttgccagtgtttcttgtgatcctcttctgctgctccggaaagaaacagtccagtgctatgcagtacaagaagacagatgctccccagccagatgtgaaggaagaagatgggaaggaagaagagaagaacaagggggatgaagaggaagaaggagaagagaagcttgaagagaaacagaaaagtgatgctgaagatgatggnnnnnnnnnnnnnnnagatgaggaagatagaaaacctactgcagaggaggatgaaattttgaacagatcaccaagaaacagaaagccacgaagagagtga

SEQ ID NO: 504 - DNA, 2194 bp, Cricetulus sp.
  misc_feature (941)..(1035): n is a, c, g, or t
  misc_feature (2027)..(2105): n is a, c, g, or t
aaaaatagcaaaatctgaacccccaacattagcacagccatcaaaatggtcttcaaattttaaggactttctaaagaagtgcttggaaaagaatgtggatgcccggtggactacatctcagttattacagcatccctttgttactgttgattccaacaaaccagtccgagaattgattgctgaggcaaaggctgaagtaacagaagaagtagaagacggcaaagaggaagatgatgatgaggaaacagaaaatgctctgccaatacctgcaaataaasgtgcctcctctgacctcagtattgccagctctgaagaagataaactttcacaaaatgcttgcattttggaatctgtttcagaaagaatagaacacaatactcctggggataaatttagcaataaagttcttaatgaaagacccaccactgatgaacctggaaaggcactgaasggtgttaatgagcatatgggtgattctaacttggaatctatggctgaactcagcgaccaaacagtttgaatccatgatcatgggagggagaakagacccaaactggwkawtcctcctgwcacasaasaccaacagctggtggatattaattcagtccgtgaaggaaatgaggagaatatagtgactttagagatgaacactaaccatgtgaaaccagaggaagaccgagaaaaagaaaaccaagagatacctgagaataaacttagacagtctgaagaaattaaagatatgaatattcaaacaatggacttagtttctcaagagaccggagaaacagaggcagactttcaggcagttgacagtgaagttgggtttacaaaagcagatggtcaggagaaactgagaaaagatgataacactcaaaaagttgtaattaatgatagaatcagtgaggtagtggcaaatgaggcactagatgttgctgagaagnnnnnnnnnnnnnnnnnnnnnnnnnnnnnnnnnnnnnnnnnnnnnnnnnnnnnnnnnnnnnnnnnnnnnnnnnnnnnnnnnnnnnnnnnnnnnnnccctgaggctggcagtgctgaggaagagccttctgctcaaggaagagttgagaataaagaggtacatcaacagtctgcggtgtgtgaaggtgacggacagttcatcagcacttccgtgaccacacaggcaacccctgaggaaccagggacagatgaagttgagcaagttagtgagtcacatagcactgaggagagagagccaagcccagtgtctggtggtgctgaggaacagactccaggaagtgaagctgtggccgctgctgctgaggtagagttggagggcagagaagctgcacaggaagtaccagtgaaagcagagcccgaagctcctgcagcctcaccgtccaacgagcctcatcttatcctaatacccagtatcaatattaactctgaaaacacagaaaataaaggagagttgggtgatttaccaaaaactgaaagcattctgccaccagagcctgaaaatgaaaaggaaaatgacactgactcagggactgggtccactgtggagaagagcagcagtgacttgaatttgtccatctctagcttcctaagcaaaactaaagacagtgggtcaatgtcactacaagagacaagaagacagaagaaaacattgaagaaaacacgcaaatttattgttgatggtgtagaagtgagtgttacaacgtcaaagatagttacagatagtgactccaaaactgaggaattgcggtttctcagacgtcaggaacttcgagagctgagatttctccagaaagaggagcagagggcccagcagcagctcaatggcaaactgcagcagcagcgggagcagattttcaggcgctttgagcaggagatgatgagtaagaagcgacaatatgaccaggaaattgagaatcttgagaagcagcagaaacagacaattgaacgactagaacaagaacatacgaaccgcttgcgagatgaagctaaacgaatcaaaggagagcaagagaaggagctgtccaaannnnnnnnnnnnnnnnnnnnnnnnnnnnnnnnnnnnnnnnnnnnnnnnnnnnnnnnnnnnnnnnnnnnnnnnnnnnnnntgaaaaagatcatccaaaacagaaggcagagttggctaatattgagagagagtgtttgaataacaagcaacagcttatgagagctcgag

SEQ ID NO: 505 - DNA, 1234 bp, Cricetulus griseus
gagagagagaaatggaaaaatgagagcgtagtgtggcccaagaagaggacgagcgcaggaagcgcgcggccgctgtggggtggatgtgtgaagttttcaggcgtttaccggggacagcccccgggtcctctccccccgcccccgccacgcaccggctgaggctgctcgggagggagctgcggttcgccgcttcatgattttctgccgattctgggcaaagatggccaccaatgatgctgttctgaagagactaggagcaggaagggtgcagaggctgaccaggatcattgagtatctcaagcagcaggttgctcttctcaaggagaaagcagttttacaggcaactttgagagaagaaaagaaacttcgagttgaaaatgctaaactgaaaaaagaaatagaagaactaaagcaagagctaattcaggcagaaattcagaatggagtgaagcaaattccagtgccagtccaatctgatactccagtgcaagctagctctgcagtttctacaagtgtgatacagtctacatcggtatcaaccatctcttgtagtataaaagaacacagtaaaggagggggagaagaaaagaaggtaaaagagaaaactgataagaaaggagagaaaaaggagaagaaactgcagtcagcagcaccaagtgctgactcgaagccagtagatgtttctcgtctggatcttcgaattggtcgtattgttactgtcaaaaagcacccggatgcagactcactgtatgtagaagaagtggatgtgggggaggcagccccaaggacagtcatcagtggactggtgaatcatgttcctctagaccagatgcaaaatcgaatggtggttttactttgtaatctgaagcctgcaaaaatgcggggaatactgtctcaagcaatggtgatgtgtgctagttcaccagagaaagtggaaattctggcccctcccaatggatctgttcctggagacagaattacttttgatgctttccctggagagcctgacaaggagctgaaccctaagaagaagatctgggagcagatccaacctgacctgcacaccaatgctgagtgtgtggccacatacaaggggtctccctttgaggtgaaggggaagggagtttgcagggcccaaaccatggccaatagtggcattaaataagtactctgttactgaaggccatggagaaaccttagtaacaataaagaggagtatattgtcacacacaca

SEQ ID NO: 506 - DNA, 2475 bp, Cricetulus griseus
  misc_feature (1781)..(1818): n is a, c, g, or t
  misc_feature (1861)..(1879): n is a, c, g, or t
  misc_feature (2284)..(2340): n is a, c, g, or t
tgaggcgggtcagctcagtcaaagcacccgccctcctgcgttaaacgagccagctaagcgcacgccccggaaacgagctgtgcactccagaactgtaaacctgtttggcagcagcaactaaacacagaaaacaccatggcagagcaggtggccctgagccggacccaggtgtgtggcatcctgagggaagagttgtaccagggtgatgccttccaccaagctgatacacatatatttatcatcatgggtgcatcgggtgacctggccaagaagaagatctatcccactatctggtggctgttccgggatggccttctacccgaagacaccttcattgtgggctatgcccgctcccgactcacagtggatgacatccgcaagcagagtgagcccttctttaaagccaccccagaggaaagacccaagctggaggagttctttgcccgtaactcctatgtggctggccagtatgatgatccagcctcctacaagcacctcaacagccacatgaatgccctgcatcaggggatgcaggccaaccgcctattctacctggccttgccccccacagtctatgaagctgtcaccaagaacattcaagagacctgcatgagtcagacaggctggaaccgcatcatagtggagaagcccttcgggagagacctgcagagctccaaccagctgtcgaaccacatctcctctctgttccgtgaggaccagatctaccgcattgaccactacctgggcaaggagatggtccagaacctcatggtgctgagatttgccaacaggatctttggccccatctggaaccgagacaacattgcctgtgtgatcctcacatttaaagagccctttggtactgagggtcgtgggggctactttgatgaatttgggatcatcagggatgttatgcagaaccacctcctgcagatgttgtgtctggtggccatggaaaaacctgcctccacagattcagatgatgtccgtgatgagaaggtcaaagtgttgaaatgtatctcagaggtggaaaccagcaatgtggtccttggccagtatgtggggaaccccaatggagaaggagaagctaccaatgggtacttggatgaccccacagtgccccgtgggtccaccactgccacctttgcagcagctgtcctctatgtggagaatgagcggtgggatggggtacccttcatcctgcgctgtggcaaagccctgaatgaacgcaaggctgaggtgagactacagttccgagatgtggcaggcgacatcttccaccagcagtgcaagcgtaatgagctggtgattcgtgtgcagcccaatgaggctgtatacaccaagatgatgaccaagaagcctggcatgttcttcaaccctgaggagtcagagctggacttgacctatggcaacagatacaagaatgtgaagctccctgatgcctatgaacgcctcatcctggatgtcttctgtgggagccagatgcactttgtccgcagtgatgaactcagggaagcctggcgtatcttcacaccactgctgcacaagattgatcaagagaagccccagcctatcccctatgtttatggcagccgcggccccacagaggcagatgagctgatgaagagagtgggcttccagtatgagggcacctacaaatgggtgaaccctcacaagctctgagccttgggaacttataccatctgcactctgccccttttggacaccctttctgtgtctatccttcttaccacctaacctcatatttggactattagccnnnnnnnnnnnnnnnnnnnnnnnnnnnnnnnnnnnnnncacattccagtccctgggctcgtgccaccactctataccctannnnnnnnnnnnnnnnnnnaccactgccaccaccaccatcactgctgctgctgctgttaccaccaccactgaccccagctacattcctcaactatcaaattctccaagttctcaaaactcactgtaatgctttcagggccaccattgaccctatctgagccacccatctctccacaagaagcaaatcacctcctcccctcactccagcccctgcaaagggaagaagaacagcctatcagtctgtccctagactcctcaagacaggagttaggaacaatggggaggaaccttgagcctcagagggataaagaccaaaccacactccctagtgtctatgggcaagctcctcaaaattcaaatgaaatggtcaaggacacccatgtgagaagacctgcccatggccacaccagcttcagtgccactnnnnnnnnnnnnnnnnnnnnnnnnnnnnnnnnnnnnnnnnnnnnnnnnnnnnnnnnnctagagatgtcccctaaccaactccatactccatggtcatcatcccacccacaggcagccttctcaccaaaggaaggcagaagtagcagctatgatttccctaccccaaccttgcaattaaatcctccaacagtt

SEQ ID NO: 507 - DNA, 1015 bp, Cricetulus griseus
tttggggaccccswcccatcgaagactctcgctgtgaggtgaggttctctgaagagggatgtgcaaagtccctgctctggcttctaccccctcaacgacttcgcaggacagcgggggcctaggccgtcctgcgcgtgattctggaagccggggcctcgstcswscywsggskggggsttsctcttcaccgacggacttaagccgaggcctakcgcctcagtactggagtgcagagctcaattctgagcacattgtcttctccacggcctgcgctcactgccwgggggacgatggmttcctgtgtcctcctacacactggacrgragatgcctctgattggkctggggacatggaagagtaaccctggccaggtgaaagcagccattaaatatgcccttagtgtakgctaccgccacattgattgtgctgctgtctatggcaacgagattgaaattggagaggccctgaaggaaaatgtgggaccaggcaaggcagtgcctcsagaggagctgtttgtgacatccaagctgtggaacactaagcaccaccctgaggatgtakaagctgccctccsgragacactggctgatctccarctggagtatctggacctctacttgatgcactggccttatgcctttgagaggggagacaatccatttcccaagaatgacgatggaaccatccgctatgactcaacccactacaakgagacctggaaggctctggaggcactggtggcaaargggctggtgaaagccttgggcttgtccaacttcaacagtcgacagattgatgatatcctcagtgtggcctctgtgcgcccagctgtcttgcaggtggaatgccatccatacctggctcaaaatgagctcattgctcattgtcaagcacgaggcttggaggtgactgcttatagccccttgggctcctcagatcgtgcgtggcgccatcctgatgagccagtcttgcttgaggaaccagtggtcttggcactagctgagaagcatggccg

SEQ ID NO: 508 - DNA, 1450 bp, Cricetulus griseus
  misc_feature (620)..(646): n is a, c, g, or t
tctaaagcggtccccgcggaccccgctgccccggcggcgcggccatgaagctgaagctgaagaacgtgtttcttgcctacttcctggtgtcgatcgccggcctcctctacgctctggtgcagcttggccagccatgtgactgcctccctccgcttcgagctgcagctgagcagcttcgacagaaggacctgaggatttcccagttgcaagctgatctccgtcgaccaccccctgtcccagcccagccccctgagcccgaggctctgcccactatctatgtcattacccccacctatgccaggctggtacagaaggcagagctggttcggctgtcccagaccctgagcctggtgccccgtctacactggctgctggtggaggacgctgagagccctaccccgctggtctcggggctgctggctgcctctggtctcctcttcacacacctggctgtcctaacccccaaggctcagcggcttakggaaggcgagccargatgggttcggccccgaggagtakaacagcgcaacaaggccctggactggctccgakgcaaagggggtgctgttggcggkgagaaagacccaccaccaccagggacccaggragtggtgtatttnnnnnnnnnnnnnnnnnnnnnnnnnnnggagctctttaaggagatgcgttggactcgtggtgtctcagtgtggcctgtggggctggtgggcggcctgcgatttgagggtcctcgggtacaggatggccgggttgtgggtttccacacagcatgggaacccaacaggccctttcccctggacatggcgggatttgctgttgccctgcccttgctgttggctaagcccaatgcccagtttgatgcaactgcaccccggggccacttggagagtagtctcctgagccatcttgtggatcccaaggacctagagccacgggctgccaactgtactcaggtactagtgtggcacacacggacagagaaacctaagatgaagcaggaggagcagctgcagcggcagggccagggctcagacccagccattgaggtgtgatggcagcctcaccctgacttctaccttattttaggcacataccttgtgggactgggctccaggccagtccaggatgtggttttttaaaaagacctgacccctcagaaccagaggcagcccctccaaccacagggtgtggcccagctgcttccctcccttcccccagcctgccatgtggcactgcccacaggctggggacaagcagttgttgtattgagccaggtcagccccatctggggtggagcaggacagatggactcaggagggagggtggctgagggaactgggtaacttattggggacaagcatgcactggggggctagaggagctgggctggaccctccccacctgagcatgcggatcctcttcctacctctagaataaagaatctcaacct

SEQ ID NO: 509 - DNA, 2755 bp, Cricetulus griseus
  misc_feature (711)..(736): n is a, c, g, or t
  misc_feature (2479)..(2493): n is a, c, g, or t
gcggccccgccagcaccgcccctcggccccccgcggccggccggcaactataaagtcagacgcgctgcgcgccgcccgcgtcccgtcccgtccgcgcccggtgctccgtgccccttgccccgtgggtgctcgtgctccctgcgctctgctggccttgctatggctcccacccgcgccaggcccacgccacccctgctcctcgccctggtggccgttgtgattccagggcctggtagtgctcaagtatccatccaccccaaagaagccttcctgcctcggggtgcatccatgcaggtgaactgctcttcctcctgcagcgagaacctcagcctgggcttggagactcagtggcccaaagtagagctggatcatggacacaattggaagctgtttgaactgagtgacattggagacgacagcaagccactgtgctttgagaactgtggccctatccagtcctcagcctctgccaccattgtcttgtactcattcccggagcgagtggagctggaccgtctgcccacctggcaacctgtgggcaagaacctcaccctgcgctgcctggtggatggtgggacaccacggagccaactctccgtcaagctgctccgaggtggggaggtgctgcaccaggagccagtgggtgtggactccaggaaccccaaggaggtcacagtcacggtgctggcaagcagagatgaccacggagcnnnnnnnnnnnnnnnnnnnnnnnnnnacctcaggccacaagggctagcactgttcccgaatgtctctgtgattaggcagctctggacttttgaccttcctgtgaccgagccgaagcttgacaccccagacctcctggaggtgggcacggtgcagaaagtgatgtgctccctcggaggcctgtttcctgccgctgaagcccggataactctggagctgggaggccacacactgacctccaagagcacaaaccacagagacttggtgtcagccaccgccttggtgactgcggagatggagggaactcagcagctgcgctgtgtcttggagctggcagaccagatcctgaaggcagagaggactttgagcatctacaatttttcagctccggtcctgaccctgagccagcaagaggtctcagaagggagccaggtgactgtgaagtgtgaagctcaaggaggggcccaggtgcggctgagtggtgctccgcccgggcaggtccagttcacgctgaatgccagctctgaggatcacgagcgaatcttcacttgctctgcggccctgagggtggctgggcaggagctgttaaaaaatcagaccctgaaactccacgtgctgtatggsccccggctggatgagaacgactgcccggggaactggacctggcccgaggggtctcagcagaatctgagttgccaggcttttgggaacccaccccccaagctaacctgcagccggaaaacagatggagccctgctgcccatcggggaagtgaagactgtcacatgggccatgaacggtacctacgtgtgccatgccgtgagctcccatggaaatatcaccagggaagtgttcctgaaagtgcttccaaaatctccgatatggcccatcatcatcattgtggtaatactggctactgtggtctttgtgggggtcctgaccatttacatttataaccgccagagaaagatcaggatatacaagctacagagggcccaggaagaggccatgaaactcaaggtcccgcctcactgagccacaagaacaccaacacctccctgggcgtcccctgcgggcagcagctagtgctgcttttgaacagaaaggtagacaaacagtgtttaccctcaccacctcaggctgtgacaagacaagatgtggcctggggatgcacccaatcagacctccttggcctcacacttgtggcctcaggactgtgaggagaggacctgacaagatcaagggtgtgtttctgtgaactggacacacccacagcctgtgggcctccagtcaggaaatgctgacctcattacctattgcccatgctggagcctctgcctaakgaggagygatatccaatakatacatagcaaagttggaacacaagagtatacttcctctgactcakgaacgctgggacattgyccccaactctycatgatgatgtatttattaaagttttacctggaggttggggatgtagctcagtggtagagcccttagcaaggccctggggttggtcctcagctccaaaaagagaaaaaaagttttacctgctatttattgagtaccttgatactagagcagcaagcaggttcttgtcaggatagtgttgcagggactggatatacaacagagcccggagagaggttcacatagggctaggggtgcctctgttggtcaggatgcttttcccaaaagagccatcacaagaatactaagtgatctaacagtggctccctgctcgtaggcctctcttggagtcctgacnnnnnnnnnnnnnnnagtaaccacttccccacctacatacattcctacctttgctccccgtgtcaaccaccatacccaaatatggatgcccacccttggcagctaaacaggggagtctcatgctcatgaaatcgtggtcaatccctgcctggttccacctcaaacaaagcctgcaagaagatgctgcaactacttaggagggtcctgcaagctggggggtggggggtacaacactcccagctcagaagactttcatttgagtcaataaagtgttatg

SEQ ID NO: 510 - DNA, 812 bp, Cricetinae gen. sp.
cggcacgrgtggtgaacgmggctccggcaccatgtctggttygtctggcccactatsytggcctggccctcgcccgtgtgcgttgctctttctgytcctgctcggccccagctcggtgctcgccatctccttccatctgcccgtgaactctcgcaagtgcctccgcgaggagatccacaaggacctgctrgtgacgggcgcgtacgakatcaccgaccagtccgggggcgcaggcggcctgcgcacccatctcaagatcacagattctgcrggccatattctgtatgccaaggargatgcmactaaggggaartttgcyttcaccacggaagactatgacatgtttgaagtgtgttttgagagcaagggaacagggcggatacctgaccaactcgtgattctagacatgaagcatggagtagaggcgaaaaattatgaagagattgcaaaagttgagaaactcaaaccattggargtggagttacgacgcctagaggacctttcagartcaatcgttaatgaytttgcctacatgaagaagcgggaagaggagatgcgygacaccaatgagtccacraacaccagagtcttgtacttcagcatcttttccatgctctgcctcattggactagccacctggcaggtgttctacctgcgtcgcttcttcaaggccaagaagttgatagagtaatgaggctcagtcttctgtcccctggtatctcagccagcagaacatcgctgggacgtgcctggcctggctcaaggccatcctactaacagtaccatcaaggcacagtggagctttcttgcca

SEQ ID NO: 511 - DNA, 700 bp, Cricetulus griseus
  misc_feature (672)..(672): n is a, c, g, or t
agaatcctacctataagttctttgagcagatgcagaactagacaaccgccacagcagcagcctccgaacttggacagcaaaaccattgcttcactacccatcggtgttcatttataaaataacgtggaaagaaacaagcccttctggtttattatttactcatmatcgccttttgacagccgtgctgtaacacaagtakatgcctgaacttgaattaatatacaaatcagtaatgtattctctctttctctctttatattctggtctctacactacattattaatgggttttgygtactgtaaaaaaaaaattasctgyatcaaactagygcatgawtagattctctcckgatwattkatyacacacatagccccatakcccgtkgtatattattmttgtggwtwgwgacacaatywactcctacttgaaatacgctttaaaaatcgatgggggatgcttcgtgtgaacstgggcatttagctgcttctctgkctaagtgtkmttttcmcgatcactatgcattttaaacattgttgagtattccaaatgatttaggaaaatttttccatgattgcatttactgtacagattgctgcctctgctctgtttgtggcatagggtgcgaggatacacattgatttctttgtgcctgttttatgtgcacacattangcattgagaatttgaacttttttttttt

SEQ ID NO: 512 - DNA, 2403 bp, Cricetulus sp.
gggggggggccggctccgcggcaggacggggagaagggccatggcgtcgtgcgtggggagccggacgctgagcaaggacgacgtgaactacaggatgcatttccgcatgatcaacgagcagcaagtggaggacatcaccatagacttcttctaccggccgcacacgatcaccctgctcagcttcaccatcgtcagcctcatgtacttcgccttcaccagggatgactctgttcctgaagacaacatctggagaggcatcctctcagttattttcttctttctcatcatcagcgtgctggcgttccccaacggtccatttaccagacctcatccagccttgtggcgaatggtttttggcctcagtgtgctgtacttcctcttcttggtatttctccttttcctgaacttcgagcaggttaaatccctaatgtattggctagatcccaatcttcgatatgccaccagagaagcagatatcatggagtatgctgtgaactgccatgtgatcacctgggagaggatcgtcagccattttgatatatttgcatttgggcatttctggggctgggccatgaaggccttgttgatccgtagttatggactctgctggacaatcagcatcacctgggagctgacagagctgttcttcatgcatctgctgcccaactttgccgagtgctggtgggaccaggtcattctggacatcctgttatgcaatggtggtggcatctggctgggcatggttgtttgccgatttttggagatgaggacttaccactgggcaagcttcaaggacatccataccaccacagggaagatcaaacgtgctgtgttacagttcacccctgctagctggacttacgtcaggtggkkkgaccctaagtcttcctttcagagagtggctggggtataccttttcatgatcatctggcagttgactgagctgaataccttcttcttgaagcacatctttgttttccaagccagccaccccttaagctggtgtagaattctcttcatcggctgcattacagctcctacagtgagacagtactatgcttacctcaccgacacacagtgtaagcgcgttgggacacagtgctgggtgtttggggtcattggctttctggaagctattgtttgcataaaattcggacawgatcttttctctaagacccakatactctacgttgtattttggcttctttgtgtggccttcaccacgttcctgtgtctgtacsgcatgagttkggttgcasagcactatggtcaccgggaaaagacctattcagagtgtgragatggcactccagagatctcctggcatcatgggaaaggctcaaaaggttctgaagacagccctcccaagcattcaagcaacaacgaaagccattcttccagaagaaggaaccggcattccaagtccaaagtcaccaatggagttggaaagaaatgaaggagcctcattaatttcagatgttccagagagtgcctagacctgagagggcaacagaacacattgggaccttcctatgtggagatcaaaatgtacagaacacacagaaggaacagagggggctttggggatcatgattggagagtgtaagtcttgtctcccatagctctgaacatacattaggctgaccatgacttggggtcctttgccaacaggaggtgtctcctaacttcagcatgaggcctgtggtttctggtagctatacagtgtgctggaaggacaggatagctgtttgctcctggttgccagcaatggctctgtgcccatgtgtctcgtggacgctgtaggactatcttcattcagatgtcaacttcaccaactggttaatgaattgttcactgggttttatttttatgaatctgcctttccatttgactgattgttttaagttcagtttgtttttccatcttttcctttgtgttttcaagttagaatgcttaaaaacttccagaatccactgctgaaattggggttccttctagagaagaaatgggtggggggagtttttttgtgtccctgcttagcatactcagtccctagccacatgacagatgaccagcagcctgagtttgaaggaggctggctgtttgcactggagcctgagcttcagactggaacctgttgtattccattccaaacgctgtttgtcccaactgagtgcacacaagtgaccctgctagaggatctggggcactgcggctcctctcctgccaggtgcctttcccatatgcttggttttccttctgtggtatgttgcctactttgtctttctgtctcatgtgaggtgctagtgagtattaagtttcatctgtgccatgctctcctagaacattttcccaccctggatccttgttttaaataaatcaattcacatgaaaaactcctca

SEQ ID NO: 513 - DNA, 1403 bp, Cricetinae gen. sp.
  misc_feature (696)..(750): n is a, c, g, or t
ggcggccgcgcgagatcctgagtckcccaacggcgcyrcggactcrggtggcwgygctgagtccgtmcgtcccagcgcggccctcatggcgctgctccgacgcccgacggtgtccagtgatttgaagamtattgacacaggagttaatcctaaagctaagagccatgtgacyatycggcgggcagttttagaagaaattggaaataaagttagaascmgagcagcyccagtggctaagaaacctcagaacaccaaaataccagttcagcccaccaaagtgacamatgtcaacaaacagccraaacctacagcctctgtgaaacckgtacaratggagacmctggctccmaaggatccttctcctgcccctgaggatgtctccatgaaggaagagaacctctgccaagctttctctgatgctttgctctgcaagatygaggatatagataacgaagactgggagaaccctcagctctgcagygactacgtgaaggacatctaccagtatctcaggcagcttgaggttttgcagtcyatcaacccacayttcttagatggaagagatataaatggacgtatgcgtgccatcctggtggactggctggtccaagtycattccaarkttaggcttytgcargaaactctttacatgtgcattgccatcatggaccggttcctacaggcgcagccggtctnnnnnnnnnnnnnnnnnnnnnnnnnnnnnnnnnnnnnnnnnnnnnnnnnnnnnnncgaggagatgttttctccaaatatcgaagactttgtttatatcacagacaatgcttacaccagttcccaaatccgagaaatggagactctgattttgaaagagctaaaatttgagttgggtcggcctttgccgctccacttcttaaggcgagcctcaaaggctggggaggtggacgtggaacaacacacgctagccaagtatctgatggagctaacgctcatcgactatgacatggtgcactatcacccttctcaggtcgcagcggctgcttcctgcctttctcagaaggtgctgggccagggcaaatggaatttaaagcagcagtattacaccggatacatggagactgaagtactggaagtcatgcagcacatggccaagaacgtggtgaaagtcaacgaaaacctcaccaagttcatcgctgtcaagaacaagtatgccagcagcagactcctgaagatcagcacgatcccacagctgaactccaaaaccatcaaagaccttgcctcccctctgatgggcaggctctaggtggctggctcccgccatgcacatctgattttgtacatactcctgtagtttacttcacaaaacctcttctcagactaatctcctaattgtgtattgaggaaaaaataaagctattgcggcc

SEQ ID NO: 514 - DNA, 962 bp, Cricetulus griseus
gtcgacccacgcgtgggggaaggcttaacccccaccgtsagcacccaaagctgaaattcttattaaactacttcttgtacatcaacttctagtacataaatttatctagtccataatacattaatgtatatcgtgcattacattatattcccctagcatataagcatgtratacttaattaatgtaataagacatcttatgtaaaatccacataaattatctacaacatgtattttcatctatactatatattaatgtaattccacatatctgcgttatcttacatacaccattttagtcatatccctgctttgccatatgtctatccccgtccccattkggtctaacacatctaccatcctccgagaaaccagcaacccrsscacctctgcccctcttctmgctccsggcccattacaacttgggggtgactaacctgaaactyyaccaggcatctggttctttcttyavggccatgaaatgcatcatcskccmtacgttccccttaaataagacatctcgatggtacgggtctaatcagcccatgcccaacataactgtggkctcgtgcctttggtatcttttatttttcggtatgctgtgactcaccatagccgtcaaggsrkgaaskycaacttattcgtgtagctggacttctctattcaagtgtcatttatccacatatacaatccccaaagacatactattcaatgctttcttcggacatatctttaatttacactagattttcaagccaaacccccctcccccactgataattactaactctgacaaaccccaaaaccagagatttcaataccaggtctctccaccattctagtaatccgccaaacataacttgaatttcaataagtgtaaaatttaccctatcgctttaaaattcctattgacacctagactagttttaatatacaagtgggtgacgggcataaacacgttaa

SEQ ID NO: 515 - DNA, 6134 bp, Cricetinae gen. sp.
  misc_feature (3005)..(3041): n is a, c, g, or t
  misc_feature (3426)..(3518): n is a, c, g, or t
  misc_feature (3565)..(3601): n is a, c, g, or t
  misc_feature (3629)..(3683): n is a, c, g, or t
  misc_feature (3710)..(3724): n is a, c, g, or t
  misc_feature (3726)..(3750): n is a, c, g, or t
  misc_feature (3848)..(3880): n is a, c, g, or t
  misc_feature (3886)..(3916): n is a, c, g, or t
  misc_feature (3925)..(3992): n is a, c, g, or t
  misc_feature (5196)..(5221): n is a, c, g, or t
  misc_feature (5545)..(5559): n is a, c, g, or t
ggatccaacttctaagtccgttttttattgatctaaaaggccttttgcgaatcatcttgaaggcaatcgcgttctgagccacctcagctttggcacacagcgcggggactgtcgcgaggggtttagggcccaagcaggacacaccccgaaatctccgcagccacccccaccccacgcccccggctcttgagggttaaatcgcaggcgcaggttctcgcacgcgcacatcatcccgcaggcgagccccagcacccagcccagggtgcgcgcgcgccgtcacgtgacacgcccaaccggcgtcgccgtataaaagcgcgggcgttgacgtcagcggtctcttccgccgcagccgccgccatcgtcggcgcccctcgctcttctcctgtgcccgtgagaatccgtcgccatccgccactatggtgagtgaccccggagcggcggtgctcggggccggagacggtacctcggggctgcgggacgtgtcggtggcggtccgcggaggccggcctgggaggagacatggctgccggggcggcgggacgtggacggacggggcggctggcgccatgtctgcgcgtcgggctgtggcctcggcacggcggccgttgtcccctcggcggacggtgctgatttggcagtgggcacagccaggcctctggccgccctcgggcgtgggatcgctggtcccgtccccggcggagggccagcgtccctttacgaggtgacagccgggtgggcggtcttccgtttgcacatccgcgtcccctgtggccggcctccgcgcgtcacgtcgctgctgtaggaccccctcctgaacggtgacgtgctccctgctaaccaaatggattccgaaggtagcctgggcaagggctctcgcatcccgccatgtggaacccgctggctttgggtggcgcaaagcgtgtcccatgccgagcgtctggaggttctgtgcctccacacgtgtggacccatcgagttgtcatgagtagtgtcctgctgaggttcccacgcacttctaggcactgcttgcttggctgtgaagctggggtggcaggcgcagttttgttgcctgtggatgcgttggaagattgggggcctttggttattgcggtggtgactgtctttgagatagggtttcacgtagcccaggcttgctcaggtggttagttcagggtttgtttagttagggctggacttctgacgtgctggctgtggactcttgatctgtatgctaacgaggtgcttgggcttgcaggctcgagtcaccgcggactcactgttccttatgaatgacaaccgaggctccatcttgggctgacggtcgtggttgtagtggctgtgtgcgcactggagtgttgtgtgggcaggccacggccacgcgtgggaaacgacatgctgctgcctgcagtttgctcagctgcccctcccccatcccaggtgaacttcacggtagaccagatccgtgccattatggacaaagaagccaacatccggaacatgtcagtcatcgctcacgtggaccacggcaagtccacactgacggactccctggtgtgcaaggcgggtatcatcgcctctgcaagagccggtgagacacgcttcacagacacccgcaaggacgaacaggagcgctgcatcactatcaagtccacgtaagtggcgatgctcagccgtcactgggggcacctttgctgggagtctccatccagcatctggggaggggtgccagcaggtgccctatggccgctgtagtgcctgctccacagtagactgaggagtgtaaggcagagcctctgccggcctgatccctgtctccttctccagggccatctccctcttctatgagctctctgagaatgacctgaacttcatcaagcagagcaaggatggatctggctttctcatcaacctcatcgactctccaggccatgtggatttctcctcagaggtgacagctgcacttcgtgtcaccgatggagctcttgtggtggtggactgtgtgtctggtaagcagatggtggcccatagagtgaaactgaggcatacagggcactttgctttatgtgtatttagatacatagcagcagggagagtgagattcttgaacttaacagcagggaggcgggggtctccagtttaaggacagccagggctacatagtgggactcttgtctcaaaaatccacgaacacaaagggacaggaaagcccagtgttgtgctctggctgatgacatttcagctataccttctagaaactttggtcccctgtacacattcccacacagagatgtgcttttctggggactagtgtctggttccaggcattctctgctagccccaagtggcacatgctcacatacatcactttaaaaatacatctacaaaccccatgtcctcccccccaggtgtgtgcgtgcagactgagaccgtgctgcggcaggccattgccgagcgcatcaagcctgtcctgatgatgaataagatggaccgtgccctgcttgagctgcagctggagcctgaggaactataccagaccttccagcgcattgtggagaatgtcaacgtcatcatttccacctatggcgagggcgagagtggacccatgggaaatattatggttcggagcccaccttgtggggtgggtctgtgaccatgctctgtaggaacccttctggcagaccacacatgatgactgaaattcttcactttgacctgatgtctgttgaagaaactctgtgtctgagcctgtggggatcttggctgggtgggcttctaatggatgttcttggctcagcgctgctctccttcttcagattgaccccgtcctgggcactgtgggctttggctctggcctgcatggctgggccttcactctgaagcagtttgcggagatgtatgtggctaagtttgcagcaaagggtgagggccagctggggcctgctgagcgggccaagaaagtggaggacatgatgaagaagttgtggggagatcggtaagtttagctnnnnnnnnnnnnnnnnnnnnnnnnnnnnnnnnnnnnnaatagccctgtggaatgtggcataacttgatctctccctctgtaaggtattttgatcccgccaatggcaaattcagcaagtccgctaacagccctgatgggaagaaactgccacgcaccttttgccagctcatcctggaccccatcttcaaggtgggttgggttagctgtgtccctggcctcagcgcaagccctcagagcacccttgccctggaagcagctctccagtgcccgcctgagcccacttgcctctggtacaggtgtttgacsccatcatgaacttcagaaaggaggagacggccaagctgattgagaagctggatatcaagctggacagcgaggacaaagacaaggagggcaagcccctgctgaaggctgtgatgcgnnnnnnnnnnnnnnnnnnnnnnnnnnnnnnnnnnnnnnnnnnnnnnnnnnnnnnnnnnnnnnnnnnnnnnnnnnnnnnnnnnnnnnnnnnnnntctacgaggggccacctgatgatgaggcggccatgggcattaaaagnnnnnnnnnnnnnnnnnnnnnnnnnnnnnnnnnnnnnaagatggtgccaacctccgacaaaggcnnnnnnnnnnnnnnnnnnnnnnnnnnnnnnnnnnnnnnnnnnnnnnnnnnnnnnngtccgcatcatgggccccaactacacnnnnnnnnnnnnnnnannnnnnnnnnnnnnnnnnnnnnnnnggtgggcgcagtcccktgcctgtccacaccttctgcytgarccctggctgcctcccatggtgcccctgttgacactccattgtccctccctctagaannnnnnnnnnnnnnnnnnnnnnnnnnnnnnnnnttgagnnnnnnnnnnnnnnnnnnnnnnnnnnnnnnnttggtgtannnnnnnnnnnnnnnnnnnnnnnnnnnnnnnnnnnnnnnnnnnnnnnnnnnnnnnnnnnnnnnnnnnngttcagcgtcagccctgtcgtcagagtggctgtggaggccaagaacccagctgacctgcccaaactggtggagggcctgaagcggctggcaaaatctgaccctatggtgcaggtgtgccttaggcagagggtaggggcactttctgccacagactcagtggtgtgccatggttagagggcaacttggtaggaggaggcggtgccttcctgggtggtggcagggttctcaccactgttcccatagtgcatcattgaggagtctggggagcacatcattgctggagcaggtgagctgcacctggaaatctgcctcaaggacctggaggaggaccacgcctgcatccccatcaaggtgggcaccctcctgggttcctgtgaggagccagggccccttttacccctgctgatgcctggaagktcwwsccagcswysrcagyctkmwtccycmtsmaraaatctgaccctgttgtctcataccgggagacagtgagcgaggagtcaaatgtgctgtgcctgtccaagtcgcccaacaagcacaaccgattgtwtatgaaggcccggcccttccctgatggcctggccgaggacatcgacaagggtgaagtgtctgctcgccaggagctcaaggcacgcscacgctatctagctgaaaagtacraatgggatgttgctgaascccgcaaratctggtgctttgggcctgatggcactggccccaacattyttaccgatatcaccaagggtgtgcagtacctgaatgaaatcaaggacagtgtggtggctggcttccagtgggccactaaggaggtgagtggctggggcctgggtgttccttctctggagaccaatgctttcttgactttcagtaggtgttggagtgtggctgggtctgactaaccagctttcctagggcgctctctgtgaggagaacatgcgtggtgtgcgcttcgatgtccatgatgtgaccctacatgctgatgccatccaccgaagaggtggtcagatcattcccacagctcgtcgttgtctgtatgccagtgtgttgactgcacagccccgcctcatggagcctatctacctggtggagattcaggtaagaaaaaaaaaacatgcctgcctgtgtggcgcccattcacccttctgtgatgatgcagttctcactggtgctctctgtccttcagtgtcctgaacaggtcgtgggtgnnnnnnnnnnnnnnnnnnnnnnnnnncgtggccatgtgtttgaagagtcccaggtggctggcacccccatgtttgtagtcaaggcctatcttccagtcaacgagtcctttggtgagtgtcatggcttccccttggtgttcccagccctctgcactctagggtggctgcctcattgggtcaaaagcaaagtggtctgtgtatccagatggtggtgggcagggagccaggaaatgtggaaacccttcctgagtgggaagaccaggcagggggaagcacaaaccgaggggctaggctcttgctgagcctcttgcctttatccaggttttacagctgacctgcgctccaacacnnnnnnnnnnnnnnncccccagtgtgtgttcgaccactggcagattctgcccggggacccgttcgacaacagcagccgtggcagccaagtggtggctgagacccgcaagcgcaaaggtctaaaggagggcatcccagcactggacaacttcctggacaaactgtaggcaggcttgcacagccacacactgcacagtgcccacccatcagaagacaccttgagactgtccccataatgctgctctggaggtggctggggccaccctgccattgagcactaacacttgatgccgattctatttatttcggaatttccgaggcagtggagtcgccctctgcaggctggactggctggcgggccatggggtgggcaggacacagctctttatcattttcagagggaaaaatgctcagatatcaaacatctaaataaatgcattcagaggtttatggggttcattcatggactggagttgcccaggggatgcagatttgtggctcctgggaggtgggtgatctatcggccctgtctggccctttgcagtaataaaactgctgtggttgaccttcctggactttgccaatctggca

SEQ ID NO: 516 - DNA, 950 bp, Cricetulus griseus
  misc_feature (95)..(115): n is a, c, g, or t
ttccagccaccttctgcactccagactccagctacactcctgcccaacgccatggccccagccacccgttcactcctccgtgcccctctgctgtnnnnnnnnnnnnnnnnnnnnnccagccgcttggctacaggggctcctgttgccaacgagctgcgctgtcagtgcctgcagaccatgacaggggttcacctcaagaacatccagagcttgaaggtgacacccccaggaccccactgcacccaaaccgaagtcatagccactctcaagaatggkcaggaagcttgccttaaccctgaagcccccatggttcagaagattgtccaaaagatgctaaagagcggaatccgtaagtaacagagaaagaagtaagattgctttggtggcgcatctgtgatcgctgacttctgacaacactggcttaacacattttacagkttcttacaagaaccctatttatttatgtatttatttatttcacaaagcttgtgtattttatttttacattaatatttaacattgtggatgtgttttatcaatggtagttcagttctgattgttcagtttgaagatggtaggcttaaaatatctcagtaaactaatatttattgggagaccattaagtgtcaaccactgtaagagaagcatgtggggttgggaaaaaagcagagagatgagagcatatgatcatgtttgtattagggtgagggaacgtgtgggaatctatgtttgaatgttttggaaagaatgtcagttatttattgaatgtcattttttatattaatggtcaacattgacatgttgaagtttcccttggacattttatgtctactttgtagggcatagtgccctgttatattctttaaccaatgtttctctttgtcttgtgacagagaagttcaaaggactcttacaaatgagataaaaataaaaagttttagcaaaaaaaa

SEQ ID NO: 517 - DNA, 1623 bp, Cricetulus griseus
  misc_feature (295)..(314): n is a, c, g, or t
cctcggaggcacgcgtccgtgctcctcgttggccatggcggactacctgattagcggaggcacatcttacgtgcccgacgacgggctcacagcgcagcagctcttcaactgcggggatggcctcacctacaacgattttctcattcttcctgggtatatcgacttcactgccgaccaagtggatttgacctctgctctaactaagaagatcaccctgaagaccccactggtttcctcacctatggacactgtcacagaggctggaatggccattgcaatggcgcttacaggaggnnnnnnnnnnnnnnnnnnnnactgtacacctgaattccaggccaatgaagttcggaaagtaaagaaatatgaacagggattcataactgatcctgtagtccttagccccaaggatcgtgtgagggatgtttytgaagccaaagccaggcatggcttctgtggtatccccatcacagatacaggccggatggggagtcgactggtgggcatcatttcttcaagggatattgattttctcaaggaggaagagcatgaccgtttcttggaggagatcatgacaaagagggaagatttggtggtggcccctgcaggcatcactctgaaggaggcaaatgaaattctgcagcgcagtaaaaagggaaagttgcccattgtgaatgaaaatgatgagctggtagccatcattgctcggacagacctgaagaagaatcgtgattacccattggcttccaaagatgccaaaaagcagctactatgtggggcagccattggtactcatgaggatgacaagtataggctggacttactggctcttgctggtgtggatgtagtggttttggactcttcccagggaaactccattttccaaatcaatatgatcaaatacatgaaagagaaataccccaatctccaagtcattggaggcaatgtagtcactgctgctcaagccaagaacctcatagacgcaggtgtggatgctctgcgagttggcatggggtgtggttccatctgcattactcaggaagtgttggcctgtggtcggccccaagcaacagcagtgtacaaggtttctgagtatgctcggcgctttggtgttcctgttattgctgatggaggaatccaaaatgtgggtcatattgccaaagctttggctcttggagcttctacagtcatgatgggctccctcttggctgccaccaccgaagcccctggtgagtacttcttctcagatgggatccggctaaaaaagtaccgtggtatgggttctcttgatgccatggacaagcatctcagcagccagaaccgatatttcagtgaagctgacaaaatcaaagtggcccaaggagtttcaggagctgtgcaggacaaagggtctatccacaagttcgtcccttatttgattgctggcatccagcattcctgtcaggacattggtgccaagagtttaacccaagtcagagccatgatgtactctggggaactcaagtttgagaagagaacatcctcagctcaggtggaaggtggtgtccacagccttcattcgtatgagaagcggcttttctgaaaagagatccagtatatgccttgaatttttcaataaaagttttg

SEQ ID NO: 518 - DNA, 5098 bp, Cricetinae gen. sp.
  misc_feature (3009)..(3032): n is a, c, g, or t
  misc_feature (3083)..(3113): n is a, c, g, or t
ggcgcaataacgttacaaattataacactgtggtagaagcaaattccgattctgacgatgaagacaaactccacattgtggaagaagaaagcatcgctgatgcaggtgactgtgaaggtggcatgcccgaggatgagctgccggctgaccagacagtcttaccaggaggcagtgacagggaaggcggtgccaagaactgctggcaagatgacgtaaaagatgatgagtgtgactcagatgcagaaaatgagcaaaaccatgaccctaatgtggaagagttcctgcaacagcaagacaccgccatcatttaccccgaggcacccgaggaggaccagcggcagggcacgccagaggccagtggtcaggacgaaaacggagcagcagatgcattttcccaattgctaacctgcccatattgcgatagaggctacaagcgctttacctctttgaaagagcacattaagtaccgccatgaaaagaacgaagacaatttcagctgctcmctgtgcagttacacctttgcatacagaacccagcttgaacgccacatgacatcacataagtcaggaagagagcaaagacatgtgacgcagtctgggggcaaycgtaaattcaagtgcactgagtgtggaaaagcyttcaaatayaaacaccacctraaagagcacttacgaatycacagtggagagaagccatatgaatgcccaaactgcaagaaacgtttttcccattctggttcctatagctcacacataagcagtaagaagtgtattagcttgatgcctgtgaatgggaggccyagatcaggactcaagacatcrcagtgtycctcaccatctctttcggcatcaccaggcagtcccackcgcccacagatacggcagaagatagagaataaaccccttcaagaaccgctttctgtaaaccaaatcaaaactgaacctgtggattatgagttcaaacccatagtggttgcttcaggaatcaactgttcaacccctttacaaaacggggtttttagcggtggtggccaattgcaggcaaccagttctcctcagggtgtggtgcaagctgttgttctgccaacagtcggtttggtatctcccataagtatcaatttaagtgacattcagaatgtacttaaagtggcactagacggtaacgtaatacggcaagttttggaaaataatcaagccagtcttgcatccaaagagcaagaagcagttaatgcttcatccatccagcagggtggtcattctgttatttctgccatcagtcttcctttagttgatcaagatggaacaaccaaaatcatcatcaactacagtcttgagcagcccagccaacttcaggttgttcctcagaatttaaagatagaaaacccagcccctacaaatagctgcaaaagtgagaagttaccagaagaccttactgttaaatcagaaaaggacaaaggctttgatggggctgtggatggtagcacttgccttctgtatgatgattgcccaggagacctcaatgcacttccagaactaaaaaagcactatgacccagagcaccctgcccagcctccaccccctgcccccgaagccgagaagcccgaggcctctgcttcatcagccagggatggcgatttgtctcccagtcagccacctttaaagaacctcctatcgctcttaaaagcctactatgctctgaacgcacagccaaactcagaagagctctcaaagattgccgactctgtgaacctacccctggatgtagttaaaaagtggtttgaaaagatgcaagctggacagattccagggcagtctcctgagccaccgtctccagaaacgggcacagtaaacatccctgcaaagagcgatgaacagcctcaacctgcagatggaagtgagccccaggaagacagcgcaagtggacagagtcctctcaagatgactagctccccggttttaccagtaggatcagccatcaatggttccagaagttgcacatcacccccatcacctctaaacctttcctcggccaggagcctgcagggttacttttgtgtggcagacggtgcccaggaggagccccaagtagaacctcttgatctctcactaccaaagcaacagggagagttactggaaaggtcgactatcagcagtgtttaccagaacagtgtttattctgtccaggaagaacccttgaacttgtcttgtgtaaaaaaggagccacaagaggacagctgtgttacagactcagaaccagttgtaaatgtaatcccaccaagtgccaaccccataaatattgctattcctacagtcactgcccagttacccaccatcgtggccattgctgaccagaacagtgttccctgcttacgtgcactggctgccaacaagcagactattctgattccccaggtggcttatacatacgctactacagtcagccctgcaatgcaggaaccaccggtgaaggtaatccagccaaatggaaaccaggatgaaaggcaagacactagctcagaaggagtctccacagtggaggaccagaacgactctgactctacaccacccaaaaagaaaactcggaagacagagaatggaatgtatgcatgtgacctatgtgacaagatatttcagaagagcagctcactgctgagacacaagtatgaacacacaggtaaaagaccccatgagtgtggaatctgtaaaaaggcatttaaacacaaacatcatttgattgaacacatgagattacactctggagaaaagccctatcaatgtgacaagtgtggcaagcgcttctcacactcgggatcttattctcagcacatgaatcaccgctactcctactgcaagagagaagcagaagaaagagatggcacggagcaggagcaggaagaggctgggctggaagccctgatgaatgagcatgtgggtgcgcgggcatctccctcacaggctgactcggatgagagagaaagtttgacaagggaggaggatgaagacagtgaannnnnnnnnnnnnnnnnnnnnnnnaaagagatggaagaattgcaggaagaaaaggaatgtgggaatgcacaggcnnnnnnnnnnnnnnnnnnnnnnnnnnnnnnnatggatggagccaaggatgaggcagcagccaagactgatggtgccgtggagaatggggctgctccgcaggcaggcagcttagagcagaaggcaagcgagagcagcgagcaactgtcagaggagacgacaaatgaagcctaggagctcttctagaaggaaattctacttggtaatgaaatttgctctatattacccacgcttttcatggaaacacggcccctgtgccgtggttcctgctcactactgtgtaatgtcagaactgaaaaaaaaatacaaaaaaaaaaatccgggtgtgcctgaacctcagacctagtaatttttcatgcagttttcagagttaggaacacatatgtaacatgaagcagaatagaaaacttcagagactgagaagcaggtttcttagcaggttacagggagctggatgggcatctggcatggttatcagtattatcactcttacgttggttcattcttaagctgtacaatgggagaaattttataatttttattggtaaacatatgctaaagccgcttcagtattttattatgtttttttaaaatgtgagaacttctgcactacagaattcccttcacagagcagtagaaagcagttccaaccgtgctgactacctgttaccaagtcagtcaggaggtaggacctctacgttagacgccatgttgtcatttaacatgtattgctagccttaaggaagcagccgagagaagaactgaagtttcttactcatgtgattttaaatggagttcaaaggttgtcgttgagttctgactgcagggacgaacagtattgatgtggtgaggacgacagagtctgcagaatcagtgttcgtgattgtgtttgcgtacgtggtagcaactatgaaggatctataggaagcgttatgtctcctttggccttaagcaagacctgtgtgctgtaagtgccattctcagtatttcaaggctctaactgccttcattcagtgtgtggcctacaataactagcatttgttgatttgtttgatgtttcaaaattcccaaacaaaactcaaaaccactgactctgtcagagaagctgaagcactgggacatctcataccttggttcctcagtattcattttacgttgattgactttcggaaatctctacagaaacaaaagggaaattctctaaactacttaatccatgtactttcgtgtcagacatggataagccattagtatttggcttacaaccatttccaaatgttagttattacggacccagttgatgaacaacattagctgatttttacctatcagtattattttatttcttttagtttatagatctgtgcaacatttttgtactgtatgtcttcaagcctggcagtattaatacccttcttactgacacgtacttttagttttagaaaacttttatatttatgtgtcttatttttatatttctttatttattacacagtgtagtgtataatactgtagtttgtattaatacaataatatattttagtatgaaattttggaaagttgataagatttaaagtagagatgcaattggttctcgtgcattgagatttgatttaacagtgttctgttaacatttatactcgccttgggctgtagagcagagtttaaatgggaatgtattagttttacaactacaatcaagtcattctccctttacccagtttttaatatgaaactcttcactttgaaactcactgtgtgactcatagcatgatgctctgcagttcttctgttaagagttggcccagccataacccattcccttagcaagccaaattagaattgccttctgtaaacagtgttgggaacaatgtttaacatgttgtgccaatttgttcctgtatccatgtatgtaagctaccaatccgactcttccttttaagttccttgttacaccatggtcattttctagttttttaccagactccccagctcacaataaaatgcatcaacaagcc

SEQ ID NO: 519 - DNA, 1422 bp, Cricetulus griseus
agctttctcggtgctcttgtcggtggtcacctgcgctgtcgccttccccggggctgtgacggtgttccttagctttgccggccaggtcgactcctgccctgcggatcatgatgtgcttccgcctctctccggtttcgggctcggggctcgtcctgtcttgtctcctcctgggagctgttcagtcctatgcattcgaacttaatttgccagattcaaaagctacttgcctttttgccaaatggaagatgaatttcacaatatcctatgaaactacaacaaacaaaacccttaaaactgtaaccatttcagaacctcacaatgtgacatataatggaagcagctgtggtgatgaccagggtgtggctaaaatagctgtgcaatttggatccactgtttcttggaatgtgacttttactaaggaagaatctcattatgttattggcagcatctggctcgtgtacaacactagtgataacacaacatttcctggtgctatccctaaaggaagkgctactgttatcagttctcagagcatcgaaattccattggatgacatctttaggtgcaatagtttactaactttcaagacgggtaatgtggtccagaactattgggatattcacctgcaagcttttgttcaaaatggcacagtgagtaaagaagaattygtgygtgaggaagacaaatctgtcaccactgtaagacccatcattcacactactgtgccacctcctactackacacccactccactgcctccaaaggttggaaactattccgttagtaatggcaatgcyacctgkctgctggstaccatgggactgcagctgaatgtcactgaggagaaggtgcctttcatttttaacatcaaccccagtacaactaacttcaccggcagctgtcatcctcaaactgctcaacttaggctgaacaacagccaaattaagtatcttgactttatctttgctgtgaaaagtgaaagccatttctatctgaaggaagttaacgtcagcatgtatatggctaatggctcagttttcagtgttgcaaataacaaccttagcttctgggatgcccctcttggaagttcttatatgtgcaacaaagagcaggttgtttcagtgtctagaacgtttcagataaacacctttaacctaaaggtgcaaccttttaatgtgacgaaaggaaagtatgccacagctcaagactgcagtgcagatgaagacaacttccttgtgcccatagcggtgggagcagctctggcaggagtacttgctctagtgttgctggcttattttattggcctcaagcgccatcatactggatatgagcagttttaggacctgcaatccaattgattatattataaaatacattcaaagaacgaggttttcttgcctgtcagtgctccttaaaacacac

SEQ ID NO: 520 - DNA, 4730 bp, Cricetulus griseus
  misc_feature (2002)..(2019): n is a, c, g, or t
  misc_feature (2741)..(2792): n is a, c, g, or t
cccgaacgcggagaacactgctctcattggtccgctgtgaatccacccgcctcccttcgtcggcttccttccgctccctcccgcacgcgctgactgggcgcgcatgcgtacaggctgccgagtccctcccctcccccgccagccgtgagtgacagaggactcccgcgcgcgggctctcggcgccccgccctcccctttcccccgggccgttcggagagcgggggcgagcatgaaagttccagaacgctgcggacgtgcgtcatcgccaggtggggcggggcgagggcgggacctaggagagcgtctcgggcgttcattggtgctgttcgaaaagccccatcgtccattggctaaggagccatgataggcagcgggacggggcgggatccttctggaaggttctgagacagggtataagagacagtgaggcgggcggaaaccggtctcattgaacgcggaggcagcttgtgaggttttgtgtggtctcgtcgccagcacagccgggcctacaggcaaggtgaggcctggggcttgggtggtggcgggtggcctgctttactgcagcagagcggcggggcactgaggcggcgggcgggggcttaggccgcggcctccggggacccggagctgcagctgaggaggatgggcttaggtagggcggcgccgccatggccttgaggctcgtcgcggcgggggaggggtgccgcagccgcccgcgccgctccctttcacccgtctgcggattaaacgagagggtttctgaccgcggcccaagggcgagctgcttggaatatttcagcaggcgagtctggcgccgcaatgcgcggtcctggcggctggaaggggggaggggttgggttctccgagttgaggccacgtgctcaaccattgtcgcagaccgtcaggacagatggttcttcagccaggggcgggctctgccagggttggcacggctaccggactgcagcagtgccgccctgagccttttgcgtggcctcaggtgataggtctgggctgatgagtacatacggattgcgggtctggaagctggggaatagctgcttagccgttttcgtgtttggttttctttcagcaaccatgtctaagggacctgcagttggtattgatcttggcaccacctactcctgtgtgggtgtcttccagcatggaaaggtggagataattgccaatgaccagggtaaccgaaccacgccaagctatgttgcttttactgacacagaacgattaattggggatgccgcgaagaatcaggttgcaatgaaccccaccaacacagtttttggtaagtagccagcttttacgtgggatagaagctctctagattactgtagtttaagagaagtaacgtaactgataaaacccgggcagtatttttggtattaaatacgggccactcctttcctgacccggagcttagcctcgcctagcccgtatgtccgcttttccttccggccctcgtttttggtagggaccactccctttagtgtacaatttacttcacaactctcagcctcggatttaattggtggagtttaatgagatacacacttattttgcagatgccaaacgtctgatcggacgtaggtttgatgatgctgttgttcagtctgatatgaagcactggcccttcatggtggtgaacgatgcaggcaggcccaaggtccaagtagaatacaaaggagaggcaaaaagtttctacccagaggaggtgtcctctatggttctgaccaagatgaaggaaattgcagaagcctatctcgggaaggtgggttttaactgctgtcaatatggggtggctattcaagcattcttctgttcagcgcgcaatttgctaaggtaacaattgtgtgattgtattttctagactgttaccaatgctgtggtcacagtgccagcctacttcaatgattctcagcgacaggctacaaaagatgctggaactattgctggcctgaatgtcctgcgaattatcaatgaaccnnnnnnnnnnnnnnnnnnttatgggctagataagaaggtatgtgtttcaagcacatgttttgcttaagattaatttgcacaccagagatgtgagctaaaagtttkksytwsatawgaaggttggagctgaaaggaatgtgctcatttttgacttgggaggtggtacttttgatgtgtctatcctcactattgaggatggaatttttgaagtcaaatcaacagctggagacacccacttgggtggagaagactttgataacagratggtcaaccatttcattgctgagtttaagcgaaagcacaagaaggacatcagcgagaacaagagagctgtcaggcgtctgcgtactgcctgtgaacgggcaaagcgcaccctctcctccagcacccaggccagtattgagattgattctctctatgagggaattgatttctatacctccattacccgtgctcgattcgaagaattgaatgctgacctgttccgaggcactctggaccctgtagagaaggcccttcgagatgctaaactagacaagtcacagatccatgacattgtcttggtgggtggttccaccagaatccccaagattcagaagcttctgcaagacttcttcaatggaaaagaactgaataagagcattaaccccgatgaagctgttgcttatggtgcaggtaagaccactacatagttgtctttacagtcctagcaagtccctctttaaagagtgtcctaaatnnnnnnnnnnnnnnnnnnnnnnnnnnnnnnnnnnnnnnnnnnnnnnnnnnnngttggctagttccttccttggatgtctgagcgactgaactgcattgaagtgtggttggacttgggtggtgagttttctaacatttcttccacttttacagctgtccaggcggccattctatctggagacaagtctgagaatgttcaggatttgttgctcttggatgtcactcctctttcccttggcattgaaactgctggtggagtcatgactgtcctcatcaagcgcaataccaccatccctaccaagcagacgcagactttcactacctattctgacaatcagcctggtgtgctcattcaggtattttagaattttgtttgattttctagaaatcccagggaatgaagtctcgctgtgatgatggattcctaaaccattcgtagtttccaccagaaattctgtgttggctagttccttccttggatgtctgagcgagaattctttcccctaattgagcttaaattctacagaactgtttttctaagtctgatgacttatttctgtgttccttcaaggtctatgaaggcgaaagggccatgaccaaggataacaacctgcttggaaagtttgaacttacaggcatccctccagcaccccgtggtgttcctcagattgaagttacttttgacattgatgccaatggcatcctcaatgtctctgctgtagataagagcacaggcaaggagaacaagatcactatcaccaacgacaagggtaagtatggacataactctcgtctgatgtggcttctgcttacaagtattatgactttttagtttgattttagtttatgacttatgattttgtgacttaacaggccgcttgagcaaggaggatattgaacgcatggtccaggaagctgagaagtacaaagctgaagatgagaagcagagagataaggtttcctccaagaattcactggagtcctatgctttcaacatgaaagcaacagttgaagacgagaaacttcaaggcaagatcaatgatgaggacaaacagaagattctagacaagtgtaatgaaatcatcagttggctggataagaatcaggtaggtgtcctgttgccaataaggggaaggtagtagactagactgggctaaagtataggggtcactgtgatgaatggtccaaacattctcggtttccaccagaatgtaaagcagtgttggcaattaccttccttggatgtctgagtgactctaaagctaacggaagtaggttcctgttagttacataggcttaatttgcagccttacagaagttaactgtttgtggaccatttacgtaatgtttttttttcctactcagactgcagagaaggaagaatttgaacaccagcagaaagaactggagaaggtctgcaaccccatcattaccaagctgtaccagagtgctggtggcatgcctggaggaatgcccgggggcttccctggtggtggagctcctccatctggtggtgcttcttcagggcctaccattgaagaggtggattaagtcagtccaagtagaggtgtagcattgttccacagggaaacatttgaaggacccaaatttgcaaagtttcatggcagtttttaaatttaaactgttaacaataaattactgggcattctcaatacttgaacatggaacatgtacacaggaaataaaacattgcactttataagcactgtatcctaagtggaaaacgcaatgtctaatatggtggaaaatggaatgtctaaataaaactatttaaattggcaccatacagttgtcctgactaactttggaattaagggtggcttttgtcaaggaacaaattaacaaatgcaggaatgagagatactaccctaacacaattctagtaccctccagtgggtttttcagcttagccttaggctaagaaccaacatgagttcaaagctgaaggtgctgggtaaattctctgaaaa

SEQ ID NO: 521 - DNA, 613 bp, Cricetulus griseus
agtggatccccgtcaccaagctgggccgtctggttaaggacatgaagatcaagtccctggaggagatctacctgttctccctgcccattaaggaatccgagattattgatttcttcctgggcgcatccctaaaggatgaggttctaaagatcatgccagtgcagaagcagactcgggctggccagcggaccaggttcaaggcttttgtcgctattggggactacaacggtcatgttggtcttggtgttaagtgctccaaggaggtagccactgccatccgaggggccatcatcctggccaagctttccattgtccctgtgcgaagaggctactgggggaacaagattggcaagccccacactgttccatgtaaagtgacaggccgctgtggctctgtgttggtgcgtctcatccctgcccccagaggcactggcatcgtctctgctcctgtgcctaagaagctactgatgatggctggtattgatgactgctacacgtcagccakgggctgcactgccaccctgggcaactttgccaaggccacctttgatgccatctccaagacctacagctacctaacccccgacctctggaaagagactgtgttcaccaa

SEQ ID NO: 522 - DNA, 2805 bp, Cricetinae gen. sp.
  misc_feature (219)..(238): n is a, c, g, or t
cgtcgttagttgggagctggtggtccagagaaagattgacaccaggcagaagcctactctgtccgctgtcccagacaccacaattttcagtcctctgaagatttttctcggcatccaagagccagcatgccaggacacttgctacaagaagagatgacctcttcatataccaccactaccaccaccatcacagaacctccctctgaaagcctgcagaannnnnnnnnnnnnnnnnnnnaggaagacatccgccctgaaatgaaagaagacatatatgaccccagctaccaggatgaggaggggcccccacccaagctggagtacgtctggaggaacatcatcctcatggcactgctgcacttgggggccttgtatgggcttgtgctggttccctcaagcaaggtctacaccttgctctgggcgtttgtctactatgtgatcagtattgaaggcattggagctggrgyycaccgcctgtggagccaccgaacytacaargctcggctgcccctgcgkmtcttcctcatcatygccaacaccatggctttccagaatgacgtgtatgaatgggcccgagaccaccgygcccaccacaarttctcagaaacryacgctgaccctcacrattcccgccgtggctttttcttctctcacgtgggctggctgcttgtgcgcaaacacccrgctgtcaaagagaagggtggaaaactggacatgtctgacctaaaagccgagaagctggtcatgttccagaggmggtactacaagcccgsymtcctrytgatgtgtttcatcctgcccacgytkgtgccctggtattkctggggtgaagctttcgtgaacagcttgtgtgttagcaccttcttgcgatayrctktggtgctcaatgccacctggctggtgaacagygcygcccacctctatggrtatcgcccctacgacaagaacattagmtcycgggagaayrycctggtttcrmtgggakststrggcgagggcttccacaactaccaccaygccttcccctatgactactckgccagtgagtaccgctggcacatcaacttcaccacattcttcatcgactgcatggctgccctgggcctggcgtatgaccggaagaaagtgtctaaggccgctgtcttggccaggattaagagaactggagatgggagctgcaagagtggctgagtctggcgttgtctttgtttctattcccaaagccatctgaacagagatttaatgatgttgcttaaatcctgaaaaataccatctatgttctaaagtgtctcatttcaagactgtattcttgtaaaatattctaatgttaaataaaaggcaaatctctcttttatacaaaccgagaagagcaagcagaaaaaggatttggacaatatggaaaattcggaagtgataaagaccatgcaaaaaaaagctgcagatggagataagattactacagttattcagcatgtgttccagggccttattttgggaagtaaaaccaactgggcagaggattctggcctcagggaaattgtgctgcagctggagaaggatctcaccacaatctaataagaatcctgctctggcatgggagcctgtttgtgcccactctgcctttgaaatagcagagtttgtgggaatgcaagaagtggttcggaaccattctgatgcttcgattccagggcttgggttgatgataggacatgaaatctcttgtctgaaatacgatcactaaagtgactggcatactctgcgggagtctaaacactgtagccttggaaagaaggcatctggtccagctgcggtcgagtgtgcacatcttcacaacaacacaaccatttcctttcagtgtgctctcatgcatctgtgcattggtttgtcaaccaacacattggaaaagcatccaaagggtaagggtagtgattgtttaagtacagttgtgggttgtgactttttcttccgttctctgtttagcatgtattttacttttataagtttatgaataaaaagggatttcagattgaggagaccatagaccgagagacttcagggaacttggagcagttgctcctggctgtggtgaagtctattcggagcatacctgcctaccttgcagagaccctttactatgctatgaagggtgctgggaccgacgatcacaccctcatcagagtcgtggtgtcgaggagcgagattgatctgtttaacatcaggaaggagtttaggaagaacttcgctacctctctgtattctatgatcaagggtgacacatctggagactataagaaaaccctgctgctgctctgtggaggagaagatgactgagggattggctgtctggagtactctgcctgccgcctccagcagcttccttcagcaaatgcagccatgcttatatttctcatgcctgactggatgccttactcacactagtatgctaatgaccaaatgtgttgccttactgcactagtatgttaacaactaaatgtgtcatagatgacattagtggcacatccttctgatcttcctgttgacattagtgcttaccttcacttgtctctaagtctaatgtctgaattatcaatactgtctataaagaggtcagattgctttttataacattttttttaaagcttcatttatattaagttaataaccatattaccttgattggaaccttagccatgaaattgtgaactcctggaaatactgtcaatcaagcttactgctctatcagacctgtaaagttatgatagttgtatcaaaaatgatgaatgacaaataaacattcccttcccg

SEQ ID NO: 523 - DNA, 1655 bp, Cricetulus griseus
  misc_feature (594)..(599): n is a, c, g, or t
caggttctcttacatcgaccgcctaagagtcgcgctgtaakaascrwsaccysctyctcgcytyygycaacctycgsgcwkcyrmmhmgyagcwaccatgcgtgagtgcatctccatccacgttggccaggctggtgtccagatcggcaatgcctgctgggagctctactgcctggaacatggcatccagcctgayggccagatgccaagtgacaagaccatcgggggaggagatgactccttcaacaccttcttcaktgagacaggcgctggcaagcatgtgccccgggcygtgttcgtagacctggaacccacagtcatcgatgaagttcgcactggtacctaccgccagctcttccaccctgagcagctcatcacaggcaaggaagatgctgccaataactatgcccgtggccactacaccatcggcaaggagatcattgatcttgtcttggacagaattcgyaagctggctgaccagtgcacaggtcttcagggcttcttggttttccacagctttggtgggggaactggctctgggttcacctccctgctgatggagcggctctctgtcgattatggaaagaagtccannnnnnagttctccatctacccagccccccmggtttccactgctgtggttgagccctacaactccatcctyaccacccacaccaccctggagcactctgattgtgccttcatggkagacaacgaggccatctatgacatctgtcgtagaaacctcgacattgagcgccccacctacactaacctwaaymgsytsatwrgycarattgtgtcttccatcactgcttccctcagatttgatggagccctgaatgttgacctgacagaattccagaccaacctggtaccctaccctcgcatccatttccctctggccacatatgcccctgtcatctctgctgagaaagcctaccatgagcagctttctgtagcagagatcaccaatgcctgctttgagccagccaatcagatggtgaaatgtgaccctcgccatggtaaatacatggcttgctgcctgctgtaccgtggggatgtggttcccaaagatgtcaatgctgccattgccaccatcaagaccaagcgyascatccagtttgtggactggtgtcccactggcttcarggttggcattaattaccagcctcccactgtggtacctggtggagacctggctaaggtccagagagctgtgtgcatgctgagcaacaccacagccattgctgaggcctgggctcgcctagatcacaagtttgatctgatgtatgccaagcgtgcctttgtgcactggtacgtgggtgagggcatggaggagggggagttctctgaggcccgtgaggacatggctgccctagagaaggattatgaggaggtgggtgtggattctgttgaaggagaaggtgaggaagaaggagaggaatactaaattaattgtcacaaaggtgctgcttttacagggaagtttattctgttccaacaaagaaagctgtggtctgatcagttaatttgtatgtggcaatgtgtgctttcatacagttactgacttatggttgaaaatatgaatgacttgtcatagacccaagccgtccatttcactgatgggttttaaataaaatattccctgtctt

SEQ ID NO: 524 - DNA, 2232 bp, Cricetulus griseus
  misc_feature (239)..(251): n is a, c, g, or t
  misc_feature (327)..(344): n is a, c, g, or t
  misc_feature (481)..(522): n is a, c, g, or t
  misc_feature (525)..(540): n is a, c, g, or t
  misc_feature (619)..(634): n is a, c, g, or t
  misc_feature (642)..(664): n is a, c, g, or t
  misc_feature (681)..(701): n is a, c, g, or t
  misc_feature (1343)..(1352): n is a, c, g, or t
  misc_feature (1978)..(2003): n is a, c, g, or t
  misc_feature (2167)..(2187): n is a, c, g, or t
gaagaagatgacagcagtggagaagaggttgtcatccctcagaaaaaaggaaagaaggctacagcaactccagcaaagaaggtggttgtttcacaaacaaaaaaagttgcagttcccacaccagctaagaaagctgctgttactccaggtaaaaaggcagcagccacaccagccaagaaggcagttacaccagccaaagcagttgcaacacctggaaagaagggagccacacaagcaannnnnnnnnnnnnaacccctggtaaaaagggagctgtcactccagccaagggggctaagaatggtaagaatgctaagaaggaagacagnnnnnnnnnnnnnnnnnncgacgatgatgaagacgacagtgatgaggatgaagaggatgaggaagaggatgaatttgagccaccagtagtgaaaggaaaacaaggaaaggtagctgctgctgctcctgcctcagaggatgaagacgaggaagagnnnnnnnnnnnnnnnnnnnnnnnnnnnnnnnnnnnnnnnnnnctnnnnnnnnnnnnnnnntatggagatcacacctgccaaaggaaagaaagctcctgcaaaagttgttcctgtgaaagccaagaatgtggctgaggannnnnnnnnnnnnnnngaagaggnnnnnnnnnnnnnnnnnnnnnnnagaagargargaagaannnnnnnnnnnnnnnnnnnnngaagaggaagagcctgttaaaccagcacctggaaaacggaagaaggaaatgaccaaacagaaagaagttcctgaagcaaagaaacagaaagtggaaggttcagaatcaactacacctttcaatctgttcattggaaaccttaacccaaacaagtctgttgcttgaattaaaagttgccatcagtgaacyttttgctaaaaatgatcttgctgytgtggatgtcagawctggtacaaataggaaatttggttatgtggactttgagtcagctgaagacctagaaaaggccttggagctcaccggtttgaaagtgtttggcaatgaaattaaactagaaaaaccaaaaggaagagatagtaaaaaagttcgagctgcaaggacacttttagcaaaaaatctttctttcaacatcactgaggatgaattaaaagaagtgtttgaagatgccttggagatcagattggttagccaggatgggaagagtaaagggattgcttatattgaatttaagtctgaagctgatgcagagaaaaacttggaagaaaagcaaggagcagaaattgatgggcgttctgtttcactytactatactggggagaagggacaaaggcaagaaagaactggaaagaatagcacttggannnnnnnnnnaaaaactttggttttaagtaacctttcctacagtgcaacagaagaaactcttcaggaagtgttwgagaaagcaacttttatcaaagtgccccagaaccaacakggcaaatctaaagggtatgcgtytatagaayytgcyycatttgaagatgctaaasaagctttaaattcykgtwacaaaakgsaamttgasggcagawcaaycaggttggagttacaaggacccagggggtcacctaatgcgagaagtcagccatccaaaacactgtttgtcaagggtctgtctgaggataccactgaagagaccttaaaagaatcatttgagggctctgttcgtgcaagaatagtcactgatcgggaaactggttcctctaaagggtttggttttgtagacttcaacagtgaggaagatgccaaagctgccaaggaggccatggaagatggagagattgatgggaataaagttactttggactgggccaaacctaagggtgaaggtggctttggtggccgaggtggaggcagaggaggttttgggggccgaggtggtggaagaggaggaggccgaggtggatttggcggcagaggccggggcggctttggaggtagaggaggcttccgaggtnnnnnnnnnnnnnnnnnnnnnnnnnnagacttcaagccacaaggaaagaagacgaagtttgaataattccttcccaatctttcccacttcgttttaaagaaaggactctggggttttacactgttacctgttaaatgacggagccttttaaggacatttcaagagattttttttcctacaaatattttgnnnnnnnnnnnnnnnnnnnnncgttgggggttgtaaaagaatgtttatcatgttttttttagctaa

SEQ ID NO: 525 - DNA, 2337 bp, Cricetulus griseus
  misc_feature (104)..(155): n is a, c, g, or t
  misc_feature (169)..(192): n is a, c, g, or t
  misc_feature (199)..(235): n is a, c, g, or t
  misc_feature (242)..(280): n is a, c, g, or t
  misc_feature (282)..(295): n is a, c, g, or t
  misc_feature (323)..(395): n is a, c, g, or t
  misc_feature (440)..(463): n is a, c, g, or t
  misc_feature (1673)..(1700): n is a, c, g, or t
gacactggccaagacaacagtgaccggaggacctssctttgcggctccgagagatcggaacgccgccgcgctccgggactacagcctgttgctggacttcgagnnnnnnnnnnnnnnnnnnnnnnnnnnnnnnnnnnnnnnnnnnnnnnnnnnnnagttccctatgggnnnnnnnnnnnnnnnnnnnnnnnncgcggtnnnnnnnnnnnnnnnnnnnnnnnnnnnnnnnnnnnnnacggtgnnnnnnnnnnnnnnnnnnnnnnnnnnnnnnnnnnnnnnnannnnnnnnnnnnnnycgcgtggagatcatagccaacgatcannnnnnnnnnnnnnnnnnnnnnnnnnnnnnnnnnnnnnnnnnnnnnnnnnnnnnnnnnnnnnnnnnnnnnnnngaaccagctcacctccaatyccgaraacacggkcttcgacgccannnnnnnnnnnnnnnnnnnnnnnnatgacccttcagtgcagcaggacatcaagttcttgcstktsaaggtggttgaaaagaaaactaaaccatacattcaagttgatattggaggtgggcaaaccaaaacatttgccccagaagaaattkctgccatggttctcactaaaatgaaagaaactgctgaagcatatttgggaaagaaggttacccatgcagttgttactgtgccggcttacttcaatgatgcccagcgccaagcaaccaaagatgctggcaccattgctggactgaatgtcatgcggatcatcaatgagcccacagcagctgctattgcgtatggcctggataagagagagggcgasaagaacatcctcgtttttgacctgggcggwggaaccttcgatgtgtctcttctgaccattgacaatggtgtctttgaagtggtggccacgaatggagacactcatctcggtggggaagactttgatcagcgggttatggaacacttcatcaagctgtacaaaaagaaaactgggaaagacgttagaaaagacaacagagctgtgcagaaacttcgtcgtgaggtggaaaaggctaagcgagccctgtcttctcagcatcaagcaagaattgagatakagtccttctttgaaggagaagacttctctgagaccytgacwygggccaaatttgaagagttgaacatggacctgttccgatctaccatgaagcmmgtccagaaagtgttggaagactctgatctgaagaaatcagacattgatgaaattgttcttgtcggtgggtctactcggattcccaagattcagcagctggtgaaagagttcttcaatggcaaggagccatcccgtggcataaacccagatgaggctgtagcatacggtgctgctgtccaggctggtgtcctctctggkgatcaagatacaggtgatctggtactgcktgrtgtatgtcctcttacacttggtattgraacagtgggaggkgtcatgaccaaactgrttccmaggwacactgkggkacccaccmagaagkctcagatcytttccmcagcttctgataatcagscaactgtaacaatcaaggkctwtgaaggkgamcgaccccwaacaaaagacaaccatcttctgggtacatttgatctgactggaattcctcctgctcctcgtggggtaccccagattgaagtcacctttgagatagatgttaatgnnnnnnnnnnnnnnnnnnnnnnnnnnnnaggtacagggaacaaaaacaaaatcacaattaccaatgaccaaaatcgcctgacacctgaagaaattgaaaggatggttaatgatgcagagaagtttgctgaggaagacaaaaagctcaaagagcgcattgataccaggaacgagttggaaagctatgcttactctctcaagaaccagattggagataaagaaaagctgggcggtaaactttcctctgaagataaagaaaccatggagaaagctgtagaggaaaagattgaatggctggaaagccaccaggatgcagacattgaagactttaaagctaaaaagaaggaactagaggaaattgttcagcctattattagcaaactctatggaagtgcaggccctcccccaactggtgaagaggatacatcagaaaaagatgagttgtaggtgtactgatctgctagggctgtaatattgtaaatattggactcaggaactttcgttaggagaaaattgagagaacttaagtctcgaatgtaattggaatcttcacctcagagtggagttgaaaatgctatagcccaagtggctgtttactgcttttcattagcagttgctcacatgtcttggggttggggaaaggaggaattggcaatttttaaaatt

SEQ ID NO: 526 - DNA, 2211 bp, Cricetulus griseus
ggcctgcttcgcctcgtgccctcccgccgccgccccgcagaaatgcttcgactacccacagtccttcgccagatgagaccagtgtcccgggcgctggctcctcatctcactcgggcctatgccaaagatgtaaaatttggtgcagatgctcgagccttaatgcttcaaggtgtagaccttttagcggatgctgtagctgttacaatggggccaawgggaagaacagtgattattgaacagagttggggaagtcccaaagtaacaaaagatggggtcactgttgcaaaggcaattgatctaaaggataaatacaaaaatatcggagctaaacttgktcaagatgttgccaataacacaaatgaagakgctggggatggcrctaccactgctactgytctggcacgttctattgccaaggaaggctttgagaagatcagcaaaggggctaatccagtagaaatccggagaggtgtgatgttggctgttgatgctgtaattgctgaactgaaaaaacaatctaaacctgtgacaacccctgaagaaattgctcaggttgctacaatttctgcgaatggagacaaagacattggaaacatcatctctgatgcaatgaaaaaggttggaaggaaaggcgtcatcacagtgaaggatggaaaaaccctgaatgatgagttagaaattattgaaggcatgaagtttgacagaggatatatttccccgtattttattaacacatcaaaaggtcaaaaatgtgaattccaagatgcctatgttctgttgagtgaaaagaaaatttctagtgtccagtccattgtacctgctcttgaaattgctaatgctcatcgtaagcccttggtcattattgctgaagatgttgatggagaagctctaagcacactggttttgaacaggctaaaagttggtcttcaggtggtagcagtcaaagctccaggttttggggacaataggaagaatcagcttaaagatatggctattgctactggtggtgcggtgtttggagaagaggggctaaatctaaatcttgaagatgttcaagctcatgacttgggaaaagttggagaggtcattgtcaccaaagatgacgccatgcttttgaaaggaaagggtgagaaagctcagattgagaaacgaattcaagaaatcactgagcagctagaaatcacaactagtgaatatgaaaaggaaaaactaaacgaaagactcgctaaactttcagatggagtagcagtgttgaaggttggaggaacaagtgatgttgaagtgaatgagaagaaagacagagttacagatgctctcaatgctacaagagcagctgttgaagaaggcattgttttaggagggggctgtgctctgcttcgatgcatcccagccttggattccttaaagccttctaatgaagatcagaaaataggtatagaaattattaaaagagcactcaaaattcctgcaatgacaattgctaagaatgcaggtgttgaaggatctttgatagttgagaaaattctgcagagttcctcggaaattggttatgatgctatgctcggagattttgtgaacatggtggaaaagggaatcattgatccaacaaaggttgtaagaactgctttactggatgctgctggggtggcctccttgctaactacagcagaagctgtagtgaccgaaattcctaaagaagagaaggaccctggaatgggcgcaatgggtggaatgggagggggtatgggaggtggcatgttctaattcctagaatagtgctttgcccttatcaatgaactgtgacaggaagctcaatgcaggttcctcggtgataacttaagagaagtcacctgaagaaaatgaagagaaggctggctgatcactataaccatcagttactggttcccattgacaatacataatggtttactgctgtcattgtccatgcctacagataatttattttgtatttttgaataaagacatttgtacattcctgatactgggtgcaagagccatataccagtgtcctgctttcaacttaaatcattgaggcagttctactattctgttacagtcaggattctagtgcttgcgtgaccagatgagttcagaagcagcctttctgtggagagtgagaataattgtgtacaaagtagagaagtatccaattatgtgacaacttttgtgtaataaaattttgtttaaaag

SEQ ID NO: 527 - DNA, 1249 bp, Cricetinae gen. sp.
tccgtccatcaccatggcagcatgcactgggggcccggggtcctggagtgaaaatatactggattattttcttagaaacagtcagatcacgacagaagatggtgctgagatcatctggtatcatgcagccaaccacaagtcccagatgcaggaggcattgaggagtgctgcccacatgatagaggctgatgtccttcttcctagtgatggatcagagcatggccagccaatcatggcccatcctcctgagatgaacagtgataacactctgcargartggctggctgargkcatgaarartaacaagggcatcaagttggatttcaagartctggcagctgccaragcatccatgctgktcctggacaatgtgaarcarcacctgcagtgtcctgtgtggatgaatgcggatrttcttcctggaccaaatggaagcagcaaagttgtggatgccaaagcctttctagacaccgtgacatccttcttcccagatgtgaccttttccctgggttggacaacaggatggcatccggagaaagtcaatgaaggctatagttggacaatggtgaaagagatggactacatatgcagtggactaacccagcccgtcacgtttcctgtcagggcagctttggtcaggcagtcctgttctcagttactctggctattgaagaagtctaacaggtacagcctgactgtttggactggaaaggatgacagttatcccactgaagatttactttatattcgagactactttaataaaacccaagttttctatgatattttggaaccacaaagccatgaatttaaacaagccattgggatctgagtcactctaagaatacaagaagacattttctaatcattttctctcttggcttcaccatcattctctgctttgtctgaattcattgctgtattaattgtgattattggtttgtactaaattatccaatcaaaatgcttgttgtatacctactcttcctttatcatgtcttcatggctgcacacatctgaaagattttatgaactgcaataaaattgtataaaattatagtaaaaatgctcaagctaggtgtggtggcacatgcttataaccctagacttgggggactgaggcaggaagatcaagagttcaaggctagcctggactacattgtgataccctatctcaaatttgtaacttctcaataataatcagacattaattttataaaaactttttgaattaataaagtttttgatg

SEQ ID NO: 528 - DNA, 2244 bp, Cricetulus griseus
  misc_feature (578)..(595): n is a, c, g, or t
gttttgtgtggtctcgtcgccagcacagccgggcctacaggcaagcaaccatgtctaagggacctgcagttggtattgatcttggcaccacctactcctgtgtgggtgtcttccascatggaaaggtggagataattgccaatgaccagggtaaccgaaccacgccaagctatgtkgcttttactgacacakaacgattaattggggatgccgcgaagaatcargttgcaatgaaccccaccaacacagtttttgatgccaaacgtctgatcggacgtargtttgatgatgctgttgttcagtctgatatgaagcactggcccttcatggtggtgaacgatgcakgcaggcccaaggtccaagtagaatacaaaggagaggcaaaaagtttctacccagaggaggtgtcctctatggttctgaccaakatgaaggaaattgcagaagcctatctcgggaagactgttaccaatgctgtggtcacagtgccagcctacttcaatgattctcagcgacaggctacaaaagatgctggaactattgctggcctgaatgtcctgcgaattatcaatgaaccnnnnnnnnnnnnnnnnnnttatgggctagataagaaggttggagctgaaaggaatgtgctcatttttgacttgggaggtggtacttttgatgtgtctatcctcactattgaggatggaatttttgaagtcaaatcaacagccggagacacccacttgggtggagaagactttgataacagaatggtcaaccatttcattgctgagtttaagcgaaacgacaagaaggacatcagcgagaacaagagagctgtcaggcgtctgcgtactgcctgtgaacgggcaaagcgcaccctctcctccagcacccaggccagtattgagattgattctctctatgagggaattgatttctatacctccattacccgtgctcgattcgaagaattgaatgctgacctgttccgaggcactctggaccctgtagagaaggcccttcgagatgctaaactagacaagtcacagatccatgacattgtcttggtgggtggttccaccagaatccccaagattcagaagcttctgcaagacttcttcaatggaaaagaactgaataagagcattaaccccgatgaagctgttgcttatggtgcagctgtccaggcggccattctatctggagacaagtctgagaatgttcaggatttgttgctcttggatgtcactcctctttcccttggcattgaaactgctggtggagtcatgactgtsctcatcaagcgcaataccaccatccctaccaagcagacgcagactttcactacctattctgacaatcagcctggtgtgctcattcaggtctatgaaggcgaaagggccatgaccaaggataacaacctgcttggaaagtttgaacttacaggcatccctccagcaccccgtggtgttcctcagattgaagttacttttgacattgatgccaatggcatcctcaatgtctctgctgtagataagagcacaggcaaggagaacaagatcactatcaccaacgacaagggccgcttgagcaaggaggatattgaacgcatggtccaggaagctgagaagtacawagctgaagatgagaagcagagagataaggtttcctccaagaattcactggagtcctatgctttcaacatgaaagcaacagttgaagacgagaaacttcaaggcaagatcaatgatgaggacaaacagaagattctagacaagtgtaatgaaatcatcagttggctggataagaatcagactgcagagaaggaagaatttgaacaccagcagaaagaactggagaaagtctgcaaccccatcattaccaagctgtaccagagtgctggtggcatgcctggaggaatgcccgggggcttccctggtggtggagctcctccatctggtggtgcttcttcagggcctaccattgaagaggtggattaagtcagtccaagtagaggtgtagcattgttccacagggaaacatttgaaggacccaaatttgcaaagtttcatggcagtttttaaatttaaactgttaacaataaattactgggcattctcaatacttgaacatggaacatgtacacaggaaataaaacattgctctttataagcactgtatcctaagtggaaaactcaatgtctaatatggtggaaaatggaatgtctaaataaaactatttaaattggcacc

SEQ ID NO: 529 - DNA, 2084 bp, Cricetulus griseus
aaaaagaaagctgggcctcgcttttcccatctttgagggcattgagggagagtgtatgcatgcacccatggagtataatcagataaaagaattggcagaatcagtcaggaaatatggagtcacagccaactttactcttacacaattggatagacttgccctaaatgccttgacgccatctgactggcagatggtcacaaaagctgcgcttgtcagcatgggccaatacatggagtggaaagcactctggcatgaggccgcccaagagcaggccagagctaacgcgacggccttaactcctgagcaacaactatggacattcgacctgttaacgggccagggtcgttttgcagctgatcaaacaaattatcattggggcgcttatccacaaatcgacaacgcggccattagggcctgaaaggtgctctccaagaaaggaggggttgacaatcagcttactaaaatcattcaaggaacccaggagactttctccgattttgtagcaaggatgacagaggcagcgggatggatctttggcgatcctgagcaggccgcacctcttgttgagcaacttatctttgaacaggcctcccaagaatgtcgcgcagctatagccccgagaaaaaacaaaggattacaagattggcttagggtctgtagagaacttgggggaccccttactaatgcagggttagctactgccatcctacagtctcaaaagcgcccccttaaggggccagataaaagaacttgctttakatgtggaacaattggacatattatggcagatggcccaactaggctgtgagcagaagctccccggcctatatgtcacctccatccaatatgaaaattttaccaaagcagctaatttgtctaaaagcctttctcagttcatgttacagaattggacctccaaatttgagcaaacgcttcgggagttgagagccgctattatccagattaactccacgcgccttgacctgtccttgacggagggattgtcatcatggatcgcttcrrctgtctcctattttaaggaatgggtgggggtgggattgtttggtgcakccgtttgctgcggattggtgttgcttctatggctggtctgtaggctcagggctcaaactaagagagacaaggtggttatcgcccaagcgcttgtagctttggaacaaggggcttccactgacatttggttaacaatacttaagcaataggccgctggccagacagctcttgcacacccggagcctargctcattgcacagggtagagtgtctggcttgagcagcccatgagggatgtggagcaaggcatcgcacagaagagttgcccagtatgcaggcttctctgggaggcatgttgtcctgcataagggttgcctgccctagtctccctttcccagaaaaacggcagaggacaggtcgagagcgcttcgggtcaagctaacagcctaatggcgactctcgtacacagtcttaatgtttgattgggaaggtacaacctctgcctctatccctcaacatatgggtgacctatttgcttgtaaaaatatgaagccttatcattaattaataaaaaagggggagatgtagggagccgtccctgcattctctattacaagatggcgcctgcatccggcaggcaccgaatggtawacaagktaatgcgcargtgctgggtaactttccatcccttggtctctgcctctyccgtggcgtcatatggtccgatgagctgcagccagtcagggggtgacacgtccgaggcggtggttgccagcctatataagggatgggtttttgggagttcggggtctctgctctgtaagcttatgctctccctctcaagatgcattaaagctttactacagaaggatcctgaatgtcctgcgtcattcttgctggcgagacggtagcgcgggacagatggtgacagccggtgcagaaagtgtcaacctcagcttccttctccaggaagacttcagcctgggactgctcctctacagagccccctaccaagattatctaacctgcctgccttcttgttgagctgtgtgtaataaactcattgagtttccc

SEQ ID NO: 530 - DNA, 2182 bp, Cricetulus griseus
  misc_feature (743)..(760): n is a, c, g, or t
gcaataactccatataagggtaaaggccttgaagtctggatgaaagtctgtagggagttagggggtccgctgactaatgctggactagcagctgctgtgttgcaattaactaagaaaggtggaggttcaggagcttgctttaaatgcggcaagcaagggcatttgaaaaagcaatgccccgagggaggaaacactaaagtcaataaactttgctccgcgccctaagcaacctggcttatgtcctagatgtagaaaaggaaatcattgggctaaggattgtagatcagtaaaagacatcagtggacagcctcttgttcaggggtatggaggagcccgttcaaaaaacggacgacggggcccacgaccccagggcccacaaatatatggggccatggaggatcagaaccaggagcagagtcccgaaacctggccctctcttcgtcatccgagggaccgaggagagccactacaggctccgcggggctggacttacgctccaccaccagactcgtattaactcccagaatgggggtccagcttgttgacaccgattttaagggaccccttgagcctggcacagtaggtttgcttataggaagatcatctgcagcattgaaaggtttacgagtacatcctggagttatagatcctgattacatgggtgtagtaaagatcatggtagaatctcctagagggattacggccatttctcctggagacaggatagcacagttactgctttnnnnnnnnnnnnnnnnnnagtttccagcacaagccagagagagaggagagggaaactttggctccactggatcaaacttaactttcctagctttagaccttgatcaacgtccaacccttgagttaatagtgaatggtaagaaaatcttaggcttactagattctggagctgataagagcatcatagccactaaagattggccctctggctggcctatacaggtttcttctcaaagtttacaaggtttaggctatgctaaggctcctgatatgagtgctagacaattgccttggaaagatcaggaagggcattcagggaccatgcaaccttatgtgttagacttaccaatttcattatggggaagagatttgttaaaggatatgggttttaaactcacaaatgaatactcagaaacatctcaaggtatcatgaaacgaatgggatacagtcccaggccaggcctcgggaaacatctgcagggtcgtaccagtcctattaattccacaattgagaccaaagaatctaggtctgggtttttcctagggccactgaggaggtattcctattacctggaaaacagaggagccggtatgggttcctcagtggccactttcctctgagaaactggaagctgctaagactctagtgcgggagcagctggatctggggcatataaaatcctctgtatctccatggaatactcctatttttgtcattaagaaaaaatctggtaaatggagactgcttcacgatcttagagctattaatcaacagatgcaaattatgggccctgtacaacgtggtcttccacttttaacttctttacctgcatcatggcctatcatctctatagatattaaagattgcttcttttccatacctttgtgtgccaaggattcagggcgttttgcgtttacgctgccctcttgtaatcatgaacaacctgatttaaggtatgaatggatagtgttgccacaggggatggccaatagtcctactatgtgtcagttgtttgtagcagaagcaattgctcctttgagagtggactttccaaagattagatgtgttcattatatggatgatattttattggctgccaaagatgataaaacgcttaataaggcatatacaaaattggtaaaattgcttgagatgcataatttagtcatagcctcagaaaaggtacaaaaggacactgttgttaactatctaggggctaagattctccctcatacaattattccacaaaagatagagattagaaaagataatttaaaaactcttaatgattttcaaaagttgttgggagatataaattggataagatgttatttaaaattaccaaattatgagttgaagccattgtataatattctcaatggtgattcagcattagattcacctaggcagttaactgctgaagccagagaagctttaaag

SEQ ID NO: 531 - DNA, 2154 bp, Cricetinae gen. sp.
gaggggcgtgtccacctaggaggaggcgagatggcggcgtctgtgtgtcgtccgtatgttcgctcgctgcctggagtcatgccctggcggagcagctcctgccactatgaatatactgccatgcaccattttctggggtccttccagaagctgccttttgaaccctttaacacaggtgccagaaaaatccatactgctcctgtccgatccttgttcctgctgcgccctgtgcccatcctgttggcaacaggtggtgggtatgcagggtaccggcagtatgagaagtacagggatcagaagcttgagaagctgggattggagattccgcccaaacttgccagtcactgggaggtggccctgtacaagtcggtgccaacgcgtttgctgtcacgtgcctggggtcgcctgaaccaggtggaacttccttactggctgcggaggccagtctacagcctgtatatctggacctttggggtaaacatgacagaggctgctgtggaggatctgcaccactaccgaaacctcagcgagttcttccgacgcaagctgaagcctcaggcacggcctgtctgtggcttgcacagtgtgatcagcccatcagatggcaagatcctcacctttgggcaggtgaagaattgtgaggtggagcaagtaaaaggcgtaacctactccctggagtcattcctgggtcctcgaacctatacagaggatctgtccttccctccagcctcctcccgtgactccttcaggaaccagctggtcactcgggaagggaatgagctctaccactgtgtcatctacctggcccccggagactatcactgcttccactcccctactgactggactgtctcacatcggcgccacttcccaggttccttgatgtcagtgaaccctggcatggcccgatggatcaaagagctcttctgtcacaatgagcgtgtggtgctgagtggggactggaaacacgggttcttctcattgacggcagtgggcgccactaacgtgggctccatccgcatctactttgatcaagacctgcacacaaacagtcccagatacagcaagggttcctacaatgacttgagctttgtaacacatgccaacaaggagggcattcccatgcgcaagggcgagcacctgggtgaattcaacttgggctctactattgtgctcatctttgaggcccctaaggacttcaacttcaggctgaaggcagggcaaaagatccgctttggggaagcgctgggctctctctagtcgtcttggttgtggctgccaagggatctttccacgcagaagcatgagagtcttcagagacactcctgactgtcctggtgagaggactgtgggactggccaagtaggacctgaatgatttgttcccgcctgcccagaggtgcagagagaggttttggatttgtcaggacctagtgggtatgatttgaccctacatctcctggctgagcattgtgagaacagttatgcactaccacaccctctagttgctctccccagctgtctcagggcctttttctgtcagcccttctgttctttctgccttagcatctctgtctcccctcactgtgcacaggacgaggtgcttccttggcacagacctcttagaggaggccccatggccttcacaactgctttctgttcccagttcaaccctctgcttgctggaaaagtaaaatcatttatgttgttgaatgtgttgacctagattctgccagtgtcttctgaggtctgaccttccaaggctggctgagccctttttgctagggcaagaccaatcactgacttgcctggtagtgtccggagtggaggcccagccctgcaggaagtgtaggagacatgctgctattggtctaggggctgtgttggaggcagagggtgtggtggtcagtacttagaaaacctgttccaagtgactgcgggtattcaggccattaggatcccagtaatagggacaaggccagatttcatgttgatcttggggatgccatggatttctcctgcaggagaaattattgaactttgatttcaactgtatcagtagtacagtattttgtatgaaaagtaggagtcttctgaacagtaattcatttcattgcaagacattttgaaataaaaaagacaaaacaccattgta

SEQ ID NO: 532 - DNA, 4278 bp, Cricetulus sp.
  misc_feature (940)..(975): n is a, c, g, or t
  misc_feature (1844)..(1862): n is a, c, g, or t
  misc_feature (2722)..(2763): n is a, c, g, or t
  misc_feature (3030)..(3067): n is a, c, g, or t
  misc_feature (3329)..(3359): n is a, c, g, or t
  misc_feature (4183)..(4233): n is a, c, g, or t
gaattcccccggaccggcgcgagcgcagcgcgagcgggagctgcggcggactgcggggcggccccggtcccggccccctccgtccccggcctgccctgccctccggcacccctgctcgccgcctcccgggccatggggaacactgcgatcgccaagaaaggcagcgaggtggagagcgtgaaagaatttctagccaaagccaaagaagactttctgaggaaatgggagaaccctcccccgagtaatgctgggcttgaagattttgaaaggaaaaaaacccttggaacgggttctttcgggagagtcatgctggtgaagcataaagccactgagcagtactatgccatgaagatcttagacaagcagaaggtggttaagctgaagcaaatagaacatactttgaatgagaaaagaatactacaggcggtggagtttccgtttcttgtccgactggagtattcttttaaggataattctaatttatacatggttatggaatatgttcctgggggtgaaatgttttctcatctgagaagaattggaaggttcagtgagccacatgctcgattctacgcggctcagattgtgctcacgtttgagtacctccactccctggacctcatctacagagatctcaagcctgagaacctcttaattgaccaccagggttacatccaggtcacagacttcgggtttgccaagagagtgaagggcaggacctggacactgtgtggcaccccagagtacctggcccctgagatcatcctcagcaagggctacaataaggcagtggactggtgggcactgggagtgctcatctatgagatggccgctggctaccccccattctttgcagaccagcctattcagatttatgagaagatcgtttctggaaaggtccggttcccctcccacttcagctctgacctcaaggacctcnnnnnnnnnnnnnnnnnnnnnnnnnnnnnnnnnnnnttcggaaacctgaagaatggcgtgagtgacataaagacccacaagtggtttgccacgactgactggattgctatttaccagagaaaggttgaggctccattcataccaaagttcagaggctctggggataccagcaacttcgatgactatgaagaagaagaaatccgtgtctctataacagaaaaatgtggaaaagaattttgtgaattttagggagggaaaagatggcctcgagctcacactagtctttgcacgctgtggaggtggaaggtggagccgagccctgctcattgaagcagttaccaagttccttcattccagcaactgagtgaggtccgtatcgcatcatcagtgtgcactctgcaaccacctgtgtaccagggcaccgtccgcacgcattgtccgtgccatgacacagtgtgcaccactttcctactgttgagttgtttttctccaccctcctacattcttttcattatcttctctgaccagtactccactttattttctccgtgtttcaggtggcagtgttatggctgtgtgatatttaaaaggaaagctacgtgttgcttcttgtagttttgagcgatatttttgctgaccagtggcttgaagataaactctctaatgattatttttattttgagtagctcggactcagttttgccaaaactcttataatttttgaagatggaatgtcttatcaccaagggaatatgcataagtgaagataataacttttcaggagtcactgatgtggcaataaattcagagtggctagcctagcagtatggactcctggaccagaggcttcatttccctttgccttttaatattcttctctctgtgagaaattaagtgaccagacnnnnnnnnnnnnnnnnnnnagaagtgaggggcgtggctccttgcccggccgtctccctggtaccaacatctctgtgggttagaagggcattccgaggtttctaagccttcactcttccatgagggttttagccagtatttaggagacatgactctaaagctatgcaacgtgaaatgtctcagacagtcctcatcggcagtgtcttaagggaaacatgcgaactaaaggaacacagatttggatagatgctaagtcgagggaagccttgatccctgcttacagcgtagagctactgtcctttcagggaagtggtctgtttgctttggttcataacacgtaaggacaagaagttgctgttgcttactgttgtgacgtattaagatgagggcaccgtggcaacttcagattttatcccctgctttggcagagggggggggaggcaaagcttaagaaactgccacatttgtagtttaattttgaggtgtgatattatctttagatacatcggaatttctaacctctttttttctttgtagacagagtatatgatcatgcagatacagttttaatatttgtgtttccttaatttttttatactttttgccaattgacttcacaatgttgccatcatgaggaaatttcaagcactcttgcacatttagttcagtgttctttgtgaataaatggcttaacttttttaactattttttccattgcttttattttcctgtctcattttctctctgtttcagtgacctaccttaaatgatcaactcacccaaatggtttaaaatgttccattttgtgagcaatctacaagcatataaggttgttttaaatcaaacaagccctaatgtgtatatatatatgtgtgtgtgnnnnnnnnnnnnnnnnnnnnnnnnnnnnnnnnnnnnnnnnnnaaaccttgatctgcttccttactggtgcaggtaggtcattgacgccacccctgttcatatgcacccacccctcactaaacccttgaagacactgagaagtcctacaagagaccttctctccacctatctgcatgtcttttggttgtcaagtgtttctgcatggtagtgtccacaaagacaaatgatgatttcagttggtccacctgtatttaaaatgtgcaagaaaaattgaaatactctgctgtagcaagttttatgtaacaaagnnnnnnnnnnnnnnnnnnnnnnnnnnnnnnnnnnnnnntgtacaaaatactttagttttttgtatttcatttaaacccaagaacatgctaatcattgtgttttatgtatgctacaaattctctggtagaattgttgtatattattgtaaaattatttcaataaatcatggggatgacaatttgattattatactttagttttcaaaattgaacagatttctatgaatcctaaaaatatttttttctatgaaatcattagtacccagctagagtccgcccaggtatggcccctagacatannnnnnnnnnnnnnnnnnnnnnnnnnnnnnnatttcactgtctgtttgaagtacatgagcgaactgtcagatgtgtcaaaggggtctatttctgactaatcaagtgcactaaatcagaatattcttagcatactgagagttcccatttttagccacagggtagccaaaaggattttctttaaaacttaaaataataagtcagtggcaaaaaccagtgtttaactcaaattatattacacaaaacagaagaaattatgtttttgcccagaaaataaagaaacagcgtggtgcaggaaggagcctggatgacagtgaaacttactggagtgttgtcagttgcagacagcagaagagctggacaggcactttctgggtcctttccaattccccatgttaggtcaaggtcccctctttatctgatacccttaagggacaacatactctgaagtaagtttctgtacagtgatacatttctgtgcatccttcctcttacctcttacactatcctgaaaatcctttgactatcataagacccttgtctgtcccgttccatactcccccactgatgctaatatacacttgatatcaaactgtcagcctaccaaaaagatattgtggcttatgggtattgctgtcttgttcttggtatgttcctatactgattgcccctcagtctgaaaaaaaatgctcattgtaagcctaaaactagatgattttgctttcccactcactgttttttctttccttctgcttgttgtaagaatccaatgaaataatgtatgtaaaagcaccttgtaaactgtaagctttcggtgtaagatgtaaggtgtgttgttttttcattaattctttgtnnnnnnnnnnnnnnnnnnnnnnnnnnnnnnnnnnnnnnnnnnnnnnnnnnngttttttaattcatcaataaccgcaaaattaaagtatctttaaag

SEQ ID NO: 533 - DNA, 843 bp, Cricetulus griseus
gcgcggtttcctgcttcaacagtgcttgaacggaacccggcgctcgacccctccgaccccagccggccgctccgggacagaaccctttgcaacctcgtcgctccgccgctccagsstcgccaccgcgcccgccgccgccatgaccaccaccgccctgaccaccgcgtctccctcgcaggtgcgccagaactaccaccaggactcggaggctgccatcaaccgccagatcaacctggaactgtacgcctcctacgtctatctgtctatgtcttgctactttgaccgggatgatgtggctctgaagaactttgccaaatactttctccaccaatctcatgaggagagggaacacgctgagaaactgatgaagctgcagaaccarcgaggtggccgaatcttcctgcaggatatcaagaaaccagaccgtgatgactgggagagtgggctgaacgcaatggagtgtgcactgcacttggaaaagagtgtgaatcagtcactactggaactgcacaaactggctactgacaaaaatgacccccatttgtgtgacttcattgagacccattacctgaatgagcaggtgaaatccatcaaagagctgggtgaccacgtgaccaacttgcgcaagatgggagcccctgaagctggcatggcagaatatctctttgacaagcacaccctgggacatagtgagagctaagctgacttcccgaagccaccagtgatgtcatcagtcactgaggaagtgtatgcatgttggctgccgttaccttttctataagtcaccaaaacatctgcttaagttcttttaatttgtaccatttcttcaaataaaggattttg

SEQ ID NO: 534 - DNA, 1842 bp, Cricetulus sp.
  misc_feature (101)..(119): n is a, c, g, or t
  misc_feature (830)..(854): n is a, c, g, or t
ctgtatagtgcctgcaaactgtgtgaaaaccctttaaccattttaatccgatgtttatcaatctaatctcttattctaataaaaatactatggagttaaannnnnnnnnnnnnnnnnnntgcccaagaagaagccgacgcccatccagctgaacccgacccccgatggctcggcggttaacgggaccagctcggccgagaccaacctggaggccttgcagaagaagctggaggagctggagcttgaggagcagcagcgaaaccgtctggaggcctttctgacccagaagcagaaggtgggagaactgaaggatgatgactttgagaagatcagtgagctgggggccggcaacggtggagtggtattcaaggtctcccataagccgtctggcctagttatggccaggaagctaattcatctggagatcaaacccgcaatccggaaccagatcatccgggagctgcaggtgctgcatgagtgcaactccccatacatcgtgggcttctatggggttttctacagtgacggcgagatcagcatctgcatggaacacatggatggtgggtccttggatcaagttctgaagaaagctggaagaattcctgagcaaattttaggaaaagttagcattgctgtgataaaaggcctgacatatcttcgggagaagcacaagattatgcacagagatgtcaagccttccaatattctagtaaactcccgtggagaaatcaaactctgtgattttggggtcagcgggcaactaattgactccatggccaactcctttgtaggcacaagatcatacatgtcgcccgagagactccaggggnnnnnnnnnnnnnnnnnnnnnnnnntctggagcatggggctctctctggtggagatggcagttgggagataccccatccctcctcctgatgccaaggaactggagctgctgtttggatgccaggtggagggagatgcagccgaaacgccacccaggccgaggacccctgggaggccccttagctcatatggaatggacagccgacctcccatggcaatttttgagttgttggattatatagtcaatgagcctcctscaaaattgcccagtggagtattcagtctggagtttcaagattttgtgaataaatgcttaataaagaaccctgcagagagagcagatctaaagcagcttctggttcacgctttcatcaagagatctgatgccgaggaagtagacttcgcaggttggctctgctccaccattgggcttaaccagcccagcacaccaacccatgccgctagcatctgagcctttgggaagcagcaaagaggaaatcctctkcccagtggcatgccatgttgctttcamgcctctcccatgcttgtctctgttcagacgtgcatctcatctgtgacaaaggatgaagaacacagcatgtgccaaattgtacttgtgtgtgtcatttttaatatcactgtctttatcactatggttactcccctaagtgattggctttgtgcttggggctatatgtatgttgatcaaacacataccaggctgaactatagtgaaaccctggtgaccagggtggtcattcttattgatgtttgcactgctgttcatgttccgtgactcactggctggctgcctctattgtcaggattctcggacccttggtacttcactcttgctggtgacctctcagtctgaagagagggagcttggtgagacccttcacaggcagtgcatgggaagcatgctttgctgctactgaaatgagcatcagattgtgtacatcatgttatttttatgttttgcttttgatatagaactcagcaattcccatcaaa

SEQ ID NO: 535 - DNA, 1437 bp, Cricetinae gen. sp.
gtctactgatggtgctgaaggcacctcacagattccagcttcggaacaagagactctggttagaccaaaaccattgtttctgaagttgttaaagtctgtcggggcgcagaaagatacctatactatgaaagagattatattatcttggcagtatataatgactaaacgattatatgatgagaagcagcaacacattgtgtattgttcaaacgatcttctaggagatttgtttggagtgccgagcttctctgtgaaagaccacaggaaaatacatataatgatctacagaaacttggtggtcgtaagccagcaagagactcttcagtccggcacatcagtgagtgagagcagatgtcagcctgaaggaggcagtgaacagaaggatcctgtgcaggagccacaagaagagaagtcgtcttcagattcagtttctagaccatctacctcatctagaaggagaacaattagtgagacagaagaaaatgcagatgagctacctggtgatcgacagaggaagcgccacaggtccctttcctttgatgaaagcctggctttgtgtgtgttaagagagatatgctgtgagagaagcagcagcagcgagtccacagacaccccctcaaatcaggatcttgatgatggtgtaagtgaacactcgggcgattggctggatcaggattcagtttctgatcaattcagtgtagaatttgaagttgagtctcttgactcagaagattacagcctgagtgaaggagggcaggagctctcagatgaggatgacgaggtctatcgagtcacagtgtatcagtcaggagaaagtgatgtagattcctttgaaggagatccggaaatctccttagctgactattggaaatgtacctcctgcaatgaaatgaatcctccccttccacctcwctgcaacagatgttggacyctkcgtgagaaytggcttccrgaagataargrgaargataraggggacrysyctgaagargccaarctggaggcagaaggcttagatgtgtcctgatggggaaaaaagctacakcgartgattstaaggagtcctgcactgaggarartgatgataargaaatatatacctcccagtcrcaagagagtgaggactattcccagccstcaacktccagcagcattgtttatagcagccargaagaygtcaaagagtgggagaaggaagagacascagacaaagargagartgtggaatctggcttctctcttaatgccattgaaccatgtgtgatttgccaagggcggcctaaaaatggttgcattgttcatggcaaaactggacatctcatgtcatgtttcccatgtgcaaagaagctaaaaaaaaggaataagccctgcccagtgtgcagacaaccaatwcaaatgattgtgctaacttattttagctagctgacctgcccataa

SEQ ID NO: 536 - DNA, 4987 bp, Cricetulus griseus
  misc_feature (348)..(373): n is a, c, g, or t
  misc_feature (376)..(388): n is a, c, g, or t
  misc_feature (2549)..(2569): n is a, c, g, or t
ggtggagcccgggcgcagctcaaacatggcggcggctggcacgggccggtgaggcggtaccaggtgggggccgtcgggtgtcatgggcggtggcggcggcaccgcctccgcgtctccctgagccggacctcacgggggactcagcgccaagctgggcgatggacgagagcagcgagctgggcggtctggagaccatggacaccctcacggagctgggcgacgagctgactctgggggacatcgatgaaatgctacagttcgtcagcaatcaagtgggagagttccctgatttgttttcagagcagctatgcagctccttccctggtggtggtagcagtggcagtagtnnnnnnnnnnnnnnnnnnnnnnnnnntgnnnnnnnnnnnnnaggcaatggtggtgcagccacagatcctggagtgcagcggtcgttcagccaggtcccattacctaccttctccccctcaactgcctcccctcaggctctagccttgcaggtcaaagtctctcctaccccacccagggcaacccctgttctccagcctagaccccagccccagccgcagccccagccttcagctcagcttcagcaacagacggtaatgatcaccccgacattcagcactgctccacagacaaggatcatccagcagcctttgatataccagaacgcagcaaccagcttccaagtcctgcaggctcaagtccaaagcctggtgacatcctcgcaggtacagccagtcacgatccagcagcaggtgcaaactgtacaggctcagcgggtgttgacacaaacagccaatggcacgctgcagacccttgccccagcaacagtgcagacagttgctgcaccccaggtgcagcaggtcccggtcctggttcagcctcagatcattaagacagattcccttgttttgaccacactgaaaacagatggcagccctgttatggctgcagtccagaacccagccctcactgccctcaccacccccctccagacgggcgcccttcaagtaccaactctggtgggcagcaatgggaccattctgaccacaatgcctgtgatgatgggacaagagaaagttcctattaagcaagtacctggcggtgtaaagcagctagagccccccaaagaaggagagaggaggacaacacacaacatcattgaaaagcgatatcgatcctctatcaatgacaaaatcatagagttgaaggacttggtcatgggaacagatgccaagatgcacaaatctggcgttctgaggaaggccattgattacatcaaatatttgcagcaggtcaatcacaagcttcgtcaggagaacatggtactgaagctggcaaatcagaaaaacaagctcctgaagggcattgatttaggcagtctggtggacagtgatgtggacttgaagattgaagactttaatcagaatgtccttctgatgtctcccccggcctctgactcggggtcccaagcaggcttctctccctattctattgactctgagccaggaagtcctctgctggatgatgcaaaggttaaagatgaaccagactctcctcctgtggcactgggcatggtggaccgatctcgaattctgctgtgtgtcctcaccttcttgggcctctcctttagccccttgacttccttgctgcagtggggaggggcccacgacactgaccagcacccatactcaggctctggccgaagtgtactgtctctggagtcaggttctgggggctggtttgactggatgatgccaactctcctcctgtggctggtaaatggtgtgattgtcttgagcgtctttgtgaagctgttggtccatggggagccagttatccgtccacacacacgctcctcagtcaccttctggagacaccggaagcaggcggacctagaccttgccagaggtgactttgcagctgctgctgccaacctacaaacctgtttatcagttttgggccgggcactgcccacctctcgcctggacttggcctgtagcctctcctggaatgtgatccggtacagcctacagaagctgcgtctggtgcgctggatactcaaaaaagtcttccagcgctggcgggccaccccagccactgcagctggctttgaggacgaagctaagagcagtgcaagggatgcagccctggcctatcacaggctgcaccagctgcatatcacagggaagcttcctgcaggatctacctgttcggatgtccacatggctctatgtgctgtgaacctcgctgagtgtgctgaggagaaaatcccaccaagcacacttattgagatccatctgacagccgccatggggctcaagaccggatgtggaggcaagctgggcttcttggctagctacttccttaatcgtgcccagagtctgtgtggcccagagcatagcactgtccctgactccctgcgctggctctgccaccccttgggccagaagtttttcatggagcgaagctggtcaatcaagtcagcagccaaggagagtctgtactgtgcccagaggaacccagctgaccccattgcccaagtnnnnnnnnnnnnnnnnnnnnncctcctggaaagagctgtggagtctttggtgaaacctcagtctaagaagaagtcaggcgaccaggaggatgagagctgtgaattttccagtgccctagagtatttgagattacttcattcttttgtggactctgtgggatttgtgaccccaccattctccagcagctctgtgctcaagtcagcccttggtccggatatcatctgtaggtggtggacatccgcagtcactatggccatcagctggctccagggagatgatgcagctgtgcgctctcattttactgaagtagagcggatccccaaggccctggaagtgactgagagtcccttggtgaaggccgtcttctatgcctgtagagccatgcatgcctcactctctggaaaaggagatgggcaacagaattccttctgccattgtgagagggccagtggccacctatggaacagtctcaatgtcagtggagctacttctgatccttcacttaaccatgtggtccagttgctgacctgtgacctactactgtccctgaggacagcactctggcaaaagcaggcaggtgccagccagggcctgggtgagacctaccatgcatcaggcactgaactggctggcttccagcgggacctgggcagcctgcgtaggctagcccacakcttccgcccagcataccgcaaggtgttcctgcatgaacccactgtgcgcttgatggcaggagccarccccacccggacgcaccagctgctggagcatagcctacggcggcgtaccagtcagaacaccaagcatggagagatagacacctggcctggscaacgagagcgagctactgccatcctgctggcctgccgccatcttcccctctctttcctgtcttccccaggccagcgggcagtgctgctggctgaagctgcccgcaccctggagaargtgggtgaccgacgctcctgcaatgactgscarcagawgattgtcaagctgggtggkggcmctgccatygctgcctcctgaccacgtatggggcttggtctacctccttccacctttgtctctttctcccaggatcttccctctgtctctcagactgtctccccatctgtttttctcccttctccaagagttgtgaggatgaaggcaagactgactttctgagttgtcacctgccaaggcttttggatcatttcagcccagtaggaccatgggcaagtctccttaagactgctgtggtaaatgtccatggtctaagcccaagtgggctgagaagaaaagtggcctgagcaggaatggggtgatctcctcacttgaaagcaacatagggtgctgccaaagccccttccccagccctctggagacctgagtgtctcactttctgcctctttgttttttttgttatgttttgtttttatcaggctttctctgggaactaggtctctgtgcaccagagaacattttgcattctggacttatctggcatgcccccttttatacaaatgtttttatatgtgtgcttgggcctgtcacaatacagggcaaagttgctgtggcatctttatttctcctgggtctgcactccttccactgtgcctgactaagcctgttcattgttttctcatcatcacaagggacagccagggaaggaagggagcccagtcctggggaggtgggtgggaggcaagggcaggtcttgggatggatgaaataatgttggcattgttttttaattttttaaaaaataaatggtatcttacttaattgtcctgttccttcccactcctccaccccctgagagggcaacctgagctcagggtaggcccaaggggctggataggatgaagccacctttggacctaggatccaggggtcttcagcatgatttatttgttccttcctacccctagcctaactcctacctcccatagagtgtatttttatccttaattcctgcctgtgaataggccagggtgacagacactggtccaagccctccccagcagcaagcctctcttttttcagggtaggcagcaggaatcaggtctcctccttgagatgggggagtcctaggaagagagtggtcctgcttttctggactgcttggttcagggcttcctgggagacttgcgaggaaccttccttgtgcttctcatccctctaagctggttgaagcagagagtaggcaggggtggccccttcctgtgcttggtccccacctgtcctatcctgtctatcactgtaatttatggtcccgctgatggggcagcccagcccttgtgtctcgtgtatatactgtgccttttctctttgttgggggtgggagggtggtttttcactgaacaggggatatacctatgtcttccttgatgttgcaacattcaccatgtgctggacataggttactcaataaacacagattggtaccacct

SEQ ID NO: 537 - DNA, 1124 bp, Cricetulus griseus
aattcggcacgagctttttcctggtttccacccggcgccaggtgacacacacagagctgccactatggttcatcaagtgctctaccgggctctggtctccactaagtggctggcggagtcgattcggtctggcagcctggggcccggcctgcgggtgttggacgcatcatggtactctccgggsacccgccaggcccgcaaagagtaccaggaacgccacgtgcctggcgcgtccttctttgatatagaggagtgccgggacacgacttcgccttatgagatgatgctgcccagygaggcscacttygssgactacgtgggcagyctgggaatcagcaacgacacacacgttgtggtgtacgacggakacaacctgggtagtttctatgcacccagagtatggtggatgttccgtgtgtttggccatcgcacggtgtcagtgcttaatggtggcttccggaactggctgaaggagggccacccagtgacatctgagccctcacgtccagagccagccgttttcaaagctacactggaccgctcccttctcaaaacctatgagcaggtcctggagaacctccagtctaaaaggttccagctggtagactcccgtgcccaaggacggtacctgggcacagaaccggagccggatatcgtaggactggactcgggccacatccgaggttcagctaacatgcccttcatgaacttcctaaccgaagatggctttgagaagagcccagaggagctgcgtgccatattccaggacaaaaaggtggacctttcacagcccctcattgccacatgccgcaagggggtcactgcctgtcatattgccctggctgcctacctctgtggcaagcctgatgtggctgtttatgacggctcctggtcggagtggttccaccaggcacccccggagacccgcgtgtcccagggaaagagtgggaaggcctgagtgtgcacagcctcctctgcacaccaacttcagttagttcccttaagagaggccagtgtgatctgtcacagcttcacacctcttaggcaatgaagactgacaggattttagaattgctgtgagtgcctccttcctaccatactgaaataaagtgctttttctcaga

SEQ ID NO: 538 - DNA, 702 bp, Cricetulus griseus
  misc_feature (246)..(272): n is a, c, g, or t
gacgtgttggtgcttctggctgcgctgctggccacagcgtcgggctacttcgtcagcatcgacgcacacgcagaggagtgcttcttcgagcgggtcacctcgggcaccaagatgggcctcatcttcgaggtggcggagggcggtttcctggacatcgacgtggagatcacaggaccagataataaaggaatctataaaggagatcgagagtccagtgggaaatataccttcgcagcccacatggannnnnnnnnnnnnnnnnnnnnnnnnnntaggatgtccaccatgactccaaagatagtaatgttcaccattgacattggggaagctcccaaaggacaagacatggagacagaagctcatcagaacaagctagaagaaatgattaatgaactggcagtggcgatgacagctgtaaagcacgaacaggagtacatggaagttcgggagagaatacacagagccatcaatgacaacacaaacagcagagtggtcctttggtccttcttcgaagctcttgttctagttgccatgacattgggaymgaycyactmcstgaagagattttttgaagtccggagggttgtttaaaaggccttttcctgttgatcccaaattcacaattcasttgtttaccaaacaccttggycataataatgtcattmgttgatacatttttattttccgatcgttcatgactta

SEQ ID NO: 539 - DNA, 2392 bp, Cricetinae gen. sp.
acgagtcgtggagcttkyrgcggctcgttaagaaaagtgaccatgggagaacaaygaaacctcagtrgattccaaatccattaaaaattttgaagtaccatacatggaagcaaatcaatggaytctggaatrtatctggacartagttacaaaatggattatcctgaaatgggtgtgtgtataataattaayaataagaactttcataaaagcactggaatgacacctcgctctggtactgatgttgatgcagccaamctcagggagacattcatgsscytgaaataygaagtycggaataagaaygatcttactygtgragaaattgtggaaytgatgaaaaatgyttctaaagaagatcacagcaraagragcagtttcrtttgtgtgattctaagccatggtgawgaaggagtaatttttggaacagatgggcctrttgacctgaaaaaactaactasttacttcagaggggactattgccgaagtctaaytggaaagcccaaactcttcatcattcargcctgccgtggtacrgarctggactgtggcattgakacagacagkggaacygawgatgacatgrcatgccasaagataccagtggaagccgacttcctgtatgcctactccacagcacctggttactactcctggagaaatccaaaggacgggtcctggttcatccagtcactttgttccatgttgaaactgtatgcacacaagcttgagtttatgcacattcttactcgagttaaccggaaggtggcaacagaatttgagtccttttcccttgactccacgtttcatgcaaagaaacagattccatgtattgtgtccatgctcacaaaagaattgtacttttatcactaaggaaatgattgggagctttgtttctctctgttctttgttgatgccaatgaggaaatagtgtcagggagactttatttccttctcatttaattctgatgttccagatggtaccatgaaccatataccactgccctagcaatgcaaccacaatgcagctacctcaagttcaacatcaggtagttgaaacaaaatttaattaggaacaaatgtcaatgatattactacattatagaggaaattacaaatttgctctttttataattagcaagatttggtgatactgtacattttgaataattctgaagaagttaaactttgtggtgtaattttatactccctacatacattaagaatgccatactagcttttgttaaaatataggaatgatggtgtcaaatgataatgtcttagaacttgaatccgtgggcagagtcaaaggcttgaacctttattttggaagtgatgtatggaaatgaagcattggaccaccagtagcatccattgtagcttctggttttgtgatgtttggcctaagcatgtatttgttattaaaaaatcatgttttattattgaaaaaaagagaggaaaatgtgtgaaattggttgactctttgaaggctaccatacatccgtagtggacatgatggcaaggtgctaaatctaccagcatttgtttcttgttcttgtacaaatcagcttagttttacagaccagcaaaataactaaaggatggttatgtagcagcatcaaattgtggattattagaatgaaataaagaaattctgcaggaacttactaaaataccacctgttaaacagaatgtaaggaggggagaaatgaatctactgaaattggagagaggtggttcgagccaccgaggagatatggcagagccttgggcacagcttcagaaaggactgccttctggatccgcctcatgagtacccgttcgtgtggatgatgtccccaaggtccaagtcaccacatgagaaagtgagccagatcagaaacttcagagaaagggctttcccaaagtggtgagaatctccagaaagatccctgaactccatgtcctgagtctataagcatgctgacttttctgttgaagtttacaataaaaggaagccaacggtgatatttacattgtcaccagggattaaaggactgtggcacacaggtacttggagaacatccagcacaggccctgcagctacacgggaagctgcaggatggagtccagtcccatcagagaggctgtgctccaggctgcctcctcacttgtggaggcgctgagccgacgctggctatcctgatgtgttcagcgtttcacggaaacttcctttttgctcaaagaaaggaaggaactcacatgtataactgttacattcttgttttagactggatctattaactctaaccaaatgtagcatgtgatgatattttaaagtgtgttccatgtatcaattttataagagtttgtcacatttttctttcaaaacataaactcagatttaaaatta

SEQ ID NO: 540 - DNA, 1198 bp, Cricetulus griseus
gtttctaccgtgtgtacctgctcgcgtgcaatccgccgccatcgcgctttgggcgagcattgtaatgggtagtagagaggcggcagccgagcggaggccgacctggctttggcgatggtggcgcgcgctctggaggaccgatcggagaccagcgccmggaggcggctcactgatgtggaggtgacggaggagcttttggtgtgacctggcgccatgtgtgtgataccacacgakcttgaccgagcgtgccacgcaatcataattcagcgaaccttttgcttcgatgaggcatcgtgttggtgatgactrgaagacatacgtggcttggaagatgacgtgaaatacacaggaaaggaaagaagtaaaaggatgttttgcttaagagtatgccatttgcaaattcattcaataattyggagatttatataagggcctgttcagacagtggtgtttctgattcctgctaaggaaagtgctccacacaagcctgatgacctgagctaattcctgaggcccacagggtggaagatgagagttgactcctgaaagtatcttcaaaccacacatacacaataagaaaaaacaatatagtaaagctgaaacattagagtgttgctgttttattgaaatgtaaaatggtacaagtaattatggaacaaatgtattccataccttgtgacagttttgtgtaaaaccttaccctcttctaaatgagaaagggattaaagttgtcaaaagaatttaacttttaagtctttcattttcttttataaaggtttatttctgatggtatgttgtatgtttgtgtgccctcatacagctggagttacagacagttgtgagctgcctgaggtgggtactgtgagcaacatgctctcacaagtaccaagtcatctctccagcccaactttttgtgaatgaatttgaaagtttttgcattttggagaaaaagcaaaagggaggtgtgctgttgtaatgtggcagttgccaatcaaaatgaactgtaacttcttgtcagttgctgcctggtaagaggctagcccagacacaacctactagaagtgtccttattacatttcaggaaccatgccaaatagggtggctgcccaatacaaccaggtagtttgtcttcagatccaattgtactgctgtctgtccggttcatttgtagtatacttaataaacatagttttctact

SEQ ID NO: 541 - DNA, 1181 bp, Cricetulus griseus
  misc_feature (1096)..(1096): n is a, c, g, or t
ccggaactcaagatggctgcgctcttgctgagacacgttggccgtcattgcctccgagcccaccttaattctcagatctgtctcagaaatgctgttcctttgggaaccacagccaaggaagagatggagcggttctggaataagaacacgagttcaaaacgtcctgtttctccccacctcactatctacagatggtctcttcccatggtaatgtccatttgccaccgtggcactggtgtggccttaagtggaggggtctctctttttggcctgtcggcactgctgcttcctgggaactttgaatcttatttgatgtttatcaagtccctgtgtttggggccagcattgatccactcagctaagtttgtgcttgtcttccctctcatgtaccactcgttgaatgggatccgacacttgatatgggacctarggaaaggcctgtcgatctcccaggtctatcagtctggagtggctgtcttgatgcttgctgtgytgtcctctgtagggctggcagccatgtgaagagctgaaattcccatcatcgtcctatacattatcacactgatttatattcccatttatcactcttatccccagtcaccaaggttcccctgatttgtttagatgccatgtgcttcagatcccactggagctcaktagagaggcttgaagacctgtagtagtagaaaaaggtcattttccctgggcctggagccyttactcccaatccacatttgactttgatttgtgctgagggtcagctttcgactccttcttgctgaracagtggaaacaatggcagtcctgtggctgcccttggtgccactgcctgtgggctgctggcttaaaggacagttcggttcattggtcagctcagggcctttagcgcccacacagtgtgcctgagagaagagaggtggagggagggaatggctytgcccagctagagggagagaaagagcgagttggatytggggagctcatgcttgggaaaagatatagatggagcttttgatggatgaggaagatccaatgtgttttctgttctgtttttcacttctagtaaaacacamcyttaatgtcatgttttctaatntaaatttttgtaccatyttctttggaaatgattaaaatacttctcatttcatgtttcaaaaaaaaaaataaaataaggggcgccc

SEQ ID NO: 542 - DNA, 3899 bp, Cricetulus griseus
  misc_feature (290)..(359): n is a, c, g, or t
  misc_feature (1277)..(1314): n is a, c, g, or t
  misc_feature (1784)..(1818): n is a, c, g, or t
  misc_feature (2226)..(2317): n is a, c, g, or t
  misc_feature (2415)..(2460): n is a, c, g, or t
  misc_feature (2588)..(2613): n is a, c, g, or t
  misc_feature (2682)..(2732): n is a, c, g, or t
  misc_feature (3179)..(3223): n is a, c, g, or t
aggtgcgcagagtccggggccggctggtgcgcgagacgccgggagagggtcgcgatggcagccacagtgagaaggcagaggccaaggaggcttctctgttggaccttggtggctgtcctcttggcagacctgttggcactgagtgacacgttggctgtgatgtctgtggatctgggcagtgaatccatgaaggtggccattgtcaagcctggagtgcccatggagattgtgttgaacaaggaatctcggaggaaaacaccagtgactgtgaccttgaaagaaaatgaaannnnnnnnnnnnnnnnnnnnnnnnnnnnnnnnnnnnnnnnnnnnnnnnnnnnnnnnnnnnnnnnnnnnnncctcctaggaaagcaggcagataaccctcatgtggccctttatcgggaccgtttcccagaacatgagctaaatattgacccacagaggcagactgtgcgcttccagatcagtccgcagctgcagttctctcctgaggaggtgttgggcatggttctgaactactcccgttccttggctgaagattttgctgaacaacccattaaggatgctgtgatcaccgtgccagcctttttcaaccaggctgagcgccgagctgtgctgcaggctgctcgaatggctggtctcaaagtgctgcagctcatcaatgacaacactgccactgccctcagctatggtgtcttccgacggaaagatatcaattccactgcgcagaatgtcatgttctatgatatgggctcaggcacgaccgtgtgcaccattgtgacctaccaaacagtgaagactaaggaggctgggatgcaaccacaactgcagatccggggtgtggggtttgaccgaaccctggggggcttagagatggagcttcggctgagagaacacctggcgaagctcttcaatgagcaacgcaggggccagaaagccaaggatgttcgggaaaatccacgtgctatggccaagctgcttcgagaagccaatcgccttaaaaccgtcttgagcgctaatgctgatcacatggcacagattgagggcttgatggatgatgtggacttcaaggcgaaagtgactcgagtggagtccgaggagttgtgtgcagacttgtttgaaagagtgcctgggcctgttcagcaggccctccagagtgccgagatgagcttggatgagattgaacaggtgatcctggtgggtggggccactcgtgttcccaaagttcaagaggtgctgctaaaggctgtgggcaaggaggaactaggaaagannnnnnnnnnnnnnnnnnnnnnnnnnnnnnnnnnnnnntaccaggcagcagcactcagcaaagccttcaaggtgaagccgtttgttgtgcgggatgccgtcatctaccccatcctggtggagttcacaagggaagtggaggaggaacctggggttcgaagcctgaagcacaataaacgtgtgctcttctcccgaatggggccctaccctcagggcaaagtcatcacctttaaccgctacagccatgatttcaactttcacatcaactacggtgacctgggcttcctggggcctgaggatcttcgggtatttggctctcaaaatctgactacagtgaagctaaaaggtgttggagagagcttgaagaaatatcccgactatgagtccaaaggcatcaaggcccacttcaacctggatgagagtggggtgctcagtttagacagggtggagtctgtatttgagaccctggtggaggacagcccagaagaagaatctactcttaccaagcnnnnnnnnnnnnnnnnnnnnnnnnnnnnnnnnnnnacctcgtcagatgccaaagagaatggtactgatgctgtacaggaggaagaggaaagccctactgaggggagcaaggatgaacctggagagcagggggaccttaaggaggaaactgaagcccctgtggaagatacctctcagcctccaccccctgagcctaagggtgatgcagctcctgagggagaaaaacctgatgaaaaagaaagtgggggaaagtctgaagctcagaagcccgaagagaaggggcagtcagggcctgagggtgtccctccagctcctgaagaagaaaaaaagcagaaacctgcccggaagcagaaaatggtagaggagataggtgtggagctggctgtcttggacctgccagacttgccagaggatgagctggctcgttctgtgaagaaacttgannnnnnnnnnnnnnnnnnnnnnnnnnnnnnnnnnnnnnnnnnnnnnnnnnnnnnnnnnnnnnnnnnnnnnnnnnnnnnnnnnnnnnnnnnnnaccagcctgagtaccaggaagtgtccactgaagaacagcgggaggagatctctgggaaactcagcgccacttctacctggctggaggacgaggggttnnnnnnnnnnnnnnnnnnnnnnnnnnnnnnnnnnnnnnnnnnnnnnaaactgtgccaagggctgttttttcgggtggaagagcgcagaaaatggcctgaacggctttcagctctggataatctcctcaaccactccagcattttcctcaagggtgcccggctcatcccagagannnnnnnnnnnnnnnnnnnnnnnnnnatgacaacgttagagaaagtcatcaatgacacctgggcctggaagaatgcaactctggctgagcaggcnnnnnnnnnnnnnnnnnnnnnnnnnnnnnnnnnnnnnnnnnnnnnnnnnnncaagatgatggccctggaccgtgaggtacagtatctgctcaataaggccaagtttaccaagccccggccacgacccaaggacaagaatggcacccggacagaacctcccctcaatgctactgctggtgaccaagaggagaaggtcattccacctgcaggtcagcctgaagaggcaaagcccattttagaacctgacaaagaagagactactacggaaccaacagactctgagcctctggaattaggaggtcctggagcagaatctgaaccgaaagagcagacagcaggacagaagcggtcttcgaagaatgatgaactataacccccccctcctgtatccccactgtstsgcctscagccccttctcctaccacctctatttattatacatcagggttggggcaaggggtgggttttgcccttagggsstcaagttccttctctcannnnnnnnnnnnnnnnnnnnnnnnnnnnnnnnnnnnnnnnnnnnncatgagtgaaatgatctagttctgtccccagctccacgctctggtctcctactctctggccctgtgtttgggaaaaatcactattgtgtcttaattgtttgcctgtgggtaaatgagagaatggctgsccggttgttggagacctggtaatgggaaggatattttgggacactagagtgcccagtcttctctgagtatcatttcattctttgctgttccacaaaatcagtgtcctgtttgggccagtgtctacagagcctcatcaccacctttggcttcccagtgcctctttttctcttctgtgtcttctctttcccctgcccttcctccttggctcttctgtctgtctttgccttcccagtacagattgggcctcgtgcgaattcgccgacaccatcataaccaaagcaacatttaccaaaacatggaaataatgatagcagaaacagtcaatgagctaaatattttccttttccttttttttagatacggtctcgctctgttgcccaggctggcagtgaacttccgaggccttcggtccagatgatccatgtctacaagcttatgacactggaatttactttcaaatcaacaatcatgattgtgaaaaatcacgcattttatttttcaactcataataaaaatatgtattattagcagaatatatgtaagaaat

SEQ ID NO: 543 - DNA, 1248 bp, Cricetulus griseus
  misc_feature (1166)..(1180): n is a, c, g, or t
gcacacggacatttgctctctcaggaaggttttggcagcaaccatgtccactttcgtggagctcagtaccaaagccaagatgcccatcgtgggcctgggcacctggcagtctcccccaggccaagtcaaggaagctgtgaaggtggccattgatgctggataccgccacattgactgcgcctatgcgtattacaatgagcacgaagtgggagaggccattcaagagaagatcaaagagaaggctgtgagacgggaagacctcttcatcgtcagcaagttgtggcccacctgctttgagaggaaactgctaaaggaggcctttcagaagaccctcacggacctgaaactggactatctggacctgtatcttattcactggccacagggacttcagcccggaaaggagttatttcccaaagacgatcaaggcaacgtcctcaccagcaaaataacgttcttggatgcctgggaggtcatggaagaactggtggatgaagggttagtgaaagccctgggtgtctccaacttcaaccacttccagattgaaaggatcctgaacaaacctggattgaaacataagccagtgaccaaccaggtcgagtgtcacccatacctcactcaggaaaaactgatcgagtactgtcactccaagggcatcactgtcacagcctacagccctctgggttccccaaataggccttgggccaagccagaagacccttcactcctagaggaccccaagattaaagagattgctgcaaagcacaagawaacctcggcccaggttctgattcgattccacatccagaggaatgtggtggtgatccccaagtctgtgacaccagcacgtatacatgagaactttcaggtctttgacttccagttgagtgatcaggagatggccaccatccttggcttcaacagaaactggagggcctgcctgctgcctgagacagtaaacatggaagaatatccctacgatgcggagtattgaagctaactcgcctgatgaggcttccctctttgctgatgcacacctcaatcatttctggtgtgccatttgagccaagcctgcctgatgtcatgctctaggcaacgctgtacttaaaatcctgtgttcaaggaagtgtgactctgagaagtgaatgtgcatttctttcactgannnnnnnnnnnnnnntgtttgccaaaaatcaggaactctggtaactttggaggacataagaatagaacaataaaagccaagcc

SEQ ID NO: 544 - DNA, 2697 bp, Cricetulus griseus
  misc_feature (1228)..(1253): n is a, c, g, or t
  misc_feature (2512)..(2552): n is a, c, g, or t
  misc_feature (2664)..(2685): n is a, c, g, or t
atgataagcgccacgagagccgccgccgcgcgtctcgtgggcactgcagcctcccggacgcccgcggccgcccgccaccaggatggctggaatggccttagycatgaggcttttagatttgtttcaagaagggattatgcgtcagagrcaattaagggtgcagttgttggtattgatttgggtactaccaactcgtgtgtggcsgttatggagggcaaacaagcaaaggtcctggagaatgctgaaggtgccagaactaccccttctgttgttgcctttacagcagatggagaacgacttgttggcatgccakcaaagcgacaggctgtcaccaacccaaacaatacattctatgctacaaagcgtctaattggacgtcgatatgatgaccctgaagtacagaaagacactaagaacgttccctttaaaattgtccgtgcctctaatggtgatgcctgggttgaagctcatggaaaactgtattctccaagtcagataggagcatttgtgttgatgaakatgaaagagactgcagaaaattacttgggtcacacagcaaagaatgctgtgatcacagtccctgcttatttcaatgactcacaacgacaggctactaaggatgctggccagatatctgggctaaatgtacttcgagtgattaatgaacctacagctgctgccctggcctatggtctggacaaatctgaagataaaatcattgctgtgtatgatttaggtggtggaacctttgatatttctatcctggaaattcagaaaggagtgtttgaggtgaaatccaccaatggggacactttcttaggaggtgaagactttgaccaagctttgttgcggcacatcgtcaaggagttcaagagggagacgggggttgatttgaccaaagacaacatggcacttcagagagttcgtgaagctgctgagaaggctaagtgtgaactctcctcatctgtgcagactgacatcaatttgccatatctgacaatggatgcttctggacccaagcatttgaatatgaagctgactcgagctcagtttgaaggcattgtcacagacctaatcaagaggactattgctccatgccagaaagctatgcaagatgcagaagtcagcaagagtgacataggagaagtgattctggttggcggtatgacgagaatgcccaaggttcagcagactgtgcaagatctttttggcagagccccaagtaaannnnnnnnnnnnnnnnnnnnnnnnnncattggagctgccattcagggaggtgtgttggctggtgatgtcacagatgtgctactcctggatgtcactcccctctctctgggtattgagactctgggaggtgtttttaccaaacttattaataggaacaccactattccaaccaaaaagagccaggtattttctaccgctgctgatggacaaacgcaagtagagattaaagtgtgtcagggagagcgagagatggctggagacaacaaacttttaggacaatttactttgattggaattcctccagcccctcgtggagttcctcaaattgaagttacatttgaccttgatgccaatgggatagtacacgtttctgccaaagataaaggaacaggacgtgagcaacagattgtaatccagtcttctggcggattaagcaaagatgatattgaaaacatggtaaaaaatgcggagaagtatgctgaagaagacaggagaaagaaggaacgtgttgaagcagttaatatggctgaaggaattattcatgacacagaaaccaagatggaagaattcaaggatcagttacctgctgatgagtgcaacaagctaaaggaagagatttccaaaatgagagaactccttgctcgaaaggacagtgaaacaggagaaaacattagacaggcagcatcttcacttcagcaggcatccttgaaactctttgaaatggcatataaaaagatggcatctgaacgggaaggttctgggagttctggtactggggaacagaaggaagatcagaaagaggagaaacaataacagtggcagcacattgtcaagccagaagagcacaacataccatgaagcttgggagtaaagggacttcctgagcagaaaaggggcaaatttcagtctttttactgtgtttttgcagtattctatatataatttccttaatatataagtttagtgacaattagctaactcatttaatgggtggtaaattcagcagtagcaggttcatactgttctgtcactagcctgttattttttcagccgcatgaaaggggttgggtggggctgtataccaatcattattaaggtatatccggtttgtgctgaatggccatgttctaggtatgaaacccatcacatgcaataagactatctgtagatcctgttggccaagagtactgctataaagaatgacctatgtgtataggattggtccttcaactgaggccttgcatgacagctacctgtgccatggtttgtaggtgcaaagctaggnnnnnnnnnnnnnnnnnnnnnnnnnnnnnnnnnnnnnnnnnggggagagatgaagtctctcttggtcctaaggcatatctttctagctaccctcttggttggcctgtgtcaggaacctgtatccttgatgattgttcttttcatccattctgnnnnnnnnnnnnnnnnnnnnnnaaaattccaaaa

SEQ ID NO: 545 - DNA, 1843 bp, Cricetulus griseus
  misc_feature (1659)..(1697): n is a, c, g, or t
ctactcggagttagcaggattcgagccgtctcactgaccacaggccgtgtcgtgtcaccggttctgcaggcaccatgagccaggacaccgaagtggacatgaaagaggtggagctgaacgaactagaaccggagaagcagcctatgaatgcggcggccggggcggcggccggggagaagaacggtctggtgaagatcaaggtggccgaagacgaggcggaggcggaggccggggccaagttcacgggcttgtccaaggaggagctgttgaaggtagccggcagccccggctgggtgcgcacccgctgggcgctgctgctgctcttctggctcggctggcttggcatgctggcgggcgccgtggtcatcatcgtccgggctccgcgctgccgtgagctgccggtacagaggtggtggcacgagggcgccctctatcgcgtcggcgaccttcaggccttcgtaggtccgaacgcgggaggcatagctggtctgaaaaagcatctggagtacttgagcaccctgaaggtgaagggcctggtgttgggcccaattcacaagaaccagaaggatgacgtcaatggaaccgacttgaaacagattgaccccagtttaggctcccaggaagattttaaagaccttctgcaatctgccaagaaaaagagcattcacatcattttggacctcactcccaactaccggggccagagtgcatggttcctccctgctcaagctgactgggtggccaccaagatgaaggaagctctgagttcttggttgcaggaaggtgtggatgggttccaatttcgggatgtggaaaagctgatggatgcatccttgtacttggctgagtggcagaatatcaccaagaacttcagtgaggataggctcttgattgcagggactgactcctccgacctgcagcaaattgtgaccatactcgaatccaccagcgacctgctgttgaccagctcctatctatcaaattccagttttactggggagcatacaaaattgctagtcactcggtatttgaatgccactggcagtcactggtgcagctggagtgtgtctcargcagggctcctgacagcctccgtcccagctcagctcctccgactctaccagctgatgctcttcactctgccagggacccctgttttcagctatggggatgagatcggcttgcaggaagctgtcgttcctggacagcctgtggaggccccattcatgccatgggatgaatccagcctcccccaaactccgggacacataagcacgaacatgacagtgaagggccagaatgaagaccctggctccctccttacccagttycggtggctgagtgaccttcggggtaaggagcggggtaaggaacgctctctgttgcacggtgacttccgtgcactgacctcctcacctggcatcttctcctacgtccgctactgggaccagaatgagcgttacctggtggtgctcaactttcaggacgtggtcctgtcagccaggctagaggccgccaacctccctgctggtataagtctgccagccagcgctaacctattgtttagcaccaacagtacccggctaggccaagagcagggtacttctctgagtctggaaaacttgtacctgaatcctcatgagggcttgctgttacatnnnnnnnnnnnnnnnnnnnnnnnnnnnnnnnnnnnnnnncaccctcctctcttttcccctggccttttgaattatttttttctctcctttggtttgtttgtttggtttaactttttgcagattgcatatcaattctcacactgggtgtttttggcttcaaataaaaatcacccctgcctgataaa

SEQ ID NO: 546 - DNA, 1555 bp, Cricetinae gen. sp.
  misc_feature (668)..(686): n is a, c, g, or t
  misc_feature (1454)..(1454): n is a, c, g, or t
  misc_feature (1461)..(1461): n is a, c, g, or t
  misc_feature (1507)..(1507): n is a, c, g, or t
acttatgaatgatatcaaaccaatatggcagagaccatccaaggaggtagaagaagatgagtacaaagctttctacaaatcattttcaaaggaaagtgatgaccccatggcttatatccactttactgcagaaggggaagtcaccttcgaatcaatattatttgtgcccacatctgctcctcgtggtctgtttgatgagtatggatccaagaagagcgattatattaagctctatgtgcgccgagtattcatcaccgatgacttccatgatatgatgcccaagtaccttaattttgtcaaaggtgttgtggattcagatgatctcccccttaatgtttcccgtgagactcttcagcaacataaactgctcaaggtgataaggaagaagctcgtccgtaaaactctggacatgatcaagaagattgcagatgagaagtacaatgatactttctggaaagagtttggcaccaacatcaagcttggtgtgattgaggaccactcaaatcggacgcggcttgctaaacttcttaggttccagtcttctcatcactcaactgacattactagtktagaccagtatgtggaaagaatgaaggagaagcaggacaaaatctacttcatggctgggtcaagcaggaaagaggccgaatcttctccatttgttgagnnnnnnnnnnnnnnnnnnnatgaggttatttacctcacagagcctgtggatgaatactgcattcaggctcttcccgagtttgatgggaagaggttccagaatgttgccaaagaaggagtgaagtttgatgagagcgagaaaacgaaggaaaaccgggaagcaacagagaaggagtttgagcccctgctcaactggatgaaagacaaggcccttaaggacaagattgaaaaggctgtggtatctcagcgtctcacggaatctccttgtgctcttgtggccagccagtatggatggtctggcmacatggagaggattatgaaggcacaagcataccaaacgggcaaggacatctctacaaattactatgcaagtcagaagaaaacatttgaaattaatcccagacatccgctgatcagasacatgcttaggarggttaaggaagatgaagatgacaagactgtcttggatcttgctgtagttttgttwgaaacagcaacacttcggtcaggatatcttctaccagacaccawggcatatgsagatagaatakagagaatgcttcgcctcagcttaaacattgaccctgaagcacaggtagaagaagaaccggaagaagagcctgaagacaccacagaagacacagaacaagacgaggaggaagaagtggatgcaggcacagaagaagaagaagaagaggaacaggaaacagcaaaggaatctacagcagaaaaagatgagttataaattatcctctcaccacagatcctgtgtggagagggaatgtganattttanagtcgtttcttttcagagagacttgtttgggatgctccccagcctncttctcccctggactggtaaatgttggggattgggggttaccaggaag

SEQ ID NO: 547 - DNA, 723 bp, Cricetulus sp.
  misc_feature (615)..(630): n is a, c, g, or t
gctgtcccctgtcgcctcttcctgcagccatggtcaaccccaccgtgttcttcgacatctcggccgacggcgagcccttgggccgcgtctccttcgagctatttgcagacaaagttccaaagacagcagaaaactttcgmgctctgagcactggagagaaaggatttggatataagggttcctcctttcacagaattatcccaggattcatgtgccagggtggtgacttcacacgycataatggcactggcggcaggtccatctacggagagaartttgaggatgagaacttcatcctgaagcatacaggtcctggcatcttgtccatggcaaatgctggaccaaacacaaatggttcccagttttttatctgcaccgccaagactgagtggctggatggcaaacatgtggtctttgggaaggtgaaagaaggcatgaacattgtggaagccatggagcgtttcgggtccaggaatggcaaaaccagcaagaagatcaccatttccgactgtgggcaactctaattcttttgacttgcgggcttcttacctaccagaccattccttgtgtagctcargagagcattcccaccccatctgctcgaatgccctgtannnnnnnnnnnnnnnnaaattctttgggttccatattttcctcattcccctccaagtctagctggatggcagagttaagtttatgattgtgaaataaaaactaagtaag

SEQ ID NO: 548 - DNA, 1267 bp, Cricetulus griseus
gkcymycyrckcstacsctgttctakagacasccgcatctttscgtgcaktgccagcctcgctcckgadacgcawtggtgaakgtcggsgtgaacggatttggccgtattggacgcctggttaccagggctgccttcacttctggcaaagtggamrttgttgccatcaatgaccscttcattgacctcaactacatggtctacatgttccagtatgactctacccatggcaagttcaaaggcacagtcaaggctgagaayggraagcttgtcatcaacgggaaggccatcaccatcttccakgagcgagatcccrccaacatcaaatggggtgatgctggygccsagtatgttgtggartctactggcgtcttcaccascrtssrgaargctggggcccacttgaagggyggrgccaagagggtcatcatctycgcmccttytgctgatgcccccatgtttgtgatgggtgtgaaccawgacaagtatgayaactccctcaagattgtsagcaatgcrtsctgcaccaccamctgyttakyccccctggccaakgtcatccatgacaactttggcattgbgraargactcatgaccacrgtccatgccatcackgscacccakaaractgtsgwtggcccctccsgraakctgtggcgtgatggccgtggggctgcccavaacatcatccctgcatccactggygctgccaargctgtgggcaargtcatcccadagctkaacgggaagctsactggcatggccttycgtgttcctacccccaacgwgtccgtygtggatctsacatgtcgcctggagaaasctgccaagtrtgargacatcaasaaggtggtgaagcakgcatcygadggcccwyygwwrggyatcctgkgctacaccgakgaccasgttgtctcctgcgacttcaasagtgactcccactcttccacctttgatgctggggctggcattgctctcaatgacaacttygtaaagctcatytcctggkatgacaatgaattyggctwcagcaacagrgtggtggacctcatggcctacatggcctccaaggagtaagaagcccaccctggaccatccaccccascmaggactcsagcaagarggaggccctggctgctgagcagtccctgtccaataacccccacaccgatcatctccctcacagtttccatcccagacccccagaataaggaggggcttagggagccctactctcttgaataccatcaataaagttcactgcaccc

SEQ ID NO: 549 - DNA, 908 bp, Cricetulus sp.
  misc_feature (29)..(45): n is a, c, g, or t
aaagtcacagcttgtccaaagacccgggnnnnnnnnnnnnnnnnnagtctgagaagtccagcaccagcaccagcaccagcaccagcaccagcaccagcaccagcaccagcaccagcaccagcaccagcaccagcaccatgcctatgatactgggatactggaatgtccgcggtctgacaaaccccatccgcctgctcctggaatacacagactcaagctatgaggagaagaaatacaccatgggggacgctcctgactytgacagaagccagtggctgaatgagaagttcaagctgggcctggactttcccaatctgccctacttaattgatgggtcccacaagatcacccagagcaacgccatcctgcgctacattgcccgcaagcacaacctgtgtggagagacagaggaggagaggattcgtgtggacattgtggagaaccaggctatggacacccgcatgcagctcatcatgctctgttacaaccctgactttgagaagcagaagccagagttcttgaagaccatccctgagaagatgaagatgtactctgagttcctgggcaagcggccatggtttgcaggggacaaggtcaccttatgtggatttctcgcttatgatgtccttgatcagtatcaaatgtttgagcccaagtgcctggatcccttcccaaacctgaaggacttcttggcccgctttgagggcctgaagaagatctctgcctacatgaagaccagccgcttcctccggagacctatattttcaaagatggcacagtggagtaacaagtaggcccctgctacacgggctctcatatggaggacctgtgcacactggatcctcctggccctggggacagctggtcttctgcactgctgcctcaaggttctcacttctttctccttt

SEQ ID NO: 550 - DNA, 1608 bp, Cricetulus sp.
  misc_feature (189)..(202): n is a, c, g, or t
  misc_feature (204)..(220): n is a, c, g, or t
  misc_feature (306)..(325): n is a, c, g, or t
  misc_feature (419)..(432): n is a, c, g, or t
  misc_feature (434)..(450): n is a, c, g, or t
  misc_feature (461)..(477): n is a, c, g, or t
  misc_feature (536)..(564): n is a, c, g, or t
  misc_feature (582)..(595): n is a, c, g, or t
  misc_feature (597)..(634): n is a, c, g, or t
  misc_feature (648)..(661): n is a, c, g, or t
  misc_feature (663)..(679): n is a, c, g, or t
  misc_feature (690)..(718): n is a, c, g, or t
  misc_feature (766)..(800): n is a, c, g, or t
  misc_feature (826)..(863): n is a, c, g, or t
  misc_feature (919)..(937): n is a, c, g, or t
  misc_feature (994)..(1028): n is a, c, g, or t
  misc_feature (1054)..(1084): n is a, c, g, or t
  misc_feature (1147)..(1169): n is a, c, g, or t
  misc_feature (1222)..(1256): n is a, c, g, or t
  misc_feature (1285)..(1320): n is a, c, g, or t
  misc_feature (1426)..(1458): n is a, c, g, or t
tgcttagtttggtgttttgaaatgctttagcagcttggaaccatgacaaaacagatactgtgttgtgaaggaacgcgggggaggggctttcattagaggtattttgtgggaatcgaaatttttaccagacatttaaaattacaagtggcacttttacttttaaattcaaggtcaaaatgcaaatcttcnnnnnnnnnnnnnncnnnnnnnnnnnnnnnnnagaggtggagcccagtgacaccatcgaaaatgtcaaggccaagatccaggataaagagggcatcccccccgaccagcagcgactcnnnnnnnnnnnnnnnnnnnnttgtccacttcggagctcttkctkakgtgtttctacgcgcwcggcggtttgtggtctcatcacatccgttaacaggtcrrmatgcaratyttcnnnnnnnnnnnnnncnnnnnnnnnnnnnnnnnagaggtggaannnnnnnnnnnnnnnnnaaatgtcaaggccaagatccaggataargagggcatcccccccgaccagcagcgactcnnnnnnnnnnnnnnnnnnnnnnnnnnnnngccgcactctttctgatnnnnnnnnnnnnnnannnnnnnnnnnnnnnnnnnnnnnnnnnnnnnnnnnnnncatgcagatyttcnnnnnnnnnnnnnncnnnnnnnnnnnnnnnnnagaggtggaannnnnnnnnnnnnnnnnnnnnnnnnnnnncaagatccaggataaggagggcatcccccccgactcagcagcgactcnnnnnnnnnnnnnnnnnnnnnnnnnnnnnnnnnnntctttctgattacaacgtccagaaannnnnnnnnnnnnnnnnnnnnnnnnnnnnnnnnnnnnncatgcagatyttcgtgaagaccctgacyggcaagaccatcaccctagaggtggaannnnnnnnnnnnnnnnnnnttgtsaaggccaagatccaggataargagggcatcccccccgaccagcagcgactcnnnnnnnnnnnnnnnnnnnnnnnnnnnnnnnnnnntctttctgattacaacatccagaaannnnnnnnnnnnnnnnnnnnnnnnnnnnnnnagggtggcatgcmkawyttcgtgaagaccctgacyggcaagaccatcaccctagaggtggaannnnnnnnnnnnnnnnnnnnnnngaaggccaagatccaggataargagggcmtcccccccgaccagcagcgactcnnnnnnnnnnnnnnnnnnnnnnnnnnnnnnnnnnntctttctgattacaacatccagaaagagnnnnnnnnnnnnnnnnnnnnnnnnnnnnnnnnnnnnctattaattcttcagtctgcattcccagtgggcaatggatggcattaatctgcactatagccatttgccccaatttaagtttagaaaatccaagtttcagtaatannnnnnnnnnnnnnnnnnnnnnnnnnnnnnnnnttgttgcatggtaagcatacatggtgtcatttgtgaagtttctatggtggcttgggtgggggacttcccctactgtctttagagattggtatttaactaaaatttgcgtcacttatgtcttagctgagttgggaacttcgtttaaaagtt

SEQ ID NO: 551 - DNA, 1674 bp, Cricetulus griseus
  misc_feature (145)..(161): n is a, c, g, or t
atctcgctgctgcagcctccggggccacgttccatcccttcagcctgagaccagccaagggggaaaaaaraamcaattatcttttcttgctcggyacctaccttgaagccagcacaaatttattacagtaaaccktagccatgannnnnnnnnnnnnnnnncaggccggmcaatgtggcaaccaratcggtgctaagttctgggaggtgatcagcgatgaacacggcatcgaccccaccggyacctaccayggagacagcgacctgcagctggaccgaatctctgtgtactacaatgaasscacaggtggcaagtatgtccctcgggccatattggtggatctagaacccgggaccatggactccgttcgatcaggtcctttyggccagatcttcagaccagacaactttgttttcggtcagtctggggcaggcaacaactgggctaagggtcactacacsgagggagctgagctggttgactcygtcctggaygtggtkcggaaggaggcrgaragctgtgactgcctgcagggcttycagctgacccactcvctgggyggaggyaccggttcyrgtatgggcaccctggctcatcagcaagatccgmgaagaataycccgaccgratcatgamyaccttcagygtsgtaccytcwcccaaagtgtcygacaccgtggtggagccctacaaygccaccctgtcygtscatcagctggtggagaacaccgacragacctactgcatcgacaacgaggccctstacgacatcctgcttccgcackctmaagctcaccacgccsacctayggrgacctsaacmacctsgtctcggccaccatgagcggggtcaccacctgcctccgcttcccrggccagctcaaygcygacctccgraagytggcsgtcaacatggtscccttcccmcgtctccacttcttcatgccyggcttygcccctctcaccagccgygggagccagcagtaycgggccctcacygtgccygarctcacccagcaggtcttcgatgccaagaayatgatggcmgcctgtgacccccgccacggccgmtacctcaccgtggckgccgtcttccgygggcgsatgtccatgaaggaggtggacgagcagatgctsaacgtgcagaacaagaacagcagctacttygtmgagtggatccccaacaacgtcaagacsgcygtctgcgacatcccrccrcgsggcctcaagatggcmgtcaccttcatyggmaacagcacggccatccaggagctcttcaagcgyatctcsgagcagttcacsgccatgttccgccggaaggccttcctscactggtacacsggcgagggcatggacgagatggagttcactgaagccgagagcaacatgaacgacctcgtctccgagtaccagcagtaccaggaygccacygcggaagaggaagaggatttcggggaggaggcagaagaagaggcctaagscagasagagagagccctgcgtcttctcctcaggctrcttaagttccctcagctytcttcagctgcccgtttttctccttcagagttttctyttctgctgcctctgtcctgtttttttatttttttccatcggagggggggtaaacagtgcctggcacatagtaggcgctcaataaatatttgtttgtggaatgtc

SEQ ID NO: 552 - DNA, 1537 bp, Cricetulus griseus
gctgcttgttcttcctctgcagccgctccgcagtcgccgccgccatgagggagatcgtgcacctgcaggctgggcagtgcggcaaccagattggcgccaagttctgggaggtgatcagcgacgagcatggcattgatcccaccggsrcgtaccacggagatagcgacctccagctggagcgtatcaacgtgtactacaacgaggctaccggtggcaagtatgtgcctcgtgccgtgctcgtggacttggagcccggcaccatggactcagtgcgctccgggcccttcgggcagatcttcagaccagataacttcgtattcggtcagagtggggctgggaacaactgggccaaggggcactacacagaargcgcakagctggttgactcagtgttggacgttgtgaggaaggaagctgagagctgtgactgcctgcarggcttccakctgacccactccctgggtggggggactgggtctgggatgggtactctccttatcagcaagatccgagaggagtaccctgacagaatcatgaacaccttcagtgtggtaccttcccccaaggtgtcggacacagtggttgagccctacaatgccaccctttcagtacaccagcttgttgaaaacacagatgagacctattgcattgataacgaagcactctatgacatctgtttcagaaccctaaagctgaccacacccacttatggtgacctgaaccatctagtgtctgccaccatgagtggggtaaccacatgcctgcgattccctggccagctaaatgctgacctgagaaagctggctgtaaatatggtgcccttccctcgcttgcacttcttcatgcctggctttgctcccttgaccagccggggcagccagcagtaccgtgccctgacagttcctgagctcacccagcagatgtttgatgccaagaacatgatggctgcctgtgatccccgccatgggcgctacttgacagtggctgccgtgttccggggccgcatgtctatgaaggaggtggacgaacagatgcttaatgtccaaaacaagaacagcagctactttgttgagtggattcccaacaatgtgaaaacagctgtctgtgacattccaccycggggcctaaaaatgtctgccaccttcatcggcaacagcacggcaattcaggagctgttcaaacgcatctcagagcagttcacagccatgttccgacgcaaggccttcctgcactggtacacgggtgagggcatggatgagatggagttcaccgaggctgagagcaacatgaacgacctggtgtccgagtatcagcagtaccaagacgccacggctgaggaggagggagagtttgaggaggaggcagaagaggaggtggcctagagctgttttaagcagtctaaagcatgggagcagtgtgaactctttattcattcacagcctgtctgctagccatgtccactgtgcatttgctgtcctgtcctgacatcacttgtacagataccaccattaaagcaattcatagcaaaaaaaaaaaa

SEQ ID NO: 553 - DNA, 1777 bp, Cricetulus griseus
  misc_feature (70)..(85): n is a, c, g, or t
  misc_feature (1485)..(1513): n is a, c, g, or t
gagccagcgcccgagcgcagacgcgcccgccatgagggagattgtgcacattcaggcgggccagtgcggnnnnnnnnnnnnnnnnaagttttgggaagtgatcagcgatgagcacggcatcgaccaggccggaggctacgtgggcgactcagcgctgcatctggagcggatcagcgtctactacaatgagtcatcttctcagaagtatgtgcctagggctgcgctggtggacttggaacccggcactatggacagtgtgaggtctgggccttttgggcagctcttccggcctgacaacttsatcttcggacagacgggcgccgggaacaactgggccaagggycactacactgagggcgccgagctggtggactcagtgctggatgtgattcgcaaggagtgtgaacactgcgactgcctgcagggcttccagctcacccactcgttgggcggckgcacaggatcakgcatgggcaccctgctcatcagcaagatccgggaggagtacccggaccgcatcatgaacaccttcagcgtcrtgccgtcgcccawrgtctyakacaccgtggyggaaccttacaatgccacattgtcggtacaccagctggtagagaacactgacgagacctactgcatcgacaacgaggccctctacgacatctgcttccgcactctcaagctgaccacacccacgtacggggacctcaaccatctggtgtctgccaccatgagcggtgtcaccacatccctgcgttttcccggccagctcaacgctgacctgcgcaagttggctgtgaacatggtgcccttcccacgcctgcacttcttcatgcccggcttcgccccactcacagcccggggcagtcagcagtaccgtgccctgacagtgcccgagctcacacagcagatgttcgatgccaagaacatgatggctgcctgcgacccacgccacggccgctacctgaccgttgccaccgtctttaggggccccatgtccatgaaggaggtggacgagcagatgctggccatccagaacaagaatagcagctactttgtggagtggatccccaacaacgttaaagtggccgtgtgtgacatcccaccccggggcctgaagatggcttccaccttcattggcaatagcactgccatccaggagctattcaagcgcatctccgagcagttctcggccatgtttcgccgcaacgcttttctgcactggttcaccggcgagggcatggacgagatggagttcaccgaggctgagagtaacatgaacgacttggtgtctgagtaccagcagtatcaggacgccacggtcaacgacggggaagaagcttttgaagatgaggatgaagaagagatcaatgaatagggggcctttaagatgctatggtgcacacctgctcttagccctgatggtgtgagcacggtgccctggtctacacatcacaggcccctctcaaccaaatacacaccactgtnnnnnnnnnnnnnnnnnnnnnnnnnnnnnctttcctttaccagacaattgacagtcctaccagaccagggtgatttcatacaggaacactgaaagcaaagttagggggctgtaaaaggctgaagacagagaccaccttccgttaagtgcccagccatcagagttagcagggaagttagaataaagatttgtgtttcatccttggtgataaaatctaaagcaccgcattgttgccttaattgaatatacaatatggaactttgtgacaatccattcataataaaatgctaaacc

SEQ ID NO: 554 - DNA, 2206 bp, Cricetinae gen. sp.
  misc_feature (1853)..(1871): n is a, c, g, or t
gaattccgccggcttctcggcatggctcgccttgggttcggtctggtgagctgtaccttctttctggctgccagcggtctctattcctctagtgacgatgtcattgaattaacgccatcaaatttcaacagagaagttattcagagcaatagtctgtggcttgtagagttttatgctccatggtgtggtcattgccagaggttaacaccagaatggaagaaagcagccactgcattgaaagatgttgtcaaagtcggtgcagttgatgcagataagcatcagtccctgggaggtcagtatggtgtccagggattccctaccatcaagatattcggagctaacaaaaacaaaccagaagattatcagggtggcagaactggggaggccatcgtagatgctgccctcagtgctttgcgccagctcgtgaaggatcgccttagtgggcggagtggtgggtacagttctggaaaacagggcagaggtgatagttccagtaagaaggatgtgatagagctgactgacgacacctttgataagaatgtcctggatagtgacgatgtttggatggttgaattctatgctccatggtgtggacactgcaaaaacctggagccagaatgggccactgcagccacagaggtaaaggagcaaacgaaggggaaagtaaagctggcagccgtggacgctacggtgaaccaggtcctggccaaccggtatgggattagaggattccctacaatcaagatatttcagaaaggcgaggctcctgtggactatgatggtggacggacaagatcagacatagtgtcgagggccctggatctgttctcggataatgcccctcctccagagctgcttgagataatcaacgaagacgtggccaagaagatgtgtgaggagcaccagctctgtgtcgtggccgtgctgccccacatcctggacactggggccgcaggcaggaactcttacttggaaattcttctgaagctggctgacaaatacaagaagaagatgtgggggtggctgtggacagaagctggagctcaktctgagctggagaatgcactggggattggagggtttgggtaccctgccatggcasscatcaacgctcgcaaaatgaaatttgctcttctcaaagggtctttcagtgaacaaggcattaatgagtttctcagggaactgtcttttggacgtgcctccacagcacccgtgggaggtggttcctttcctgccatcactgccagggagccctgggatggtagagatggtgagcttcctgtggaggatgacattgacctcagcgatgtggaacttgatgacctggagaaggacgagttgtgaggccacagctcagccttccaatgtcttctcttgggagcgggcagttttccggcagtgaaggctctggtcagctgtctgcccttggcctttccgagcagcacttgctggctggccggccactaaaaacactgcagcagtgaacctcggcgtctcaagaaaacactgaagaattctatgaattgtagcagtgaattggattgcgttctttggtatattttgaagcaaggtgggttgttgaaacattttccctcctgactgctgcttgaatgttcttggaagctgtttcttatatatagggtttttaaaatgtgattcctttgtttgaatattaatggctttttccattaaagaataaaatgatattttggacaatgctgataaatgtatgaaattagtggcacatcataaaatcggagtctggtggttagcctgaaaactaaccctgtgcactgatgacaccacaccacggcttcctgtaaaagtgtttttaaatatgaagataagaccannnnnnnnnnnnnnnnnnnccattaaaggctagactcacaaccaaaaatgaagacagaccttttgacaagggtgtggttctgtgtggtaaacttggtaccgagggagaccacactcatgccccaaacaaagtcttggtcttcgggcttcaccagtgacaaggaggctcaggttttcaacattctcactgatttcccattaaacgtctcatgaagaccagagccccagtggattatccaagctattttcactttgtgtaaaacgctcaggagacagtttggagttatgttaggacaccagaaaagcctcagactgaggcattttattgtaacttaaaaaaataaatacactctaa

SEQ ID NO: 555 - DNA, 1527 bp, Cricetinae gen. sp.
  misc_feature (434)..(456): n is a, c, g, or t
  misc_feature (1121)..(1144): n is a, c, g, or t
tgggttcgggcctggctgtgggatgttagctgtgggggcgatggagggcccccggcagagcgcgtttctgctcagcagcccgcccctggccgccctgcacagcatggccgagatgaagaccccgctgtaccccgccacctacccccctctgcccaccgggcccccctcttcctcctcgtcctcctcgtcttcgtcgccctccccgcctttgggcgcccacaatccaggcggcttgaagcccccggccgcggggggcctctcgtcgctgagcagtcccccgcagcagctctcagccgccaccccgcacggcatcaacgacatcctgagtcggccctccatgccggtggcctcgggggccgccctcccttccgcctcgccctcggggtcgtcttcctcctcctcgtcgtccgcctccgccacctcggcctctgcgnnnnnnnnnnnnnnnnnnnnnnnggctgctgccgccgcctcgtcgcccgctgggctgctggccggcctgccccgcttcagcagcctgagcccgccgccaccgccgcccgggctctacttcagccccagcgctgcggccgtcgccgccgtgggccggtaccccaagcccctggccgagctgcctggccgggcgcccatcttctggcccggggtgatgcagagtccgccttggagggacgcacgcctggcctgtaccccccatcagggatccattttattggacaaagatgggaagagaaaacacacgagacccacgttctctggccaacagatcttcgccctggagaagaccttcgaacaaaccaagtacttggctgggccagagagagctcgcttagcctattctttggggatgacagagagtcaagtcaaggtctggttccagaaccgccggaccaagtggaggaagaagcacgcggctgagatggccaccgccaagaagaagcaggactcggagaccgagcggctcaaggggacttcggagaacgaggaggaggacgacgactacaacaagcccctggacccgaactctgacgacgagaaaatcacgcagctgctgaaaaagcacaagtcgagcagcggcggcctcctgctgcacgcgtccgaggccgagggctcgtcctgagcgnnnnnnnnnnnnnnnnnnnnnnnntgctgcgggatcccgggccgccccgaccgcgcccctcagccggtcacccccgggcccagcaccgcggctgctccccgggcctttactattttctaagatgtacatatctatttttttaacccagaaatcgtggcggggcctggggggataggacggcgcgttgacgagaaggaagggagcccgccgagtgcgccgcgttaaatgacgaacccgcatccccgcggctcccctggacccttcccacccgcggtgtcagtcaatccccacccccatccaggctcggtcccttgctctgtggtccctgagctccggggttcgtgtttgtgaagagtcgacagccagcgcctggtgggaatctccgagccacacagggcatctgccac

SEQ ID NO: 556 - DNA, 962 bp, Cricetinae gen. sp.
  misc_feature (95)..(109): n is a, c, g, or t
ctttttagaggsassagcttttaacaagagaaaccaagygrttgctgccatggcgggraagccagtccttcactacttygatggccggggmagannnnnnnnnnnnnnntggctcytggctgcagckggagtrgagtttgaagaraaatttctgaaaactcgggatgacttggsaaggttaagaaatgatgggagtttgrtgttccagcaagtgcccatggtggagattgacgggatgaagctggtgcagaccagagccattctcaactacattgcctccaaatacaacctctatgggaaggacatgaaggagagagccctcattgacatgtatgcrgaaggtatagcrgatctggatgaaatmgttctccatcaaccttatrttccccragaggagaaagaggcaaaccttgccaagatcaaggayaaagcaaggaaccgttacttccctgcctatgagaaggtgttraagrgccayggacaagattatctcgttggsaacaggctgagcagggctgatgtttacctggttgaacttctctaccatgtggaagagctggaycccagcgttttggccaacttccctctgctgaaggcactgagaaccagagtcagcaacctcccaacagtgaagaagtttcttcagcctggcagccagaggaaaccttacgaggacgagaaacgtgtagaatcagtaatgaagattttcagttaaatcaggcacagatagatggatagcagccaccaggtcaaccttcttaagcgtcgcaacaatgaagtgttttgattaaatgttgatcctgcttattgtgaggctaacatgttttctaagctttgagcattaattcaagtagtcatgacctgtgcagaattgctaggatgctattgtagtccaaattggaatcatgatcacttcctaggatgttcccttgaatttcaataaaatagaacaagcttcttag

SEQ ID NO: 557 - DNA, 1970 bp, Cricetulus sp.
  misc_feature (167)..(184): n is a, c, g, or t
  misc_feature (981)..(1038): n is a, c, g, or t
taagctgggcggtggggaagatggccacgctgcaggagtgtaaagtaaaagtggatggcgagccgaaactaagtaagaatgaactaaagagacgtctaaaagctgagaagaaattggcagagaaagaggccaagcagaaagagctcattgagaaacaactaagccannnnnnnnnnnnnnnnnncaccaaccacactgctgataatggcgtgggtgttgaggaggagactctggacccaaaccaatactacaagatccgtagtcaagcaatccaccagctgaaggtcagtggggaagacccttacccacacaagttccatgtggacatctcactcactcagttcatccaagaatacagtcaactgcaacctggggaccacctgactgacatcaccttaaaagtggcaggtcggatccatgctaagagagcgtctgggggaaagcttatcttctatgaccttcgaggagagggggtcaagttacaagttatggctaactcaaggaattataaatcagaggaagaatttgttcgtatcaataacaagctgcggcggggagatataattggagttcaagggaaccctgggaaaaccaagaagggtgagctgagcatcatcccctatgaaatcacgctcctgtctccctgcttgcatatgttgcctcatcttcactttggcctcaaagacaaggagacaaggtatcgtcagaggtacttggacttgatattgaatgactttgkgwsgcaraaawttattgtscgagctaagatcatcacatatataaraagtttcttggatgagctgggatttctagagattgaaactcccatgatgaacatcattccaggaggagctgtggccaagcctttcatcacctatsacaatgagttggacatgaacttatatatgagaatkgctccagaactctaccataagatgctggggggggggggcattgaccgagtttatgaaattggacgcnnnnnnnnnnnnnnnnnnnnnnnnnnnnnnnnnnnnnnnnnnnnnnnnnnnnnnnnnntctacatggcttatgcagactatcacgacctcatggagatcacagagaagatgctgtcaggaatggtgaaaagcattacaggtagktacaagatcacctaccacccagatgggccmgaaggtgaagcctatgagattgatttcaccccacctttccgaagaatcagcatggtagaagagcttgagaaagcactgggtgtgaagctgccagagaccagcctctttgaaactgaagaaactcgaaaaattcttgatgatatttgtgttgcaaaagctgttgaatgccccccacctcggaccacagccaggctccttgataagcttgttggtgagttcctcgaagtgacatgcatcaatcctacattcatctgcgatcacccacagattatgagccctctggccaaatggcaccgctccaaagagggtctaactgaacgctttgagctgtttgtcatgaagaaggaaatctgcaatgcctacactgagctgaatgatcccatgcggcagcgacagctgtttgaagaacaggccaaggccaaggctgctggtgatgatgaagccatgttcatagatgagaacttctgtactgccctggaatatggactgcccccaacagctggctggggcatgggtatcgaccgagtcaccatgtttctcacagattccaacaatatcaaggaagtacttctgtttcctgccatgaagcctgaagacaagaaggaaactgcagcagccactgaaacactagaaagcacaacagccggcccctctgtctagaagataaatgaaactctggcttctctgcatttcagcagacctggtctaagtgttgccatccctctggccactgcaattcaaccaccagaagagagaagaattaaaggatttctttttattccttattaccaaataaaccatttctctctttaccta

SEQ ID NO: 558 - DNA, 1049 bp, Cricetulus griseus
gtgtctcccaggaagagcactgtatactggcatagcgacatggcgcctccggctcccggcgcggcctctggcggctccggagaggtagacgagctgttcgatgtgaagaacgctttctacatcggcagctaccagcagtgcatcaacgaggcgcagcgagtgaagctgtccagtcccgacagggaagtggagagggatgtctttctgtatagagcatacatcgcacagaggaagtatggtgtggtcctggacgagatcaagccctcctcggccccagagctccaggctgtgcgcatgtttgctgactaccttgccactgagaaccggagggatgccatcgtggtggagctggaccgtgagatgagcaggagtgtggatgtgaccaataccactttcctgctcatggctgcctctgtctacttccatgaccaaaacccakatgcagccctgcgcaccctgcaccagggcgacagcctcgagtgcatggccatgacgattcagatcctcctcaagctggacaggctggacctagcccggaaggagctgaagaagatgcaggaccaagatgaggatgccactctcacccakctagccactgcctgggtcaacctggctgtgggtggtgagaagctgcaagaagcctactacatcttccaggagctggctgacaagtgctctcccacgctgctgctgctcaatggccaggcagcctgccactcagcgcaaggccgctgggagactgccgagggtgtgctgcaggakgcactggacaaggacagtggccaccccgagaccctcatcaacctcattgtactgtcacagcacctaggcaagccccctgaggtgacaaaccgatacctgtcacagctgaaggatgcacacaggacccatcccttcatcaaggagtatcaggccaaggagaacgactttgaccgccttgcactgcaatatgcgcccagcgcctgaggtggagatacccctggtgaccccagcttcgtgccagacgtcgtcctcacttccttgtctgtcaataaagtctgtccatcttc

SEQ ID NO: 559 - DNA, 1689 bp, Cricetulus sp.
  misc_feature (770)..(799): n is a, c, g, or t
  misc_feature (1581)..(1635): n is a, c, g, or t
ctcctcttcctcacatctgagcctcttgatcctaccgtgttgccaaaatgtcgctttctaacaagctgactttggacaagctggacgtgaaggggaagcgggtcgtgatgagggtggacttcaatgttcctatgaagaacaatcagataacaaataaccaaaggatcaaggctgctgtcccaagcatcaaattctgcttggacaatggagccaagtcagttgtccttatgagccacttgggccggcctgatggtgttcccatgcctgacaagtactccttagagccagttgctgcagaactcaaatctctgctgggcaaggatgttctgttcttgaaggactgtgtgggcccagaagtagagaatgcctgtgccaacccagcagctggcactgtcatcctgctggagaacctccgctttcatgtagaggargaagggaagggaaaagatgcttctggcaacaagattaaagctgagccagccaaaatcgatgctttcagagcctcactatccaaacttggggatgtctatgtcaatgatgcttttggaactgcacaccgagcccacagctccatggtgggtgtgaatctgccacagaaggctggtggatttttgatgaagaargagctgaactactttgccaaagctttggagagtcctgaacgccccttcctggctatcttgggaggagctaaagttgcagacaagatccagctgatcaataatatgctggacaaagtcaatgagatgatcattggtggtggaatggcnnnnnnnnnnnnnnnnnnnnnnnnnnnnnnggagattggaacttctctgtatgatgaagaaggggccaagattgtcaaagatctcatggccaaagccgagaaaaatggtgtgaagattaccttgcctgttgactttgtcactgctgacaaatttgatgagaatgccaagactggccaagctactgtggcctctggtatacctgctggctggatgggcttggactgtggtactgagagcagcaagaaatatgctgaggctgtggctcgagctaagcagattgtttggaatggacctgttggggtttttgaatgggaagcttttgcaaggggaaccaagtccctcatggatgaggtggtaaaagccacttctaggggttgcatcactatcataggtggtggagacactgccacttgctgtgccaaatggaatacagaggataaagtcagccatgtcagcactgggggtggtgccagtctagagctcctggaaggtaaagtccttcctggggtggatgctctcagcaatgtttagtattttcctgccttttggttcctgtgcacagccagcctctaagtcaacttagtgtgtttccacatctccatttggtgtcagctagtggcggagatgcagcaccaggaacccttaaacagttgcacagcatcttaggctcgtctttactgcatcgggatttgtctacattcttcaagatcccattttaatcccttagtggctaagtgcattctagagtgcatctatttatattctgcctgaaaagaaagtgagctataaaagcttagttctctttgagtannnnnnnnnnnnnnnnnnnnnnnnnnnnnnnnnnnnnnnnnnnnnnnnnnnnnnncagctgtaggtttggagaagttgatgctctattaataaagatgtccactgacaa

SEQ ID NO: 560 - DNA, 3775 bp, Mesocricetus auratus
  misc_feature (538)..(863): n is a, c, g, or t
  misc_feature (1165)..(1293): n is a, c, g, or t
  misc_feature (1559)..(1580): n is a, c, g, or t
  misc_feature (1789)..(1830): n is a, c, g, or t
  misc_feature (2371)..(2405): n is a, c, g, or t
  misc_feature (2787)..(3006): n is a, c, g, or t
  misc_feature (3149)..(3497): n is a, c, g, or t
aagcttgcttcttcaaacacggtattttacaagttgagaagtcaagaggaggatgccacggcagctcacccgctcccagcgccaaaaagtaccaaggagcagaaccacagatctccaactccgtggtggatagagagggtggagagagggggttggtctaaagcccttcctccccctccgtccgtgcggatgctacttacgtttttgtggtagggagacctttccttgccttgtctgtaggctcctaaatgcatttgtatgcatttgtccctgcggcaaagcactaacggaagcagaagccagctccgaactgctaaaagtgcaggtactgtccatgaaaaggggggaaagtcacatgaaaaccatcgtccgacccgtaaaatgggggggtggggcggggtaggaggatgaagcggtgtaggggtaggaagcggcacccagcggggaagagagctaagatgctccgtgcctttgctgtctcggggtcgcgctcccctgggtaccagaggtgagcgagacttcaccctgacagcggggnnnnnnnnnnnnnnnnnnnnnnnnnnnnnnnnnnnnnnnnnnnnnnnnnnnnnnnnnnnnnnnnnnnnnnnnnnnnnnnnnnnnnnnnnnnnnnnnnnnnnnnnnnnnnnnnnnnnnnnnnnnnnnnnnnnnnnnnnnnnnnnnnnnnnnnnnnnnnnnnnnnnnnnnnnnnnnnnnnnnnnnnnnnnnnnnnnnnnnnnnnnnnnnnnnnnnnnnnnnnnnnnnnnnnnnnnnnnnnnnnnnnnnnnnnnnnnnnnnnnnnnnnnnnnnnnnnnnnnnnnnnnnnnnnnnnnnnnnnnnnnnnnnnnnnnnnnnnnnnnnnnnnncttcatttggtgaccccgacgtgatagttagggaatagtggtcggccacagacggcgtggcgatcctgccctcatccgtctcgcttattcggggagcggacgatgaccctagtagagggggctgcggcttaggagggcagaagctgagtggcgtcggagggagctctactgcagggagcccagataccctaccgagaactcagagagtcgttggaagacgggaaggaagcccgacgactgagcagtccaccccaggcgtgattctggtcgcccggtggatcaagcatggaagccgtcataannnnnnnnnnnnnnnnnnnnnnnnnnnnnnnnnnnnnnnnnnnnnnnnnnnnnnnnnnnnnnnnnnnnnnnnnnnnnnnnnnnnnnnnnnnnnnnnnnnnnnnnnnnnnnnnnnnnnnnnnnnnnnnnntggagccacccgacagcacccaccacgggggattcccagcctcgcagacccccgacgagacagcagcccccgacgcacaccgcaaccccagccgctccttcgggaccgtggccaccgagcccaagctcttctggggcttcaacacttctgacaccgtcacgtcgccgcagcgtgccggggcactggctggcggcgtcaccactttcgtggctctctacgactacgagtcctggactgaaacggacttgtccttcaagaaaggagannnnnnnnnnnnnnnnnnnnnnacggaaggtgactggtggctggctcattccctcactacaggacagacgggctacatccccagtaactatgtcgcgccctcagactccatccaggctgaagagtggtactttgggaagatcactcgtcgggagtccgagcggctgctgcttaaccccgaaaacccccggggaaccttcttggtccggaagagcgagacggcaaagggtgnnnnnnnnnnnnnnnnnnnnnnnnnnnnnnnnnnnnnnnnnnccaatgtgaagcactacaagatctgcaagctgtacagcggcggcttctacatcacctcacgcacacagttcggcagcctacagcagctggtggcctactactccaaacatgctgatggcttgtgccaccgcctgaccaacgtctgccccacgtccaagccccagacccagggactcgccaaggacgcgtgggaaatcccccgggagtcgctacggctggaggcgaagctggggcagggctgctttggagaggtctggatggggacctggaacggcaccaccagagtggccataaagactctgaagcccggcaccatgtccccggaggccttcctacaggaagcccaagtgatgaagaagctccggcatgagaagctggttcagctgtacgcagtggtgtcggaagagcccatctacatcgtcattgagtacatgagcaaggggagcctcctggatttcctgaagggagagatgggcaagtacctgcggctgccacagctcgtcgatatggctgctcagattgcatccggcatggcctatgnnnnnnnnnnnnnnnnnnnnnnnnnnnnnnnnnnngcggccaacatcctggtgggggagaacctggtgtgcaaggtggctgacttcgggctggcacgcctcatcgaggacaacgagtacacagcacggcaaggtgccaagttccccatcaagtggacagcccccgaggcagccctctatggccggttcaccatcaagtcggatgtctggtccttcggcatcctgctgactgagctgaccaccaagggccgggtgccatacccagggatggtcaacagggaggtgctggaccaggtggagagggsgtaccgcatgccctgcccgcccgagtgccccgagtcgctgcatgacctcatgtgccagtgctggcggaaggaccctgaggagcggcccacctttaagtacctgcaggcccagnnnnnnnnnnnnnnnnnnnnnnnnnnnnnnnnnnnnnnnnnnnnnnnnnnnnnnnnnnnnnnnnnnnnnnnnnnnnnnnnnnnnnnnnnnnnnnnnnnnnnnnnnnnnnnnnnnnnnnnnnnnnnnnnnnnnnnnnnnnnnnnnnnnnnnnnnnnnnnnnnnnnnnnnnnnnnnnnnnnnnnnnnnnnnnnnnnnnnnnnnnnnnnnnnnnnnnnnnnnnattctgcttggaatatgatggcgtcttccctgttttgcccttagactattcaagttgcctctgtggattagggctggaggcagcacggatagtctgatggccaaataaggcaggcaagacagctatttgtaactgcgaaatannnnnnnnnnnnnnnnnnnnnnnnnnnnnnnnnnnnnnnnnnnnnnnnnnnnnnnnnnnnnnnnnnnnnnnnnnnnnnnnnnnnnnnnnnnnnnnnnnnnnnnnnnnnnnnnnnnnnnnnnnnnnnnnnnnnnnnnnnnnnnnnnnnnnnnnnnnnnnnnnnnnnnnnnnnnnnnnnnnnnnnnnnnnnnnnnnnnnnnnnnnnnnnnnnnnnnnnnnnnnnnnnnnnnnnnnnnnnnnnnnnnnnnnnnnnnnnnnnnnnnnnnnnnnnnnnnnnnnnnnnnnnnnnnnnnnnnnnnnnnnnnnnnnnnnnnnnnnnnnnnnnnnnnnnnnnnnnnnnnnnnnnnnnncttcagcggggccagcagcaacagcgagcaggtcggagcgcagccctggagttcacttgcggttcaaaggagactcagtgactcccgtggagcgctctgctttgggcctgggaggagaaaggcggggtggagggtggagggtgggggtgggaagaagggaggtgaaggagtaggggaggaagtccccaggagcagcctgcgcccaaacatttgtcaaacaagcacacacacccacttgggaaatcaagttggtgcgagggggctggtggccactgcag

SEQ ID NO: 561 - DNA, 5102 bp, Mesocricetus auratus
  misc_feature (758)..(792): n is a, c, g, or t
  misc_feature (3925)..(3979): n is a, c, g, or t
tccatacagcccacaaaatcctctggaagcatacaatctagactgggctctgagacccaaaaataactagaacataacagcttgtgctgacttgaaggctgaataagaatatctggaacttctcatctatcgaacaagctcgtctcggggataaaaattagatgctcaatgtgagcatcacctgctatagtcacatccagtctggggccaaagcctagaccctcaccgtgctgagctacaagaatgggatttataccaggccatgcttcaggaggttgttggagacctggggagtcataggcgtggcattcccagcagacatcagtacatataaggcattgttgttgttattgttgtgagttttactgtcccttgggcgtgttcaaatgaccattgcacagtcatgggaggttcccactctatgactaaggacattgggggttagggaggtaaaggacatgctttttagcaactctttgtgaccagccctgggcaggaccagggctcctaacccagtgctcagtttccagggttaaagctgtggctacaaatctagtgctctgtttctagggtttgcattccagaaggctcagtcctgtgagaggcgtatagagggcagggaaggtgaggagccacagaaatctgcatggagaaatacagatgcctttgggctcagtgagtgccctgtgctgagtgggagagaagggcaaacccacttcagggcttctctgttggggttctggagtgactgaagtttnnnnnnnnnnnnnnnnnnnnnnnnnnnnnnnnnnncttgcttggcacgtacatctcctcaggtgcctgggccccaatccccagaatctctctcctgtaccttgcttccctggttcatgcattcatcctcctctataaataccagctctggtattcgacttggcagctgttgctgccaggggatggctgggttgacacacagctcctgacaaaacacaaacccctggtgtgagtgggtgtgggcggtgtgagtagggggtgaatcagagaagggggcgagggagacagggcttgcaatgtcaggcgaaggcaatgttccccacggttgcaaacagtcaccagagtctttctggacattgtcttgctggttataaacttgagggaaaccagaggcctgcactccgccagagggaaattgaggttcagagctagagcccacttgtcagtggtacgcataagcagtcaggcactgaccaggctaactctctgcctaattcgtgtccccctaccctacaggtctgtctagagacctctttgatgagctagtagactcctgtctggtctttacctccagtggttggagacctcagcctcttctagcaacctttgcaagtaaaatacttgggagtttccttcttgttcattctaatgacctaaaaatctctccttgaagaagatagcggcctcaaactaatgaaaatctccagcctgctttccccaggataaggcaggattccaaatgtaaagaggccggtctggggtctcctgtcagctagctgcccatccagcaggcctgcttgtcttctgttcttgtggggcagcatggggcacaggcctcttgcaggggagctggcctccccgccccctcgctagcggccgccctttcctggcaggacagagggatcctgcagctgtcaggggaggggctgcggtggggggtgatgtcaggagggctacaaatagtgccgacggcaaagggactgtgtctcccctcttcgtatccactctccagccggctgcctgcccgctgcctcctctgtgcgtctgcccagcctcgtccacgccgccaccatgagtcaggcctactcttccagccagcgggtgtcctcctaccgccgcaccttcggtggtgccccgagcttctcgctgggctctccgttgagctctcccgtgtttcctcgagcaggcttcggcaccaagggctcctcgagctcagtgacatcccgcgtgtaccaggtgtcgcgcacgtcgggcggggccgggggtctggggtcgctgcgggccagccggctggggagcacccgcgcgccatcctatggcgcgggcgagcttctggacttctcgctggccgacgcggtgaaccaggagttcctggccacgcgcaccaacgagaaggtggagctgcaagagctcaatgaccgcttcgccaactacatcgagaaagtgcgcttcttggagcagcagaacgccgcgctcgccgctgaggtcaaccggctcaagggccgcgagccgacccgggtcgccgagctctatgaggaggagatgcgcgagctgcggcgccaggtggaggtgctcaccaaccagcgtgcccgtgtcgacgtggagcgcgacaacttgatcgacgacctccagaggctcaaggccaagtgagggcacggcgcctcctagatctttccccttcgccccctccccccctccccgcagggaacaaggcaccccctccgggatcccgtgaccctcctcaccccatgtttggaggtcattccccggtgttccctaagaagagatggtccccgaatctttttattgctctttctgtgttacactggagtagttttctttgggagatagagagaagaaacgggggaccttgggaggcctattgcacggtggccagccacttggaaaggatgctaattaagttgctgtagcggtggtgctgtgatgtgacagaggcagagcagagggctagagcaggtcagagcgtgaagagaggctggtggagcctggaaaactggatgcattgggaagtggaggaggaaggaaaccaaactgtaactaactttcagctcagctgtgatgaggcccgagggaggggtgaggtggggagcttggccccttggcctagctgaggtgtgctactgcactaggtaaaaggataggcttgagtaaagggggcagtggataaggcctgtggccctttgagagctcaagaagaccagcccattccaccatgacccaataagaaaaggctgagtaattccggtctgggggcacacccctgtattccagctcttgggaggacgattcaggaggactgctgtgagttctaggtaaacctgggatacagagcaagtaccaaggcagctgggcctacatagcaagacttgttttagacaattaaggaaaattaaaggcaggaaaagttttgtacattctcgaacctgtttctgtttaccctactgagcagagttaccttcttgtctccaaagtcacaaacatttatttagccgctacatgggtcaggctgggcctgagaacatacaagtgggtaaaataaaacacagtgcctaaccccggggaggtcaatctatttgggacatagacttcaagggtgcggctcagggttgagactcagccgcttcctaccccgccccccacccgtgggcgggacctttgctattttttttctgagcctcttgtttctacccagcaaccaggacttgtccctgtgtcctgagctggctccctgataggtccccagccagtggtttctattgatggctctgtagctcaccatttgtctgtctgtctgccctggctaggctacaggaggaaatccaactgagagaagaagcagagaacaacctggctgccttccgagcggtgagccttctttggtccccagcagtcatctctcttctctctcttggctccacttgaactgttccagaccctaacattgttgtttccccgtacccaggacgtagatgcagccactctggctcgcatcgacctagagcgcagaatcgaatcgctcaacgaggaaatcgcattcctgaagaaagtgcacgaagaggtaccagggcccttgggtgatggtgaaagcagctaggcaatgggctggctttgaaatgggggtgtgaaggtgctttgggagggtcttgannnnnnnnnnnnnnnnnnnnnnnnnnnnnnnnnnnnnnnnnnnnnnnnnnnnnnnttcaggaacagcaggtccaggtggagatggacatgtccaagccagacctcacagcggccctcagggacatccgggctcagtacgagaccattgcggctaagaacatctctgaagctgaggagtggtacaagtccaaggtaggtggtttagcctggggaccctggcacctgtcctctatctccacgagatgcttcctgtacctgcatccatggagtaggtgagcctgggatttccacactccctcgcccacactgaatcctgcttttccccatctcagagtccctttctctgccctcaggtttcagacttgacccaggcagccaataagaacaatgatgccctgcgccaggccaagcaggagatgatggagtaccgacaccagatccagtcctacacctgcgagattgatgccctcaagggcaccgtgagtccctccccatccccacggctcagcctctttctgcccacagcttagttccacaccttcactctgtgacactttgagcctattacagaccctctggggtctccatctcctcaaatgtacagggaggtaaaggcagattcctagttaggtactaaggaatcggaggactcctgggggtgtctccctatgtagggttggaggactagtgtagatgctccttattaggtggtttattgtgagtggccacatatgccttctctagagctcagggctccatgactaagaaagaagcacttgacgattcttctacctggccatgaccatgtggagttgcctccaacctccaacactgggtctctttctaccccaattctctggcgccctccttcctagatatgctctgggcctatccttgacttgggtcccctcatcccctgcagaatgactccctgatgaggcagatgagagagctggaggatcgctttgccagcgaggccagtggctatcaggataacattgcacgcctggaggaggagatccggcacctgaaggatgagatggcccgccacctgcgggagtaccaagacctgctcaatgtgaagatggccttggatgtggagattgccacctaccgcaagctgctggagggcgaggagagccggtgaggatttaggtatcgggtagggtgctgggatc

SEQ ID NO: 562 - DNA, 3155 bp, Cricetulus sp.
  misc_feature (771)..(823): n is a, c, g, or t
  misc_feature (3074)..(3091): n is a, c, g, or t
ttttcccttcagccaggtgcgcatactctacctgactcatgttcattcatcaatgaacactataacacccggtatggggatgtgtgaggaaaaggattagtaggacatctcttgctgcatgggctctggctctgtgatgctcacttggtctctctggctcttgttacagggcattgacttctgccccggtcagaatgtctcaggagtcacaacccatacccaggaagaacacacggagctacccctgatctttcacctgggacgtgacccaggggagagattcccactcaggtgaggcaggggtagggtctccatgctccagacactggccagacaggcaaaggtgagaaccagatctgagtggtctgtcttccatggagttactcctctggtctcagagggaatgtatgcctctttgaggacatgaactacacagagggatcccagaaacctccacctccaccttgggccatggttgctttgctctctggaagctctcttctcgctttcctttcctggttacttctcatctctgccccttctaggaccagtcccagcaatgggtcctatactctgagctaccttcagggcatgagtgagggatccaggcttaggatacatctatctgtactaactagccctgggactgacaggagggaaagattgagagtagaaatgttcaggacatgatcctagattctagagtaaagtgcttcaggtgacagccagcatcgtggagctgagggttgcctgctggtcccactggcagannnnnnnnnnnnnnnnnnnnnnnnnnnnnnnnnnnnnnnnnnnnnnnnnnnnntgagttaaatggccactgtagggttcaaagatacccctcctactttcccctattcacagtgaagatcacacgtcactgcacacacagtgactggaatcacatccaccaaactccaaatctactacggctcctcagccaactctggcccagttcactctggctctccctgggaggctaacacagctcccttagcaggatggtaggtgccttaggtcctggattacaagtcctgtgtcctatagcattcctgccaggttggaaaacacagccttctgctcagtgacaggccatggcttgctaatcagagattataaaacagaggactttaatacaccataaggatcactaaggctgttcctacatcttgtgtggtagttgtatgtctccagcacctcggaaggcaaccttttagaaattgggtcttgtagatattgttaaggtcaagatagcaatgaggttagcctggatagtggtggggcattattctgaaagaagaggggagagacatcaagggggaaagtctgcttaaggacaaggcagagataagccaaggggttggaccaggcagaaaggtacctctcaggttctctagagggagtgtggccctgtagtgtccaacttcaaccctctagcctccaaactgcggctgtgtggagcctcttttcctttctctcaagcagagactggtatttcctcaaggcccactagcggataaatgtcacaaaccacaaggagctctgttgataataagggagggtggagctgcagggttgtttggctctcctaaaagatatgtgtcttgattgatcaccactggcctcctgccctcaggatcaacccaagggccacagtgtcttacagtggtgcccctgcttcattttcccacatcaagtttatgctcagtttgggcccttgcgggaatttttcattctgagatgcttcttctcaaggcctgttcacttcctaaaggtaagccctacctaccagactcagtgaaggctgcacaattctaccacctgcagcagctgcccagccctgtcccaaagccacctcctggcccaagggcatgactctctcaagacagggcataaggaaagccagaggtgaattttggagagaatgtccccatggcagactctctatggttttacctgccttgctgcttttctgcattgagcctcttgaaaagcaagatgatagtcacagactgggagccttgggacaaagtccttagcactagctggccatgggacaacagatgtatttggccacagtacctgcagggattttggaatgcccaggacttggaattaacaacaagccatgaacagggcagcacacaagaagtatagggaggtaccatacaagggctggaggttatgggtataggcaagcctctgaagatccaaacccataaggaattcaccctgtggccctgtcatgttgtgtgtctcaagatactccatctgtgtggacagaaaactctgatgctagaagttggactagaacataactgagtcccaggagcctaagtcctcttcctaggaggcagctgtgctggaagaggccctgctatcatcagggagcagtcaaacccagtacaacgttggagtacagcctaagcctctgaagtccctcaggccccttggggtcacagtgatggttggggtacctgaagggtaggaagcatatggtcatcttctcaccagccatcctgagacattaagaaatatgaggacttgtttcacatgcagaattctctctgcccacagtttgtcaaagcttgagttacagatatctgagatttgtctgcaccctgcatgtacacagccctaggtctgcctctttactccatgtgggcatatcagtggtgtgtgttgtgtggagccattcatcacacagtgagtgtgctatggcttgcttcacactcagctaaaggctccctgacagtccagcagatggttatggcgcaggtgtttggatggaccttgtttgaatggtcaggtgagagggcaatgtacagaagggataggataagacacagactggatatatagctcagtgtagagtagttgcctagtgcttccatccctagcacctcccaaaaagaaaaataaatgtaattgatcttatctgggagggaaatttagcattacatttttatttatttattagagacagggtctcagtagtgtgccctgtcctggaactcatgatgtaaacaaggctggcctcaaactcacagagacannnnnnnnnnnnnnnnnnttggctataaaggtgtgtagccaccatgctcccccttcagcattaacctttgaggaaccaccag

SEQ ID NO: 563 - DNA, 1665 bp, Cricetinae gen. sp.
  misc_feature (693)..(712): n is a, c, g, or t
  misc_feature (1019)..(1037): n is a, c, g, or t
ggcacgagggcggcagcagctcccgcggctcctgctctgctccgcctcggccccggagcgaggggggagagcgcgcgcttgccttagtccgagccgccaccctccccgttccccgctttcccggcccgcccgaggccgcccgccccgtccccgccgccccgcagcccggccgcgccccgtcgccgccatgggctgcctcggcracagtaagaccgaggaccagcgcaacgaggagaaggcgcagcgcgaggccaacaaaaagatcgagaagcagctgcagaaggacaagcaggtctaccgggccacgcaccgcctgctgctgctgggtgctggagagtctggcaaaagcaccattgtgaagcagatgmggattctgcatgtwaatggktttaacggagagggcggcgaagaggacccgcaggcygcaaggagcaacagcgatggygagaaggccaccaargtgcaggacatcaaaaacaacctgaaggaggccattgaaaccatcgtggccgccatgagcaacctggtgccccctgtggagctggccaaccctgagaatcagttccgygtggactacattctgagcgtgatgaacgtgcccaacttygacttcccacctgaattctacgagcacgccaaggctctgtgggaggacgarggrgtgcgygcctgctaygarcgctccaatgagtnnnnnnnnnnnnnnnnnnnncagtacttcctggacaagattgacgtgatcaagcaggcygactaygtgccaagcgaccaggacctgcttcgctgccgcgtcctgacctctggratcttygagaccaagttccaggtggacaaagtcaacttccacatgttcgatgtgggcggccagcgcgatgarcgccgcaagtggatycartgcttcaatgaygtgactgccatcatcttcgtggtggccagcagcagctacaacatggtcattcgggaggacaaccagaccaaccgyctgcaggaggcyctgaacctcttcaagagcatctggnnnnnnnnnnnnnnnnnnnccatctctgtgatcctgttcctcaacaagcaggacctgcttgctgaraaagtcctcgctgggaaatcgaagattgaggactactttccagagttcgctcgctacacmactcctgargatgcgactcccgagcccggagaggacccacgcgtgacccgggccaagtacttcattcgagatgagtttctgagaatcagcactgcyagcggagacgggcgccactactgctaccctcacttyacctgtgccgtggacactgagaacatccgccgcgtcttcaacgactgccgtgacatcatccakcgcatgcacctccgccaatacgagctgctctaagaagggaacacccaaatttaattcagccttaagcacaatyaattaagagtgaaacgyrattgaaaagcrgttgatcacccaccatagggcatgatcaacaatgcaacctttccttcttctccccagtgattctgaaaaccccctcttccccttcagcttgctttgatgtttccaaatttagtaagcttaaggcggcctacaaaagaaaaaaaaagaataagaaataggccacaaaagttccctctcactttcagtaagtaaaataaaagcagcaacaaacagaaataaatgaa

SEQ ID NO: 564 - DNA, 1501 bp, Cricetinae gen. sp.
  misc_feature (942)..(962): n is a, c, g, or t
ttacctcaccgctttctcgtgcctcggcgcctcctctgcgggcttcctcctcacaccgctcttcgctcccgccagccgaccgattccgtcatggcgacccgcagccccagcgtcgtgattagtgatgatgaaccaggctatgacctagatttattttgtattcctaatcactatgtcgaggatttggrraaskygtytattcckcatgrwktkattwtkgwcaggactgaaagacttgcyygmgatgtcatgrwagagatgggaggccatcacattatggccctctgtgtgctgaaggggtgctataaattctttkctrryctgctggattacattaaagcactgaatagaaatwgtgatagatccaytcccatractgtagattttatcagactgaagagctactgtaabkatmmktcawcakrggaywtaaaarwtawkgrtsskrrtkwtvtmtswaytttwactggaaagaatgtcttgattgttgargryawaaytgacaytggtawracaatrcaaactytgctttccytkgtcaarcrgtacaaccycaaaatgkttaagrttgcaarcttgytggtgaaaaggacctctcgaagtgttggataycttgtttggtaggaaccagacaattctctaatgttgctcttacctctcagaatatatkwytmtaatgwgwrcttcwkkswtttgmakcatatttgtgtcattagtgaaactgggaaagccaaatacaaagcctaagatgagagttcaagttgaatctgcaaacacgaggagtcccattcatgttcccagtaaaattaccaagcattctagttctgcagccatctgcttagtacagctttttgcatgaaccttctaagaattttatggttttttatttttagaaatgtcagttgctgcattcttaaactttttatttgcactatgagcctnnnnnnnnnnnnnnnnnnnnntgtgagcaaagtaaatctcttaaattaccactattaaaaatgctgagattgtatctgtaagaaacatttaaagaggagatatattagttttttaattggtattttaatttttatatattcgggaaagaaagctgtgattgaatattgttaattataccaccatgtgtttagaacagtgtgaagcactcagtttcatgtcagtaaccatctaagaagttttgctcagtggaataaacatatgttttatcagtgttgcctatattttcccacttggattctttcagtgagtcattgtcaacagttcctttaaatgcaaataaattctaaaaatttaccacttttttgagttttttaatgtaaaatttcttaaacttaaggactgtctcttatagaactctgcatgccaatcatttccctataaattaacttggtaaccctcaccaaatatcgcaagtaatggttatctggtagaatggtttggcagaactaggaaggctcctgtctacttgagacagtactatttactacatttctctgtt

SEQ ID NO: 565 - DNA, 2933 bp, Cricetulus griseus
  misc_feature (864)..(1369): n is a, c, g, or t
  misc_feature (2576)..(2655): n is a, c, g, or t
acacacacagaaccatgcctgtcatttctgtggtcacagtaccatgttgtataatgcaacaattcagattttcttagatgtatttaagtgtgtttattagttattattacttatatttaagtaaactctttactaaacacatgcatcagtcctattccagatacagaagatagctagaaaaatggatgtatgtgaagatacacccacacagacatatatgtatttcactcataaattgtccttgtgggctaggcataataattaatatatgcctgtaatcttagcccttgggcggcaggaggaactgtagttcaaagccaatttggattatatacaaaaccatatctgaaaacaaccacaaaaatattgcttttgtctctgccagcagtggagctgggggcgtgggcctatatgagtagatttcagctgtagacaaatgttaaggccataccagacacaagggagtctctcaagaaaactctttaaagggaagctccatcaagagcaaaggtaggctgtgggattccaagccctgcacagctccccaggtctgaacttaattaaaacagggcctgacagcgaatctaaagttgctcaaaatcgggaacaatgcagtccttggataccacctaaaatgatcccactggagggaagacatctccagtttttaaaaccgctatcttggagtagagccgataggttaaggtgtgtgaccccagtcctgtacaatgtgcctagacttctccggagtggggaaatgaatgtgttaagatgagatgcgttggccctgttgctgtgtccaggaggaagagtcccaaggattgtgatgggacagagatagcaaatgaggacggggaaagtacnnnnnnnnnnnnnnnnnnnnnnnnnnnnnnnnnnnnnnnnnnnnnnnnnnnnnnnnnnnnnnnnnnnnnnnnnnnnnnnnnnnnnnnnnnnnnnnnnnnnnnnnnnnnnnnnnnnnnnnnnnnnnnnnnnnnnnnnnnnnnnnnnnnnnnnnnnnnnnnnnnnnnnnnnnnnnnnnnnnnnnnnnnnnnnnnnnnnnnnnnnnnnnnnnnnnnnnnnnnnnnnnnnnnnnnnnnnnnnnnnnnnnnnnnnnnnnnnnnnnnnnnnnnnnnnnnnnnnnnnnnnnnnnnnnnnnnnnnnnnnnnnnnnnnnnnnnnnnnnnnnnnnnnnnnnnnnnnnnnnnnnnnnnnnnnnnnnnnnnnnnnnnnnnnnnnnnnnnnnnnnnnnnnnnnnnnnnnnnnnnnnnnnnnnnnnnnnnnnnnnnnnnnnnnnnnnnnnnnnnnnnnnnnnnnnnnnnnnnnnnnnnnnnnnnnnnnnnnnnnnnnnnnnnnnnnnnnnnnnnnnnnnnagatctggaaatggaccccaactgctcctgctccaccggtaagagaatacccagttaggaccgcagagrcattcccgcagttgtagaggatgtagtgtagaatcttcgcgggaataatgccttcgttggggattcattctagttctttttagcgtccccctttgcaagcacctccatctattcttgcagtattaatattgtccgaacggatcctttgtcggggttgagggcagtatttaggcgcacaaatgtcccgctcctgatcamccaggtagtgaggacatctgggtcgagctccaggcactactaaacttttatgaattgcctagactaggagagaagtgagggacttctgtgtcttggaccaaagaccaagccctaccctaccccgtgagaagtgggggctaggcttcctggaatcctgagcaggatttagtgaactgagctcggcacgtgtgtgggcactgtgatcttgcaagtctctctactgtcttctttctcctccgcaggcagcacctgcacctgctccagttcctgtggctgcaaagactgcaagtgcacctcctgcaagaagagtgagtgtggagggatacctggggtggtggctaaggtttggcgggaacacccacagggcccgacagatcccagggccctcccttgtaacgtgtcaggccagagctgttctaagacacacacacccccgcttgttggggcaagaaacaggtcttccgtcaggtctgtgtgacaggtcttaggactccagctytgacctcttcctctccctgttctaggctgctgctcctgctgcccagtgggctgctccaagtgtgcccagggctgcgtctgcaaaggggcatcggacaagtgcacgtgctgtgcctaatgggaggacgatgccgcctcccacgtgtaaatagtgcccggagctctaccctgtttactaagtccccttttctacgaaatatgtgaataaaaaaccaatgtgattctaactytggttttctttgtgtgacttggaaataaggaagtggggtgacagattgacttaatgagattgcaaggatttggttctggasttgttggtccctttacctcttcaccctctgccccagaggagggggaagtgtcttagggaaagatcaattatgtcatgagcttcctcttaatggaagacgagcagctgtgtgccggatcagactctctctcnnnnnnnnnnnnnnnnnnnnnnnnnnnnnnnnnnnnnnnnnnnnnnnnnnnnnnnnnnnnnnnnnnnnnnnnnnnnnnnngccatgcgtgcgtgtgcagagctctagcaagtgctcacatttgcttgtgcatgtggaggctgagatggacattgggaatcttcctctttcactttctgccccccaccttgagacaggtttatctgtgtagctttggaggctgtcttgaaactgactctgtagaccagactggcctcagactcacagagatccgcttgcttctgccctacaaatgctgggattaaaggcttgcaccaccattgactgggcctctaatcttactttttgaaatgagatct

SEQ ID NO: 566 - DNA, 11062 bp, Cricetulus griseus
  misc_feature (175)..(197): n is a, c, g, or t
  misc_feature (359)..(388): n is a, c, g, or t
  misc_feature (906)..(935): n is a, c, g, or t
  misc_feature (942)..(996): n is a, c, g, or t
  misc_feature (1896)..(1921): n is a, c, g, or t
  misc_feature (1924)..(1951): n is a, c, g, or t
  misc_feature (2002)..(2024): n is a, c, g, or t
  misc_feature (2682)..(2702): n is a, c, g, or t
  misc_feature (2736)..(2772): n is a, c, g, or t
  misc_feature (4347)..(4407): n is a, c, g, or t
  misc_feature (5004)..(5030): n is a, c, g, or t
  misc_feature (5077)..(5102): n is a, c, g, or t
  misc_feature (6525)..(6559): n is a, c, g, or t
  misc_feature (7530)..(7551): n is a, c, g, or t
  misc_feature (7793)..(7821): n is a, c, g, or t
  misc_feature (9249)..(9293): n is a, c, g, or t
  misc_feature (9774)..(9796): n is a, c, g, or t
  misc_feature (10884)..(10928): n is a, c, g, or t
ctcacacattcactgacagtagcctcagcactaagtgtctgagtaagatcccttaagtttaattacttcagagatcagtgtcccaatttttttgaggaaaatgaagtataaaaattaaattttaagcatatgtccaaagagatacaaaacacaaaatttaaaaaaactaatattnnnnnnnnnnnnnnnnnnnnnnnggttaagagcaccaactgctcttccaaaggtcctgagttcaattcccagttcccagcaaccacatggtgctcacaaccatccgttataagatctggtgccctcttctggtgcgcagatgtacatggaagcagaatgttgtatacaaataaacaaataaaatnnnnnnnnnnnnnnnnnnnnnnnnnnnnnnctaatattagtcccagaaagaaattcgaaaatagctttataatgtaaaatatatattaccagaagtaagctggtatagtaattcagccctgatggagtcagtgtatcacagatacataacaagggtttctccctacacagtcagtgtgttttttctctaggagcaataacagttatgtgggttattaaaaggatgatgtggaataaaagcgtattgagaaggggaattgcatgtaagtagtaaggaggctgacaagtggcctggcttgttctgaatatggcagcagtggaatttacagtggtggaagggatgaggaacttgtgaagagtttcctcgggtacacactgtaggagcagcgtgtagcaggagtgcagtgaagatagtaaggtggttagtaagggctgtcttaggtacaaagaaaaccttttgctgagagctgggaggtacatcttagaagccaggggcaaagatgcaggtgggtctaagaatgaaattcagctgggtggtggtggccacgnnnnnnnnnnnnnnnnnnnnnnnnnnnnnncaggcannnnnnnnnnnnnnnnnnnnnnnnnnnnnnnnnnnnnnnnnnnnnnnnnnnnnnncccaaagctacagagaaaccctgtcccgaaaaaccaagataaataaataaacaagcaggtgggaaaatagaattaaaattcaagttagcataaagggataagccaattgtggtatatatctagagttttaacttagtcataaaaagaactaaatactagtaggtgctgtatcttagataaacctcagaaacactatactaagtaaaagaatccaaacataaaagttatataatgtttgggtccttttatatactatatctaaaataggcaatccttagaaaaaagaagcatattttgtgtttggggggggcatgttacttaatgattacaagagtatttttctcaaatgatgatattttgaaactaagatggtagtagttgtataatgaatgtcatgaatatactaaatgttctagagtaacatacttaaaaatggttaaatatatatttggtgaaatttccttataattatggggggcactgattgctcaatggtaaagatcactttttacagaggatgcagacttggttcctagtacccatatggtgagctataatcacctgtaactcaagttgtaggggatccartgccctcttctggtttctgtaggtacctacacatgaaattaaagaaaaaaaaaaaactttaccatttaaaaaaaaaaaaaaacttttacaattttacaaatgtttatatgggggcattgtttccctcctcctggccccatttctgagggtgcgagcactggsctcaccattagagcctttggtttccttttcagcatagaaagtacctcttagaccagagaagagatactggaggggtagttgaaaccttttgactttaggagwgttaaaaatgtcatctgagccaggcattggtggcgcacacctttatcnnnnnnnnnnnnnnnnnnnnnnnnnnggnnnnnnnnnnnnnnnnnnnnnnnnnnnnctccagagcgagtgccaggataggcaccaaagttacacagagaaactctgnnnnnnnnnnnnnnnnnnnnnnnaaaacmaaaatgtcatctgttcagagtaagggggtaggagaatttgatgtgtttatagaagatgaacatgttgaggacaggaaaagaaatcttgactagaaaggttgacattgatgttgagtggctcactacacatacacatgaaagatccttcagtatcacgctatcttgttgtgaacttgaagactgtttcccaccaactttgttctgaaacttgagcatgcctacagtcctgggttatcaggcattcagtatatgttcgtactggataaaaattcccttttctcttgtctgtccttttaaatttagaaactttctttcagatttcaagaaacatgctttaggcacctactaagtattcttcctttagttctttattctatgtgatattcttttatgagctcctctctctttcccagtctttatgcactgagttaatgcttcttgtcaagcttgatctcactgaaaatagcctttggtttatagaaacaaactgcatgttgctttatagtttaccctggataaaactggcagtttctaagtctgtcctaattaaagcttcccaagccaaaagatggtgtagagggtagagactagtgctaattataaatataaaaataaggcatactgttggtcttctcttgctcctactctaaannnnnnnnnnnnnnnnnnnnntagacttcacctcagtgtgttgttagttgtgcannnnnnnnnnnnnnnnnnnnnnnnnnnnnnnnnnnnnggaagtcatgtgtttgaaaccattccagggtggaaatgaccttgtggcaaaggatgttactaggctctgacttctttcccatctgctggtttgcctttgcctgtgcctctttaaaatgggaatgattctgaaatgaatgctttacctttttggaatccttatttcagattcactgcaaggggtaaaatgtgtcattttaagtagattcattctctagaaacagacccaactactcttctagttcttttgcatagtctagatttctttttcagctgaaaaaatctaaatgaagaggaagtgaaacttgttactttcctcattctctgtgtgtgatggttttattttaggtacagtggtagtctgttttcatgaaaattctaatgattatagaaaatcctaataacagtagaaatggaggaagaattctgtttgtaatcgattgtgttgtgtgcctttcttacgtaaatactgatgacctaacttagctgggtgcaggcagctgttacaacttgagctgacaatgttggttgtatgtttcaggttccaatacgtacgaagaggcagctgcttacattcagtgccagtttgaagatctgaaccgaagaaaagataccaaggagatctacactcacttcacctgtgccacagacaccaaaaatgtgcagtttgtttttgatgctgttacagatgtcatcattaaaaacaacttaaaggaatgtggactttattgagaggatggcattagtaaaaggtaaaactttagacagtttagttgcactgttatggtggggtgttttgcctttgtaaatgtttttctaattgacagtgttcttcttttttagttactgcaatgagtgttgagaccagacatcatctgctgtctcttgggtcagctacaagcatggcgggaccagggaatggcagcagcatgcagaatcttagcactctttagcacaatcttctgtattagggaatgtttagttggcatgagatgttcaaatcagacatcggaattggaacaactgtaaactgtggttgactcatcaaggcatcacttggattttatattctcaaatgtttagggcatattgaagtcgaggtgctgcattccagaacttaaatatgtagctcacttttttttcctttttaaacaaatcacccgtagttaatttctaaggtttttctcatcaagagaagaaaaactaaaaaatcgtgcttgtttgcaaaagaatcttgaaagaactcagtcttaactatgcacatgatgtgaccagacatcttgaaaatattcctcttagtaggaactgtttgttttttagctcttggtacggtcagacgcaatatttccataattaaaattcttcctggttattgggactacgttaatatagcttttctgactgaaatgtatgttactgttatgtttaacgtgccacgatggcttctaacagcaattacttggagagttctacagtatgcgtttagctctcatttctttaagcttatggttgaagattaaccttgtttatgctgattaccaaattactagtgaatactgacgtaatatgataaacnnnnnnnnnnnnnnnnnnnnnnnnnnnnnnnnnnnnnnnnnnnnnnnnnnnnnnnnnnnnnttgagaaccaatgacttgctgctacagatctactaaattgaccactttgagtcttgtctgtttgtctcagtcatagggaattttgtataaggtgcctcttgttttccatctctgtggcctttttggttgggagacatctcaagtgtattaacagtgtgtgcttttcttttgtaaatgtggtgccaaatccctgtttgccatcgtttttactgtagcaatgctaattgtagtagtgatccttagttagtatgttctttttctaaaacttgcattttggaacttttttccactttgtcatgtgtacagattttaatctgttacagctggcagcagtattaaaacagtgagtaaagagtccaggtttgctctgcttgtaactggtcctttctggaaatcctgtcttgtgtttccttttgcccctcttgagtatgctttggcctttgtctaagagtgggtttaggtagaagggggtctctgaaagtctagttcttcaatgtagtaatattatcaaatctaggactgagggctttatgtccagtctatgtacaagggatatgagtcataattagcttctgatttacattctgcttgtgctgnnnnnnnnnnnnnnnnnnnnnnnnnnntagcaaatgtcattaacactgagtggatcactgagggatggcaaacnnnnnnnnnnnnnnnnnnnnnnnnnntcagtagttggagcagtgccttttgaggtccagtcttttcagattggatccgtttcatcttttgatgttacctcctactcatttaaaaggttgatggtcagaactgctttggaaagcaagccacagtgaccagtgcctttgctggcagcttttaaaattttttaattctcacagaaaatcattattatgcagacagtataactattatctgacaagcatttctttagggctaggaaaataccatcggaaagaaagaaaagtgttgatttcagtcagcaatggacttaattcccacagtgtaggggttcctaagtcttactctgaatttgtcttttctttattgtattctgtaatataaaaacattgaaaacaagagctagtgaaatgttgttttcataacttttctatactttgggattagtgaaatggtgttgataattaaaataatagatatccaaatttaattttactttagaatgcattttgtattttcatttgaatctgtctattttttaaacctttctattaattaaaaatacaagttctccacttctttgcctctacataccacttttatttgctttctgtttacacgaagtcattctcatcatccaggtgccttcttttaggacagacgggaggcagttgaagttttcagcgatgacctgaaggggaaaaatcacctaaagctgtctgaagagcttcttagctgtgaactgttaaagtgtttctgttcagctaggctttgagatcactactttgtattttgaagaacatttcttaggcagagtcagaatgtgaaagttaaacatcttatgagcctggaggaaaaaagattgatgccaaacgttaggagtttcctctggaaaatgctggagttttgtgatggataatgttcattttgaggtggccagacctttggaccatctaagaagtcagctaagaaaattaatgttgaattaataaaacacgatcaatagactttatccttgggaggatggcaaccataacctttgttgttggcagccacattttctcctgagtggaaacttgagcagataggagatggtctctctttccttacctaatcagttcaggcaggtaatagactacaccttctgctgtgaaagtccccaaaccattacaggtccttatcacacagccacttacacacctaccccccaaacacacacagttactgtttccagctacttctgtgaaggacaacatactttagaattcgaattcgtcagggtagtacagttttgttttttccaccccataccatgcctgacttggcttggcgcttctcgggaattgagatgacactgggggtacatagttagtttatgcagattccctgactaaactgaactaaatcaaatctcacaaagacatcctgggaaaatgtgtgtgggggggnnnnnnnnnnnnnnnnnnnnnnnnnnnnnnnnnnnttgttttactaaatcccttaagcaacttgtgccaaaagttgagggcaacagaacagactaatattgacaagaacacttgaatccattacagaacatacataatctcaaagtcactagtgagtgacaggaactttgaatacttctgggtgttagggacatgactctgtggttaagagctctggctgctatttcagaggccttatttcagttcccagcactcacacggcaactcacaaccgtctatagctccatccctgggattgtgacaccctcttctgtggacaccaggtacaagtggtacacatacatatatacaggcaaaacactcatacacagaaaatagaaatgtcttaaatttttatatttttcacactttaaagtgcctttcacacaaacaattggtgtaaggattggtgggtcaaaaacatccctacatcttaggtgcagagtatttaatttttatataaaatttcaaaagacacttaagatacccaaacatatatttctacttcagttgtttatagtatttataagcagtgaaaggtttaaaaattccatgacaagtgactattaaatgtaataacagatgaatgtgcacttatggggatcacaaggtggcagaagtaataaataattagtgatacattattgcagtgtattaacattgattttgtgtggtctggcttatatcatttcctatctctaggcccacctcaatattcgttgggctactcagacattttaactgagaagtttgtttgtgagattccccacaagtaatacaagaaattacttttttctctttttatctttgctcatgtaggacaaaagtcctgagacctcttagaaatcttaggagcctgagaattacttggcgtactgagttctgctcttttctcggcttttcctaagccacgaacgtttgaacaggtcgctttcagtcttacattccttttgtgttgtccaaagannnnnnnnnnnnnnnnnnnnnnagacctttgttttgtatttcagccatccttattttctgttcacactggtatgttcccttctactatctcagtatgcctgtctgacctacaaaaacttcacgttgttaacaagcggcaaccccagaggcacttgctgtccctgctggaatctgtgctctgagggctgtgctgggtagaaagggcagggggaggtaagccctcttcccccttcacctccctcccagcattgctgctgtggcacnnnnnnnnnnnnnnnnnnnnnnnnnnnnngtagagactctgaaagtatgtgtgtctttcaccaaatgactgctgcttttgtgtctcattcctttatctgcagaaagtgcaccagcacgtcgctaatcattttttccttatttttattggcaggaaagaatacatgacaagaacatccaagtttaataattaagcataaagttgaatagcattaaccactattgtatttccatcacccccatccatctccaaaatttatttcttcccccaggtctctctgacttccaggcccatttttccatgttttaaatacctcagataagtggggttttacagtatttgtcctgtcatgtcatcatagtatttaaaaactcatcagatgtatgtgaaattttagtagtctgtgtttgtgttgtcaccaatcatgctgtgatagggaagtgcctcacagcctctcactgccgcctaagggtgtaaacatttctgtgagtttggggccaacatagtctacacagtgagacagtgtttcaaaaacaaataaataaataaaaacacaagcaagcaaacaaagcggaaacaggccatttatgtaaaagtaaaagttgtctctgtagctctgaagagtagagtggagggacagtgtcagcctgcctaggctgaactggagttaagatgcttgggggacaccaactggcattcctccatctcctcggaggtgagccctggccaagtttcaaagtacagatgagtgggtgactgactgggtgttaggcagtgtagccagtttgtataaccacatcctcatctcaattgaaaagcagctgggatacggccttaaggagtcactgtttctcctctgtctgccaagaaaataattttgtgagatgcaaggtacattatgtgaatttgtgagccagttaaacattaaaatatctgtcagaaaatggtagagaactaaaatgcaactcgggttttggcttgagaattttattgttctgccagaagtcctgttccattggctcttataatagagggcaagttttgtgtatcagtagccaaagagataaggagaagcaaagagtccagtccagtctggaggggaagctctcctatgaggagcaaatagggtaaaattgttttaaggcctgaatgcacaaccacactctgggttctgttttttgagacaggatctcatggcgatcctcttgcctctgcctcctgaatgcagtgctgaaattaaagctgtgtgacactactcctggctgtaactccaatttcttaagttgggtgttaaaagatccggtgtctacaaataaaattgcttaatttgcttgttttctttgtaattctgaattttatgcattttaaagcattttgaggggcagaatgatgcctcagtagtttaaaaacactggttgcagcctataatccacaaccccagagaagctagaacccccnnnnnnnnnnnnnnnnnnnnnnnnnnnnnnnnnnnnnnnnnnnnnacagtcgaagtgaggagggcgaaatatgacaagagtcagtcgtgatgggaactacagatcagctgacccaagctagtgagaatcattgactcaggtctgacaaatggggaacagcatagacaactggactccttaatacagatgacaatggtgtggctgggacaatattgaggccactggcagtgggtccatgatctaacactaatgcacaaactgacttagtggacccattctatatggagagataccatgcccagcctagacataggggtgtgggaagtggagaggtgccttggtcctgcctcaatgagatgatgggacagacttagtagacttccttggggcggccataccctctctgtggagcagatgggaggagcaggaagaaaggaggtgggggggggactgggattgaaatgtaaaaaataataaataaataacaaaaccactggttgctcttccagaggacctgggttctatnnnnnnnnnnnnnnnnnnnnnnnccaaatcatgtgactagttccaggttctgatgtcagtggacaactagcataccagcatccaagtggttcacagacataatcaggcaaaacactcatacacacaaaataagaatcttaacaaaaccttctgagatgggagtgttggtgcgtgcctgtagtcctcttccctggactgaagcaaatggatctcttgaactcacaaactcaagcagttttggcaatacaatgagaccccatctcataaaaacagaaaaagcaaacagaatcactctgaagagagatccatagcctctctcatcctgctgtaggagttcgtgatctaagacactcagaatcattgtatgcttagagtggacagattgctgatggcttgtattgcctttctacaaagtgctttgcccaggtgggatttgtttattatttatttttgtttgaaggggtctttgttgatgttactagccatacctagagtagttcctagggtgattctggcaggttggggtgtgtgtgtatgtatgcatgtgtgttcatttacttgttcagaatattaagtgaatcctcatttcagtggtcgcagatcagttctttggtgccttttttcaagctcgtgaggctggctggctctctagtattaatattgctggaagcagctaagtgtgaatgggtgtttctggcaaggagcagattttcattttaattgacactttcttttatgcattaaaccatggatgccaagtgctttcctcactagtagttgtaaatgctaaatctatacatggcgttcaccacctcctgtcaagataaatgccaagcttcatttcccctcagagcagttcaaaggaataatttacccctggtttgcttgggaagatgtttgcagccagcctcacgtggacccagctgcaaaaattcccagtgcctaaagcaagctcagcagtggtgtttgttcttgtgaaacatacagcagctggaatgagaattcagattgcttgcttgttcaaatcctacagaagtggcggtggtaacgtcttaagtggggggtatgctgatgccctcaagttcagccagacactacttaacagtatagnnnnnnnnnnnnnnnnnnnnnnnnnnnnnnnnnnnnnnnnnnnnngagtgggataataaagacggtcatttctgaatgaatgccctaagaaatgaggcaggactcacatgctttctccagtgatgcgggtctctgagcagaggcatattgatctgctagtaaaaacccagggggcaggg

SEQ ID NO: 567 - DNA, 2854 bp, Cricetulus griseus
  misc_feature (187)..(211): n is a, c, g, or t
  misc_feature (1534)..(1572): n is a, c, g, or t
  misc_feature (1834)..(1854): n is a, c, g, or t
  misc_feature (2835)..(2849): n is a, c, g, or t
gagctcgcccaaaagacckatttaccggaagacacgattcacatatggtttcagaacagaagagcacgccaccgtgccgcctgcacgggtagagttccgagtccagattccctttcctcgcctgagcccaatgaggcagtgcacggcagcgagactgagcgtgcacaggacagcttgttgccactgnnnnnnnnnnnnnnnnnnnnnnnnngcactttgaccatgacttgcccatcaacctcctaccgaatgtcctggcctgcagagacggcacagccctctccaccagacgtcccagagacacacaccgttgcatggaacacctgcgctgggcagctctttcttgatgcagtgatgaaagagatccaagatgaccaagatctccgacccctgcaggactctctggatccctacgatcaatgggagcagatgcagccaacccttgagccccctctggacgaagaagtctatcaagctctactggatgacctctgtgacacacactgcaaggcttcatcgtctcatcacggatgccgtcctcttccagaaagcaagacccttacaccaaaccccaacacaggacaaaatggacctccaacgcccctgcccctgttccggagcccatggacaggaatcccctgaccctaagcaactgggaaaaatcaccagaaacaggaagtcgggtgtggaaggccatcccaggaggccgaggactagaaaattccctggcaggaggcgtttgctggagactagagggaaatttccccagtcatacacaggaagacatctctccaatgaagtggcctgagaacccctcagtagactccacagacaagatactgcctgaagtggacccccaccaggtctcmctccctgcctccwggtctctacamtctattggccactgtggaaygctyrggccagataagcacattttcytrgagatgcgasyctgcytttcktgtcaatgcctagtagtggctaccaggatcmatwggtawcaggtcrttyaatgtataatcagarggacktccamttycttctttcctttctatagattgaatgattgattgcattgattttctagtttccttttcatgctgggrcatcystttgagcaaaggwgtgaaaggggaataatggaccagaattgcaaggaacacagggaggtcttgaggaatgggggacaccasagycagkagaaggacattctctggtgscwasgasctgaggactsraaagwtggawaggggttcagaatggktgytttagaatggcaattsraataaaaatctacmaaagaaagaaccgggaattggactaaatggaataaatggrataaaytcattttkgkttcatgttaagactttctttcttacatccgttctctttcttctaatcttgcaatttttatttttkwywcatattgtggagatttggkkttttggagcatttctctttraaaatagwtttcaatttacayaaaccgctaaatyycctcattagccacckamaaacwcacacaacacaaatnnnnnnnnnnnnnnnnnnnnnnnnnnnnnnnnnnnnnnnaacacagacacacacatgggtacacraagkggattgtgtctgagrgcaagctgtaagcatctaggcttcctcctcagtytasaagtytgatatctgtactgtgaaagtgaggcttttstgtttggttstgatgtatgcagacaggtttmcwacaaacactggggagatcccctagatcagcttctgcrggwcttgagatgaagggtgtggccgaactgcaagccgctcaagctgattctcccacttcgggataataaacacnnnnnnnnnnnnnnnnnnnnncccccttgtcgcaacctgtgctgccctgattcctcacttgcacccygwgatcacttmttgtcwcccarcagggatryagttcttygactgggttctcccatcstgcccaaargtgccwggctttaggaagggaagctgccaagctaagcttcggcttccayattctccattcascggttgagcttgayakgaggtgggccyttccttcctcsagttccctattcttcytggmgaaytgtcgtgsggtggcaggtaaagaagwctgctaccttctgrtccgtttcmcwgccggcctacsyraagrttcrrctcaaggaggcaaggtcagyggtagctgtggagatraggscaratctcttggsaggsgccrgmckyggcagcagtccaagagagcargcrgggagagtgggcgggscmtccacccagcggtagataaaaggccagggtgtagcacgctgaggcccwgacaagcaaaggacttgcttgctctttcctcctggggcggwggtctgktttggtagtggcaagtgaargaagtagctcctggcaagtcttccttcgttgcttggcaggatggaaggtcgcagccgtgtgggaaaaatcagggtggcccgggaatcccggcgcccaaagacccttttgaaaggcatgcagaaggaggcccttctaagtcgtttcgccaagagcccttccccaagcttccgggccagggagcaactagccagggaaatcgggctgcctgagtcccgagtgcgggtgtggtttcagaaccgccgaagtcgttcggsgatggtgaggcgaggcccagaatcctcagcgagccgaagcgtcctggagtccccgaagcsgcctgaaatgtctgatgccagggcacaaggtagaaggagcagcccrtcgggacgtaggaggcctcgcactcgactcagctcgacacagttggccatcctgctccaggcttttgagaggacggtacccgggcannnnnnnnnnnnnnnagctc

SEQ ID NO: 568 - DNA, 3646 bp, Mesocricetus auratus
  misc_feature (965)..(985): n is a, c, g, or t
  misc_feature (1026)..(1066): n is a, c, g, or t
  misc_feature (1893)..(1917): n is a, c, g, or t
  misc_feature (2407)..(2432): n is a, c, g, or t
  misc_feature (2837)..(3020): n is a, c, g, or t
gcggattgcaacacatgccgcggcctggagagagggagccggtgtcctacgtcagagccgccgccgccgccgcgagccgccgccggggaggagccgccgctgccgcccagcactgggcccttagggaggaggaggcgagaagatggcggacgaccccagcgctgccgacaggaacgtggagatctggaagatcaagaagctcatcaagagcttggaggcggcccgcggcaatggcacgagcatgatatcgctgatcattcctcccaaagaccagatttcacgagtggcaaaaatgttagcagatgagtttggaactgcgtctaacattaagtcacgagtaaaccgcctttcagtcctgggagccatcacatctgtacaacagagactcaaactttataacaaagtacctccaaatggtctggttgtttactgcggaacaattgtaacagaagaaggaaaggaaaagaaagtcaacattgactttgaacctttcaaaccaattaatacatcattatatttgtgcgacaacaagtttcataccgaggctcttacggcattactttcagatgacagcaagtttggttttattgtaatagacggaagtggtgctctttttggcacgctccaaggaaacaccagagaagtcctgcacaaattcactgtggatctcccaaagaaacacggcagaggaggtcagtcagccttgcgttttgcccgtttaagaatggaaaagcgacataactacgttcggaaagtagcagagactgctgtgcagctctttatttctggagacaaagtgaatgtggctggcctggtattagctgggtcagctgactttaaaactgaactaagtcagtctgacatgtttgatcagaggttgcaatcaaaagttttaaaattagttgatatatcctatggtggtgaaaatggattcaaccaagccattgaattatctactgaagttnnnnnnnnnnnnnnnnnnnnncaagagaagaaattaatagggcgatactttgatgagattannnnnnnnnnnnnnnnnnnnnnnnnnnnnnnnnnnnnnnnnctgaaggctttggaaatgggagctgtagagattctaatagtctatgaaaatctggatataatgagatatgttcttcattgccaaggcacagaagaggagaaaattctctatttaactccagaacaagagaaggataaatctcacttcacagacaaagagactggacaggaacatgaactgattgagagcatgcccctcttggaatggtttgctaacaactacaaaaaatttggagctacactagaaattgttactgataaatcacaagaaggatcacagtttgtaaaagggtttggtggaattggaggtatcttgcggtaccgtgtagatttccagggaatggaataccaaggaggagacgatgaattttttgaccttgatgactactaggtagtcgacatgggtccggcaaaatgtgcctcaccctccagcattcaacccaaggagcatacccgtggtggaatccaaacagatccctgccttacaattggaacatttccagaacttaatccgtgagcattggatactgaaaaggaaagcgaaacaaaaccagacccaaccctacactttggtttgtcatggagtcagcacagcagcctacaactaagttcctaaatgccacttcggactaatttaacaaagaatcccagtttttacttttacttgatggtaaaattggttgctcttgtattttatgaaaaaaaaatgatttttttaaccttcatacatagaagcaaaaatactttaactgctgtaaaccttcaaaaattagtagaagtgagatcatactggtttgtttcttattttgatgggagaataagtaaatnnnnnnnnnnnnnnnnnnnnnnnnnacatggcattctcagcttagactgcacaagaagaaatatatgtggtgaaatattggaactgtttctctcttggtctctgtttaatgttgaaaggtgagctaataggcgatgtcagcttcactccctgacacccccactcccagactgtttcaaaggtgcagggtgcatggtaaagtcaggtgagtgctgttaacaactgggccagcgccctctggcttccatctattcgaaccaagcattgggggcctttgtgtcgctaacacaaagctccctgtaatctcaacctcctagaaaccagtttggggtggacatgatggggcttctgtgctattgctgggattgggaggaataaaacatgcaatttaagtggaaccaaaaaaaagaaagctcagaggtgattttgatttcgcttggatctgttcttggtaacaaagggaggtggtcgtgtttccttgtgtggatggcatgagattatgtgaatgttttggannnnnnnnnnnnnnnnnnnnnnnnnncaaatgaactgcaaaaattttcgcaggaacaacagaacaacatgtatgactgtgcatgtttctcaaaccctgatggggctggagcatctgttttgaaagtgggacttagaagcacctctcagatgagaaagtatgggaggagggtggggagggccggggtggggagggatgggacacagcttctggcaccatggattaaaccatgttagatccaaacgttggccaaaatcctgaagcaaacgcttcaagctgggctgtgagttggatttgaacccagttaagtacaaggtcatggtgtgctcgaggtggtgacagtgagcaaagcgtaggatgtgcccggtgtcggccgcggaggagaggtgccaggtggactttgaaggaccaaaggctttgaagtcagttggnnnnnnnnnnnnnnnnnnnnnnnnnnnnnnnnnnnnnnnnnnnnnnnnnnnnnnnnnnnnnnnnnnnnnnnnnnnnnnnnnnnnnnnnnnnnnnnnnnnnnnnnnnnnnnnnnnnnnnnnnnnnnnnnnnnnnnnnnnnnnnnnnnnnnnnnnnnnnnnnnnnnnnnnnnnnnnnnnnnnnnnntgaagggagtgtgtcttacatgtaaagctttggttctcacactgtactctgaggtccaaatgactgtctgtcgtgtaacctgatgtctcaacccccagggagaagaagagtcaatctttggtgttcaccaacatgggaagcttcaccagaacaggcttttgctttgggctctgctgttggtttgcagatcacccaagagcaagccaacatgcgcttcccagcagtaccttagggttttgccattgtaaatgggtctaatgtgatatgacaagaccagagaaattggatgtaaattgacatttttggaaatgcttgttgtttcacatgatacatttagggtatgcagctccttttgtagtttttatttttactatttaagtttggaaatgatgccaaatttttgtatttctttaatcaatgtgttctccttggtgatatatattgcattatatattgatgtgtgtatcaatatatactgatatgtgttacacttacgcatacaaacacacataagtgaggggtggaaccgtagcctgcactccctagcctctgcagagagaccctaagagcagaatctcggtgttgtgatgtacagaaatggagaagagtattaaaccatatttaag

SEQ ID NO: 569 - DNA, 5149 bp, Cricetulus longicaudatus
  misc_feature (4090)..(4108): n is a, c, g, or t
  misc_feature (4110)..(4125): n is a, c, g, or t
atggccaagtccagcctcgcgggtgctgatggggcgctgacctgggtgaacaatgctgcaaaaaaggaagagttggaaacctcaaacaaaaatgattcttcaaagaagttgtctgttgagagagtgtaccagaagaagacccagcttgaacatattctccttcgtcctgatacatacattggatcagtagaaccattgacccagttaatgtgggtgtatgatgaagatgtaggaatgaactgcagagaggttacctttgttccaggcttatacaagatctttgatgaaattttggtcaatgctgctgacaataagcagagggacaagaacatgacctgtattaaggtttctattgatcctgaatctaatattataagcatttggaataatgggaaaggcattccagtagtagaacacaaagtagagaaagtttatgttcctgctttaatctttggacagcttttaacatcgagtaattatgatgatgatgagaaaaaagttacagggggccgtaatggctatggtgcaaaactttgtaatatttttagtacaaagtttacagtagaaacggcttgcaaagaatacaaacatagttttaagcagacatggatgaataatatgatgaagacttctgaagccaaaattaaacattttgatggtgaagattatacatgtataacattccaaccagatctagccaagtttaagatggaaaaacttgataaggatattgtggccctcatgactagaagagcatatgatttggctggttcatgtaaaggggtcaaggtcatgtttaatggaaagaagttgcctgtaaatggatttcgcagctatgtagacctttatgtaaaagacaaattagatgaaactggagtagccctcaaagttattcatgaacttgcaaatgaaagatgggatgtttgtctcaccttgagtgagaaagggttccagcagatcagctttgtgaatagtattgcaaccacaaaaggtggacggcatgtggattatgtagtagatcaagttgttggtaaactgatcgaagtagttaagaaaaagaacaaagctggtgtatcagtgaagccatttcaagttaaaaaccatatatgggtttttattaattgtcttattgagaatccaacctttgattctcaaactaaggaaaacatgactctgcagcccaaaagttttgggtccaaatgccaactgtcagaaaaattttttaaagcagcctctaattgtggcattgtagaaagcatattgaactgggtgaaatttaaggctcagactcagctgaataagaagtgttcatcagtaaagtacagtaagatcaaaggcattcccaaactggatgatgccaatgatgctggtggcaaacattccctggagtgtacattgatattaacagagggagactctgccaaatcgctagctgtatctggattaggtgtgattggcagggacagatacggagtcttcccactgaggggtaaaattctcaatgttcgagaagcgtctcataaacagattatggaaaatgcggaaataaacaatattattaaaatagttggtttacagtataagaaaagttatgatgatgcagaatctttgaaaaccttacgttatggaaagattatgattatgactgatcaggatcaagatggttctcacatcaaaggccttctaatcaattttattcatcacaattgrccatcacttctgaagcatggttttcttgaagaattcattactcccattgtaaaggcaagcaaaaataagcaggaactttccttttatagtattcctgaatttgatgaatggaaaaaacatatagaaaaccagaaagcctggaaaataaaatactacaaaggattgggtaccagtacagctaaagaagcaaaggaatattttgctgatatggaaaggcatcgtattttgtttagatatgctggtcctgaagatgatgctgccattaccttggcatttagtaagaagaagattgatgacagaaaagaatggttaacaaactttatggaggatcggagacagcgtaggttacatggcctaccagagcaatttttatatggcacagcaacaaaacatttgacatacaatgatttcatcaacaaggaattgattctcttctcaaattcagacaatgagagatctataccatctcttgtggatggcttcaaaccaggccaacgaaaagttttgtttacctgtttcaagaggaatgataaacgtgaagtaaaagtcgcccagctggctggatctgttgctgaaatgtctgcctatcatcatggagaacaagcattgatgatgactattgtaaatttggctcagaattttgtgggcagtaacaacattaacttgcttcagcccattggtcagtttggaactcggcttcatggtggcaaagatgctgcaagccctcgttatattttcacaatgttaagctctctggcaagactgctttttccagctgtggatgataacttgcttaagttcctttatgatgataatcagcgtgtagagcccgagtggtatatccccataatccctatggttttgattaatggtgcggagggcattggtactggatgggcttgtaaactgcctaactatgatgctagagaaattgtgaacaatgtcagacggatgctagacggtttggaccctcatcccatgcttccaaactacaaaaacttcaaaggcaccatccaggaacttggtcagaaccagtatgctgtcagtggggagatatttgtggtggatagaaacactgtagagattacagaacttccagttagaacttggactcaggtatacaaggagcaggtcctagaacctatgcttaacggaacagataaaacaccagcactaatttctgattacaaagaatatcatactgatacaactgtgaaatttgtagtgaaaatgacagaagaaaaacttgcacaagcagaagctgctggactgcataaagtttttaaacttcaaactactcttacttgcaattccatggtactctttgatcatatgggatgtctgaagaagtatgaaactgtgcaagacattctgaaggaattctttgatttacgattaagttattatggtttacgaaaggagtggcttgtaggaatgttgggagcagaatctacaaagcttaataatcaagcccgtttcattttagagaagatacaagggaaaattactattgagaataggtcaaagaaagatttgattcaaatgttagtccagagaggttatgaatctgacccagtgagagcgtggaaagaagcacaagaaaaggcagcagaagaggaagacacacaaaaccaacatgacgatagttcctctgactcaggaactccttcaggccctgattttaattatattttaaatatgtctctatggtctcttactaaagaaaaagttgaagaactcattaagcagagagatacaaaagggcgagaagttaatgatctcaaaaggaagtctccttcagatctttggaaagaagatttagcagcatttgttgaagaactggataaagtagaagcacaagaacgagaagatattctggcaggaatgtctggaaaagcaataaaaggtaaagttggcaaaccgaaggtaaagaaacttcagctggaggagacgatgccctcaccttatgggagaagaattgttcctgaaattactgctatgaaagcagatgccagtagaaaattgctgaagaagaagaagggtgatcctgataccccagtagtgaaagtagaatttgatgaagaatttagtggaacaccagtagaaggtacaggagaagagacattgaccccatcagctcctgtaaataaaggtcccaaacccaaaagggagaaaaaggagcctggtaccagggttagaaaaacacccacatcagctggtaaaccgaatgcaaagaaagtgaagaaacggaacccttggtcagatgatgagtccaagtcagagagtgacttggaagaaacagaacctgtggttattccaagagattctctgctccggagagcagctgctgaaagacctaagtacacctttgatttctcannnnnnnnnnnnnnnnnnncnnnnnnnnnnnnnnnnaataatgatttagaagaactgaaagttaaggcatctcccataacaaatgatggggaagatgaatttgttccttcagatggcttagataaagatgagtatgctttttctccaggcaaatcaaaagctactccagaaaaatcatcacatgacaaaaaaagtcaggattttgggaatctcttttcatttccttcatattctcagaagtcagaagatgattcagctaaatttgatagtaatgaggaagatactgcttctgtttttacaccatcatttggtctgaagcaaacagataaagttccaagtaaaacagttgctgctaaaaagggtaaaccaccttcagatacagcccctaaggccaagagagcacctaaacagaagaaagttgtagagactgtaaactctgactcagattctgaatttggcattccaaagaagactacaacaccaaaaggtaaaggccgaggggccaagaaaaggaaagcatcaggctcagaaaatgaaggtgattataaccctgggaggaaaccatctaaaacagccagcaagaaaccgaagaaaacatcttttgatcaggattcagatgtagacatctttccctcagacttcacttctgaaccacctgctctgccacggactggtcgggctaggaaagaagtaaaatattttgcagaatctgatgaagaagaagatgttgattttgcaatgtttaattaagtgcccaaagagcacgaacatttttcaaaaatatcttgtgttgtcctttgtcttttctgtctcagaattttgtacatctggcttattttaatgtgatgatgtaattgatggttttttattattgtggtaggccttttaacattttgttcttacacatacagttttatgctcttttttactcattgaaatgtcatgtgttgtctgattggcttgtagaattgttatagattaccgtgcattagcacagattttaattgtcatgattgcagactacagacctgctttttgaaatgaaatttaaacattaaaa

SEQ ID NO: 570 - DNA, 1303 bp, Cricetinae gen. sp.
caagagctgcgctccgctgccggggcgaggagagccatggaggagcagggwrttcagtgcgcccctccacctccygccgcctcccagayaggggtacctcttgtcaacctctcccacaactgcagcgccgagagccacatttaccaggactccatcgccctgccctggaaagtcctgctggttgcattgctggctctcatcaccttggccaccacgctctccaatgcctttgtgatcgccacggtgtatcggacccggaagctgcacaccccggctaactatctgattgcctctctggcagtcactgacctgctcgtgtccatcctggttatgcccgtcagcaccatgtacacggtcactgggcgctggacactaggccaggtggtctgtgacttctggctgtcgtcggatatcacctgttgcactgcttccatcatgcatctctgtgtcatagccctggaccgctactgggccatcactgatgccgtggagtatkccgctaaaaggactcccaaaagggcggccatcatgatagcgctggtgtgggtcttctccatctctatttcgctgccacccttcttttggcgtcaagccaaagctgaggaggaggtgctgrmctgyttkgtgaacacggaccacgtcctctatacagtctactccacggggggcgctttctatttacccaccctgctcctcatcgccctctatggccgtatctacgtggaagcccgctctcggattttgaaacagacacccaacaagaccggcaagcgcttgacccgagcccagctgataacagactcgcctggttccacgacctcggtcacctccattaactcccgggctccagacstgcccagcgagtccgggtctccagtgtatgtgaaccaagtcaaagtaagagtctcagacgccctgctggagaagaagaaactcatggccgctagggagcgcaaagccaccaagaccctagggatcattttaggagcctttattgtgtgctggttgcccttcttcatcatctccytggtgatgcctatctgcaaggatgcctgctggtttcacatggccactcttcgacttcttcaattggctaggctatcttaattccctcatcaaccccatcatctacaccatgtccaatgaggacttcaaacaagcattccataaactgatacgctttaagtgcrcaggttgacttgtcaatggcagtggggtcgcctaggcgactttggggaccaagttgggtcttttcacaggtaggtcaaatcttctttccctgttactgggtggaagcaaggcc

SEQ ID NO: 571 - DNA, 602 bp, Cricetinae gen. sp.
agtttgcaggagatggattactacagaaaatatgcrgctgtcattctggtcrtgttgtccrtgttcctgcacattcttcattctcttcctgatggagactttatgatkcagggttgyccwgartgtaarctaaargaaaataartacttctccaagctgggygcccccatctatcagtgcatgggytgctgcttctccagggcataccmcacwccagcaagrtccaagaagacratgctggtyccaaagaatatcacctcrgaggccacatgctgtgtggccaaagcatttactaaggccacrgtratgggaaatgccagagtggagaaccacacggagtgccactgcagtacttgttactatcacaagtcttagcttttrrcaaggggctgkgctggyrattgctggtctgygggayrgmactgtgtgatgccrcctccytccttaccagacttttgatgtacttcagyyrtacactgyagctttatttcmcwmtaccttacmccastgtaatcagcagyctctttttattaggsaaatagatgstatttagcrtgaycatraaagytgkttccatcagaaataaagccytttaaaycatc

SEQ ID NO: 572 - DNA, 1770 bp, Mesocricetus auratus
  misc_feature (1058)..(1088): n is a, c, g, or t
tgagtgaaagaccaggaatgctgttcaggaaattcttcaggcatgggccgggacttggctgcagttgtgcggttggaaaatgtgactgtggcagctcctgagtgcaggcagggcctgctcacatgggcgggctaagtggccgcctccttcagaacctctcagctttccccaggaccacggggactctcatccgccactytgtgaaacagaggagagatgcctcaggaacagtactctcaccacaggagcaccatgcccagctcagaggggccacacatttacaaagtggggatttatggctggaggaaaagatgcctgtatttctttgtcctgctcctcatgattttaatcctggtgaacttggccatgaccatctggattctcaaagtcatgaacttcacaattgatggaatggggaacttaagaatcacagaaaagggtctgaagctagaaggagactcagaattcttacaacctctgtacgccaaagaaatccagtcccgaccaggtaatgccctatacttcaaatctgccaggaatgtgacagtgaacattctcaatgaccagacaaaagtgctgactcggctggtgacaggtccgaaagctgtggaagcatatggcaaaaagtttgaagtaaaaactgtttctggaaaattgctcttttctgcggatgacaatgaagtggtcgtgggagctgagagattgcgagtcttaggagctgaaggcacagtctttcccaaatccatagaaacacctaatgtcagagcagaccccttcaaggaattaaggttggagtccccaacacgatctctagtgatggaagccccaaaaggggtagaaataaatgcagaagcaggcaatatggaagccacctgcagaagtgagctgagactggaatccaaggatggagagattaagttagatgctgcgaaaatcaaactacctagactgcctcgaggatcctacacacccacaggaacaaggcagaaggtcttcgaggtctgcatctgtgccaatgggaggttattcctgtcccaggcaggaactggttccacctnnnnnnnnnnnnnnnnnnnnnnnnnnnnnnngactatccacagtggacaattgttggcagcatcgaggccctttttggcttgagacattggctgccaattatttttattagaacacagaaagcctatcaaagaccttgtgtgtgtgtgtatgagtgtgtgtatgagtgggttgtgcgtgtgagtgaatataaatatatataaatacatataaataaatatatatatcctctgtataaaatgaggtttcagtacaaaaggaaccatgggtgaccctgtgacatcatccactgtcgtttttccatcccatccccatcacccacatgacagaatcttccccaggcaatttcaaatcacacagtgaataaagcacttacagaatatccattgacattttcaagtaatcccctagccttctctcttagagtcattagaggcattagtgatggcgggaatctctggggtcactctcaagcaatgatcaacatttaatgcatttgtaatcacaacaccaggcaagttgtggtgatggaggccaacctgggttacatagtgaggctgtcttaaacatatggacatttggtttccctttcttagcttcagctaagctcttcaaggtaaagatagggtatacccatagaaattagtcacaagaaatcaaaataccactctatctttgtagaccatactattagttgtatggctaaatgaatag

SEQ ID NO: 573 - DNA, 481 bp, Mesocricetus auratus
gaataaacctaccacaagacccagcaactccactcttaggcatatattcaaaagatgtccattcatacaacaaggatgtctgttccactatgttcatagcagcattatttgtaatagtcagaacttggaagcaacctagatgtccctcacccgaagagtggatagagaaaatgtggtacatttacacaatggagtactattcagcagaaaaaaacaatggaatcctgagattcgcaggcaaatggatgacactagaagwaaccatcctgagtgaggtaacccagtcacaaaaagataaacatgacttagaagaaaagacttagaagaaatctccatcctcaggaatttggagacagctgcactggaagctgtgtggaagttaaggagactgttgctgtagtggggacctgagaacattatatcaatcccaatgttgccctgacatttgtacctaagattcaagaggattaagactaaaaag

SEQ ID NO: 574 - DNA, 3547 bp, Mesocricetus auratus
  misc_feature (408)..(428): n is a, c, g, or t
  misc_feature (1014)..(1028): n is a, c, g, or t
tctagatgagtcatctcatctccctaggcttgggtttctctatgtaagatgaaggttggggacaatttgtattggacactctctaagttctctgactctataattactgtacagtgacctcagatgtatgggtgtgtctaaccacttatgcctgaatacacaccacaccatcatgatttgatgctaacccctgacctcagtgaatcctaatatttacagcagccccctctggtacataaaaacagttgtaatatccggcaagaaaatgggaagacaaaaacaaaggaaggagggagtaaaggaaaaatggaaagagagggaaaaagaatgttgcatattcatgtgatttatgctaatgccaagatgaagagggaaaaggaagaaaagaaaaagaagaggagggggaannnnnnnnnnnnnnnnnnnnnagaaaaaaaacgaagaaacaaagaacaaacaaaaaaaaccccaaaaacctcacaccaaatgctcctttttaacttgttttgtgcaatattagcttgagaactttactttggcttattagatataggtagcctccatttggaagcttgtattttttaaggtttttctactgttttatgataggaaagagaaaatgtcaaaggtagaccccagaacacagcaggagatacccagaacatcctgagggaatgctacctaggaaaacaaacattacagctgcactgatgcagggtgcattctggtctcagcttctccctcattcctgtcaccttaacgcagttgtcacagcatgtaaaatgccacagtcagtgccatcttacctgcactgctttagagcaaaaagtatcccaagagtctgagaaaaataattgtattatttttagttgctgcagaatcaggtggaacggacaacaacttggaagaacagaactggaaatgctaaaaatactacttcccccagcaacttaaattttaagaaaaagttaggaagagcctgagagggaggtggtattagaattcatatctctnnnnnnnnnnnnnnntattwatcaagaccaggsagggcagagcacagagggacagtgggggattccacttggaacaggcaaggtacatagagaccacattgaactgggagagaaaagtaaaacgtgacttgtctattgcatccagtacccagagcaaagcctgtgtggagaatggctggaaaatccaagtcgtatcgagaaacagccttctttctttctttctgtgagtgtgagcccagcagacgccatgagcgcagtagcgaggaagcaaggctgtgttttgacacacgtgtttcccattgatatctggagacagcccagtagctgggcttgacaaaaccggatcgaagcagaggcagagtagggtttcaaagcaggcagtgaaagaccaggaatgctgttcaggaaattcttcaggcatgggcagggacttggctgcagttgtgcggttggaaaatgtgactggggcagctcctgagtgcaggcagggcctgctcacatgggcgggctaagtggccgcctccttcagaacctctcagctttccccaggaccacggggactctcatccgccactctgtgaaacagaggagaggtagggaacttgcagctcttgcctttccagcctaacttcctgagccctgtctggtgtttgttcacaaacactgggggggcgggggggtggggtgagataggggtcgcgtgtgtatgtgttaattaacacatttcagctccttcacctctgcagagggagccggtggttctcatctttgttttccccacaaaggccctggaggtctgagtttcaacagtgcccaggcacttttgaaagttaggacactacagctaacaccaccgggaagggagagtgtgtggattcctcctgttgtcactctgttccagcggtctggaagtttccctttctgcttcacaggatacttcattgacagcaaagacaatctctgatgaaaaatgttcccgttcttaatgcttcaagggttttaagacggtgttccaagcagggaagagtgctctgttttcggagggaatcagagtttgaagtttttactttggaacacattttgttttctttttttttggagagggtaggaacaaatgtgtgtgtaagggttcctggtgtcttttattttcatatatgattttggctttcttatgtgagttttgaagagcagtaacatatttttacccaacgtgtgctgggctgttattctgctttggtaaacaattccctttttactcagtggcaggaataacctgcaggtaaaaaatacagataatatagccacagcagaaagcggtaatttattttttttatcattgttaaaaatagagactaatgatgtgaatgttttatcgaccacttcattttattttcacctaactaaaaatagtgcattaaaatattgaataattttagtgtggcagggagaccttggctttcctggtcaattttaattctcttttatacatataggctgtattgcaatgcatgtagtagccctcctaggactttggcattgctcctttctgtgttcatagttagaagacaagctccacattgccactgtctttaagataagtctggactaaagctcatccatcctgctgtaggtttccttgcaatagagtccatggcaagaggaactccccagaggggacttgggcaaaagcctgcctggggaaaatagataaaagggtggagtccttgcctactagttctgtagcaaagagccactagacctcatgagtgcttctcttggaaaatgggttgagcttaattcctgaaccccctaacaagcagcttgtcagtactcgatgagatggggctgaatgaagagtaaatgctggaatgcctcagtttccccatcttaagatgggtaggcagaagtcactctggtagtaaagttttcagattctcaactagcactttctttccccttagtttagttgttggaggatagaatctgtatgtgactgacagctagctggctttcttagtcttgagtaatggctcacacctgttttccttgttcatctcatctgagtgtcaagagggatagaggtggatggagtagggcagggtggggcagcttaaagaattccaggactccctacaggctagggaggacagttagaagtcaagatggaccatgactctctttttaaatggccaggcagattaggagctggcatgaacaacagccaagcacccattgccaggggcagagacagaaagagatctggaatgtcatcgcctctaaatttaggtcatgtcaagctttctgcagaaaggcgtgacatagcaactccaggttgcaagattgtgcagagtagtgcccaaactgggaagaaactctgagttcctattttttttttcgttagtttttttttttaattttaaatagcttgttttacatgtcaatcccagttccctctccctcccctcctcccgcactccccttccaccctccctcccaccctattgccacatacttccacataggggatgtctaga

SEQ ID NO: 575 - DNA, 7326 bp, Cricetulus griseus
  misc_feature (1020)..(1037): n is a, c, g, or t
  misc_feature (2261)..(2317): n is a, c, g, or t
  misc_feature (2782)..(2796): n is a, c, g, or t
  misc_feature (3579)..(3605): n is a, c, g, or t
  misc_feature (3786)..(3832): n is a, c, g, or t
  misc_feature (3874)..(3893): n is a, c, g, or t
  misc_feature (5769)..(5840): n is a, c, g, or t
  misc_feature (5884)..(5941): n is a, c, g, or t
  misc_feature (6045)..(6064): n is a, c, g, or t
  misc_feature (6435)..(6459): n is a, c, g, or t
tctagaaaagaacactagctatctcatgtaatcaaattggtgactatcctaattattatgagagagcttccgtccagtaagtgctagaagtagatgagagtaccacagacaagcactgagccaagctccaggagtcctgttgaaaagagagaggaaggattgtaggagccaaagagtcaagagcatgacagggaaacccacagagacagctgacctgggcttgtgggtgggagctcatggactcttgaccaacaattagggaactgcatgaggccaacctaggaactctgcatgtgtgtgacagttgtatagcatggtctgtttgtgaggcttttagcagtgggacagggcctgtccttggcgcttgagtggcttttgggaactgttcgcatgctggattacaaccagcttgatgctgggaagcattgtctgctaatgatgcgcttgcattgttggatctcatggaggactgcccttctgaaagacaggagaagtgaataggggaggggattgggaggagaggaaggagaggaaactgtgatagggatgtaaaataaattaaaaaattaattaattaaaaaagaacacttgtactggtagattggctaaaatgaaacaaagataaaagtacacaggaaaaagagaggagaaacctggggaggggggctccaaagagaggtgagggggggatgggaatggcagcttagtggaggaaggaagacatgacctacacgaatcgagctgtagtttttatctggagcatagggtaaagatgtttgaggagaaggaggaacacatgcttgtaaaacaggtcttcagaaccagcaacaatcatacagatgtgtccagggcgtccatgggcagcatgaagcgacagacccaacacatatttaacagtccatacagtgtcctatatgtggtattgtaaagtgatgagtaaattgtcactaggggactgttaatttagctgtaaaggacttgtctggcatgtgggtattcttgggttccctccttagcacnnnnnnnnnnnnnnnnnncacacacacacacacatatattctagtgttttgtagaaaggattcaagaaagcatgatttctcttgataatcagataatgtaataagacacacagtggttgatttcagcaatcaagtacaccttgcctgtctgtttgttgtatgggatggttgggtggttgtttgtttggtttgtaagatgggttggtgggttggtgggtggttgcttggttgggtagttggttgggtgattgggtgggtgggttggttgggtgggtgggttggttggtcgtttggttgggtggggtgggttttgttttgagacgagggatttactctatatctcagtttgtctcaaactcactatgtccacatgagtatgtgatgatgagattatctaagaccatagtgtctgtgttcatggaatgctctctctagcttagagaatttaaaaaatggccatgtagggaacacccctcagaaaaggagtttctatggcctccaagaataagaatggatcctcctagctcggagtcagcaaggaactgaagcccttaattttatagacacaaaggaayccattgtgtggctccttcccagccaagtytcagatgagtcacagacctgcatggcaccttatgcagtcttttgaggtcccaagaataggatgcagataagccatgccagaatcccaacacacaaagccttagtsatatagtaaatatgtattgtgtctaggctgctgcatttctggttatgctactgtgcagtaatacacaactaatacagatgtgatggttaatattatgtgacaacttgagtggggcacagaggtacagacacttggtaaaccattmtrggtgcacgtaaggatagttttggatgacataaacatttagattagtatgctgggtaaaatacattgtccatcccaatgggcatgggctttgtccaactagatgacagctggaatagaaaagtctgcctctctcatagttctcaggcctttgagctcagactagacagaactcacaggttctctgagctttccagcttgatgaatgtccatggcagtcttcacacttaacacctgacagacttaatgatcatatgaaccaattcaaatctgaccatcactcgggtcattcttttgattctgtcactttggagaactaataccgaggacataaaatgccatcacatcgttattttcttcctgtctgtgaatatttttcttttttttcnnnnnnnnnnnnnnnnnnnnnnnnnnnnnnnnnnnnnnnnnnnnnnnnnnnnnnnnntttggagcctaatcctggcacttgctctggagaccaggctgacctgaactctcagagawcctcctggccttggcctcccgagtctggggattaaaggcgtgtaccaccaacgctcggcctgtctgtgaatatttaaaatgaaaactttggaaatgttctgaaaccagctggtgtcagatagtcagagaactttcgtaaggtaggtgtgggttatagcataatcccacacaagaggctgaagcaggaggattttgtgtttgagggcagctagagccacatggtgagtccctgcctcaaaacacaaaagcaagacaaaaacaagctccaaataagattcactkggscctttctttccttccttctcagtgagtccacttsytttaaaatcaggtcttaaagacgcactagatgctgaacttaacagtaataataaatatcttctcttacagtacagattatgctctnnnnnnnnnnnnnnnataaagttcagccttaacctttgttctgtaaatgtttcctagtttttctactgccgtattataagacaaatgtcagcatgaaggcaggtttttcagaaaacacagcagctccacagatggcctctaatccataatcattaaagacaagactgcaactttttcaactgggaaatcattcaaggatgtttttctgaagtccctaccaggrcacamgccaccykggttgctgtgtgacatcagttaggtagactctgaactggcttcccaagaaattatacaaaagcaaggtgtcacctagtattagcataacttctgataactactgtcttagctggggtttctattgctgtgaagagacaccatgaccacagaaactcttataaaggaaagcaattattgggtccagcttacagttcagaggtttaatccattgtcatgattgcaggaagtatggtgssccacagssagacatggtgctggagaagtagatgagagttctatatcagattgacacacttcttccaacaaggccacacctccactcactctgagcctatggggccattttcattcaaaccaccaaagctacaaggtagcttataccccagcttgctatttctgatgagacttagtaaatagtcttaaaagcccataaaatgactcaaaactagtttttttattattattattagttcaaattaggaagaagcttgctttacatgtcaatcccttctccctctccctcatcaaaactagttttttgttttttaggttttttttcannnnnnnnnnnnnnnnnnnnnnnnnnngagcctatccwggcactcgctctggagaccaggcctcgaaatcacagtgatctgcctgcctttgcctcccgagtcctgggattaaaggcatgcaccaycaacacctggccaaaattagttttaagtccagttctaggagctccaatgccctcttttggcttccatgggaaccaggaacacnnnnnnnnnnnnnnnnnnnnnnnnnnnnnnnnnnnnnnnnnnnnnnntcaggcaaatatttatgcatataaaaataaaataaatctttnnnnnnnnnnnnnnnnnnnnagtgacattgtcttggaatttttgtggctgctstgcccttatgtgtaactggacactaccagcatctaaacactggcctgaaaccagccaaagaaaacctttgtgccaggtcctgtgtcaaagtattatgttccttttaggatatcctatatcstaaaggatttattttactgatagcatcttaacttcctttgaaaggttggtcttctcaagcagtcctcgtggagctgsctcctcagctaatgccaggggacaataatgatcccctcccaaaaccaaacaraaaaccatggcaactctggtttccttgggcagcacctgctttaagaatgagcaaatgaccaatcagctcatgaaactaaatactctattattactaaaatatttttttgagacagggcatggaattcatcacatagttcaggttggccttgaactcagagagactcacttacctttgcctcccacgtgctggaattaaaggcatgaaccaccacaccaaacataacacttgaattttgkaagagtccttcttccaatagatttgaggttttgaaaatgtggcacagaaaatatgaattcaaatataatsaaaacaagasataactttcaactaagtttctataggttcttgctaggaatcyyaagcttgtctgaaactctagagcttctgtttctagtcttctgagtgttagtattgtaggtatgtgccctgcctcagtgtgatgtttttgataatcttaaagaaatcaaagaaattttataaaagactagactgtgctacacaaaaagaatattcagatgccaagaaagagttcttagaaattaagaaatatgctactagtataaatcctttataaagtggaatgacaaatctgatgaaatcttactaaaagtagaaaaacataaacatcaaagacatgaataataagaaaatcatattgtgcatatsattaacctaaaacattaacttgcaaaaatagaatagtccaaaaagtaaacaaaataaataaatcaccaagacatgatacaaggacaattcctagaatgataaaacaagaatattcattataaaaggccctatcactaaagcacaacagaaacagactcaaaagataaatcttcattgtcactggagagaagtcatactatcatagcactcagaaggaaataaaaatcaaaatgtcaaaaaggacctcagcctctgaaacacaaatacaaaatatgtccgccttcttgacasgcattactcttcaattaacattttaagaaaactataaagagagcttagtattttaagaaatctgtagctatttcttttataagcatgacaactaagtttcctgatttaaacagacctaaaaaaccggtgaagtgagtggagaaaggggatacgaagacagcatcccacatgactgctcccagtaaaggcaaggtcttcatccattttatcctgaactctgggaaatttataaagaacagaaatgtatttctctcagttctggagcctcagtccaggacactaagtctaggtactacactctcacatggtggaaastagaaagcaagctcacttgtcactcactacctgatgcctctttcatcaatcccattgataaggaagagacctggcatctcagtttcctaaggactcagctcttactaacattagctgtcatttctgggtcactgcaacagaaagcctgacagaagcaacccaggggaagaaggatgtattttggctcactgtctctgaggatttcaacttatcccagcaataaagggataaaggcattgcagcaggaatatgtgtggcagaagctgtttatgtcacaataaacaaataaacacacgctagcgcgcgcgcacacacacnnnnnnnnnnnnnnnnnnnnnnnnnnnnnnnnnnnnnnnnnnnnnnnnnnnnnnnnnnnnnnnnnnnnnnnnggggggggcagacagacagacagagagggagagaggcagagagnnnnnnnnnnnnnnnnnnnnnnnnnnnnnnnnnnnnnnnnnnnnnnnnnnnnnnnnnnaatcaaaggcccacctccatcagactggtcccatatcccaaatttctagaacctcctaaaacaacaccatcaactgagggagacatttttggattgaaagcatnnnnnnnnnnnnnnnnnnnnatctgcctgtctgggggagtcacatttaagccatggtatcaattgacctcatgtaatttcagaatactacataaaactatcagatatttttcatgatgaatttctaaagcttgaaattccctttgaataaaggaccaactacagaattttgctgagtctacaattacatacatgaaaatgtaactacgaagtggccagccacaatgaaaattaaagtgtttgggtggtctgtctctattgatgctcttctttgccctgtttttttttaatattgttgatggtttgtttttcttttaagatacttggccccaagaaaaaaaatgacagccttaattaattttgtttactctcctgacagttttaaaagacannnnnnnnnnnnnnnnnnnnnnnnntgtagtattagaaagatgtaaaattaagggttgcttaagctgcgtgtagaattgaagagcacagcatttgagtgacagggtacaattagagatcatcagggatgtggcacaaaggtgtactcaacctcaccttttcctgcttagcagagaacagggtgcctcggtgagataggaaattaatcaaatagaagaagaaatagtaattttagaaggatcaaattttctggttagaatgatcaaaactacaagactgtaactaaaatatagtcaaacccattttcaactggaatctgtgctatttcatgtatagattaactagaatctaatttttaaattttcatcttacttccaaaaatatttgtccaaatactctgtgaatgcattagtttcttatgggaaaacatcatatcttttgatcaatgtgtttcttagcttgaggttctctccaaacaggaccaagacgaggccaggaccaatgtgatacaacccatagtcctcaagaaatagttgtcatttcttattccaattgcatcccaaggtctcatctcattttgcgtgtgcctttgacaccccatacccacataaactaaggtggtgttattttttgaggccctgaaggtatcttcaggaatccataagtgagccttaagctgcatctggatataggaatctgaaagtgtcccttctctgcatgatctcttctttcagtttttcaagtcagtgtgccacaggaatcaggaacgataaatggagaggggaagtgcagttgcttggtatagacaccccagaggctatttgcatcctgtccttcaaaatctctctgagccttcctgcctaagccttgttttgagttgggtttgtggtacc

SEQ ID NO: 576 - DNA, 5996 bp, Cricetulus sp.
  misc_feature (3496)..(3513): n is a, c, g, or t
  misc_feature (5161)..(5175): n is a, c, g, or t
gaattcccattcctctagctgcctacataaggactaagggaggatttctgtaattttaacgaatctgagataaagaaagaacatccgtttctacatcattttattcaggcggagagctgagaagagctgaggaaacggctttgcacttgcaaaacgccttctctcctcagagttttcggatcacatgggcctttctcattggccagatttcctgtaagtctctgctacaggaatagactattggtctatcctgaagactctcccgcctcctttacctaattggttcattcgaacaggccgccttttcaatgggtatgaataaaagaccgtccacgattggttactctaaacagagctaatgagagcgactcggtgattggttcctctgatttgggcgggctcggcgaaggttcaaatgaaactagggaagccatcctaaccgacgtgcgtctgtggaggagcgctctggtcgcgggtcgcctcgcgtttcccactgatttagtcgctttcgggactcacgagcccctacaggaccgtcaccatggagttgtcgccgctgcagsctryarmtgmrratrkgcmmrkgarswaraagaaaaatgaagatgccaagaaaaggctgtctatygaaagaatctatcagaaaaaaacacaattggaacatatattgctccgcccagatacctacattggctctgtggaattagttacccagcaaatgtgggtttacgatgaagatgttggcattaactacagggaagtaacttttgttcctggtttgtataaaatctttgatgagattctagttaatgctgcagacaacaaacaaagggacccaaaaatgtcttgtattagagtcacaattgatccagaaaataatttrattagtatatggaataatggaaaaggaattcctgttgttgaacacaaagttgagaaaatgtatgtcccagctctcatatttggacagctcttaacctctagtaactatgatgatgatgaaaagaaagtaacaggtggtcgaaatggttatggagccaaactgtgtaacatattcagcaccagatttactgtggaaactgccagtaaagaatacaagaaaatgttcaaacagacatggatggataacatggggagagctggtgacatggaactcaagccctttaatggagaagattatacatgtattaccttccagcctgatttatcaaagtttaagatgcaaagccttgacaaagatattgttgcactgatggttagaagggcatatgatattgctggttccactaaagatgtcaaagttttccttaatggaaataagctgccagtaaaagggttccgcagctatgtggatatgtatttgaaggataaattagatgaaactggtaacgcactgaaagtagtacatgaacaagtaaacccaaggtgggaagtgtgcttaacaatgagtgaaaaaggctttcaacaaattagctttgtcaatagcattgctacttctaagggtggcagacatgttgattatgtagctgatcagattgtgagtaaacttgttgatgtggtgaagaagaagaacaagggtggtgttgcagtgaaagcccaccaggtgaaaaatcacatgtggatttttgtaaatgccttgattgaaaacccaasctttgactctcagacaaaagaaaacatgactttacaggccaagagctttggatcaacatgtcaattaagtgaaaaattcatcaaagctgcaattggctgtggtattgtcgaaagcatactaaactgggtgaagtttaaggcccaaatccagttaaacaagaaatgttcagctgtaaaacataacagaatcaagggaatccccaaacttgatgatgccaacgatgcagggagtcgaaactccactgaatgtacacttatcctaactgagggagactcagccaaaacactggcagtttcaggtcttggtgttgttggaagagataaatatggggtatttcctcttrgaggaaaaatactcaatgtgcgagaagcttctcataaacagatcatggaaaatgctgaaattaacaatatcatcaagattgtgggtcttcagtataagaaaaactatgaagatgaagattcattgaaaactcttcgttatgggaagataatgattatgacagatcaggatcaagatggttcccatatcaaaggcttgctgatcaattttatccatcacaactggccctctcttctgcgtcatcgttttctagaggaatttattactcccattgtaaaggtgtctaaaaacaagcaagaattggcattctatagtcttcctgagtttgaagaatggaagagttctactccaaatcataaaaaatggaaagtcaaatattacaaaggtttgggcaccagcacatcaaaggaagctaaagaatattttgcagatatgaaaagacatcgtattcagttcaaatactctggacctgaagatgatgctgcaatcagcctggcctttagtaagaaacaggtcgatgatcgaaaggaatggttgactcatttcatggaagatagacggcagcggaagttacttggccttcctgaggattatttgtatggacaaaccactacttacctgacgtataatgacttcataaacaaggaacttattctgttctcaaattctgataatgaaagatctatcccatctatggtagatggtttgaaaccaggtcagagaaaggttttgtttacttgtttcaaacggaatgacaagcgagaagtgaaggttgcccagttagctgggtcagtggsagaaatgtcctcttatcaccatggtgagatgtcactgatgatgaccattatcaatttggctcagaattttgtgggtagtaataatttgaaccttttgcagcccattggtcagtttggtaccaggctgcatggtggcaaggattcagctagtcctcgatacatctttactatgctcagccctttgactcggttgttatttccaccaaaagatgatcacacattaaagtttttatatgatgacaatcagcgtgttgaacctgaatggtacattcctattattcccatggtgctgataaatggcgctgagggaattggtaccgggtggtcctgcaaaayccccaactttgatatccgtgaagtcgtaaataatatcagacgactgttggatggagaagagcctctgcccatgctcccaagttacaaaaatttcaaaggtactattgaagagctggcttctaatcagtatgtgattaatggagaagtagctattctaaattccacaaccattgaaatctcagagcttcccatcagaacgtggactcagacttacaaagaacaggttctagaacccatgttgaatggtactgagaagacaccccctcttataacagactatagggaataycacacagacaccactgtcaagtttgtcataaagatgactgaagaaaaattagcagaggcagagagagtgggactacannnnnnnnnnnnnnnnnngactagtctcacttgcaactctatggtgctttttgaccatgtaggttgcttaaagaaatatgacactgtgttggatattctaaaagacttctttgagctyaggcttaaatattatggattaagaaaagaatggcttctgggaatgcttggtgcagaatctgctaaactgaataatcaagctcgttttatattagagaaaatagatggcaaaataatcattgaaaataaacctaaaaaagagctaattaaagttctaattcagagaggatatgattcagatcctgtaaaagcctggaaagaagctcagcaaaaggtcccagatgaagaagaaaatgaagaaagtgacaatgaaaacagtgactctgtagcagaatctggaccgactttcaattaccttcttgatatgcccctttggtatctaaccaaagaaaagaaagatgaactgtgcaaacaaagaaatgaaaaggaacaagagctcaacacattaaagaacaagagtccatcagatttgtggaaggaggatttggcagtttttattgaagaactggaggttgttgaagccaaggaaaagcaagatgaacaagtaggacttcctggaaaaggggggaaagcaaaagggaagaaagcacaaatgtctgaagtcttgccttctcctcayggaaaaagagttattccccaagtgaccatggagatgaaagcagaagcagagaagaaaattaggaagaaaattaagagtgaaaacgttgagggcactcctactgagaatggtctggaactaggaagcttaaaacaaagaatagagaagaagcagaagaaagagccaggtgccatgacaaagaagcagactacattggcttttaagccaatcaaaaaagggaaaaagagaaacccctggtctgattctgaatcagatatgagcagtaatgaaagtaatgttgatgtccctccacgagaaaaggayccacgaagagctgcaacaaaagccaaattcacgatggatttggattcagatgaagatttctcaggttctgatggaaaggatgaagatgaagattttttcccactagatactactccacctaagaccaaaattccccaaaaaaatactaagaaagcactgaagccacaaaagagtgccatgtctggtgaccctgaaagtgatgaaaaggacagtgtgccagcttctccaggccctcctgctgctgacttgccagctgacactgaacagttaaagccatcttccaaacagactgtggcagtgaagaagacagccaccaaaagccagtcttcaacatccactgctggtaccaaaaagagagctgtaccaaaaggaagcaaatcrgattcagccttgaatgctcatggccctgaaaagcctgtgcctgccaaagccaagaacagccgcaaaaggaagcagtcctcttctgatgattctgactctgattttgagaaagtagtctccaaagttgctgcaagcaagaaatccaagggagagaatcaggatttccgagtggacttagatgaaactatggttcctcgagcaaaatctggacgagcaaagaagcctatcaaatacctggaggagtcagatgatgatgatcttttctgatggggagagtattgttttagcaatggttttactgagccnnnnnnnnnnnnnnnttatttgaagttcttctctaaccccctctgaatttagtttggggaagactttttataagactatcctacgtggccatcagctttatattctatatactgtctcagtgatgaccatctcatgacactgttttcttctctgatttatctatgttttgtgtctatttctttggtctctaaaatcttgcttgagattcttttggattccacataattatatgctcacttcagcatgacagaatttattgatcatatgttaagctaaaatgggtatgttttcaaaagtgtgcctctacctcctttcctatgtctactaagatatgaatgaggtagcaaggtgtttctttttcagttgtgtaggtagaattccatcacatagaactagacagttctagtatggatacagtgttcaacctatgatttgatgcatttttgtttcagccataaaaaattactcataactcttttaaacatcatcagagkctgaagaaagtcatcttgactgtgtctccatgatctcagtacatgtagcaagaaaaagagagttagtctggttatgtggcatcctgactttccttatgatacctttcgaacatgagatcacagggaggagacagaagtgctcagacttacatctgcatgctcaattgtgaaatgtggtccattgcaagtgtacagagttccaacttgtgaacgccaaaagcattctgtgctrttgtatgttacttaagtgctgttatcaatgtgttttgtaaatatttaatatgtctttctatrtagcttattccaacaattttgtacattaataaatatttaaacattgt

SEQ ID NO: 577 - DNA, 3626 bp, Cricetulus griseus
  misc_feature (2665)..(2707): n is a, c, g, or t
gtcgccgtctgctcgtgcctctcgggaactccgtccgcctgctcaggccgccccgaccgtccgtgtctcccccgcgctgcctctgagcccgtagcgttcgcccgccggccgacatgagcggggaccatctccacaacgactctcagattgaagcggatttccgattgaatgattctcacaaacacaaagataaacataaagatcgagaacaccggcataaagagcacaagaaggataaggaaaaggaccgggaaaagtcaaagcatagcaacagtgaacataaagattctgaaaagaaacataaagagaaagagaaaaccaaacacaaagatggaagctcagaaaaacataaagacaaacataaagacagagacaaggaaaaacgaaaggaggaaaagattagagcctccggggatgcaaaaataaagaaggagaaggaaaatggcttctctagtccaccacgaattaaagatgaacctgatgatgatggctatttcgctcccccaaaagaggatataaagccactgaaaagacctcgagatgaggacgatgctgattataaacccaagaaaattaagacagaagatatcaagaaggagaagaaaagaaagctagaagaggaggaggatggcaaattgaaaaaaaccaagaataaagataaagataaaaagggtgccgagtcagataacaagaaaaagaagccgaaaaaggaagaggaacagaagtggaaatggtgggaagaagaacgctatcctgaaggcatcaagtggaaattcctagaacataaaggacccgtgtttgctccaccatatgagcctcttccggagggtgtcaagttttattatgacggtaaagttatgaagctgagtcccaaagcagaagaagtagctacattctttgcaaaaatgcttgaccatgaatatactactaaggaaatattcaggaaaaatttctttaaagattggagaaaggaaatgactaatgatgagaaaaatgtgattaccaacctaagcaaatgcgacttcacacagatgagccagtatttcaaagaccaatcagaggctcggaagcagatgagcaaggaagaaaaattgaaaattaaagaagaaaatgaaaaattattgaaagaatatgggttttgtgtcatggataatcatagagagcggattgccaacttcaagatagagcctccagggcttttccgtggccgaggtaaccacccgaagatgggtatgttgaagagaaggatcatgcctgaggacatcattatcaactgtagcaaagatgccaaggttccttctcctcctccaggacataaatggaaagaagttcgacacgataacaaggttacttggctagtctcctggacagagaacatccaaggttctattaaatacatcatgctgaatcccagttctcgaatcaaaggtgagaaagactggcaaaaatacgagactgctcggcggctgaagaagtgtgtggacaagatccgaaatcagtatcgggaagactggaagtccaaagagatgaaagttcggcagagagctgtagctctgtacttcattgataagcttgctctgagagcaggcaatgagaaggaggaaggagaaacggcagacactgtgrgttgctgttctcttagagtggaacatatcaatctacacccagaattggatggtcaggagtatgtcgtggaatttgactttcctggaaaggactcaatcagatactataataaagtcccagttgagaaacgggtttttaagaacttacaactatttatggagaacaagcagccggaggatgatctttttgatcggctgaatactggcattctaaataaacatcttcaggatctcatggagggattaactgccaaggtgttccgtacgtacaatgcctccatcacgctacagcagcagcttaaagagctcacagcccctgatgagaatgtaccagcaaagattctgtcttacaatcgggccaatcgagctgttgcaattctatgtaaccaccagagggcaccaccaaagacctttgagaagtcaatgatgaacttgcagtctaagattgatgccaagaaagaccagctagcagatgctcgaagggacctgaaaagtgctaaggctgatgccaaagtcatgaaggatgcaaagaccaagaaggtagtagaatcaaaaaagaaggctgtacagagactagaagagcagctgatgaagctggaagttcaagctacagatcgagaggaaaataaacaaatagccttgggaacctctaaacttaattatctggaccctaggatcacagtggcttggtgtaagaagtggggggtcccaattgagaagatttacaacaaaacccagagggagaagtttgcttgggccattgatatgaccgacgaggactacgagttttgaccagtcttgccaggggttctatgaaaagggacagtgtggtttgaggaagatggataaactgagcctcacttgccctcacacctgagggagaggccacaagtcttaacaaaccaacatctttgcaaaaagatagacctggagatgttataagggagagctgagccagttgtcctatggacaacttatttaaaaatatttcagatatcaaaattctagctgtatgatttgttttgaattttgtttttatnnnnnnnnnnnnnnnnnnnnnnnnnnnnnnnnnnnnnnnnnnnggcaaattcagttttgctgcaatgtttggattctctcagctactgtatgcaaagtctgattatattggtgcgtttttacagttagggttttgcaataacttctatattttaatagaaacgaattcctaaactccctcctctccccatttcaggaatttaaaattaagtagaacaaaagaaaaacccagcgcacctatttagagttgtcactctatcgtcacgggaatcagttttcattaaacttgaagcagttatgacatcggcagtgttttggttcagacacctattcacagaaaagcatgatgagaaaatatttcctgacttgagtgttcctttttaaatgtgaatttttatttctttttaattattttaaaatatttaagccttcttcttgatcttaaagatcgtgtagcttggggttggggagggatgaagggtgagtgagtctaaggataatgaaataatcagtgactgaaaccattttcccatcatcctttgttctaagcattcttgtaacctttaagagatccatctttttctttggaaaccccagtctttcatttgaaagattttattgtatcaaaacttccacaggtcagtaaatttagaggaaaatgagcatttggtccaagaaaaaaaccaaaaccccaaaaaacaaaaaaggaaaaataatcaagattttagggcttttattttttcttttgtaattgtgtaaaaaatgggaaaaaaaagaccataaaaagcagaattttaatgtgaagacattttttgctataatcattagttttagaggcattgttagtttagtgtgtgtgcagagtccattccctcatctttcctcaagtatcttctatttttatcatgaattcccttttaatcaactgtaggttatttaaaataaactcctacaacttaacgg

SEQ ID NO: 578 - DNA, 282 bp, Mesocricetus auratus
  misc_feature (175)..(177): n is a, c, g, or t
  misc_feature (219)..(219): n is a, c, g, or t
  misc_feature (229)..(229): n is a, c, g, or t
  misc_feature (236)..(236): n is a, c, g, or t
  misc_feature (246)..(246): n is a, c, g, or t
  misc_feature (259)..(259): n is a, c, g, or t
  misc_feature (264)..(265): n is a, c, g, or t
  misc_feature (270)..(271): n is a, c, g, or t
  misc_feature (277)..(277): n is a, c, g, or t
tccctgtaaagggggggtgcagagagaacttctgaagtttttatttattttttatatttatatttatttattattcatttatttatgagaatctgctttggtgccaggtctggctaggtactgggaaataaatgggatataaggtggactaagttcccactatcatttagtcccnnnctctaggaccagcctctcatataagaagttatcacataaatnttgagatatnttgattnaccctatatnccatcctagaacnctcanncagtnnctgatngagga

SEQ ID NO: 579 - DNA, 1062 bp, Mesocricetus sp.
  misc_feature (226)..(240): n is a, c, g, or t
  misc_feature (1020)..(1034): n is a, c, g, or t
gacccggacgccgccgtcgtgggaccaatgagaactccgctgctgccgcgggcgctgccggtgctgtcgctgctgctgattttaggctcaggccattatgcagctgggttggatctgaacggcaccacctctgggaaaagtcaagcattttctgggcacmacaatgccactgaacttgtggtttctgtgggaagagaggtctctaccataagtgaaatgccctctnnnnnnnnnnnnnnnacaggggactatgactactcagaggaatatgataatgaaccacaaatatctggctacgttatagatgattcagtcagagttgaacaggtaattaagcccaagaaaaacaaggcggaaggggacaagacttcagacaaacccaaaagaaggaaaaagggtggcaaaagtgggaaaggtagaagaaataaaaagaggaagaagaacccatgtgatacggagttccagaacttctgcattcatggtgaatgcaaatacatcgagaacctggaggcagtgacatgcaattgtcatcttgactactttggtgaacggtgtggagaaaaatctatgaagactcacagcggtgatgacaatgacctatccaagattgcattagcagccataactgtcttcgtctctgctgtaaccttgatagctgttggcatcgttgtcatagtcctgcttcgcaaacggcacctcaaggaatatgaagaagaagcagaagagcgaaagaagcttcgtcaagaaactggaaatgtgcctgtcatagcctagttgaagacaattcaggttaacagtcatgtcactgccaagtagaagcaaaaatacccacattggtcctcttctctatgaaggaagtggagcctcctgatggttccagtctctcggttgtcacttttcatgacggtcttatttctgtacataatgagatgtgtggagataaagtattttttcatgttgtaaataatctatttatatttaagtcgttatttatcttatagcttcattaaactttttttnnnnnnnnnnnnnnnacaggggactaattatctacacattcat

SEQ ID NO: 580 - DNA, 375 bp, Mesocricetus auratus
  misc_feature (191)..(193): n is a, c, g, or t
  misc_feature (201)..(201): n is a, c, g, or t
  misc_feature (205)..(208): n is a, c, g, or t
  misc_feature (255)..(255): n is a, c, g, or t
  misc_feature (270)..(270): n is a, c, g, or t
  misc_feature (280)..(280): n is a, c, g, or t
  misc_feature (307)..(345): n is a, c, g, or t
  misc_feature (360)..(361): n is a, c, g, or t
taagtyaaactcacagaatgtgtggtacgtgcccggcctttgctggcagggtcacaccgattatagcatttaatctccactgccaccccacacagtaagaactgttatcactgtcatttcgcagataggaaaattgaagctggaaagagttaggtaatatctcaaagtacgttgtcagaagttagaatttnnntacagacncccnnnnctctggtgaccatgatatctgttgtctcccaaatcactaataaggangctgtattatagatngctaccaagntgccttrgttctattmtaawyagaatnnnnnnnnnnnnnnnnnnnnnnnnnnnnnnnnnnnnnnngtcaggtacgattgnnctatgtgcgtctat

SEQ ID NO: 581 - DNA, 561 bp, Cricetulus griseus; identical to SEQ ID NO: 101
  misc_feature (2)..(16): n is a, c, g, or t
  misc_feature (90)..(120): n is a, c, g, or t

SEQ ID NO: 582 - DNA, 264 bp, Cricetulus griseus
  misc_feature (142)..(208): n is a, c, g, or t
  misc_feature (219)..(252): n is a, c, g, or t
  misc_feature (259)..(259): n is a, c, g, or t
gagaggatatgatctaaaagtactaatttacccagtaaaatccaatttccctggagggataacttcttctggaatgatattttccccaaggacccacactggctgaggctcaatagttaaggaacaaaaacaaaaaaaatannnnnnnnnnnnnnnnnnnnnnnnnnnnnnnnnnnnnnnnnnnnnnnnnnnnnnnnnnnnnnnnnnncgcttggcgtnnnnnnnnnnnnnnnnnnnnnnnnnnnnnnnnnnttatccngctca

SEQ ID NO: 583 - DNA, 574 bp, Cricetulus griseus
acatgcagcggcacactgggcaggtgccggacttctgaagccagatggacacacatggcttatggaaatagtggtggcacgggagctcagttgccacctcacccttcacatattcactgcagcagatgggacagcacatttcttggcccactgcaccatgatcttcaktgaccaggatctcaggaagcgcatcaatgctctccttgcttgcaggtgggttagccacctcgacatcaacggcgagagactccaggtgcgcaagggcagtctccatcgcctgggccaggcgctcttcgagagccatgtaggtgaggaactgaggatccacataggagatggcttctgccactcccaacccatctgcaaagccatcaaataggctccagtccacttctaggtcttcgctcacactggagtcatcttccaggttgttgtttccatccagcacgaacatcccaggctgcatcatctcatggccggactcattatccgcttcactgctgctttcattctcattgtaccggagccaaggaatttctccttcttccagggaggcctgctcttcctgaaggac

SEQ ID NO: 584 - DNA, 581 bp, Cricetulus griseus
atgctctctctctcaagatgcattaaagctttactgcagamgkrkscgagtgtcctgtgttgttcttgctggcgagacgatcgcgcgggacatctggtgccgaaacccgggaacttgttaacatcgccggcactgcggagacccctcggacggggcggattcagaactgcagggtggatgaagagaatcccctgtggatcccggaaagactcaccctaagagccccttcggaccctcaaaagtcggaactccaccctctccccgggagttgagagccgctattatccagattaactccatgcaccttgacctgtccttgacggagggattgtcatcatggatcgcttcagctgtctcctattttaaggaatgggtgggggtgggacatttggcacaattctctgcagtggtgtggtgtttatgcttgggactgtgtgtagactcaaaacccaaacaaaawaagataaggtrgtggttgcacagacactcgctgccctagagaatggaatctcccccggcatttggctaagcatgttgaggcaataggtcgccgactgctcagctcctgcacctccggaggc

SEQ ID NO: 585 - DNA, 569 bp, Cricetulus griseus
  misc_feature (204)..(220): n is a, c, g, or t
  misc_feature (259)..(284): n is a, c, g, or t
tagttacscaktaattatgtccccatgactgtcagccaggactaggctgttccaagagtcctgcttggagctggcctgtgatgtctgagtgacaggagatgcatatcctggkggggagagcttcaragccgacagcactggatgaatggagggcccatggccggacacagaactgacagaraatgcctgggatatggaggtgcnnnnnnnnnnnnnnnnngacaacccaggctctgtcttgatgggacgcatctyttcnnnnnnnnnnnnnnnnnnnnnnnnnncattgctggagttgctggaggcactgctgctgggagggaggctctcaccaggaggacctgctgatgtcttaratttattcaggttcttgggctttcgtttcctggtttgaatcccctccttccgcattgcaagargcctargtaccccatggagcttcatgtaraggccgcasgcattgcacacaggctcgccctcggcattgcggcgccacagtgtagtggtggtggtctggcagttggcacaggagaggcctacccggcgggaagcggacagtcggcgctgag

SEQ ID NO: 586 - DNA, 514 bp, Cricetulus griseus
actacctccattcctcttgagaacttcaaaataaaaacagccagtctgcctggctccagatcttcttctagggtatcgcttcacctccaggggctatagttctgatgtgacatgacgatccagcgcctgcctctgggggctacatcacatgattgcacarcatgagttttgtttccgggcakttttatagaacgctttcgactgtgttcccagtacttctgatttggataccaagtcatcaagcttctcgcctcgctctaacaaagattccatggkgttatgcagaatgattttggtctcgtccasttcggcttgtactttgctcattggatcagcttctcgggggttctggtatctactaaggtgaccatccagggctgtgtactcrattgtagcargwgatcctactggccagtctatcctatccacctgtttggagaattcatctagtaccttctccagcaaggtaaaggccactctggaaggatattcgctgtcagcaatgaccacacct

SEQ ID NO: 587 - DNA, 574 bp, Cricetulus griseus; identical to SEQ ID NO: 295

SEQ ID NO: 588 - DNA, 579 bp, Cricetulus griseus; identical to SEQ ID NO: 341

SEQ ID NO: 589 - DNA, 262 bp, Cricetulus griseus
  misc_feature (153)..(207): n is a, c, g, or t
agggcaggcagagtatatacaggatacgcttaaattaaaacacaaataataattaagacacacagagtgaaggaagggctaaggcagaaggtggggagggggcctcctggcccactgcagaagagggtgaggcctcctgtgggcacattaggnnnnnnnnnnnnnnnnnnnnnnnnnnnnnnnnnnnnnnnnnnnnnnnnnnnnnnntcgtctgcctccgtttgcgaccctgagaggttccgggtccacsggkktstcctca

SEQ ID NO: 590 - DNA, 5626 bp, Mesocricetus auratus
  misc_feature (4664)..(4684): n is a, c, g, or t
  misc_feature (4875)..(4894): n is a, c, g, or t
ggatcccctatcgcccgcgagggcggcgtccttgctggcgcccctcacggctcagggaccaataagaaggtcgtgatgctggaactcgaccagctattggttggctcggccgtggtgagagatggtgcggtgcccgttctccgcccgggtgcgagcagtgggcggttgttaaggcgaccgttcgtgacgtaggccgtcaggctgagcagccgcccggtgattggctaggcgatcggacgatcctttcttattggcggccctgagcgtgcgtaagctcagttccttccgcccgaggctccgttggctggagaccgcggctgggccggctttggggcctccattgagatccggaggtgagcggacagactctggggactggccgccagtggccgcggggctggcgggcggcggagcccgtgctccgccagggcccacgaggtggctgtggaccgaggggaccgcgaggaggcgtccttgaggcccggcggcagggcgggggcctcgggatccgtgggccggctaggccggagggccagcagcatcagggcgttcgtgggtccagttcagagggctccgtgctgaccgggcggtcatgttcatcccggtagaatgagtgtcaggcaggggggacagcgggagcggatgttcgtgttcccctaggggacaagtgttcacgcccaggcgttgctttgaagcaggacctttctttaaagtgatggagaaggtcctggtgtaggttgcagattgacccaaagccagaatccgcgtggatacggcaggttatgcctctcctagtgggccgggaggatgcgaggtcagttcaggcaaagctagcccccaaaagtctgtcgctctgcctgtatgtcttgtctttctcctaaggggcgtaggctcattgataactcatgtcctcaccttgcactccttttggaattatttggtttgagtgaagaagaccggaccttcgaggttcgcaacttaaacaatagacttgtgaggwwssaggrrsykartgkmtacaatgttgtcamgacttttccgtatgcatggcctctttgtggcctcccayccctgggaagttattgtggggacggtgacacttaccatctgtatgatgtcmatgaacatgttcactggcaacaacaagatctgtggttggaattacgagtgcccaaaatttgargaggaygtattgagcagtgacatcatcatcctcaccataacacggtgcatcgccatcctgtacatttacttccagttccagaacttacgtcagcttgggtcgaartatattttaggtattgctggcctgttcacaattttctcaagttttgtctttagtacagtcgtcattcacttcttagacaaagaactgacrggcttaaatgaagctttgccctttttcctgcttttgattgacctttctagagcgagtgcactagcaaagtttgccctaagttcaaactctcaggatgaagtaagggaaaatatagctcgyggaatggcaattctgggccccacattyacccttgatgctcttgtggaatgtcttgtaattggagttggcaccatgtcaggggtgcgycagctkgaratcatgtgctgctttggctgcatgtctgtgcttgccaactacttcgtgttcatgacrttyttcccagcgtgtgtgtccctggtcctwgagctttctcgggaaagycgagagggtcgtccaatttggcagctyagccattttgccmgagttttggaagaagaagaraataaaccraaccctgtaacccaaagggtcaagatgattatgtctttaggyttggttcttgttcatgctcacagtcgmtggatagctgatccttcccctcagaayagcacaacagaacattctaaagtytccttgggactrgatgaagatgtgtccaagagaattgaaccaagtgtttctctctggcagttttatctctccaagatgatcagcatggacattgaacaagtggttaccctgagcttagctttyctgttggctgtcaagtacattttctttgaacaagcagagacagartcyacrctgtctttaaaaaatcctatcacgtctcctgtygygaccccaaagaaagctccagacaactgttgyagacgggagcctstgctykygagaaggarygagaagctttcrtcrgttgaggaggagcctggggtgarccaagatagaaaagttgaggttataaaaccattagtggyrgaaactgagagyrcaagcagagctacattygtgcttggcgcctctgggrscwgcyctccagtggcasygrggacacaggagcctgaaattgaactycccagtgagcctcgrcctaatgaagaatgtctgcagatactggagagtgccgagaaaggtgcaaagttcctkagcgatgcagagatcatccagttggtcaatgccaagcacatcccrgcctacaaattggaaacyytaatggaaactcatgaacgtggtgtatctattcgccggcagctcctctccacaaagcttccagagccttcttctctrcagtwsctscmttayagwgayyaymwktrttycstggtgatgggagcttgctgtgagaatgtgatcggatatatgcccatccctgtcggagtrgcagggcctctgtgcctggatggkaaagagtaccaggttccaatggcaacaacggaaggctgtctggtggccagcaccaacagaggctgcagggcaataggtstwgktggakktgycwrcwkycrrgtmywwgcakmtgggatgacccgrggcccagtggtgcgtcttcctcgtgcttgtgattctgcagaagtgaaggcctggcttgaaacacccgaagggtttgcrgtgataaaggacgccttcgatagcacyagcagattygcacgtctacagaagcttcatgtgacyatggcagggcgcaacctgtacatccgtttccagtccaagacrggggatgccatggggatgaacatgatttccaagggcactgagaaagcacttstgaagcttcaggagttctttcctgaaatgcarattctggcagttagyggtaactactgcactgacaagaaacctgcygccrtaaactggatcgarggaagaggaaagacagttgtgtgtgaagctgtyattccagccarggtggtgagagaagtattaaagacractacggaagctatgattgacgtaaacattaacaagaatctkgtgggttctgccatggctgggagcataggaggctacaatgcccatgcagcaaacatcgtcactgcyatctacattgcatgtggccaggatgcagcacagaatgtggggagttcaaactgtattactttaatggaagcaagtggtcccacgaatgaagacttgtatatcagctgcaccatgccatctatagagataggaacygtgggtggtgggaccaacctcctaccrcagcaggcctgtctgcagatgctaggtgttcaaggagcgtgcaaagacaatcctggagaaaatgcacggcarcttgcccgaattgtgtgtggtactgtaatggctggggagttgtccttgatggcagcattggcagcaggacatcttgtyagaagtcacatggttcayaacagatcgaagataaatttacaagatctgcaaggaacrtgcaccaagaagkcagcttgagcagcctgacagtattgaactgaaacacgggcattgggttctcaaggactaacatgaaatctgtgaattaaaaatctcaatgcagtgtcttgtggaagatgaatgaacgtgatcagtgagacgcctgcttggtttctggctctttcagagacgtctgaggtcctttgctcggagactcctcagatctggaaacagtgtggtccttcccatgctgtattctgaaaagatctcatatggatgttgtgctctgagcaccacagatgtgatctgcagctcgtttctgaaatgatggagttcatggtgatcagtgtgagactggcctctcccagcaggttaaaaatggagttttaaattatactgtagctgacagtacttctgattttatatttatttagtctgagttgtagaactttgcaatctaagtttattttttgtaacctaataattcatttggtgctggtctattgatttttgggggtaaacaatattattcttcagaaggggacctacttcttcatgggaagaattacttttattctcaaactacagaacaatgtgctaagcagtgctaaattgttctcatgaagaaaacagtcactgcatttatctctgtaggccttttttcagagaggccttgtctagatttttgccagctaggctactgcatgtcttagtgtcaggccttaggaaagtgccacgctctgcactaaagatatcagagctcttggtgttacttagacaagagtatgagcaagtcggacctctcagagtgtgggaacacagttttgaaagaaaaaccatttctctaagccaattttctttaaagacattttaacttatttagctgagttctagatttttcgggtaaactatcaaatctgtatatgttgtaataaagtgtcttatgctaggagtttattcaaagtgtttaagtaataaaaggactcaaatttacactgataaaatactctagcttggnnnnnnnnnnnnnnnnnnnnntagcgttgtccaggaaaccctgcttgcttgccaagcctaatgaagggaaagtcagctttcagagccaatgatggaggccacatgaatggccctggagctgtgtgccttgttctgtggccaggagcttggtgactgaatcatttacgggctcctttgatggacccataaaagctcttagcttcctcaggggnnnnnnnnnnnnnnnnnnnnttaattttttttttaatgtaccagttttgtataaataataataaagagctccttattttgtattctatctaatgcttcgagttcagtcttgggaagctgacatctcatgtagaagatggactctgaaagacattccaagagtgcagcggcatcatgggagcctcttagtgattgtgtgtcagtattattgtggaagattgactttgcttttgtatgtgaagtttcagattgctcctcttgtgactttttagccagtaacattttatttacctgagcttgtcatggaagtggcagtgaaaagtattgagtattcatgctggtgactgtaaccaatgtcatcttgctaaaaactcatgttttgtacaattactaaattgtatacattttgttatagaatactttttccagttgagtaaattatgaaaggaagttaacattaacaggtgtaagcggtggcttttttaaaatgaaggattaaccctaagcccgagacccagaagctagcaaagtctggcagagtggtaaactgtcctgctggggccatccaatcatctctctccattacactttctaactttgcagcattggtgctggccagtgtattgtttcattgatcttccttacgcttagagggtttgattggttcagatctataatctcagccacattgtcttggtatcagctggagagagttaagaggaagggaaaataaagttcagatagccaaaacac

SEQ ID NO: 591 - DNA, 2641 bp, Mesocricetus auratus
  misc_feature (61)..(127): n is a, c, g, or t
  misc_feature (771)..(785): n is a, c, g, or t
  misc_feature (1653)..(1692): n is a, c, g, or t
  misc_feature (1713)..(1799): n is a, c, g, or t
  misc_feature (2092)..(2135): n is a, c, g, or t
  misc_feature (2413)..(2442): n is a, c, g, or t
cttgagcccctcccccaccaccaccacctcccgatgggcttctattgttttggaataggannnnnnnnnnnnnnnnnnnnnnnnnnnnnnnnnnnnnnnnnnnnnnnnnnnnnnnnnnnnnnnnnnngggatcctggactgtccctgagaacaggtgtcagtgccccgcccctggagctggctgacgatggcggaagggccaggtccacttagtctagcaggcatctgtccctgtccatgaaggcttacagtgttctatggctggaaaagatactccgtaagcctgcagcaacttcgtcctgtaggccaggttcgcctaccaacatatctagccctgtctgccttaagagcaacagccacagaggcgggggggaatgcagatagcccctgactggtagtggacaagcagacagattcttactcctcctcctccgtttctcttttatccctctctggtcctcagagagtccgtcctccccaactgtcttccccctggtctcctgcgagagccccctgtctgatgagaatttggtggccatgggctgcctggcacgggacttcctgcccagctccatttccttctcctggaactaccagaacaagtctgaagtcaaccagggtgtcagaaccttcccaacactgaggatgggagagaagtatgcagccacctctcaggtgttcctgcctcccaagagtgtcctcgagggttcagatgaatacctggtgtgcaaagtgcaccatggcaacaccaacaaagatctacgcgtgccnnnnnnnnnnnnnnnccagccagtgggggcagaggcccaggcatggcccagaggaggccgggggctgcagcttagagcaatctgagctcacaccttgtcctttcactccagtcgtcacagagatgaaccccaacgtgagtgtgttcgttccatcccgggacgccttctctggccctgccccacgaaagtccagactcttctgcgaagcctctaacttcagtcccaaacaaatcacagtgtcctggctacgtgacgggaagcctgtgaagtctggcttcaccacagagccagtgactcctgaagacagaggttccggaccccgaacctacaaggtcataagcacactcacgatcaccgaaagcgactggctgaacctgagtgtgtacacctgccgtgtggatcacaggggtctcaccttctggaagaatgtgtcctccacatgtgctgccagtgagtgccctgtcctagcccagtggctatccctcccagatcagggccaccctcttacaagtaaggctaatgccaccctgacatggccatttgctccttgagccttggtttcaagggccaagaccagtgtcttcccttaagcagaacctcggaggttcagtaaatcagttggtactatttggggatagagacttaagcttttctccgacttcacaacttgacagccactgacacaatgttttcttgactgcaggcccatccacagacatccaagccttccctatccccccctcctttgttggcatcttcctcaacaagtctgccacgctgacctgcctggtcacaaacctggcaacctacgacaccctgaacatctcctggtcttcccgaagtggtgagccactggaaaccaaaactaaactcactgaaagcnnnnnnnnnnnnnnnnnnnnnnnnnnnnnnnnnnnnnnnntttgtgtggaagactgggatnnnnnnnnnnnnnnnnnnnnnnnnnnnnnnnnnnnnnnnnnnnnnnnnnnnnnnnnnnnnnnnnnnnnnnnnnnnnnnnnnnnnnnnttcccatttccttgtcctctggtcagctccagggttcttcctctgtgtcacagggatggcaggtccccttctgccaccatatcctcaccactgtctctacttgcagagatgaacaagaccccccctgctgtgtaccagcagccactagcccgagaacaactgatcctgagggagtcagccacagtcacctgcctggtgaagggtttctcccccgcagacatctttgtgcagtggcttcagagggggcaacccttgtcccaagacaagtatgtgaccagcgccccaatgcgggnnnnnnnnnnnnnnnnnnnnnnnnnnnnnnnnnnnnnnnnnnnngtgacagaggaggaatggaactccggggagacctacacctgtgtggtaggccacgaggccctgccacacatggtgaccgagaggaccgtggacaggtccaccggtaaacccacactgtacaatgtatcgctgatcatgtctgatgcaggtggcacctgctactgaccatgctagcccccaaccaggcaggctctggggggccagttgcactgtttacacaaactaaccatgtcagagtgagatgttgcatcttataaaaactagaaataaaaaaaaannnnnnnnnnnnnnnnnnnnnnnnnnnnnntgcaatgcttttggctgccgaggcaacggctgtgttgtgtttgccttgcacgcaccctgcagatttgcctctgccctgacccttcctctgtctgcacagttgcctccttctgtgtgaactcacagagtgtaaggatgccatccctccagctgcttccagatacagggctggaagcgtggctaccctggtgcaggcagaa

SEQ ID NO: 592 - DNA, 3959 bp, Mesocricetus auratus
  misc_feature (40)..(57): n is a, c, g, or t
  misc_feature (442)..(565): n is a, c, g, or t
  misc_feature (3891)..(3908): n is a, c, g, or t
  misc_feature (3930)..(3950): n is a, c, g, or t
aaaagctgaaactgggacttgctttgtttttaggacaggnnnnnnnnnnnnnnnnnntgtatgtttttctctgtgcaaagaaacaggtgagatgcacctcagggttagccatcatgttcccattctccttctcatattacatttcttcccaccaggcaccaaggtttgagactctgctatgtcacttcccaagattttacccacttcgcaatggatgcacacatgaaaacatccctggcgtaccacaaatacactgaattttcatttctccaccatagaggatatttgaattgggagctttctcctcatactgacccatttttcagtttccctggtcattgatttctagcttcactcattatggcaagaaatgatctttgtatagttccaacactttcggatgcattgtatcctgttctatgaacttgcttgaagtaaagtnnnnnnnnnnnnnnnnnnnnnnnnnnnnnnnnnnnnnnnnnnnnnnnnnnnnnnnnnnnnnnnnnnnnnnnnnnnnnnnnnnnnnnnnnnnnnnnnnnnnnnnnnnnnnnnnnnnnnnnnnnnncactgcttctggcagcatatttgcatgacatgcaggttgcttgttaatgcagaaacacattagcccgagataaaggcaccatgagaggagagggcagctcttagcaggtagaccagagcaccagggctgcaggactctttctcagggtcctttcttgtccctgactctggatcaagaggaaacacttcaggaagggttggtaatgacatctcacccaaaatcccaaagctgtgcagtgctttaggccaaggaccctttggaagggactgtgagtctgccaaaaggcagtcacgacaggctccttctgccaaggttcacagctgtgttgcaatttaccagcacagggatcttcctggatttgtttattcaacacagagtgtgtgccatgcagtgtcacgcaaacacgcaaagctgaatttcagtcccaaaggcctaaagaagtcaatggtcctctgggttggagatgtcatagttgtaaaggcttcacaaaattaatgatgacgatgatagcctttgggaagtaagtgtttgttcagctcttattggacagctgtgaaagagtgatcagtgggtctctagtctggacatcatctctcacagacaccatttccaactctgcagaaagaggtaggggactcacccccagagtttcccccagttgtctgcatttggcatccctgagctcagccgtggggccctggacagttcctgctgctcagatgctgaacttgccgcaggtgagaccacctgtcgggtcctgaacaataagcttcactcagctctgggcaccaggcttgaggcacaggatggacagccatgggcactgcccatgagcactcgcagaggaagtggaataggaaatgccaagcgttgggaacagatgagagaaacacagggcatccgagacagagaggaggcaggagtggagggaaaggaggacagacaggagtgaggacagaaaggggagacctctgatccctacgtacagcgtctcttggtgtctccattcggccgtcccactctctcatgcttgactctccagccctgtgtgtcaattaatgtctaccagcggtggcctctgtccacgcccctgcttccctctattgctcttgtggcatcgtctactgcttatcgtcagtctttatctgtctccatattacctgagctgtgcatcttggtgttggctccttgggaatttcgaatatgtttgtcttatttattcttttgtcccagactcctcctggatccacctcagctcacgcccattcagccttgtgttctcttttagcacttttatccaatcattttatacgtgtgagcactttggctgcaagtataatatgtccaccatgcacattcctggctcccactgacgtcgggaaaaggagttggatcccctgggaggggagttgcagacagttgtgagctgccgtgtggacaccaagggtgggactcaggtccccttcaagggcaacaagtgtcctcaacatctaagccatcctcttgcgcttggtgcttccggtactctcttggatgaatgggtgctccctgaagcacggtcgacctatgagagccaccctaaaggaaacagttctccctttcccagaagctgtcggttgccaatatcccctcagctttgcatcctgtgagctggtgtaaaagctgtacatggtttcatgacgactattcctgtcactcctgtcactcctatcctgtgttcaccgcacttaccaccgtggtcttccatttctctctcccccctttcccacacctgctagccttcttcctgcctctcagattccttcctgattccttccagtcttccctgctgtcttcctgtctgtccgtggggaaggaaagctccctgccctcagctcagagaggtggcctgggcctcatgagtaaggccgaggagtgtgtccaccttgaaacactcctcgtctcctgtctcccctccaaagagagactttgggagagttgattagaggaggtgaaagccaggggagaccatgaagaaaagccctgccagcttcacactgataaactccactagccacaaaattgaaacagctgccgtttgctgagcacatctgttgttggtaacctttgtgacttcaatggttcgtgcctcattgaaatagcctgaaagaggatgttgtcactggtcccatgaggctcaaacaatcacatcaacttttcgtggtcacaccacaacatctggataagattaagatcctaaccctagcctcagtcatggtctttgccatccatccaataatgacaatccagccactgggaccctgaggccagcaaagagaagggatttcctgagttcacaagcatggctgttagagatttgtttaggactggcattccatctcctttccaccacccagaccaattgagtgtctctacagcaagacacccttggactctttcctaaaaccctaactgcatgtctgtgaagcgctttctcccttgagaccctcaaccctcgatgtgggtgtttccagatgtttcctaacccacactcccattccattgcacaatcctggcatgccttcttctgccttggaatccgctacatgaaaaccagcccagaggtgagccctcctccgtccttgcagctggtgtcataaacaaggcagttgtatgtcagggcaatagttaggaggaaaaatgaggtaattattaagcagaagccaaagccacccctccagcctagagtataaaggcacactgtccccgtcatcatctacctgtgctgtccttcccactgccaccatgctggtgtccgggatgctcctcgtggttgtgctgacctgcctcagcgtcatgatcataatgtctgtgtggaggcagaggagactgttgaggaagatgcctccaggacccaccccactgccctttattgggaactttctggagctggacacagagaagttttatgactgcctttcaaaggtagtaccgggcagggagatgggtgagtttgacaagtggtgtctgggagtccgaggcgggagtgtgaggcagaagccggaccaggtcagaatgtggacataggatgggggcctaggggtctgcatccaagtccctgacattgggacaatggccgtcctaagagtggcttctctaactcctggcgtctcccctcagatgagggagcggtatggccctgtgttcaccatccacctggggcctcgccctgctgtgatgctgtggggttacgatgctgtgaaggaggctctcattgaccaggctgaggagctcagtgaccgaggagagcaagctttcttcgactggttcttcaaaggctatggtgnnnnnnnnnnnnnnnnnncctggctgttctggaactcacnnnnnnnnnnnnnnnnnnnnnagactcata

SEQ ID NO: 593 - DNA, 3295 bp, Cricetulus griseus
  misc_feature (54)..(82): n is a, c, g, or t
  misc_feature (88)..(138): n is a, c, g, or t
  misc_feature (141)..(153): n is a, c, g, or t
  misc_feature (183)..(222): n is a, c, g, or t
  misc_feature (244)..(314): n is a, c, g, or t
  misc_feature (322)..(366): n is a, c, g, or t
  misc_feature (369)..(395): n is a, c, g, or t
  misc_feature (411)..(450): n is a, c, g, or t
  misc_feature (482)..(595): n is a, c, g, or t
  misc_feature (598)..(624): n is a, c, g, or t
  misc_feature (643)..(680): n is a, c, g, or t
  misc_feature (687)..(700): n is a, c, g, or t
  misc_feature (702)..(824): n is a, c, g, or t
  misc_feature (827)..(853): n is a, c, g, or t
  misc_feature (869)..(909): n is a, c, g, or t
  misc_feature (916)..(929): n is a, c, g, or t
  misc_feature (931)..(965): n is a, c, g, or t
  misc_feature (970)..(1046): n is a, c, g, or t
  misc_feature (1058)..(1084): n is a, c, g, or t
  misc_feature (1100)..(1139): n is a, c, g, or t
  misc_feature (1146)..(1159): n is a, c, g, or t
  misc_feature (1161)..(1198): n is a, c, g, or t
  misc_feature (1207)..(1283): n is a, c, g, or t
  misc_feature (1287)..(1313): n is a, c, g, or t
  misc_feature (1329)..(1368): n is a, c, g, or t
  misc_feature (1376)..(1389): n is a, c, g, or t
  misc_feature (1391)..(1514): n is a, c, g, or t
  misc_feature (1517)..(1544): n is a, c, g, or t
  misc_feature (1560)..(1599): n is a, c, g, or t
  misc_feature (1621)..(1688): n is a, c, g, or t
  misc_feature (1693)..(1744): n is a, c, g, or t
  misc_feature (1747)..(1771): n is a, c, g, or t
  misc_feature (1789)..(1829): n is a, c, g, or t
  misc_feature (1857)..(1975): n is a, c, g, or t
  misc_feature (1978)..(2004): n is a, c, g, or t
  misc_feature (2020)..(2060): n is a, c, g, or t
  misc_feature (2067)..(2080): n is a, c, g, or t
  misc_feature (2082)..(2205): n is a, c, g, or t
  misc_feature (2208)..(2234): n is a, c, g, or t
  misc_feature (2257)..(2290): n is a, c, g, or t
  misc_feature (2297)..(2310): n is a, c, g, or t
  misc_feature (2312)..(2435): n is a, c, g, or t
  misc_feature (2438)..(2464): n is a, c, g, or t
  misc_feature (2480)..(2520): n is a, c, g, or t
  misc_feature (2527)..(2540): n is a, c, g, or t
  misc_feature (2542)..(2659): n is a, c, g, or t
  misc_feature (2667)..(2693): n is a, c, g, or t
  misc_feature (2709)..(2739): n is a, c, g, or t
  misc_feature (2755)..(2768): n is a, c, g, or t
  misc_feature (2770)..(2807): n is a, c, g, or t
  misc_feature (2820)..(2840): n is a, c, g, or t
  misc_feature (2842)..(2893): n is a, c, g, or t
  misc_feature (2938)..(2978): n is a, c, g, or t
  misc_feature (3006)..(3062): n is a, c, g, or t
  misc_feature (3067)..(3089): n is a, c, g, or t
ccacgaatatttgtcattcctgacctgttttttgtttgtgtgtgtgacagacannnnnnnnnnnnnnnnnnnnnnnnnnnnngcaaannnnnnnnnnnnnnnnnnnnnnnnnnnnnnnnnnnnnnnnnnnnnnnnnnnaannnnnnnnnnnnngagggcatcccccctgaccagcagaggctnnnnnnnnnnnnnnnnnnnnnnnnnnnnnnnnnnnnnnnntccgactacaacatccagaagnnnnnnnnnnnnnnnnnnnnnnnnnnnnnnnnnnnnnnnnnnnnnnnnnnnnnnnnnnnnnnnnnnnnnnngaccatcnnnnnnnnnnnnnnnnnnnnnnnnnnnnnnnnnnnnnnnnnnnnnaannnnnnnnnnnnnnnnnnnnnnnnnnntgaccagcagaggttnnnnnnnnnnnnnnnnnnnnnnnnnnnnnnnnnnnnnnnntccgactacaacatccagaaggagtctacccnnnnnnnnnnnnnnnnnnnnnnnnnnnnnnnnnnnnnnnnnnnnnnnnnnnnnnnnnnnnnnnnnnnnnnnnnnnnnnnnnnnnnnnnnnnnnnnnnnnnnnnnnnnnnnnnnnaannnnnnnnnnnnnnnnnnnnnnnnnnntgaccagcagaggttgatnnnnnnnnnnnnnnnnnnnnnnnnnnnnnnnnnnnnnntccgacnnnnnnnnnnnnnngnnnnnnnnnnnnnnnnnnnnnnnnnnnnnnnnnnnnnnnnnnnnnnnnnnnnnnnnnnnnnnnnnnnnnnnnnnnnnnnnnnnnnnnnnnnnnnnnnnnnnnnnnnnnnnnnnnnnnnnnnnnaannnnnnnnnnnnnnnnnnnnnnnnnnntgaccagcagaggttnnnnnnnnnnnnnnnnnnnnnnnnnnnnnnnnnnnnnnnnntccgacnnnnnnnnnnnnnngnnnnnnnnnnnnnnnnnnnnnnnnnnnnnnnnnnngtggnnnnnnnnnnnnnnnnnnnnnnnnnnnnnnnnnnnnnnnnnnnnnnnnnnnnnnnnnnnnnnnnnnnnnnnnnnnnngtcaaggcaaannnnnnnnnnnnnnnnnnnnnnnnnnntgaccagcagaggttnnnnnnnnnnnnnnnnnnnnnnnnnnnnnnnnnnnnnnnntccgacnnnnnnnnnnnnnngnnnnnnnnnnnnnnnnnnnnnnnnnnnnnnnnnnnnnngatgcagannnnnnnnnnnnnnnnnnnnnnnnnnnnnnnnnnnnnnnnnnnnnnnnnnnnnnnnnnnnnnnnnnnnnnnnnnnnnaagnnnnnnnnnnnnnnnnnnnnnnnnnnntgaccagcagaggttnnnnnnnnnnnnnnnnnnnnnnnnnnnnnnnnnnnnnnnngtccgacnnnnnnnnnnnnnngnnnnnnnnnnnnnnnnnnnnnnnnnnnnnnnnnnnnnnnnnnnnnnnnnnnnnnnnnnnnnnnnnnnnnnnnnnnnnnnnnnnnnnnnnnnnnnnnnnnnnnnnnnnnnnnnnnnnnnnnnnnnaannnnnnnnnnnnnnnnnnnnnnnnnnnntgaccagcagaggttnnnnnnnnnnnnnnnnnnnnnnnnnnnnnnnnnnnnnnnntccgactacaacatccagaagnnnnnnnnnnnnnnnnnnnnnnnnnnnnnnnnnnnnnnnnnnnnnnnnnnnnnnnnnnnnnnnnnnnncaaannnnnnnnnnnnnnnnnnnnnnnnnnnnnnnnnnnnnnnnnnnnnnnnnnnnaannnnnnnnnnnnnnnnnnnnnnnnncctgaccagcagaggttnnnnnnnnnnnnnnnnnnnnnnnnnnnnnnnnnnnnnnnnntccgactacaacgtccagaaggagtctnnnnnnnnnnnnnnnnnnnnnnnnnnnnnnnnnnnnnnnnnnnnnnnnnnnnnnnnnnnnnnnnnnnnnnnnnnnnnnnnnnnnnnnnnnnnnnnnnnnnnnnnnnnnnnnnnnnnnnnaannnnnnnnnnnnnnnnnnnnnnnnnnntgaccagcagaggttnnnnnnnnnnnnnnnnnnnnnnnnnnnnnnnnnnnnnnnnntccgacnnnnnnnnnnnnnngnnnnnnnnnnnnnnnnnnnnnnnnnnnnnnnnnnnnnnnnnnnnnnnnnnnnnnnnnnnnnnnnnnnnnnnnnnnnnnnnnnnnnnnnnnnnnnnnnnnnnnnnnnnnnnnnnnnnnnnnnnnnaannnnnnnnnnnnnnnnnnnnnnnnnnntgaccagcagaggttgatctttnnnnnnnnnnnnnnnnnnnnnnnnnnnnnnnnnntccgacnnnnnnnnnnnnnngnnnnnnnnnnnnnnnnnnnnnnnnnnnnnnnnnnnnnnnnnnnnnnnnnnnnnnnnnnnnnnnnnnnnnnnnnnnnnnnnnnnnnnnnnnnnnnnnnnnnnnnnnnnnnnnnnnnnnnnnnnnnaannnnnnnnnnnnnnnnnnnnnnnnnnntgaccagcagaggttnnnnnnnnnnnnnnnnnnnnnnnnnnnnnnnnnnnnnnnnntccgacnnnnnnnnnnnnnngnnnnnnnnnnnnnnnnnnnnnnnnnnnnnnnnnnnnnnnnnnnnnnnnnnnnnnnnnnnnnnnnnnnnnnnnnnnnnnnnnnnnnnnnnnnnnnnnnnnnnnnnnnnnnnnnnnnnnnaggcaaannnnnnnnnnnnnnnnnnnnnnnnnnntgaccagcagaggttnnnnnnnnnnnnnnnnnnnnnnnnnnnnnnncgcaccctgtccgacnnnnnnnnnnnnnngnnnnnnnnnnnnnnnnnnnnnnnnnnnnnnnnnnnnnngatgcagatcttnnnnnnnnnnnnnnnnnnnnnannnnnnnnnnnnnnnnnnnnnnnnnnnnnnnnnnnnnnnnnnnnnnnnnnnnaagatccaggacaaggagggcatcccccctgaccagcagaggttnnnnnnnnnnnnnnnnnnnnnnnnnnnnnnnnnnnnnnnnntccgactacaacatccagaaggagtctnnnnnnnnnnnnnnnnnnnnnnnnnnnnnnnnnnnnnnnnnnnnnnnnnnnnnnnnngacannnnnnnnnnnnnnnnnnnnnnntgagcccagtaacaccatcaagaaaagcaaacaggaagatggacgcacctttctcactacactgtctagaaagagcacaccttgtgcttgttcttgggcttgaggggaggtgttttaatttaccccatcttttaagttgttaacaagtttcattgcactttgaataaagttcttgcattcccaaaggtgttggatctcgttttagc

SEQ ID NO: 594 - DNA, 2200 bp, Cricetulus griseus
  misc_feature (2181)..(2200): n is a, c, g, or t
ccccgccccactcccgcggagaccccgccgggcggcagcgcgacccctgcccgccgcccgcagcctggcgggcagcgcaggctgggcgccatgcggagggccgagcgcagagtcgccggaggctcgggatccgggtcgccgctgctcgagggccgtcgcagcaccgagtccgaggtctacgacgatggcaccaacacctttttttggcgtgcccacaccttaactgtgctgttcatcctcacctgttcactgggctatgtgactctcctggaagaaacccctcaggatacagcctacaacactaagagaggtattgtggccagtattttggttttcttatgttttggagtcacacaagccaaagacgggccgttttccagacctcatccagcttactggcggttttggctgtgtgttagtgtggtctacgagttgtttctcatcttcatcctcttccagacagtccaggatggccggcagtttctgaagtatgtggatcccaggctgggagtcccgttgccagagagggactacgggggcaactgcctcatctatgatgctgacaacaagactgaccccttccacaacatctgggacaagctggatggctttgttcctgcacacttcattggctggtatctgaagaccctcatgatccgcgactggtggatgtgcatgatcatcagtgtgatgttcgagttcctggagtacagcctggagcaccagctgcccaacttcagcgagtgctggtgggatcattggatcatggacgtactcatctgcaacgggctgggcatctactgtggcatgaagaccctcgagtggctgtccctgaagacatataagtggcagggcctctggaacattccaacctacaagggcaagatgaagaggattgcttttcagttcacgccctacagctgggtacgctttgagtggaagccagcctccagcctgcaccgctggctggccgtgtgtggcatcatcttggtgttcctgctggccgagctgaacacattctacctgaagtttgtgctgtggatgccccctgaacactacctggtcctcctgcgcctggtcttcttcgtgaacgtgggtggtgtggccatgcgtgagatctatgacttcatggatgaactgaagccccacaggaagctgggccagcaggcctggctggtggcggccatcacagtcacagagctgctcatcgtggtgaagtatgacccgcacacactcaccttgtcactgcccttctacatctcccagtgctggactcttggctccatcctggtgcttacgtggactgtctggcgcttcttcctgcgggacatcaccatgaggtacaaggagacccggcgacagaagcagcagagtcaccagggcagagccatcaacaatggggatgggcacccagggccggatgatgacctgctagggactgggactgcagaggaagaggggagcaccaatgacagtgtacctgctgaaaaggagggggcctcagccgcctcatgatcctctccctctttactggccttatgcctgccatagggctgtcccatttctcccgtccttatgctccctgcttcagaggaggtggggggcccattcccaactccaccaggggcacctgagtgtacatgtttgtgtgcaggtaggtgtgtgcacatattggctcctgacacgtctccagggctgtgagctcctcagtgagcctggagcttgctctagagcaagggtcctgccctgtccttctacctggtcagccaaggcactggcccatggtctctcctgtgttcagtctcagcacaggccaggagaggcatgtcagtactctttctctaccctctgtggggcaaacagaagccccatgcaccctgtggcctcacccaacttgcagcagcagaagtgaaggatgttacaacaccaagatggtctcaaagtggtgggtctggagtcagtactgagctgtggcctttggagccttctttaaccaggactctaagctgagggtgtgtaatggagggggtcaccagatgggcctcttgagggatatcaagtcagagagtccaacttggagacctgtataccacaggtgctagggttgtgttgtcaccatggctcccagagtttatagtcatattcttgagcaaacagaacaaataaagtgatgatgaaggnnnnnnnnnnnnnnnnnnnn

SEQ ID NO: 595 - DNA, 1076 bp, Mesocricetus auratus
  misc_feature (846)..(923): n is a, c, g, or t
cgccaggagaggcccaagatgagagccctgggagctgttgtcactctcctgctctggggacagctttttgctgtggacttgagcaatgatgccatggatactgcagatgacagctgcccaaagccaccagagatcgaaaatggctacgtggagcacttggttcgctatcgctgccaacactacagactacggactgaaggcgacggagtgtataccctaaacagtgagaagcagtgggtgaacacagctgctggagagagactccccgagtgtgaggcagtgtgtgggaagccgaagcatcccgtggaccaggtgcagcgcatcataggtggttctctggatgccaagggcagctttccttggcaggccaagatggtctcccgccacgaactcatcacaggggccacactgatcagtgaccagtggctgctgaccacggccaaaaacctcttcctgaatcacagcgaggatgcgacatccaaggacattgcccctaccttaaaactctacgtgggaaaaatgcagccggtggagattgagaaggtggttatccaccccaaccgctctgtggtggacattggggtcatcaagctcagacagaaggtgcctgtcaacgagagagtgatgcccatctgcctgccttccaaagactacatagcaccaggccgcatgggctatgtgtctggctgggggcggaatgccaacttcaggtttactgatcgtctcaagtacgtcatgctgcccgtggctgaccaggacagctgtatgcttcactatgagggtagcacagtgcccgagaaagaaggctccaagagttctgttggggtacagcccatcttgaatgannnnnnnnnnnnnnnnnnnnnnnnnnnnnnnnnnnnnnnnnnnnnnnnnnnnnnnnnnnnnnnnnnnnnnnnnnnnnncgacctggagcaggacacctggtatgcagctgggatcctgagctttgataagagctgttctgtagctgagtatggcgtgtacgtgaaggtgaactccttcctggactggattcaggaaaccatggccaagaactagtgcatactgactggagg

SEQ ID NO: 596 - DNA, 1099 bp, Mesocricetus auratus
gaattctttagaaaatggctctcagggtgtccttcccttcaaaaacatgtgtgggtgccttatactcacactagtaaaaagggttgcttcaaataagggaacgaattgtgcaccggggagagccaattttgtccagtagaaacagacttttagagttgtcagaaaggtgggaatgtacagccagcagccggctgaatctcttcatcagttgattcccctgttttttgctttcctctcacagcggtttaatgcttctctgtgcctggtttgtttcagatgcctcaggaacagtactctcaccacaggagcaccatgcccagctcagaggggccacacatttacaaagtggggatttatggctggaggaaaagatgcctgtatttctttgtcctgctcctcatgattttaatcctggtgaacttggccatgaccatctggattctcaaagtcatgaacttcacaattgtaagtgaaactatataaatgtgttaactctcagtgaaggaaagggaagcatggagcaagagagcgaaaggatgtgggaaagtggtgtcccatgacctggcatttgagctcaaactaattcctgttcaggttggatatgaatagcaacttctgtctaacctcagtccttcttgggctgagaggccaaatttagaggcattgctgtcacctaaggtatcttgtatgccttcccttgatcatgataatgttgtagtctttgaccacttaaggaaatccctcagcagaaaatgaagaataaagtgaatgtatttgttttccccaattttaatagcaatgatgaatcctttcatcaggcaagagttggaatgtgtaagtacagttgagctccgagaaccatataaggacgctagcaggcaaattacacctgtttgtcattgttgtggctcactgaaaatctctagtttggggacagaagtgttttctaccattgcctgtgtcagatggaattgagaggaaaccagctgtatttccttgttttattattcctctaaagagatatatatgttttgataaaaatctcttgtttctggtgctcagagtattgtatagatcaaacattgacttgttggaattc

SEQ ID NO: 597 - DNA, 4798 bp, Mesocricetus auratus
  misc_feature (3723)..(3745): n is a, c, g, or t
gaattctgcctcccccagcaagtattcactgacagtaactcctccatacgggttggatctggagatgatctacccacctatggcaggtttagctgtttgaccttctgtaggcttgtacaggaaccacagctgcttcaagaccatgagtgtacagtcactccatccaaagcaacctttcacggtgctccctcaatcccacactctctcgcctcctcttccacagtgttccctggggtggttgggagtgaagaggtaatacagatgtccgtgtagggcgagcacttagtctctcaccctctcatttgacaagtcacacatctctgccttgactgccacccactgcagagagaagcttcctgatcaaggaggatagcagctcagctccatgggcataaacgcaaatgtttagaggaaattttgacaacgctaccatctagcaaaataacagcaggttctaccctgagatcttccataggcttttggcttttggtcagtgttacagcagcaggtgtttgtctcaaatccaatcagaaagcagttattcaccccaataacagccataccattatggcactagtggacacattttacctggcagatcagtgctgcagtatacaagttccagagctaggtaagactactgatgccttttctcccccaacagcctacatagtaccttccagaactgtgaaaggtggccatcaggtaagaagtttccaggtgagtttgagactggttttctatttctcatagccaatatgtgtgtatcttcagcaataaggctttaccacgaagttatggtgagtaaccaaaggcaatggcaatagtttgtgttgttttagaaaccagtaactcacagggaagcatcctgtgcctagtattataattttcatttttaaaaaaccatgttttccagtattaacattggctatccatgcacagtatttctgcccaaactacctaattagcttattaattagtgaatctccttaaggttttttatacatctttagttcgggataacctacccagttttccttttctcccccatccttttgccccatctctgattaatactccatgctttgtctgactggcatattgtgcatgtttgcctgctcatatacgtgtctatacatgtgatgtccgttgagtctttctgcaaaacgcatttgctactgcggctatagtaatcactgcctgtgtgctccctggatgcccagtgccaagattaccctcaacccaagttcctaggacccaaggtgtcctaactagaaaaggtaagatccctccgcattctgtcccggcatccttagcccacacaggcgcacagtaaaggacccatatgagtgtctgggacctgaaagtctggacgtcaatttcacgtccagtagaatcatcattcgggaggaacgtccactcatgaagacagccaggttgaagaagaaagcgtgaccaacagttcctgtggtaacagctctgccactcccctgcctgctgggagtaagaagtcctaagacccaaagataaagcttgcactggctgagagcagtccctctgagaggatgcttcttcctgccctccgtctgctgctctttctcctgggctccagcgccgaggctggtgagtaccagggtccttccgtctcaaatctgcagggtcagctcctaaggcaacaaagtttagtctgacttttgggagtctaaaacagatctcacagctcttctcaagagcctcagagtgaagtctccttttggaacacacccgcccgttgtttaaagtcacggtggtccccaggaacacggaagcttgtgttgactcgggtggggggactaaccctaaagcaagttggggggtagagggaggccccaggaaaacaggcgcattctccttgtctttggagcttaaggcaaaagaccaccctctggttttgctgatctgtgcctgcaagggagcaggacagggggaaccagggccagggcagagtgcgggaaatcagaaggggaaactgcatagacccaaggcaggattggctgctgtgccttgagaaagaagtgactatttgtgagttgtgagtgagaaaaactcatcaagacacctgagagagcggtgggcagcatttaggccaaggagatcaaggcaaccttctccaactgtgtcctctagagagagcgtccgcatccgtgtcaggccctggggttctctgttctaggcaagatcatcggaggcacagagtgcagaccacatgcccgcccctacatggcctatctggaaattgtcactcccgagaatcacctgtcagcttgcagtggcttcctgataagacgaaactttgtgatgactgctgcgcactgtgcaggaaggtgatatgggtgctgtttatctctaaacatgaagtaaaccatcagggtagcatccagggcaaacccaggtggtacctgaagcaggatcctgagtctaggactgaccagaaagagatgtcattaaacagatgccctgggcttcaatcactgtaaatgcagctcccctcagaggcaaggacatctctccaaaagtatcccctccataccccctcaacagagagacactcacggctcgcttgtcagtactactcagtagttttctgggctgtatctccttgacattttcaagtacactggctgtcagtttccagggtccagagcttattatttctttttctttgtttgtttatgtggttggttggttggtttggtttggttggtttggttttgctttataaattataattttttaatttttttttgagctcgtcatttctaagaaagacagaacaacatccacaggacacaactacctcctgcttttctcttagctcttgctatagaaggcatagaaagtccatccaaactggggagtactaaccctaccccctaggtcttccatttcttgcatgccccagaaattccaggggacccaagcttagaaattgcagccagcactctttcttgaagcttctcctgaaagctgactcgagcccaagatctgccttcaggcccaagagcagatgccgccatgttgctctcctggttaaaaactgagccatccaaaatcacgagtagcccagggagagggcaggaagaaacgatggggagaacccagcatcccagggagcagttccagccttttctccaaatacgttcatctctgcagccatggacgtcttctgcttgccctttctttttgttgttgctgttgttggttttgtttgtgttttgtttttgaagcacagtctcaggtaacttgggctggcctcaaactcactatgtagctaagaatgaccttgagctcctgatcctcctgcctctactgcccatgtccagagattattggccagcaccaccatgccagttatacagcactgtgggtcaaacccagaacttcacagatgctaggcaagcactctccatcctcagaccccatccttcctcaccacaggtctataacagtcctcctaggagcccacaacaaaaaggtaaaagaagacacgtggcagaagcttgaggttgaaaagcaattccctcatccaaaatatgatgaccgtttggttctcaatgacatcatgctactgaaggtaacaagtttctccctccattccgctcccttgcatttttccttcaggtccccattgctctgagctttccccgccctgcttcaggaaggcactcccttcttatccccccnnnnnnnnnnnnnnnnnnnnnnnctcacacacatgcacgcacgcacgcgcacgcacacacatgcacacacacgctcacacacgcgttcacacatgcaccattggacttggtatcttgccctttccctccctgatcgtctggagctgcctcctactccacggccctcactaagagccccttgttcccttcacagttgaaggagaaagccaacctaaccctaggcgtgggaaccctcccaatctcagccaaatcaaactccatcccacctgggagggtgtgccgggcagttggctggggccgaacaaatgtgaatgaaccaccctcggacactctgcaagaggtgaagatgagaatcttggatccccaagcctgcaaacacttcgaggattttcaccaggaaccccagctgtgtgtgggcaatcccaagaagattcgaaatgtatacaaggtgatgctcttactagtttttttttttcaaaaaccgctgctgggggcattgagtgtagaaggaggcggggcagaagattgtcagttaatcacagtttagggatcacaggcgctaggaaacaaagtatccatcttccattagctgtgcagagaatgtgggttatgtgaggtagctaccccaggaaagaaagatgcagtatcaggctcctcctctgactctagacctaattgcaactccaaggagaaatgggcgggagaggtagaggcattcatgcatttcctctctgtgcctccctaacagggagactctggaggacctctcctgtgtgctgggatagcccaaggcatcgcatcctatgtacttcggaatgcaaagcccccttctgtcttcaccagaatctcccattaccggccctggatcaataagatcttgagggagaattaactctggagcttggagcctgtgattaaatctgaagctggaattgagcaggtcttttgaccatgtgcttgggcctgtcttagttcctgcggaagccctgccagctccctgatctctctgaaggttcttacttgtctcagaaggttcctaaaggtcaataaacctcaataaagacccagattctaga

SEQ ID NO: 598 - DNA, 3035 bp, Cricetulus griseus
  misc_feature (503)..(527): n is a, c, g, or t
  misc_feature (942)..(1013): n is a, c, g, or t
agctgtagagccagatccacgactctcgactctgcgactttatatctttacatggatgagatggcaaccactcagatttccaaagatgaacttgatgaactcaaagaggcctttgcaaaagttgatctcaacagcaatggatacatttgtgactatgaacttcatgagcttttcaaggaagccaatatgccactgccgggatataaagtgagagaaattattcaaaagctcatgctggatggtgacagaaacaaagatgggaagataagtttcaatgaatttgtttatattttccaagaggtaaagagcagtgatattgctaaaaccttccgcaaagccatcaacaggaaagaaggcatttgtgctctgggaggaacttcagagttgtccagtgaaggaacacagcattcgtactcagaggaagaaaaatatgctttcgttaactggataaacaaagctttggaaaatgatcccgattgcagacacgttatacccatgaaccnnnnnnnnnnnnnnnnnnnnnnnnnagttggcgatggaattgtgctctgcaaaatgatcaacctttcagttcctgacacaattgatgagagagcaatcaacaagaagaagcttacacccttcatcattcaggaaaacttgaacttggcactgaactctgcttctgccattgggtgtcatgttgtgaacattggtgccgaagatttgcgggctgggaaaccccatctggttttgggactgctctggcagattattaagattggcttgtttgctgatattgaattaagcaggaatgaagcactggcggctttgcttcgagatggggagactttggaggagcttatgaaattgtctccagaggagcttctgctaagatgggccaactttcatctggaaaactcgggctggcaaaagatcaacaacttcagtgctgacatcaannnnnnnnnnnnnnnnnnnnnnnnnnnnnnnnnnnnnnnnnnnnnnnnnnnnnnnnnnnnnnnnnnnnnnnnagacattaacatgtcaggcttcaatgaaacagatgatttgaagagagccgaaagtatgcttcaacaagcagataaattaggttgcagacagttcgttacccctgctgatgtcgtcagtggaaatcccaaactgaacttagcctttgtagctaacctctttaataaatatccagcactcactaaacctgaaaaccaggacattgactggactctgctagaaggagaaactcgggaagaaaggacctttcgtaactggatgaactctcttggtgtcaaccctcacgtaaaccatctctatgctgacctgcaggatgccctggtcatcttacagctatatgaacgaattaaagttccagtggactggagtaaagttaacaagcctccatacccaaagctgggagccaacatgaaaaagttagaaaactgcaactatgcagttgaattagggaagcatccagctaaattctccctggttggcattggaggacaagacctgaatgatgggaatccaaccttgaccttggctgtagtatggcagctgatgagaagatatactcttaatgttctggaagatcttggagaaggtcagaaagcaaatgatgacatcattgtaaactgggtgaacagaacattgagtgaagctggaaagtcaacttccattcagagttttaaggacaagacgatcagctccagtctggcagttgtggatttaattgatgccatccagccaggctgcattaactatgaccttgttaagagcgggaatcttacagaagatgacaagcacaataatgccaagtatgcagtgtcaatggctagaagaattggagccagagtatatgctctccccgaagaccttgtggaagtaaaacccaagatggtcatgaccgtgtttgcatgtttgatgggcagggggatgaagagagtgtaaaataaccaatctgaatagaaccatccttactcacaggtgcatgattggcaagtcagctattcccaggtgaagtgctcatggcttaaagaattctcagtcatttaaaggacttttagttttgattaacaagactagctcatcatgacagccttcggggaaagacttttagaaacaagcaactcctttcccttccagttggatctgttcagcacacctgaacatgctcacagccggccatctgctctctcctcctagaatactgcccttgacatttcctgatgcttgtgtattacctctctgtgtatcttttcctcttaggctgtccatctcttgagacttgcttagatcggtagatagccatagtattaacttgccattttgctttccaagttcttactggagaactgtggtcagatactatgtggagatgtgagtgtccttgcttactttgtagtgctgaaaatctgctcatgttactggctgtgcagaatatactagaagcttttctcattcttttattcttaaaagcagtatctttttacagtattctttctacatgattatttttttgtacatttaagaatattttgattacggtcaacaagtctgctgatttgttacttttttaaaggggacttcaagtaagtaaaagaaaaagcataaactatagggggaggaaaatggaccctaagtttgttgtatttccccctcacacccaggatcaaatcaaatgaaatactttgtcttcaatgaatcagttcgacacatgcttctttgttttgaacactttatcacaaaactctcatttgatctaaaatgctgttgaatatgacacctttgaggagagagtgggctcagaatttagatgggactcaataagcaaagtatgctaagtgtacaatagatttttaaatttaacgcatctaacaaggagatgtggtcacgaaaaggggaaagtatgtatgtcggacttgatgttctcttcctttgtcaagctttttgctgtagttctcaagatcatatgttaatctaactctgaaaagtgatgtaatctggtagcaacatagtactccaaataaaggcatttgcat

SEQ ID NO: 599 - DNA, 462 bp, Cricetinae gen. sp.
atgggaattggtctttctgctcaaggtgtgaacatgaatagactaccaggttgggataaacattcatatggttaccatggggatgatggacattcattttgttcttctggaactggacaaccatatggaccaacttttacaactggtgatgtcattggctgttgtgttaatcttatcaacaatacctgcttttacacgaagaatggacatagtttaggtattgctttcaccgacttaccgccaaatttgtatcctactgtggggctgcagacaccaggagaagtggttgatgccaattttgggcaacatccttttgtatttgatatagaagactacatgcgggaatggagaaccaaaatacaggcccagatagaccggtttcccattggggatcgagaaggagaatggcagaccatgatacaaaaaatggtttcatcttatttagtccaccatgggtactgt

SEQ ID NO: 600 - DNA, 1588 bp, Cricetulus griseus
cagaaacaggaacgtgcaaccccacaccgttcttctccaggcacctggcacaagtggctggtgagatgcgtgtggtcgtgattggagcgggagtcatcggactgtccactgccctctgcattcatgagcgtttcagccctgtgcagccactgcacatgaagatctacgcagaccgctttaccccattcaccactagtgacgtggctgcgggcttttggcagccctatctctcagaccccaggaaccctcaggaagtggagtggaatcagcaaaccttcgactacctgctgagccatatccattctccaaatgctgaaaaaatgggcttgtccctaatctcaggctacaatctcttcaaagaagaagttccggaccctttctggaggaacacagttctgggatttcggaagctgacccccagagagatggacatattccctgattatggctacggctggttcaacacaagcctgactttagaggggaagagctacctgccatggctgactgagaggttgacagagaggggagtgaagctcttccatcggaaggtggaatcttttgaagaggtggcaagaggaggcgcggatgtgattatcaactgcactggggtgtgggctggagcgctgcaagcagacacctccctgcagcccggccggggccagatcattcaggtggaggccccttggatgaagcattttatcctcacccatgacccacgccttggcatctacaactccccatacatcatcccagggtccaagacagttactctcggaggtgtcttccagctggggaactggaatgaattaaacagtgtccatgaccacaacaccatttggaaaagctgctgtaaactggagcccaccctgaaaaatgcaaaaatcgttggggaactcactggcttccggccggtccggcatcaggttcggctaaaaaaaaagcagcttcattttggatcttcgagtgttgaggtcatccataactatggtcatggaggctacgggctcacaattcactggggttgtgcaatggaggcagccaacctctttgggaaaattctagaagaaaagaagttgtccaggatgcctgcatcccacctctaaggactctagtgaccatcacttgccccttgaggacatcccagtaccctacagccaattaagtgatagtctccttgctgattcttcactccccgctccctggcttccttgggcaaaggtgtgaggtgaggaaatcctggcactctgctcatccgtcacggcctgtccttcccacacatccatctggcaaagcatctgtaggatggatcctggctggtcctaagcccatctatatgagacaggcagcatctaggaccatgtagcaatcctgttctcacaacaggatgactgtactaaagctggttgtactgggtggcagggtctgggctcagttccctaagaggtggtccagaaacttttgcttagaactctgaagagtgattcacgacacacttgctgtctaccagtagtgacgggaggaggggggactcctgccctcagcactccattggtcaatactattaaaacactcttgggatatccct

SEQ ID NO: 601 - DNA, 2208 bp, Cricetulus griseus
cgggtctccatggcggcgccggcagcgggcccggtgttctggaggcggctgctgggcctgctgcctggccggcccgggctggccgcgctcctgggccggctgtccgaccgcctgggcaggagccgggagcgccggcgccggaggtcaccatggctgttactggctcccttgctgtccccaactgttcctcaggtcacctccccaccttgctgcctatgtcccgagggagtgcacaggttccagtggatcagaaacctggtcccagaatttggagtctccagctctcacgtcagggtgctctcctctcctgcagagttcttcgagctcttgaaggggcagataaaaatggccaagaggcgagtcgtgatggcatccctttacctggggacaggacctttggagcaggaactggtggattgtctggaaagttctctggagaagtcactacagtcgaagtttccttccgacctcaaggtctctatcctcctggacttcacccggggctcaagaggtaggaagaactctcgcaccatgctgctcccgctgctgcagaggttcccagagcacgtgcgtgtctccctcttccacacgccaaacctgcgagggctcctccgtctcctcatcccagagcgcttcaacgagaccatcgggctgcagcacatcaaggtgtacctctttgacaacaacgtcgtcttgagtggtgcaaacttgagtgactcctacttcaccaaccgccaggaccgctacgtgttcttacaagactgtgctgagattgcagacttcttcacagagctggtggatgcagtgggggatgtgtccctgcagttgcagggggatgacacggtggacgttgtggatggcatggtgcacccttacaaaggtgaccgggctgcatactgcagagcggctaataagcgggtcatggacgtgatccactcagccaggacccggcaacagttgctgcatgcgcagaccttccacagtgactctctgctgagtcaggaagaggctgcagctgctggagaccggagaccagcacctgacacctggatttaccccctcatccagatgaagccctttgagatacagatagatgagatagtcaccgagaccctgctgacggaagctgagcgaggagctaaggtcttcctcaccactggctacttcaacttgacccaggcctacatggacctggtgctaggcactcgagccgagtatcagatcctcctcgcctcccctgaggtcaatggcttctttggagcgaagggagtggccggcgccatccctgctgcctatgtgcacattgagcggcagttctacggtgaagtgtgtggcctggggcagcaggatcgggtccagcttcaggaatactggcgcacgggatggacctttcatgccaaaggcctctggctgtacctggcagggagcagcctgccctgcctcacgctgattggctctcctaattttgggtacaggtcagttcaccgggacctggaagcccagattgccatcgtgacggagagccgagccctgcagcagcagctccatcaggagcaagagcagctctacttgcgatccagcgtggtgacctctgcgacctttgagcagccaggtcggcaggtgaagctgtgggtgaagatggtaaccccactgatcaagaacttcttctgaggacaggaatggccttgatgaagatgacaggcatggctggtgtgagatccttcagccgtgcttctgcaatgactccggtctgggtgtcccagcgagctcctgtggggacaatgtaactgacggtctgggtgacctacgggaggctgaggcgatgttgggcgtgctgaccatgaataagggagccaccagcagggaggaaggcctggcctccaacctccccaggcttttcagagatgggccagtgaagggggagccccgaagtgttcaggccaggtgccaggggccgaaaatgccaaacatggggtatgaaccaaggactcagaggtgaccgcatgtcgtaatggctctgaggccgcgtctcttcagaggcccatctcagccttctgaatgtcagcggcagaaaactgacggaggctgaagattccagcattgccccttcccgatcgttcccgtgtaatgaatatctaccctgtgtacatagggaataagttatatatataatgtatgtatatgcctatataaacactatctgccctt

SEQ ID NO: 602 - DNA, 234 bp, Cricetulus griseus
ctgccatgggcttcttgctcctggtccttggacttaagatatcctccagcctcgttctcactactcactgtggccagcctcagatccctttaactataagctggggatagtccttcctgctatgggggtggggaagtgagcccatgatatcccatctagcaaatcccatccaaggtcttgttggggtccttgacttgatccatgccctggagctgtggatgcagttacatgagg

SEQ ID NO: 603 - DNA, 2858 bp, Cricetulus griseus
ctagaattcagcggccgctgaattctagccggaagggctcccatggaccggggcatatcggccgttcgcaaagcaatggcgccactgctggagtacgagaggcagctggtgctggaactgctcgacagcgacgggctagtggtgtgcgcccgcgggcttggtgccgaccggctcctctaccatttcctgcggctgcactgccacccggcctgcctggtgctggtgctcaacacgcagccggctgaggaggaatattttatcaatcagttgaagatagaaggagttgaacacctcccccgacgtgtgacaaatgaaatcacaagtaacagtcgctatgaagtgtatacacaaggtggtattatattcgcaacaagtagaatacttgtggttgatttcttgactgatagaataccttcagatttaataaccggcatcctggtgtacagagcacacaggatcatcgagtcctgccaagaagccttcatcctgcgtctcttccgccagaaaaacaagcgtggcttcatcaaagctttcacagacaacgctgtggcttttgacactggtttttgtcatgtggaaagagtgatgaggaacctttttgtgaggaagctctacctgtggccaaggttccatgtagcagtcaactcgttcttggaacaacacaagcctgaagtcgtagagattcacgtgtctatgactcctgccatgctttccatccagacagccatactagacatcttaaatgcgtgtctgaaggaactgaagtgccacaacccatcactagaagtggaagacttgtcactagaaaatgctcttgggaagccgtttgacaagacaatccgccattacttggaccctttatggcaccagcttggagccaagactaaatccttggtacaggatctgaagatactaagaaccctactgcagtatctctctcagtatgattgtgttacatttcttaatcttctggaatctctgagagcaacagagaaggtctttggtcagaattcaggttggcttttcctggatgctagcacctccatgttcgtgaatgctcgtgcacgagtttatcgtgttcccgatgtcaaactgaacaaaaaggccaaaatgtctgagagtgcagaagggcaagaaacaaaaaaggaactggtcctagaaagcaacccaaagtgggaggcattaagtgaagtcctgaaagaaatcgaagcagaaaataaggagagtgaagcccttggtggcccaggccaggtgctgatctgtgcaagcgatgaccggacttgctgccagctgagagactacctgaccgcaggagcagaagccttcctgctgcggctctacaggaaaacctttgagaaggacagcaaagccgaagaagtgtgggtgaatcttagaaagggggacggtccaaagagaaccatgaaatctgacaaaagacccaaagacaccaaaaacaaagagcgtgcctctaccaaaaagggggctcctaaaaggaagaagcgagagctaactctgacgcaagtgatggggactgctgaggagccaccagaggaaggggctgcagaggaagaccagcagagacaagccaccagtagtccagaaggctgcgggggagagattcagcatgaagcttttgatttaaatttgtcatctgactcggcctatggcatcctgaaagagcccctgaccatcatccatccgcttgtggggtgcagcgacccctatgccttgacgcgggtactgcatgaggtggagcccagatacgtggttctgtatgatgcagagctcacctttgtacggcagctggagatctacagggccagcaggccagggaaaccactgagggtttactttcttatatatggaggctccacggaagaacagcgttacctgaccgctcttcgaaaggaaaaggaggcatttgaaaagctcataagggaaaaggctagcatggttgtccctgaagaacgggaaggcagagatgaaaccaacctggacttagcaagaggcacagtgtccacagatgctcccgctgacactcgaaaagctggtggccaggagcataacggcacacaacccagcattgtggtggacatgcgggagtttcggagtgagctaccatccctgatccatcggaggggcatcgacatcgagccagtgactctggaggtgggtgattacatcctgacgcctgagctgtgtgtggagcgcaaaagcgtgagtgacctcatcggctcgctaaatagtggccgcctgtacagccagtgcctagccatgtcacgctactaccggcggccagtactgctcatcgagttcgatgctggtaagcccttctccttggcgccacgcggttccttcttccaggagatgagtagcagcgacgtgagctccaagctcacgctcctcaccctgcacttcccgcgcctgcggctgctctggtgcccctcgcctcatgccacagccgagctgttcgaggagctgaagcagaacaagccacaacctgatgcagccacggccatggccatcactgcagactcggaaacgctgccagagtcggacaagtataaccccggcccccaagacttcgtgctaaagatgcctgggatcaatgccaagaactgtcactccctgatgaatcacgtgaagaacatagcagagctggcctccctgtcccaggagcggctcacgagcatcctggggcatgcgggaaatgccaagcagctgtacgacttcctccacactgcctatgcagacgtggtgtccggaggcagagtgagaaaatgaccgaactcagatcgctgttcattagtatttgcagagcagttcattctttcccagggcttttagggatgggcatt

SEQ ID NO: 604 - DNA, 650 bp, Mesocricetus auratus
cagtaaggtaatgactgccttggttgtgccatgcctaggagtcagtagttcacagctcttctccctgtttcccagttcttagagtctttcctccccttattccttagtgagccctgatccttagggtgatagaagtgtctcatttagctttagcactgaactctcactaatagattccctgagattccataatgtttaaatcaagcaatttcatttgactataagaccctgtgaagttattatcttccactatgaatgggttttgatttttctgacattttctccaactcatttcctctgagaagtgtgtcctcaatccatgcagagtagcctaacttatcttctggagagcatgcctagaagcataaataatactgaactctgttcacgctgtgctcttttctacataggtatacccatgataaagtttaatatgcaatgggaatagcaagatattcacaataacaaagtgtaggtagagtcaggcagatctctgagtttgagcccagcctggtttacagaaagagttccaggacagcctcaaaaacaatacagagaaatcctatcttgaaaagccaaaaaaaattcaatgaataatatacttcaataaaccttagtgctttgaaatttcatcctggttctcagagcta

SEQ ID NO: 605 - DNA, 650 bp, Mesocricetus auratus; identical to SEQ ID NO: 604

SEQ ID NO: 606 - DNA, 361 bp, Mesocricetus auratus
tttcctctgagaagtgtgtcctcaatccatgcagagtagcctaacttatcttctggagagcatgcctagaagcataaataatactgaactctgttcacgctgtgctcttttctacataggtatacccatgataaagtttaatatgcaatgggaatagcaagatattcacaataacaaagtgtaggtagagtcaggcagatctctgagtttgagcccagcctctattgtactttatacttgagaaacagattatgttaagtctactgcatttgtttgtgaacaggtgaacactgaaaataaccttgtgaacgtgtggtgtaatgctttggatttaagccttcctggcactagctcatttgag

SEQ ID NO: 607 - DNA, 360 bp, Mesocricetus auratus
cttatggtcaacctgccctgcagtaccttctggaagtaatcagaaagcacattttgtaagaatagcactacccagagggctcagatttcctaagcagatgagaacaggctcttggggccttattttagcccatatttgttccttgcagaactattcctgcgggagcattgagtgaagggaccaggtggacatgagcaagtcacttctgagatgaagctattccaggctctgctaaacctattttataaaaacaaagttttgaaagagaagaccatgctatatatgcttttttaaaaataggtaagcaatgttatttttttcttcagagatacaggactgatagaagattgtgatgtaata

SEQ ID NO: 608 - DNA, 1701 bp, Cricetulus griseus
  misc_feature (257)..(282): n is a, c, g, or t
  misc_feature (490)..(518): n is a, c, g, or t
  misc_feature (584)..(609): n is a, c, g, or t
  misc_feature (1166)..(1242): n is a, c, g, or t
  misc_feature (1311)..(1333): n is a, c, g, or t
gcccacgcgtccggagatggcgtctcagccgccgccgcccccgaaaccctgggagacccgccgaattcccggggccggctcgggcccggggacgggccccggccccgctttccaatctgctgatttgggccctactttattgacaagacctggacaaccaacacttaccagagtgcccccacctattcttcccaggccatcccagcagacggggagcagcagtgtaaacacttttaggcctgcttacagttcatttnnnnnnnnnnnnnnnnnnnnnnnnnnttcattttatgggagctatagcccttacagttatggatacaatggtctgggctttaaccgcctccgtgtcgatgaccttccacccagcagatttgtccagcaagctgaagaaagcagcagaggtgcatttcagtccattgagagcattgtgcatgcattcgcgtctgtcagcatgatgatggacgccaccttttcagctgtctataannnnnnnnnnnnnnnnnnnnnnnnnnnnnatcacttttcccgcttaaaaatacactttacaaaggttttttccgccttcgcattagttaggactnnnnnnnnnnnnnnnnnnnnnnnnnngtggatgatgggcttaagaagaggctctgagagcgaggacctatgggaggaaagtgaaagaactgtggcctgccttggtgccgaggaccaagcagctaactctgcaaaatcctggccaatattcctgttctttgctgttatccttggtggtccttatctcatctggaaacttctgtctacacacagtgatgaagtaacagacaacatcaactgggcaaatggtgaggacgaccatgtagttgctagagcagagtatgattttaatgccgtgtctgatgaagaaatttctttccgtgctggggatatgctaaatctagctctcaaagaacaacagcccaaagtgcgtggttggcttctggctagtcttgatggtcaaacaacaggactgatacctgcaaattatgtcaaaattctgggtaaaagaagaggcagaaaaacaatagaatcgagtaaaatacccaagcagcaacaatcttttaccaacccaacgttaattaaaggagtcactactgccaactctttggatgaacaggaagctgcctttgaatctgtttttnnnnnnnnnnnnnnnnnnnnnnnnnnnnnnnnnnnnnnnnnnnnnnnnnnnnnnnnnnnnnnnnnnnnnnnnnnnnnatgtttgcttgcaggtgaataatactttagagtacttttaaaaattatttcttacagaaaaattaattnnnnnnnnnnnnnnnnnnnnnnntcatggccgtccaaggcattttgctgctaaaattatttagtcacactagtatgctggtctagtaatctggctacacttgaccatttattggaccatgaggacatttgtttcacctagctttagattatggagattgttgtcagtttcatcttatctaaatccctaagcttattggaacagtaaatttgatgaacactagaatacacaagttgcctcagaagggatcattaatgctttttaaagttctgagttaattgatttgaagtcttcaaaaattgagtgataacatctacttacaagaacaggcaaaaaggctgaatttttataatcctttaagtaaactaaataataaagattttttgatctgt

SEQ ID NO: 609 - DNA, 930 bp, Mesocricetus auratus
gctgtggatggggagcggctgaaacacctgatcgtgaccccctcaggctgtggggagcagaacatgattggcatgacacccacagtcattgcggtacactacctagaccagacagaacagtgggagaagtttggcctgcagaagaggcaagaatccctggagctcatcaagaaagggtacacccagcagctggccttcaaacagcccagctttgcctacgctgccttcaacaaccgaccacccagcacctggctgacagcctacgtggtcaaggtcttctctctggctgccaacctcatcgccatcgactctcaggtcctttgtggggctgtcaaatggctgattctcgagaagcagaagccggacggtgtctttcaggaggatggacccgtgattcaccaagaaatgattggtggattccggaacgccaaagaggccgacgtgtccctcacagccttcgtcctcatcgcactgcaggaagccagggaaatctgtgaggggcagatcaacagccttcccgggagcattaacaaggcaggggagtacatcgaagccagttacctgaacctgcagagaccatacacggtggccattgctgcgtatgccctggccctgatgggaaaactggaggagccttacctcagcaagtttctgaaaacagccacagagcggaaccgctgggaggagcctggccagaagctctacaatgtggaggccacgtcctatgccctcctggccctgctgctgctgaaagacttcgactctgtgcctcctgtggtccgctggctcaatgagcagagatactacggaggcggctacggctccacacaggccaccttcatggtattccaagccttggcccaatatcaaacagacgtccccgaccacaaggacttgaacatggacgtgtccttccacctccccagccgc

SEQ ID NO: 610 - DNA, 4296 bp, Mesocricetus auratus
atggatgtgaccaagaaaaacaagcgagatggcactgaggtcaccgagagaattgtcacggaaatcgtaactacaagactcacatccttaccaccaaaagggagcaccagcaatggatatgctaagacaggctctctcggcggaggaagtcggctagagaaacaaagcctgactcatggcagcagcggctacatcaactcaagtgggagcatccggggcaacgcttccacctccagttacaggagagctcactcaccggcctccaccctgcccaactctccaggctccaccttcgaaaggaaaactcacatgacccgccatggaacctacgaagggagctccagcggcaactcctcccctgagtacccacggaaggaactcgcatcttctgcaaccagagggcgaagccaaacacgagaaagcgaaattcgagttcgactgcagagtgcgtctccatccaccagatggacagaactcgatgaagtcaaacgcttgcttaaggggagccgatctgcaagtgcgagtcccaccaggaacacctccagcacactccccatccccaagaaaggcaccgtggagaccaaaatggtgacagcaagctcccactcagtatcaggaacctatgacacgacagcactggacaccaaccttccctcccacatgtggtcctccaccttgcctgcagggtcctccatggggacctatcacaacaacatgacaacccagagctcatccctcctcaacaccaatgcctactcagcagggtcagtcttcggaatgccaaataacatggcgtcctgctctcccaccctgctccccggactcagcagctgctcctcggtgtttggcatgcaaaacaacctggcccccagctcttcggtcccagcccacggcacaaccaccgctcccacagcatatggcgtgaagaaaaacgtgccacagccacccactgtcaccagcaccggtgtgtccacttctgccacctgcaccaccagcgtccagagtgacgatctcttgcataaagactgcaagttcctgattctggagaaagacaatgtaccctccaagaaggagatggaactcttgatcatgaccaaggacagcgggaaggtcttcactgcctcccctgccagtgtctctacaacttccttttcagaagacaccctgaaaaaggaaaagcaggctgcatatgccgctgacgcatgcctaaaggcagatataaatggagacctaaatactgtgtccacaaagggcaaggccacctccgtagaaaaccataactatgaccgaggcggcggcagtggcggtggagccagaggcggcggtggcagcggtggtggaggcggtggcggaggaacctggggcgctgcgcctgcctggtgcccctgcggctcctgctgcagctggtggaaatggctgctgggcctgctgctcacctggctgctgctgctgggtctgctgtttggcctcattgctctggcggaggaggtgaggaagctgaaagcgcgagtggacgagctggagaggaccagggtgcagtattttgaagacaagacggagagaagtagcaaggaccgtctcctgggtgacatgcccggcgtggggcccggattaggcaaagcagagctggatggccacagccaggaggcgatctggctgtttgtgaggaacaagctgatgacagaacaggaaaacggaaatctccgaggaaaccctggtccaaaaggtgacatgggaagtcaaggccctaaaggagaccgaggccttcctgggaccgcaggaattcctgggcccctgggccaccccggcccagaaggaccaaagggacaaaaaggcagcattggagatcctggcatggaaggacccataggccagagaggactagaaggccccatgggacctcgtggtgaacctgggcctcctgggtctggagagaagggagacagagggattgctggagaacaaggtcctcgaggcctccctggtgtcccaggttctgtgggtcccagaggtcccaatggctctcctggtccacagggacccccaggctctacgggtccccaagggctccgaggtgaagtgggactccctggtgtcaaaggtgacaaaggacttgcggggcccccaggacccaaaggtgaccagggcgagaaaggacccagaggcctcacaggggagcctggcgtgcggggtctacctggagctgtgggtgaacctggagccaaaggcgcaatgggtcccgccggccctgatggacagcaaggccccagaggtgagcaaggcctgacagggatgcctggaacccgaggcctaccaggaccctctggagacccaggaaagccaggtgtcacagggccccaaggaccacagggacttcctggtagccctggccgaccggggactaaaggtgaacctggcgctccaggcagagtcatgactgcagagggatcatcgacaatcactgtccccggacctcctgggcctcccggtgccatgggacccccaggaccttcaggaaccccaggtcctgctggccctgctggtcttccaggacaaacaaaggcccaacgaggagagccgggacttgctggtgactcattcataagcagtggcagctccatctccgaggtcctcgctgcccaaggagttgacttgcggggtcccctcggcccacctggcccacgagggccaccagggccttccatcccaggcccaccaggacccagaggccctccaggggaaggcgtgccaggcccaccgggcctaccaggatctttcctgaccgactcggaaaccttcttctcgggccctccgggtccacctggccccccaggtcccaagggagaccaaggtgatcctggtgtcccaggtactcctggcatccctggcggtcactctcatggagaatcatccagcactacatacaggcagggcccacctggccctccagggccccctgggcctccaggctccttcagcagctctggccaggatatccaacgctacatcgcagagtacatgcagagtgacagcatcaggacctacctctctggagttcagggtcccccaggcccaccaggtcctccagggcctgtcatcaccatcacaggagagactttcgactactcccagctggcaagccaggtggtcagctacttgcggacatcgggctacggtgtcagcctgtcctctgcctcctcagaagatatcctggccatgctgcgacggaatgatgtgtggcagttcctgcgtcagcacctggtgggtcccccaggcccccctgggccaccaggagttggtggagatgggtccctcctgtccttggactatggagagctgagcagacacattctcaactatatgtcaagttctggaatcagctttgggcatcctggcccaccagggccccctggcctgccaggaacatcctatgaggagctgctcaccatgctccgagggtctgactacagggacatcattggacctccaggaccgcctggacccccaggtcctcgaggacccccaggtgtctcagcagccttggccacctatgcagctgaaaacagcgacaacttccgcagcgagctgattggttacctcacaagtcctgatgtccgtagcttcatcattggcccgccaggccccccggggccccagggaccacctggagacagtcacttaagggacaactacagctggggtagcagctcctcagccagacggggcactgcctacagctcttccgtgggcatggggggagccaatggaggctccctgggcgaaggcagaacctttggtacaggagatgggggtccctatggcactgacatcggcccaggaggaggttatggggcagcagccggtggcatatatggcaccgatggcgactcattccgggctggcttcactggagacctggattacaacaagctggcagtgagggtgtctgagagcatgcagcgtcaaggcctactacaagggatggcctacaccgtccagggcccaccaggtgtgcctgggccccagggccctcctggcatcagcaaggttttctctgcctacagcaacgtgacacaggacctcatggacttcttccggacacatggagctattccaggcccacctgggcaaaagggagaggcgggcaccccaggacccaaaggtgacaggggccttgctggacaacgaggtcctcctgggccacctggccctcgagggcagaaaggagacaaaggagacaagggcgaccaagtctacactgggagaaggaggaggagtattgccatcaagccataa

SEQ ID NO: 611 - DNA, 516 bp, Mesocricetus auratus
agtcagaaatccttctacgatgcaagctatgggtcactccatgagaactgcacagataaatttgtatctctgagaacctctgaaacctcaaagatgtccagcttaacctttgaagagagcctagtgatggtggcagcaacatccgacaaagggaagattctgaagaagagacgactgggtttcaatcaggcctttgccgaagatgacctggagaccataacccgcaatttagaagagaccatccaatcagattcagcaccttacgtcttccagagcaatatgagatacaaactgataaggcgagtcatgcaggagttcgtcctgaatgattccctcaatcaaaatatctacctggatgcagaccaagtgcatctcaaagcagcttcgttaaatgacctgcaacatgaagtaaaatttgacatgtatgtctactcgtcagaagacgactctaaatatcctgttactctaaaaatctcgaatactcagctgtttgtgagtgctcagggtgaagaccag

SEQ ID NO: 612 - DNA, 440 bp, Mesocricetus auratus
aggacctcaacaagagcttccggcaggtggtgtcagtcattgtggctgtggagaagctgtggaacacccctgtcccttgcccgtggaccttccaggatgaggacctgagaaccttcttttccttcatctttgaagaagagcccatcttctgtgactcctgggatggtgagctgatcgtggctgatgctcccattcgacagctgcactgcaggctccgagatgaacaacagaaatgcctcgtgctgtctgacccctgtgagctgaaagctctccatctcaacggacagaacataaaccaacaagtggtgttctccatgagctttgtacagggagaaacaagcaacaacaagatacctgtggccctgggcctaaagggaaagaacctgtacctgtcctgtgtcatgaaaggtgacacgcccaccctgcagctggagagtgtg

SEQ ID NO: 613 - DNA, 265 bp, Mesocricetus auratus
ttgctaaccttcaccagctctgctacagctggaccggagaccctctgcggggccgagctggtggacgctcttcaattcgtgtgtggaccgaggggtttttacttcaacaagcccacaggctatggctccagcattcggagggcgcctcagacaggcattgtagatgagtgctgcttccggagctgtgatctgagaaggctggagatgtactgtgcccccctcaagcctacaaaatcagcccgctctatccgtgcccagcgccaca

SEQ ID NO: 614 - DNA, 477 bp, Mesocricetus auratus
ctggtcagcgctgagggggaccccattccagaggaactctatgaaatgctcagtgaccactccatccgctcctttgatgaccttcagcgtctgctgcatggagactccgtagatgaaaatggggctgagctggacctgaacatgacccaagcacactctggaggcaagccagaaagctcatctcgagggaggagaagcctaggttccctggcagccgcagagcccgctgtaatcgctgagtgcaagactcgcacagaggtgttccagatctcgcggaacctcatcgatcgcaccaatgccaacttcctggtgtggccgccatgcgtggaggtgcagcgctgctcgggctgctgcaacaaccgcaacgtgcagtgccgggcctcgcaggtgcagatgcggccggtgcaggtaaggaagattgagattgtgcggaagaagcccgtcttcaagaaggccaccgtgaccctggaggaccac

SEQ ID NO: 615 - DNA, 782 bp, Cricetulus griseus
atgcacgtggataccatctatgatcgcccctctaataccaccactgagatttggaccttgccgaaggtcctgggtgagagatacagtgccgacaaagatgtggtagtcctcaccagtggacgaactgggggcgtggctgaggacatcgcctacatcctcaagcagatgcgcagggccatcgtggtgggagagcggacggagggtggggccctggacctccagaagctgagaataggccagtccaacttcttcctcacagtgcccgtttccaggtccctggggcccctgggtggaggtggccagacatgggaaggcagtggagtgctgccctgcgtggggacacctgcagaacaggccctagaaaaggccttggccattctcaccctgcgccgtgccctgccaggggttgtccttcgactacagaaagccctgcaggactattacactctggtggaccgagtgccgggcctgctacaccacctggctagtatggactactcagccgtggtctctgaggaggacctcgtgacaaagctcaatgctggcttgcaggctgtatccgaggatcctaggctcctggtgagagccactggacccaaagaaagctcatctaggcctgagactgggcctaatgaccccccagaagccactcctgaggtacccaaggaagaagctgcccggagggccctagtagactctgtgtttcaggtatccgtgctgccaggaaatgtgggctacctgcgctttgacagatttgcagacgcctctgtgctgagggcact

SEQ ID NO: 616 - DNA, 1536 bp, Mesocricetus auratus
  misc_feature (388)..(388): n is a, c, g, or t
  misc_feature (426)..(427): n is a, c, g, or t
  misc_feature (685)..(685): n is a, c, g, or t
  misc_feature (702)..(702): n is a, c, g, or t
  misc_feature (995)..(995): n is a, c, g, or t
gtataacctgtcctcaaggctctgtagcctatgggtcctattgctattcactgattttgataccacagacctggtctaatgcagaagtgagtagtgacactcaggattgggaacaatagaaacaagaacttccgggtcaagagtggtgttggattccaatctctgtggtttatttgactgaggtgaacccaatccctcacctacactctaccacttcccagtgggggtttaatattgtttccattctgtccttcaaacagctatcctgccagatgcatttctcaggacacctggcatttcttctcagtactggtgaaattaccttcgtgtcctcccttgtgaagaacagtttgacggcctaccagtacatctggattggactccatgntccctcacatgtgcgatcctatctttgtcttgcttttnnctcatagtgccttttatccctgtggaagattccctgtgacaccccagaaaaagcaaatgggtcatagatctccaatgctggatggcattagagagagggaaatatcagctgtagagataagttctgtggaaatctcagagttcagttgaagtctgtatgcctatggctgacttctaagttttcatgtgagatattggaagatattatcatcagtcttagggagtctgcaaatacaagtgtcagtaaatgctgaacaangaaatcttttgtgtttntcctttatagaatagatttttgttcagtggtttctggagaaacctcaaaagtaccaccatttgtatttatcaggaactgataaaatccagtaaatcccaatttcattccatagtttctgggggtttgtaaataggactgaggtattctgggataatattacaccagaaggctcttggcaactgggtatgaccataccaagtttggtaaagctaggcatgggaccaaatgtttcagtgaaggtatcatgtaatctgtaccacccaatcctttgcactctacagggtacactacncaacggaagtggatggaagtggagcagttccaatgtgctgaccttctataactgggagaggaacccctctattgctgctgaccgtggttattgtgcagttttgtctcagaaatcaggtaagacagagaagaaccacctgtgattaacccatcttcccacatccagtatgacaacctgggcatgacacaggtttgagacatacagtgtggacgtgtggtttgtcatcttctctcatggttgcctatatgtctccttgcaacagtgattatcatgcagaagagatgtcttaagtcaagagcagacactgagtcattctttgtttgagttcacagattcacctgccgcattccctttacctcctatctctctgtaggttttcagaagtggagagattttaattgtgaaaatgagcttccctatatctgcaaattcaaggtctagggcagttctaatttcaacagcttgaaaatattatgaagctcacacggacaaggaagcaagtatgaggattcactcaggaagagcaagctctgcctacaca

SEQ ID NO: 617 - DNA, 2026 bp, Cricetulus longicaudatus
  misc_feature (1420)..(1420): n is a, c, g, or t
  misc_feature (1470)..(1470): n is a, c, g, or t
  misc_feature (1477)..(1477): n is a, c, g, or t
  misc_feature (1714)..(1714): n is a, c, g, or t
  misc_feature (1884)..(1884): n is a, c, g, or t
  misc_feature (1987)..(2026): n is a, c, g, or t
ctctgcgcaaagaagcgtttgtggtttccgaaaagcacggagccctgccaacgcgctcctgccggaggtccggcccaggtggacgaagactcggtttcctggtgagccagcccctctcccctaggcaacccacacacccagagtctgaagatgctgagatcaatgtggaattttctgaaacgtcacaaaaagaaatgcatctttctgggcacagttcttggaggagtatatatcctaggaaaatatggacagaaaaaaattagagaaatacaagaaagagaagctgcagaatacattgcccaagctcggcgacagtaccattttgaaagtaaccagaggacttgcaacatgacagtgctgtccatgctgccaacactaagagaggctttaatgcagcaactcaattctgagagtctaacagctttgttgaaaaacaggccttcaaacaagctggaaatatgggaggacctaaagataataagtttcacaagaagtattgtagctgtatatagcacgtgtatgctggtcgttcttttgcgagtccagttaaacataattggtggatatatttacctggataatgcaacagttggaaaaaatggcactacagttcttgctccaccagatgtacagcagcagtatttgtcaagtattcaacacctccttggagatggcctaacagagttagtcactgtcattaaacaagctgtacagaggattttaggaagtgtttctcttaaacattctttgtcccttttggacttggagcaaaaactaaaagaaattagaattcttgtggagcagcataggtctccttcttggattgataaagatgtatccaagtcttctctgtgccaatacatgatgccagatgaagaaacgccattagcagctcaggcctatgggctttctccaagagatattaccactattaaacttctcaatgagacaagagacatgttggaaagtccagattttagtacagttttgaatacctgtttaaacagaggcttcagtcggctactagacaacatggcagaattctttcggcccactgaacaggatctgcaacatggtaactccataaatagtctgtccagtgtcagcctgcctttagctaagataattcccatagtaaacggacagatccattcagtttgcagtgacacacctagtcattttgtgcaggatcttttgatgatggagcaagtaaaagactttgctgctaacgtgtacgaagcttttagtaccccccaacaactggagaaatgactttcttccttcaagaagagctaggatccatctacattaaaatcatctatacctagagtgacaattgcaaccaaaatgcctaataaaatatattcttaagcaaagtcttatttcataatgaagtagattcatttggcaccttattggnatttttaattcatcagcagtctacttcatcaggtgtatctaactggtgcncaaattncaacatcgggatcattcatgatctgtttcagcctggatagctgatccaaaccaagtagataattttatccatacatgtaatggaatgtgatgtcctttcacacatatctgtcttgaaaagtagatctaggatgtgtggactctgaagatatgtttaatcatgaagtttgctggactctgaagtgagagcaagccggattctctccagtcacgtgatttgtctcacacaccttgacanagggcttatcctctagaaatcagtgcattttgaaacctctgatcagctatttttttcctttgctatttttcttcaatatttatttgcagcattttctaaagctttcttagcaaccctcagaagttgcatatagaattatagtctaatgttatgttcatgttgtttactcncaattattaattacagagtttcatttgtgtataaataattttaataactttgtattgattttgagtacaacaaataacttgttgcaataaactattttcatannnnnnnnnnnnnnnnnnnnnnnnnnnnnnnnnnnnnnnn

SEQ ID NO: 618 - DNA, 2798 bp, Cricetulus longicaudatus
  misc_feature (282)..(302): n is a, c, g, or t
  misc_feature (1735)..(1752): n is a, c, g, or t
  misc_feature (1795)..(1816): n is a, c, g, or t
  misc_feature (2759)..(2798): n is a, c, g, or t
cccttcacaggtggcgtcacgggtcctctgcgccgcgcccgaggtcagcaagcaaggacaggcgcctcccagcctgcagccggagccgggcctcgcagcagctcggggactgcagctcaagccacacgttccttggcccacacctgcctccgagtcacgctctgccctgtgaggtgcagcatttgacaagtcattccccagcccccacaagccacgttcccagcttcggagctaacaatccttagctttgagactccctcccttctgcctccatacataagnnnnnnnnnnnnnnnnnnnnncttaccatagttgattttctcttgtgtaaaattaaatttggagttccgggtgccgtgcagaaagattaagactcagcacccgtttgattcaaaacaagttcatgcttattagtctgttggaaaagtgaatcccagcacacacaggatactatggctgaacacggggctcatatcacaactgcttcggtggtggacgaccagccatctatctttgaggtggtagcacaggacagtttaatgacagcagtgagacccgctcttcagcatgtggtcaaggttcttgcagaatcaaatcctgcacactatggcttcttctggaggtggtttgatgaaatcttcactctgctagactttctgctccagcagcattatctttctagaaccagtgcctcattttctgaacatttttatggcttaaagcggattgtagcagggagctcacagcagcctcagagaccagccagtgctggtcttcccaaggagcacctctggaaatccaccatgttccttgttcttctaccctatctgaaagtaaagctggagaagctggcttccagcttgagagaagaggatgaatactctattcaccccccttcctctcactggaaacgattctacagagccttcctggcggcctacccatttgttaacatggcctgggaaggttggtttcttacacaacaacttcgatacatcctaggaaaagctgagcatcactctcccctgctgaaactggctggagttcggctaggtcgactgacagctcaggacatacaagctatagagcatagactgtctgaagccagtgtgatgcaggaccctgtcagaagcgttggtgagaagataaagttagctctgaagaaagctgtgggaggcatcgccttatccctctccaccggcctttctgtgggtgtcttcttcctgcagttccttgattggtggtactcttctgagaaccaggaaaccatcaaatcactgactgctctgcctaccccaccgccacctgtacacctagactacaactctgattctcccctgctacccaaaatgaagacagtgtgccctctgtgtcgtaaaactcgggtgaatgatacagttcttgccacctctggctatgtgttttgttaccgctgtgtgtttaattatgtgaggagtcatcaagcctgtcccatcacaggctatccgacagaagtccagcatctgattaaactctactctccagagaactgaaagaaattagcctattatcacacagctcaagttctgtactgtaaggccacaagactgctgtggtatggcaaacattgatacttccctaattcacaactacagtaattttcagtaactatggattcctttaaaagtatatagccactcggagcgttggtggcacccgtctttaatcccagcaccctggaagcagaagcaggctnnnnnnnnnnnnnnnnnnaccagtctggtctacagagcgagtgccaggataggctccaaannnnnnnnnnnnnnnnnnnnnngggggagggggagaaggatatagccacttgatcctaatgttttgatttgctctctagcaagctggttaagcaggagaattgggattgcaggtggtgtgagggccagtgtggaggtggattaaagaagaccactaagtgttgcttgtcctcaagagtggggttttcagctgaatgtggtcgtgtcatatctgcactcaggaagcaggattttgagttcaaggacagcttaggccaccatagggagcctgtcaaaaaagtaaaaagataaaagtaaaaagaaagtgagagactatgattaagagggataaaaagctcacaggaaaacccaggtcagaccttatacaacaggtggtttgagaaataggccttctctttaaaaaatatttctttacctgtgaagtgtagaggctttgtcagatggcatacactatgaaatgacttcctctttctagaaatatttagggacattttagagaaacaaccccttccatataccagacttactaacatttgattatcaaattaacaaatgctaattgtcagcatttggagattccttcatgagccatacctgtctctcttgggaaacaggttaaagaaaaatagggtttgttaatggggatgagtctggaaatttcaatgtgaatgaaagctagcaagcaatgatgagatgtacgaaaatacttatctaatgtttaccaaatgcttatctaatgaacatttaatgaggagcaaaagctttctacttgctcttatgagttttctcaattgacagtttgctcaattgacatgaatcacccagggtattatgaaagtttctatgaaacatttaagtaaattttaacaatacatgattctgggaaagaactgttcatgctggcacgattatgtggaaactcaaaagattactccaggggtttaaaataaattttcagatcacctnnnnnnnnnnnnnnnnnnnnnnnnnnnnnnnnnnnnnnnn

SEQ ID NO: 619 - DNA, 882 bp, Mesocricetus auratus
agtccatcttgccccggcagtatctggctgggccaccatggacctggggcttgcaggtcggcgggcgctggtcaccggagcaggcaaaggcatcgggcgcagcactgtgctggcgctgcaggcggctggtgcacatgttgtggccgtgagccggacacaagcggaccttgacagcctggttagcgagtgtcctggcgtggagactgtgtgtgtggacctggccgactgggaggccacagagcaggccctaagcagtgtgggaccggtggacctgctggtaaacaatgccgccgtggccctgttgcagcccttcctggaggtcaccaaggaggcctttgacatgtccttcaatgtgaatcttcgggctgtcatccaggtgtctcagattgtggccaggggcatgatagctcggggagctccgggggccatcgtgaacgtctccagccaggcctcccagcgtgcactggccaaccacagcgtctactgttccaccaagggtgctctggacatgctgaccaagatgatggcccttgagctggggccccacaagatccgcgtgaatgcagtaaaccccacagtagtgatgacgtctatgggccggaccaactggagtgacccccacaaggccaaggttatgctggatcgaatcccacttggcaagtttgctgaggtggagaacgtggtggacgccatcctcttcctgctgagccaccgaagtaacatgaccactggctccactttgcccgtggatgggggcttcctggttacctgagcccccctccgttaactctgcccagccataggctcagaacattgcgcatccaccccacccccccagtccctccaataaacatctgtccagcctatgtgctgactcttcag

SEQ ID NO: 620 - DNA, 832 bp, Mesocricetus auratus
  misc_feature (357)..(381): n is a, c, g, or t
cacgcaagaggcttactcctctgtccctgtcagcaacatgaactccggcctgggctccatgaactccatgaacacttacatgaccatgaacaccatgaccacgagcgggaatatgaccccggcttccttcaacatgtcctacgccaacccgggcctaggggccggcctgagtccgggtgctgtggccggcatgcccgggggctccgcaggcgccatgaacagcatgacggcggcaggtgtcacggccatgggtgcagcgttgagcccgggaggcatgggctccatgggcgcgcagcccgcagcctctatgaacggcctggggccctacgcggccgccatgaacccgtgcatgagccnnnnnnnnnnnnnnnnnnnnnnnnngggccgcagccgcgctgggggcggcggcgacgccaagacgttcaagcgcagctacccgcacgccaagccaccctactcctacatctcgctcatcaccatggccatccagcaggcgcccagcaagatgctcacgctgagcgagatctaccagtggatcatggacctcttcccctattaccgtcaaaaccagcagcgctggcagaactccatccgccactcgctgtctttcaacgactgtttcgtcaaggtggcgcgatccccggacaagcccggcaagggctcctactggacgctgcacccggactccggcaacatgttcgagaacggatgctacttgcgccgccaaaagcgcttcaagtgtgagaagcagccgggggccgtaggcggaagcgggggcaccggctccaagggtggccccgaaagtcgcaaggacccctcgggaacaggtaac

SEQ ID NO: 621 - DNA, 521 bp, Mesocricetus auratus
tcggtaccagggacccgatctttgtaggtgcgagcgtctttgtgcggcggacaaatggggagaggacgaggaggtgggcactccggcgacgtaagatccacatcagctcaactgcaactcgctttcgcacaggccgcccgctcacttcccgcggaggcgctgccgggcgccgcgcttcgcggccgcctcctgtccccggcgctgccccctcccgccgcgccgccgccaccgccaccgccgcgcacgccgcgccccgcagcgcccggcttcctcctcgctggggtggcgctgggccctcgagcgctcgggtgaccgcagcggccccgcgcccctcccccgctgccgcgcgcagcgcacccgcccgtcgctccgcacagggttggatggttgtgccgggcagggtgggttcaggatgttagggactgtgaagatggaagggcatgagagcagcgactggaacaggtactacgccgacacgcaagaggcctactcctctgtccctgtcagcaacatgaactccg

SEQ ID NO: 622 - DNA, 2441 bp, Mesocricetus auratus
  misc_feature (1102)..(1178): n is a, c, g, or t
  misc_feature (2051)..(2068): n is a, c, g, or t
tcggagaataggatgcaggtccacgtcgggctgacgttgctgctctgcgcggtgctcctgagctcggcgaccgcgtcctccgatgacgaaagtaaccaggacgaatccatagattccaagagttctttgccagccgatgagtcggtgaaggaccactccaccacaggcagagtggttgctggccagatatttgttgattctgaggacccagaggtggagtcccctcttcaggaagaggaagagagctccaagactgaggaggaagtcagtgtcggtgaagaaatcagctttgtagaatctccaagtctaagcagcaagagctatgaagaagcaaagagagcccggaaaccagttttgaccgccattgagggtacggcgcacggagagccctgccacttccctttccttttcctggataaggagtatgacgagtgcacgtcagacgggaggcaagacggcaggctgtggtgtgccacaacctatgactacaagacagatgagaagtggggcttctgcgaaactgaagaagatgctgcaaaaagacggcagatgcaggaagcagaaatgatttaccaggctgggatgaagatactgaatgggagcaacagaaagagccaaaagagagaagcatatcggtatcttcaaaaggcagcaggcatgaatcacaccaaagccctggagagagtatcctacgctctcttatttggtgattacctcacacagaatatccaggcggctaaagagatgtttgagaaactgaccgaggaaggttctcccaaaggacaaactgctcttggctttctctacgtctctggactcggtgttaattcaagtcaggcaaaggctcttgtatattatacttttggagcccttggaggcaatctgatagcccatatggttttgggttaccggtactgggctggcatcggagtcctccagagttgtgagtcggtactgacccattatcgtcttgttgccaaccatgttgctagcgatatctccctgaccggaggctcagtagtccagagaatacggctgcctgatgaagtggaaaacccagggatgaacagtgggatgctggaagaggatttgattcagtatnnnnnnnnnnnnnnnnnnnnnnnnnnnnnnnnnnnnnnnnnnnnnnnnnnnnnnnnnnnnnnnnnnnnnnnnnnnnnagtagaacagaatcaccagagagcatttgactacttcaacttagcagcaaatgctggcaattcacatgcgatggccttcctgggaaagatgtattctgaaggaagcgacatcgtccctcagagtaatgagacagcacttcactacttcaagaaagccgcggacatgggcaaccccgtgggacagagcgggcttggaatggcctacctctatggaaggggaattcaagttaattatgacctggcactcaagtatttccagaaagctgctgagcaaggctgggtggatgggcagctgcagcttggctctatgtactacaatggcattggagtcaagagagattataagcaggccttgaagtattttaatttagcatctcaaggaggccatatcctggctttctataacctggcacagatgcacgccagcggcacaggggtgatgaggtcctgtcacactgcggtggagttgtttaagaacgtgtgtgagcgaggccgctggtcggagaggctcatgactgcctacaacagctataaagacggggactacaatgctgcagtggtccagtacctcctgctggccgaacagggctacgaagtggcacagagcaacgcagccttcatccttgaccagagagaagcaaccattgtaggtgagaatgagacttaccccagagctttgctgcattggaacagggccgcctctcaaggttataccgtggctagaattaaacttggagactaccatttctatgggtttggcactgatgtggattacgagactgcttttattcattaccgactggcttcggagcaacaacacagtgcccaagctatgtttaacctgggctacatgcatgagaagggcctaggcannnnnnnnnnnnnnnnnnttgcaaaacgcttttatgacatggcagccgaggctagcccagatgcacaagttcctgtcttccttgcactctgcaaattgggtgtcgtctatttcttacagtacatacgggaagcaaatatccgagacatattcacccaactggatatggaccagcttctgggacccgagtgggacctttacctcatgaccatcatcgcgctcctgttgggtacggtcatagcttacagacagagacagcaccaggatgtgccggtacccaggcccccagggccatggccagctcctccccagcaggaaggaccaccagagcagcagccaccacagtagcagccacacacccgcctgggtccgtgacctctagggagctgctt

SEQ ID NO: 623 - DNA, 355 bp, Cricetulus griseus
actcggacactgaagtcagagaggacaccagcaacaaaaggtgaccaggagcctccaggatgtctgagctggagaaggccatggttgccctcattgatatcttccatcagtattcaggacgggagggtgacaagcacaagctgaagaaatcagaactcaaggagctcatcaacaatgagctctcccacttcctggaggaaatcaaagagcaggaagttgtggacaaagtcatggaaacactggatgaagatggagatggagagtgtgacttccaggaatttatggccttcgtctccatggtgactacagcctgccatgagttctttgaacaagagtgagacaaaaaaaaaaaaag

SEQ ID NO: 624 - DNA, 1275 bp, Mesocricetus auratus
  misc_feature (389)..(407): n is a, c, g, or t
  misc_feature (457)..(476): n is a, c, g, or t
atgcagaaagccacctactacgacaacacggcagctgcgctcttcggaggctactcctcgtaccctggcagcaatggtttcggctacgacgggcctccccagcccccctttcaggccgctacgcacctggagggtgactaccagcgctcagcgtgctccctgcagtccctgggcaatgccgctccacatgccaagagcaaggagctcaacggcagctgcatgaggcccggcctggccccagagcccctgcccgccccgccgggctcacccccacccagcgccgcacctaccagtaccactagcaacagcaataacgggggcgggccgagcaaaagcggcccccccaagtgcggtccgggctccaactctaccctcaccaaacagatatnnnnnnnnnnnnnnnnnnngaggcaaacgtccaagctgaaaaacagctcccccggcacagaaggttgtnnnnnnnnnnnnnnnnnnnntggcagcggcggcagtagcagcggcgggggcggcagtggaggcgggggaggggacaagagccccccggggtcggcggcgtccaagcgggcgcggacggcgtacacaagcgcgcagctggttgagctggagaaagagttccacttcaaccgctacttgtgccggccgcgccgcgtggagatggctaatttgctgaacctcagcgagcgccagatcaagatctggttccagaaccgccgcatgaaatacaagaaagaccagaaggccaaagggctggcctcgtcgtccgggggtccctctccggccggcagccccccgcagcccatgcagtccacggctggcttcatgaacgccttacactccatgacccccagctatgacagcccgtccccgccagccttcggcaaaggccaccagaatgcctacgcgctgccttccaactaccagccccctcttaagggttgcggcgccccacagaagtgccccccaaccccggcgtcggagtatgagccccacgtcctccaagctaacgggggcgcctacgggacgcccaccatgcagggcagtccggtgtatgtgggcgggggtggctacgcggatccgctgccgccccctgccggcccctccctctacggcctcaatcacctttcccaccacccctcggggaacctggactacaacggggcggcccctatgggccccaaccagcatcatggaccctgtgaccctcaccccacatacacagacctctcctctcaccacgcaccgcctcagggtagaatccaagaagcgcccaactga

SEQ ID NO: 625 - DNA, 6680 bp, Mesocricetus auratus
  misc_feature (795)..(840): n is a, c, g, or t
  misc_feature (1939)..(1956): n is a, c, g, or t
  misc_feature (3637)..(3663): n is a, c, g, or t
  misc_feature (4083)..(4135): n is a, c, g, or t
  misc_feature (5666)..(5690): n is a, c, g, or t
  misc_feature (6659)..(6680): n is a, c, g, or t
ggagcagcagaggcctgggactggagatggggacgcgccgggtcaccccgggctgtgcagcggggctgctcgtgctgttgctgcgatgcttcgggcttgcggagccttccgagttctcaggtgatgattcgttcaccatcgtcaatgaaaacacgggcaagtgcatccagccgctgtctgactggatagtggcgcaggactgcagtgaaaccagaagcatgctctggaagtgggtgtcgcagcaccgtctctttcacttggaatcccaaaagtgccttggcctagacatgaccaaggctgccgataacctgcggatgttccgctgcgactccagcgtcttgctgtggtggaagtgcgagcaccactccctgtacagtgctgcccactacaggctggatctgaaggacgggtatgccacagccagtacaaactcatctgccgtctggaagaagggaggctccaaggagaacctttgtgaccagccttaccgtgagatatataccagagatgggaactcctatgggagaccttgcgaatttccattcttagttggtgagacatggcaccatgactgtattcgtgatgaaaatcatagtgggccctggtgtgccactaccttaaattatgaatatgatcaaaagtggggcatctgcttaaaaccagaaagtggctgtgagggtaactgggaaaagaatgagcagattggaagttgctaccaatttaacaaccaggaagttctttcctggaaagaagcttatgtttcctgtcagaaccagggagctgacttactgagtnnnnnnnnnnnnnnnnnnnnnnnnnnnnnnnnnnnnnnnnnnnnnnttgctagaattgtttggattggactgaatcagctctattctgctagaggttgggaatggtcagacttcaagccattaaaatttcttaactgggatccaggcacacccagtgcacctatgataggcggatcgagctgtgcccggatggacacagagacggggctgtggcgaagtgtgtcctgtgaggctcagcagccctacgtctgcaagaagccattgaacaacaccgtggagctcccagatgtttggacatactcagatacccattgtgatgtgggctggctgccacagaatggattttgctatctgctggcaaatgaaagtggtccctgggatgctgcgcatttgaaatgcaaagccttcggaggtgacctcatcagcattcattccttagcagatgttgaggtggttgtcacaaaactccatagtggggatgtcaaagaagaaatatggacaggcctcaggaacgtaaacagccccactttgttccagtggtcagatggtacggaagttactctaacatactggaatgagaatgagcccagcgttccctacaataagactcccaactgtgtttcctacttaggaaagttaggccagtggaaagtccagtcctgtgaaaagaaactcagatatgtatgcaagaaaaagggagagataactaatgatacaagatctgacaagctgtgtcctcccgatgagggctggaagagacatggagaaacctgttacaaaatttatgagaacgaggtccctttcggaacgaactgcaatctaaccatcactagcaggtttgaacaggaattcttgaatgacatgatgaagaagtatgacaagtccttccaaaagtacttctggaccggcctgagagatgccgatgcccgaggagagtacagctgggccgccactggtgggctaaagcaggctatgaccttttccaactggaattttctccagccagcatccccaggtgggtgcgtggctatgtctactggaaagacccttggcaggtgggaagtgaaaagctgcagaagtttcagagcactttcaatatgcaagaagatgagtggaccccaggagcccgaggaagcaaccccaannnnnnnnnnnnnnnnnnccgaaggctggcacactttcccctccaacctttcttgttataaggtgttccacatagaaagaactgtaagaaggaggacctgggaagaggctgaaagattctgccaagcgcttggagcacacctccccagcttcagccacatgaatgaagtaaaggagttcctgcatttgttacaggaccagttcagtgtgcagcgttggttgtggataggtctgaataaaagaagccctgatttacaagggtcctggcaatggagtgatcgtacaccagtgtccactgttatcatgcatcgggagttccaacaggattatgacgtcagagactgtgctgccatcaaggtacttgacaatgcttggctaagaacctggtattactatgatgagagaaaatttggttatttgaagcctttttcttgtgatgcaaaacttgactgggtgtgccagattccaaaaggtagcactctccaagtaccagactggtacaatccagagcgcactggaatccacggacccccggttataattgatggcagtgaatactggtttgttgaggaaccccgcttaaactacgaagaagccgtcctgtactgtgctagcaaccacagctttcttgccacgataacaactttcacaaaactaaaagctatcagaggcaagatggaaaatctatctggtgaagagcagaagtggtgggtgaaagcgaatgcgaatccaatcgatcattactttctgaggacgcgacccttatggcaccgtttttccatgctgcttgatgaagaatgcttgcaaatgtcagccaaaatgtggcaccttgacttaaacaaacgagcagactgtaatgacaagttgccgttcgtctgtgaaaaatataatgtatcttcattagagaaatacagtccagattctgcagctaaagtgcagtgtactgggaaatggattcctttccagaataagtgctttctgaaggtcaaatctgagccagttacattttctcaagcaagtagcacttgtcatacctatggtggcacccttccttctgtgctgagcaagagcgaacaagattttattatatccttgcttccggaaatggaaacaagtttgtggattggtctgcgctggactgcctatgatagaataagcaaatggacagatggcagaaacctgacgtacagcaactttcacccattgctggttggtcggaggctgagcatagcagcatattttattgacgaagagtctcactaccactgtgccctgatgctcaatctcagaaagtcaccactcactgggacctggaattttacctcctgctccgaacgccattccctgtctctctgtcagaagtactcagaaaatgaagacggacggccctgggagactaattcggaaactgtaaaatatctaaataacctgtacaagatcatctcgaagcctctgacgtggcatggtgctctgaaggagtgtctgaacgagaacatgcggctggtgagcatcacagacccttaccagcaagccttcctctccgtgcaggccaccctgcgcaacacctccttctggatcggactctccagtcaagacgatgaactgaactttggttggtcagatgggacatatcttcattttagtaactgggctgtcgacaatgagaagcttgatgactgtgtgatcttagacacggatgnnnnnnnnnnnnnnnnnnnnnnnnnnnagaaccagcctggggccatttgctactacccaggaaatgagacttcaaaggaggtcagaccgttgaacagtgctaaatgcccatctcctgcgcagagtactccgtgggtcccatttcagaactcgtgctacaacttcatgataacgaagaatagacataggacaatcacacagaaggaagtacactccttatgccagaaactgcattcaaaagcacagattctgagtattcgaaatgaagaggagaataactttgtggttgagcagcttctgtacttcaattatattgcttcgtgggtcatgctaggagtaacgtatgaaaacaattctttgatgtggtttgataagactgcattgtcgtacacacactggagagcaggaagaccagccgtgaaaaatcacaaatttttggctggtctannnnnnnnnnnnnnnnnnnnnnnnnnnnnnnnnnnnnnnnnnnnnnnnnnnnntcatttttaccaacacagcattttagcctgtaaaatcgaaatggttgactacaaggaagaacgcaatagcacactaccagagttcattccgtatgaggacggcgtctataatgttattcagaaaagggtgacgtggtaccaggccttgagcatgtgttctcagagtggaagacatttagcaagtgtccacaacccaaaggagcagctctttctggaagacattgtgaaccgtgatggattccctctctgggttgggctctcgagtcatgatggcagtgaatcaagtttcgaatggtccgacggcagtgcgtttgactacatcccttggaagagccaagggtctcctggaaactgtgtcatcctagatccgaaaggaacttggaaacatgaaaattgtctatctgttaaggatggtgccatttgttacaagcctacaaaatttaaagagctggcctctcatgcacactcatcaaaatgcccattggtgaaaaggaatggctcccagtgggtccagtatggggaccactgttactcggctgagcaggcattacacaccttcgcagaggccaaaaaattgtgccaggaacttgatcattccgcaactgttgtcaccatagcagatgaaaatgagaataaatttgtgagcaggttgatgagagagaattataacataactatgagagtttggcttggattatctcaacattcactcgatcagtcttggagttggttagatggactagatgtgacatttgtcaagtgggaaaataaaagtaagaatggtgatggaaaatgtagcattttaatagcttcaaatgaaacctggaaaaaagttgaatgttcacgtggttatgcaagagtcgtctgcaaagttcctctgagcccggattacagaggcatcgccgtcctgttcgctgtgctcagcgttttagcgctcatcagcggactcatttggttcctcgtgcaaagaaaccatttccgctggacaggcttgtcttctgttcggtatgaacacggagccaacgaagacgaggtgatgctcccttctttccacgactagcttcttccaagagtttgttcattggcaacaacgttccagaagaaagatgagccgcttaaccttgtcccacaagcagtgtttactctgtttcaaagtagaagtcttttagggacgcttctagttggtgagttgctctgctgaggcgggtgtcacttgaccctctaaccgccatgctaattactccaggtgcctgagcagagaggacttaaaaccaaaatggatgttcagattgtttacagggggatacatttaactaatgtgaattttttttctctaagaatgcagttgctaaatagataggtgcatatcttaatagcgttttaacaacttcattgaaaattaaaattgtcaatactactatacgccacatcaaccctttagtttagatgagcattgggccaaatgcaaagttagtacctcaggcacaaactcaactacaagtcagatcgatgatgtttcaaaataggcttnnnnnnnnnnnnnnnnnnnnnnnnnaggcatgctttttacacagaaaatggggcctcctggaagatgtttcttatattatttcaaagatatctataccaatattaattagttgtaatgttttctatttatatacttgtattcagtggggttttttttatcttttgaggaaacagagtttaatgtttcgtaaagtgtggggttgcgactgttaaattgactaggcgtgttgtatcagcatgtcttctgtttgatgattttcttttttacaaggacccaactacagatgagatttaaacttttacagtttttatatttcacacagcacatcaacttttgatgaatgttattttgtaacctttttagcaaagcaaaacataaaagcagtctttgaatggtggtgtttgctaactttgtatttgtaaaatgaaagcttctaagaccttgaaacttgaaactttgtcattaatgtagaaatatttaaaatctaaatgactaggggaacattattttgtggatgtaatttccattttaagacccagaatatattcttataagtcgtgtccactaaataggatgacacttttattcagtgtttaattcatatttatattttagaatatttttgtacaagatacagatttattttgtttgaggtgtttatactatcataaagttgtaaataattttctaagactgttttaatatggtccacaaatgtcctaaatatttttattgaggcatcttagaaataaccattcagtttcttcaaagacctaaacgaatgcattgtgaccacagctgtgtatatggctgatgccatggtaaagttatcttgccttttaaaagtggtggagttgatcagtgcatgcaaaagcatctctgaattgattgtataccatgcctaatatgacgagaaagtgcccagctgttgcaaggtgaggtgttaaagattctgcaagcactgtctagagaataaattcctgtatctctgannnnnnnnnnnnnnnnnnnnnn

SEQ ID NO: 626 - DNA, 1812 bp, Cricetulus griseus
  misc_feature (664)..(688): n is a, c, g, or t
  misc_feature (861)..(884): n is a, c, g, or t
atggcaatgagggagctggtggagggcgaatgtgggggtgccaacccgctcatgaagctggccactcacttcacccaggacaaggcccttcggcaggagggactgaggcctggcccctggcccccgggagcctcagctgcagagacggtttccaagcctttgggagtaggttctgaagatgagttggtggcagaattcctgcaggaccagaatgcaccccttgtatcccgtgcccctcagaccttcaagatggatgacctcttggcagagatgcaggagattgaacagtcaaactttcgccaggctcctcagagagcccctggtgtagcagacttggccttgtctgagaattgggcccaggagtttcttgcggctggagatgctgtggatgtagctcaggattataatgagactgactggtcccaagaattcatcgctgaagtcacagacccattgtctgtgtcccctgcccgatgggctgaggagtatctggagcagtctgaggagaagctgtggttgggagagccggaaggatcatccaccactgatcgatggtatgatgactatcatcccgaggaggatctgcagcacacagccagtgactttgtgtccaaggtggacgaccccaaattggctaactccgagggcacatcagaggcctggnnnnnnnnnnnnnnnnnnnnnnnnnacacgtctgccctggatgtagaatttgaacgagccaagtcagctatagagtctgatgtcgatttctgggacaagttgcaggcagagttggaggagatggcaaaacgggatgctgaggcgcacccctggctttctgactatgatgacctcacatctgcttcctatgacaagggnnnnnnnnnnnnnnnnnnnnnnnncctgcgtgaccaccctcaggctttcgaagaagggcttcgtcggcttgaggagggggacctgcccaatgccgtgctgctttttgaggctgcagtgcagcaggaccctaagcacatggaagcttggcagtatctgggtaccacccaggctgagaatgagcaagagctcctggctatcagtgccctgcggaggtgtctggagctgaagccagataaccggacagcactgatggccctggctgtaagcttcaccaacgagtccctgcagcggcaggcctgcgagaccctgcgagactggctgcgctactcaccggcctacgcccatctggtgactcctggtgaagaaggggcgagtggggcaggactgggtcccagcaagcgtgtcttgggatccctgttgtctgactccctgtttcttgaagtgaaagagctcttcctggcagctgtgcgtctggaccctacatccattgaccctgacgtgcagtgtggcttgggagtcctcttcaacctgagtggggagtacgacaaggctgtggactgttttacggctgccctcagtgttcgtcccaatgactatttgttgtggaacaaacttggggccacactggccaacgggaaccagagtgaagaggcagtggctgcgtaccgtagagcccttgaactacagcctgggtatatccggtcccgctataacctaggcatcagctgcatcaacctcggggctcaccgtgaggctgtggaacactttctggaggccctgaacatgcagaggaagagccggggccctcggggtgaggggggcgccatgtcagagaacatctggagtaccctgcggttggccttgtctatgttaggccagagtgacgcctatggggcagctgatgctcgggatctgtctgccctcctagctatgtttggcctgccccagtga

SEQ ID NO: 627 - DNA, 20447 bp, Cricetulus griseus
  misc_feature (871)..(885): n is a, c, g, or t
  misc_feature (1015)..(1042): n is a, c, g, or t
  misc_feature (2016)..(2032): n is a, c, g, or t
  misc_feature (3040)..(3079): n is a, c, g, or t
  misc_feature (3261)..(3281): n is a, c, g, or t
  misc_feature (3547)..(3561): n is a, c, g, or t
  misc_feature (3640)..(3672): n is a, c, g, or t
  misc_feature (5995)..(6088): n is a, c, g, or t
  misc_feature (6963)..(6981): n is a, c, g, or t
  misc_feature (8509)..(8527): n is a, c, g, or t
  misc_feature (9294)..(9321): n is a, c, g, or t
  misc_feature (9605)..(9641): n is a, c, g, or t
  misc_feature (10518)..(10540): n is a, c, g, or t
  misc_feature (12944)..(12963): n is a, c, g, or t
  misc_feature (13634)..(13652): n is a, c, g, or t
  misc_feature (15412)..(15458): n is a, c, g, or t
  misc_feature (15937)..(15978): n is a, c, g, or t
atctcactagatgccgaaaaagcctttgacaaaatccaacaccccttcatgataaaggttttggagaaatcatggataacaggaacatatctcaacataataaaagcaatatacagcaagccaacagccaatatcaaattaaatggagagaaactcaacgcaattcttataaaatcagggacaagacaaggctgtccactctctccatacctcttcaatattgtccttgaagttttagctagagcactaagacaacaaaaggagatcaagggaatacaaatcagaaatgaagaattcaaactctcactatttgctgatgatatgatagtttacataagtgactggaaaaactctaccagggaactcctagagctgataaacaccttcagcaaagtggcaggatacaagataaactaaaaaaaaatctgtagccctactatataccaatgacacattggtggagaaggaaaccagagaaacaccctttacaattgccacaaacaacataaaataccttggagtaacactaaccaaataagtgaaagacctatactataagaatttgactctctaaagaaagaaattaaagaagatacccgaaaatggaaagatctcccatgctcttggataggtaggatcaacatggtaaaaatggcaattttgccaagagcaatctacagattcaatgcaacccccatcaaaatcccaatacaattcttcacagaccttgaaataacaattctcaatgttataaggacaaacaaaagacccaggatagccaaaacaaccctgtacaataaaggaacttctggaggcattaccatcccagatttcaagctctattacagagctatagtcctgaagacagctnnnnnnnnnnnnnnnagtacacaggtagaccagtggaatagagttgaaaaccctgatattaccccacacacctatgaacacctgatttttgacaaacaatccaaaattataagatggaacaaagagaacatctttgacaaatggnnnnnnnnnnnnnnnnnnnnnnnnnnnngaagactacagatagacccaagcctatcaccatgcacaaaacttacgtcaaaatggatcaaagacctcaacataaacccagccacactaaccctattagaagtcaaagtgggaaatacccttgaattaattggtataggagactgcttcctgaacattataccagtagcacagacacgaagatcaacaataaatgggacctcatgaaactgagaaacttctgtaaggcaaaggacacagtcagcaagacaaaatagcagcccacagactggaaaaaaatattcaccaatcccacatctgaaagaggggtaatttcaaaaatatacaaagaattcaagaagctagtctccaaaacccaaacaatccaattaaaaagtggggtatagaactaaatagacaattctcaatagaggaatctaaaatggctgaaagacacctaagaaagtgttcaacatccttagccatcagggaaacgcaaatcaaaacaactctgagataccatcttactcctgtcagaatggccaaaatcaaaaacatcaatgacattttatgctggagaggatgtggagaaaggggaacacacctccactgctggtgggagtgccaacttgtacagccactttggaaatcggtatggcgactcctcaagaaaatgggaatcagcctaccacaaggtccagaaattccactcttaggggtacacccaaaagaagcacattcatacaacaaggacatgtgttcaacgatgttcatagcagcattatttgtaatagccagaaactggaagcagcctagatgcccctcaactggagaatggaacgagaaaatgtggtacaattacacaatggattactactcagcagaaaaaaacaagggaatcttgaaatttgtaggaaaatggatggaacttgaagaaaccattctgagagaggtaacccaatcacaaaaagataaacatgatatgtactcactcannnnnnnnnnnnnnnnntagagtaaattattaccagtttacaatccacactgccagagaagttagtatagaaggaggacccttagagagacatacttggtcccctggagaaggggaaagggtcaagatcccctgagcaaatggagagcacaggaagagggagagggagctacaagaatgagaagggaagaagatgaaggatgcagagctcatgagggagcagaaaggttgagtcaggggaataagagaagaaaggatatgtgaaaggtagggttttagttggggggttggcaggggaggacaggagggagaagaaaactgtgattgtcatgtaaaacaattttgtttctagttcaaattaaaaaatcttagttttctagcatatagctagtattcaataatatgttataaataagtcaataaaataattaaatgaaaaaattaggtaggttaaaacttcatcaatggaaactaatgaaatgaagcctacttgtaaaaatagatgagcaaaaccctaaataaaatgcatacgcataagattttaagaatttttttttcactctaaaagatttgccttagactcactttataaagtgcatcctactttgtaacttgaaatataatatcagtagagctcaagcctcatggtttactcccagtaaattatggcttttgggaaataacaacttgtaatttgtagtttttaaaaattactcagttatttggggtacatcataggacctgtagttttcctgcttgccccagaaccacaatgttctgactactccattcatactacagtgttcaacacagaacactaaccagagtgttatgaccactcactttctttgagaaatcccaagacatagtctcagaaaatggtatttaatgcagcattgtccaagcttctatgatacttacactcatctatccattcatccatgcaaccatcaatcaatccacccatccatcaatccatctgatgtctactgctcagctctatgattttccaaggactagagggtnnnnnnnnnnnnnnnnnnnnnnnnnnnnnnnnnnnnnnnncctttgttgtcatgttctgcaattattttcctaattgtatattacctttaatctgtattttaggtacaaggacaataatagtttagtcatctttgttgtggcagaaaacagccatgtatctggaacatatgtatccatgttgttttctggatgaatcattatcacagtaatatattttcttnnnnnnnnnnnnnnnnnnnnnatttttaagtatatctcagggttctatttctctctgctgagagtattatttacatgtcttattgcaaaacttttagtatttaccaacatgattattattcgtgaatccattggctagtggaatgttgcattacgatgataaaatatctgttaataatttttcataactgatttccctaggtgtataccacccaaaacaaactgcaaacatgtatcattaccagactactaaaagctagaagcatgttacttgttttgttcttgctnnnnnnnnnnnnnnngagaattaaaatttgaaatatccaaactccaaggttgaaggtgaggttaccagcatgtaactgaagctgcaacagtgcnnnnnnnnnnnnnnnnnnnnnnnnnnnnnnnnncacactctcgtgagatcatctttcagcctcttgtgcctggtgttcaaaattcatctaccaaagaggagcttcaaagctgctgaggttaggggatgtatgatactgtccatttataggaaataatatatttgttttccatctgtcccctggcatacaactcttaagttccttgaaatcccagggatgtcctttgtttgccaatgaaatgactgatggttggaggcccccagtagaataactggtctccagaaagaaagaatcatgattaaaaatttgcaagccttcatcctcactacctcccccctgcccagcctctggagctagaagtcacacttgtttggatcaccaatggataatgattcaagcaataatgctatacaatacaatcaccagaaagagagaaagacaataatcacacaagcttccagagtgctcagcagattcctggaggggtggcaaagccacagagctcaaggggttccactcacctttctggatgccttcagcatgtatctctctcatttggctgtcaagtaacatgtttctctgagttcaattaggcactctagcaaattgagcaaacctcaggaggaggctgtaggaaacctcaatttgctatgggttgacaggaattatagatcacaacctggacttgtgtctagcttctgaagagggcaatagaggacaactttacaggatttagctgtcatctaggaggtctgactcaaactccagggcagtgtcagaactgaactgaattataggatacttcattgtctgctagaaaactgactgctggaaatgtagactggaactcccatgtctatggtgtccaaagtattttgctgagtcctgtgtgacatcaggaaaacacatttgtttctcttctctccacaggagcacatgaggataaaagggagtaaatttgaacacagatcaccattctgcatgagtgactgtcattttcaggtcatttctatcttaagatcctctcaggaagcaagattcagtttggaccataactaactataacagctacacttcacagtatctcttggttgttttctctttacaactgtttttttgtttcctatttatttatactgacatgaaacttgctatgtagagcagtctgcataaacattcttgtttttattgaaattaacacataactttgttctgttttatctgaataagtgaatagttaaatatatgaatattcaagtggctttgtttattataagtgggtaaacgtgtcaacaaaaagggcaattctatcactatctattctaatagattgaataattataatgtgatttatactaagagttggggcattataaaacaggataaaactctcttaagttaaaaacagaaacacaaagtgataaagaaaaggaacatgtgattgtccaaacagaagaatctatctatgagttgcttgtatcagacatgtaactacatctctttttgtatttttatatctgtatctataccttatacaccgtgcaacttctcctctgtaaagttgaaaaaaattaaaagattgaactgctctccatctccttatcataattccttattttttttgtttatgtactttaaactgctatggtaccaaagactggttgaattgaactgaaaaccacagtcataatataatactttgaattccaagtagaaacactgatacaggcaagaaatataaatagtctgcatggttttctgctgtgaagacttttaatttgataactaccaataaatgtttgcacatttaacataagaatttttaaatgtttacaaacttttgacatgtggaagaacatatatatcttcacatatatatcttcacaaatgctgagtgctatgaatcatgggaaatttcaaaaggccagcagggtgtcagattcttcaatgggttccttcctgtgtcctgttttcccgagtattaatgtatttcactctaggaagccctgtattttccttcaattctgcctcgctaataattaattcattttgcttacactgcagccagcttcaaatcatggtctccatttcttggtaatagattttgccacaggcaatgtgctgagccataacctcaattacagcttacaggggaggagactgcacttgatttctgttggaggtgctattttgttttaactgaaattgtacagaggtgataggggaacatcactgtagtgggaaacagtgaaccccacacgatactgatcatatgtagaatttagctctgcctatcatagcagtatccactgatataaaacaactggtaagagatggctagttaaataattaaacnnnnnnnnnnnnnnnnnnnnnnnnnnnnnnnnnnnnnnnnnnnnnnnnnnnnnnnnnnnnnnnnnnnnnnnnnnnnnnnnnnnnnnnnnnnnnnattttttctttcatggggggtacagcagggatgagggagaggatggggaaccaggagatgaacagaattggggtgcatgatatgaaactcccaaagactcaataaagaaatttagaaattttaacccaaataagtttgtgcatatactaataaactgttaaaaccatttacctcttggttgcttgcttattttattttgtattaattcattaagtagtatgcatgattgtcttgcctacatgtaaatctggctgccacttgcagacttggtgcccatgaagcccaagaaagagtgtcatatcccttagttctgggattgaactcaggtcctctacaagcacagccagtgctcataactgtgaagtcatcgctccacttacaagtcaggtatttctttagatgtcctgaaagctatgtttcagcaagagaagagacaaagaaactaatatagagacaggcacagaaaaacagagatatccatctgtcaattttataagaatgtcagaagatacaactctatcacttcattcctttattagaggtgtatgtatacagcatgtatcctcattccaaaaacttttgtcaaactttatagttatatgaattcccagagtatgtagtaactgtgactagaaaccgaaaggcacaatagggcatgatgagctaattgaactagtccacatattgatggcatgtgctagggaaactgatggttgtaatgacatatttgcttgtctctgaattccttctttaattacatagcagaagcgaaggtttaacagcagctacaggtgccccaggatctttaattgtcccattaatgaaagtgttaattatgagtaggaaactctattaccatgaagatagctagaagnnnnnnnnnnnnnnnnnnntatacaagtctttctgtcccagtttttaactcagagtctcccagtagtgaattagagccataaaagctacaaaatgccattaagttcagtgtgcccaagaccatggttggtgagatgcccttgctaagcactggaagatatggtgatttcatagaggcatatataattctcctctgtctctgatgttcctggcacttaattgcatacgatacttcgagaccagtgataaagatccactggagcctggaaggtgaaatttaagagagaagtcacaaagatttcatgttctggaaagtcccaagtttaaaacaaaaacaaaaatcttagagaaacaggaggggaagccatcaagagaaagcacaatgatgctgtgttaatgaaatgtctgcatatcagttcctgaggtttcctttctgtttccatagtataagattgaattattataatgatattatactagtagacatcttacagtaatgttctcccagactgattatagtattggtcattggcaattgtgcttagattttccaaaggagatactttaaaaagatacttggtagtcaatgcatacaactgtaactattacactgtatgaaaaatccctggtgtaagaatatgtaagacaaagattaaacaatgagcattttttaatatttccagggaaagtgaaatttgtatgagtaggtgcaaatcaatataaaatgtctataatgtgatcaccataaactttagagaggaaagttggcctacacatgctaaggttcaagaattcaaaggaccaaggcttaggttacatggcagacaaccagtagtttctataggcatcagcccatctatgtactgtggtatcatctcagcatttgttaatgcgggtgaggtacatatcatagtttatcaacagcagtggctgacttgcatggacatagagattaaataattatgactcatagaaaaggtttccaccagcttaatttttgcaataactttaaagggaaagactagtttcaatggaattagaaaattatgtgataagtttcctttgtgtaaacattaattcaagagaaagctcacacatgttgtcaagctgaatcatgagtgaaccagaggactatgaacatgtgtctaccagtgttgactattatggcacatttaattattcaaaacaaccacccaagttgcatcaacttaaaccagaataactgatgtagacagagctctacaagagtaagtaagatgtgactctacagttcaaggcatctcaggtgaaaactggaccaatggctggattaactttcaagtgaaattatgcagatgaccaaaatactcagcaacacaatttatatcttggggcttaatttatttaatctaaagaaaattctaatggatttaattctgagaataatttcccaatggaatcactatatgaaaagaagacctaccataaactcttaatttgtactgtaggatgtaagctcaacagatacaccatgttcggactttagactgggtgctgtattgttttcannnnnnnnnnnnnnnnnnnttagctggtaaaatcaagcaaaataattcatctatgaattcatgaaaaatcaccagtacaagtttaatatgaatttctttatcacaagggttgctctttatactttttatatatctctggaatacctggaattgtgggagcactgatttgaatatattgtctcatagagagaatttgttattttatttatttaaaatttttgccattagcagaggcagggaattttgattctctcctataaagatttttgaaaattcattgcattttcttataaaggaaagacaaaccttaagacatggaggaggaatctcccaggcgccttcctctggctcttgttaccagatgccattcagtgacctcagcaaaggtgcccttgatggaacacttgcccgaactgtcatcctgaacaactgcagttctaaagctttctataccggcatttaatcttttatttagtcacagaaacacaaagtcaccatttttttttaaaactgccaagagaaaattgggggagaagagtgttctctctcctcagctctgaggaaaatgacgtgagataataggaagatgagagcattttttccattaacctcttgaccccataagttaatggctttttgttgcaaactactatatcaacaaacagggctccaagtgagattctaacccaggtagggagggctctgcaactatctagaaaagtgtcctggcgttacatgctgctatctacaaccctaccaagaggccagctgccctatgggctatannnnnnnnnnnnnnnnnnnnnnnnnnnnccttagcaaggagccaaacagcaaaggcatttctcacacataagataaaatccttgaatgcagttgccagccaggaaagctcttcaaagtatgcagatcagctaaaggtatattgtgaggtccacagcttttcaacatagcctcctgtctgccttgaatgcagaagtgtccagaagttacttccatattgaagaaggaaatcaggtactaactatcaaatatagcaaaagagcctaggttcctaacagcactgggttactcatatgagttatggtctgactctnnnnnnnnnnnnnnnnnnnnnnnnnnnnnnnnnnnnnaataggcagcagcctggtattatacttaaatgtcattacccaggaggggaaggcaagaaactcatgaaatgaggtcagactgggccacaaagagagacattctttcaacaagatgataataataatcagaatgaacggcaaccacaaaagacactgcaataagaaatacaaatggtcatatattggtttaaattgcagttttaggaagctttcaccatagcccagtgatagagtatacctctatcattttacaaagtgggggagcagggaactgtgtgggagagacacttcaaagagaactgcctgtatagcacccaccatcctctgccttggcttcaagtcttaggaggaccttgaaatatgactgcatttatattcaggtcagccaaaagaggcattactctgctctgtggaggtttccatgttcacttgaaaagagtgagcagacaccggaattggttggctggatgctacaaacagaatgattagctcagaccagccccttgccttcagagaaatagctgtcattggttcggaatgtcaaaacaaccatcgcatgtatgatttgtgcatctatgtatgtgtgtgtggagggagggcacatgaaaaacagtagggggagagaaaaagagaaattttattttttatatttgtatagtgccatgtagaattgaaaatataattgaggaggcaactaaaatgtaagtattctttcttttttttccaagttgaaaatgcttcttgcaaaatattgtagttgaattttctttctttcttctcagaaaactatgtcagagaacatcccctgcccccaggccccatgttctcatttgtaatgatatactgtatgtaaagttatattactagcacatgcaannnnnnnnnnnnnnnnnnnnnnntgtcacaaaattataactaagagaggctgttacatctactgctctaaggcacagggagtattatttcagcaacaatgaaagcacataataaaggcctttaattttaacgacagcttgagtgcaagctgttagaaaaaccaagtatatgttttcctatccaggtaaccagatctggactctcctccagacagcacccttttccaacttactttggattttaattattcaattcaattcaacaagcatttgcaaatgcccactctatgtgaaggactacagtggattccttagctattgaataccaatacgggcattttggaggtcacagtctagtgagagagaaaaatgcctatttaaacaactttaataaaaggctattatgagaagtactgaaatgaggttaatttaagtgtcatgtacagcagagagggatgtgtgagaagggggctttggagaggcacagtaccatgaatatggaagtggtaaaacatcccagcaaagacacctaacatccaacatcattaactagcaggcaacaatgctgggacatgctaagaggcaagaagtggatagacatgacttcagagacagcaaatgtgaaaagaaaaggaagaaacttgaataaatgctgctgactgattggacataggagtgaggaagaaagtatcctgtgatattctatgtgactgatttagtatgtgttttctcttaattattcagtgtcactgattaagtgagcctaccagtgttacttttcaattgctgtgataaaactccatgactaaggcaacttatagaacaaagggtttatttggacttattgcttcaaagggtaagagtctttcatggtgtggaaatggtaggcatgggagacagagaagccagctgaggtctcatatccttaactgagagcaaaaggcaggaagatcgaagttgaaatggcctaagtctttaaacttgcaaaccctgccttcaatgagatgctttgtccaacaaggttatacctccaaagcctccaccaccaatgtcactaactggggaccaagcattacaatgtcttagattttatgggatatcttgttcaaaccaccatactgaacctctgggtgtatttatgagcagttatatagattaactgaagtgagaaagctgaccttgactgtgagtagcaccatctcatgggctgggatcctggactcattaaaaagtagagagtgagctgagtgttagaattcaacataccctttcacactgtggatacaatggaagcatttgctcaaggatctgctgccaacctttgccagcacagaagactattccctggaactgtaagatcaaggcaaccctttcctccttaaagcacttctgtcatggtatttcattacaggagcaggaaaagaaattaagacagtgatcaagacaaggaaagaaaaagaatggccagagattggcaaaataccctctttcagagtacccctagcaaccttctccctttaactaggtgccaattccttctctttaaaacacctttaacaattcaggtatgaatttatccatggactaatctaccagtgaagtccgatctaccctcatgatctccaaaccctattcccctcatcaacctttggggcatatttcagtttcagactgtaagagggggctaaaggttgaggtccatcttttatgagtactaccacagcggccagctacattaaactctggttgccagagtttgtaaatttctagtgaattgcttaaaaattgacttcctttccttctctacctcatttcctttttctaggaacagctgttccaagaaaggaaaaaaaaaaactgtttctgggaacagctccctaataaactatctaaactcaaatctttaaaaaaaatctcaggatctatttttaaagaatcacaaccaaagacagctagaataggtgatgacaatgtgtaaaaatgcatgtatagaactacatgatgaaggggagaatgcatcaagtcagtgttatcaccatgaagctctaacactttctttgaaaatcatgatcagtgtaaagatagagaaagcaatgctattaagagtagattatggacatcgaagatgatataataatacacacatcagaataagaaatacctttggcagattgaagcaaaagcatcgtttagtgagatggatgtacatttcttaaactggaagctatgcaacattcgaagggaaaggctacacttgaacaaactctacatagcttgtacttctaagatgcacaaacaaatcaaaagaggactacggaagtaatagtaaataatatgatccccttaatagttatgcattattagaaacacaaacattcagaatagttctgttgaattatacaacactccaatggctgtactgggtagnnnnnnnnnnnnnnnnnnnnctcttgcaaactacccttgattggacataggagtgaggaagatgccttccttgactactctggctctcaccaccctacccagattagggaacagatgagcattctgaactggacaacttcgtttgccttgcagcatgacttccttgtagtatgtgttaccatatcctgttttttaaagtggaccataattccccctaaacagaattcctgatggcttgcaaaaagtgccatggaaacctagttttctagggattgagagtggagctcaggaaattctgaaggaatgatcttgagaaaaacatgtgctggaagtgaaggaaggaaaggaaaaatgagcctagacagaagccagtttgaatcactcacctcacggagagctccattggaagtcatcaaaaactgttgtgagggaggtgatcctgtgatgtttgcaattagtctctcagatggaggacatggatataggtgtcctctacagcagtagatactactcagatcactgtaagcacgtaggggagatgtcaccacttaggacaagatacactaatgctagcaggaagacctcatgctgtttcttattcacttatttctttcttgtgttttattgttgaatatatacaatacatttatatataatttatatatattatatcaatattatacatttatgnnnnnnnnnnnnnnnnnnncatcattttatataacactggaatttatgtttagtgatcgatatagcttctaaaaaatgagtactttgaagttatagaacttttctgttgtccccaaacactataaccaatgtataattttattattaacaattccaattataatttggcgccgtttacaaatctgaagtgtatggtgtcttggtttcaatacaccaaaagaagacgattagaggaagaatcaagctgatccaaacactagggaaaacaatattgagagaagaaacctgaacacaaatgctgaaggactgcaatgcacgaagctctgtattttcaaatgatgcccttcacttttctgcctgaatgtacagaagtgcctaaggatactttagaatgatttcctttaagcatgactttttaaacattttagtatttgaattgataaaatgacattatctcagaaatgggtttctgcattctagattctgtgaaaatagtcaaatcagcagcatttgaatagattttgactgactaatctaccctcacgatgctgtgggtactcctaagtctcttcattgctattaatccactggtaattacactatgaatcatggtcattttaactccctcttattatttttctctgcagacaaagagggaagaaagaaaaagggctgcctgtttcaatggaaaacagtgtctcttctctgaagtcctctttaatgttggggacttttgataacaagttctaatttgactagatttttagctttaatattagaaccctgacttagcctcttctgagccttggtttccttctataaaagcaaatacgttacagggctaaattgggggtgaaggaagtcaactggctacttaggagggcctggcccacacacaacaccatgagactgcgggctgctggtgctacttctgaaccataagcacttcaataaaagcaatgtgagtaaatgcagaatagaggaagcacatagatagtcactgtgattattgaagttatgaatatttaaagtagactatctgggggagatagtgagtttctagcaaataaagagaatgtgatgattattaagggttttcaccatcctattattcactgacctactaaatatttagtgtgttaagaggaatttgagaaagtcagattttattttcatcaaatccttatcaataacaatctacaataagaaaattgaattacagtatatacttctgtaggggaagctgtagccacgcctacttggggctggctacaggtgtgcctgaccacgcttgcgagggcgtggtcagggtgacagagcgatacttgcatgggactgcattttctctttcagtttcactttggtacttgctggacagactgctgccacgccggctggctaggttgctctgtaagtaaggcttttccctattaaatacccttatatttctacgactccatattggtaatttcccactatacacttcaacttgaatttcccagttaaattccattttgagtagtagagagcagtggggctattactaggtcactaatcaccttgtgttgccagcttgtcttaagtaccagggtgagggaagggtctgtacagatgggaaagttcaaagacaccttcatggcttatgtatagcagtcagggaaaatacaagtatgatcttggcatgtgaatatgtagctatgtgaaggtcagtacaatctttgtgtgagtgttttgaaaggtaaaaggtacaatgttataagaaggaaaacctgaggatgnnnnnnnnnnnnnnnnnnnnnnnnnnnnnnnnnnnnnnnnnnnnnnnaaaccaatattgagaacagcagattagataaccacaattgggaatttttaaaaataagcaaattaacatagacatactgtgagcagcagattgccctatgtatactctgagcttggaatggagacatctaatgatgattcttgctagaacacatctgatgaaatttttttctcccactcataatcttgtctacaccaaagctgactcttaagcattggggtttgcagtggaatagagcctgtttagtaagataatgttatttttcttgttatgatttcacagaaaaaaatgaatttcagaataagcaacaacaaaacccaatacggtgaattggtagatttcatcctggctcttcttgacttagactggcatgctaggttgggatcctttcaattttcatgtattatttgtgcatgtcatggtgtacatgtgtaggtcagaaggccagcattttggagtcagttctccccctgcccccnnnnnnnnnnnnnnnnnnnnnnnnnnnnnnnnnnnnnnnnnnagggcttggaaggcaggtgcttttcccggctgagtcacctgccagcctaagttctgacttcttgacattccatcactagatacagcacttggattacatgatcttataaggactgttcccacaccatcattcaagtataatggtggatattaggaggaattaaacacctacacaatcagtttttattgactttaagttttcaagcccatgcaaagagaggaaattttaaaggtgcaccccaagtcactttgagttcaccttgtgaagcaaggtgccaagagctctcatatgattctacggtacgtggaaagaactgattgcactaaactcacacctaaagtgtcatcaactccatactttctcctgatagatgagatcctcgtgaactcacacttgatctaggctgagcctttgtcttagtcaagaattctgaacaacttgagcatccattttacagataaggccactcaatgggagagagtggtttaaaacatacacatgaagaaatggagatgggtagaagtagggggtcggggctgggcaatgaaattggtgttgatttaaccttggcttgcctttctaaggcagcagaggtgaaaacacattgtggcagtcagtacttctaccccacagactgcaatcagaaaaatttaaggcacatttgtaatggaatatctttatggtgtacctgttatttaatgtcaacaccaagtgcctcactttgtgcctgactcattggtaatgggaggcagtgaggcctcagataaaccttctttgataatggctgccatttgcaaactttggaaatttgaacaagttactcagaatttgtagggccatttgggggtgggagtcaggtctgatggtgagaagacagctggaaagaatgcaggatggagtggggcacatatgagacctcaagctttgtagatactcagtccattttcagaaactttcctcggccccactgctttgcggttgtagctcaactttcttcaatatacataggtttgtgaatggttcgagttaatgcaaggtatcatatttataacccattttcttctctttggtgaagaaattggaggccaccttgataaaagctgaaactgctttaggtatagagtatatcagtgtgaaaactggcacattccttacattagccatcagacacatctacggtttcaaacaagtttttccttgccttttatgtttgaacagcatattacagaatttcacgcctgggtccactagttacctaataaactatttttcttctttgttctctggcgccaccaaagctcctatttgtgttacttaatatacatcttcttacttgtgtggtctctaagaatccagcaaccttcagacttgtgtcagtttccaggaaagcagtaaaaaaaaataaataaataaattcacagctgttgagactgccatcataatatatcaagacatgaaacagaagcagactctcacccacatcacaggccaagccctgtgctcagacatctttatggggtctcttgcccctgagcaccagcccatacaatagctgaagtctgctcaattgggtattttaaaaataacacagtgaatcaagaaaaatccctggtaactcagcaatcactctgaatatctcaggacaccaccagccacttggaatacaaattaatattcacactttggataaaatgttaaacatatgcatattatgatatacctaataatctaaaacctagggagatgttcagcaaaaatttattcatgtttatgccaaaaggtatgcacaagaatgtttacagactctctataagctagaaattgctagtgtctactaacaggaaaatgaactagtataatcacatagcagaatatgaatagcactaaaaatgaaactacttccataggcaaaacatggaacctcaaatacataacattgactcaaagaactaagatataaatagctatagctatatggatctatttatatggatttcaaaagcaggcagaactaatctaagagccctggacactcttccttgtggaaatggaggtatgtgctgcatctcaacaggctgctggctacaaaacaaaacaaaaaagtgtagttggcaaaatttcaagtccaacactaggcatattcacatcctactaggtgtattacagcctgtagggacatacctgtagccagcactgatataccacacaatcctacaggacaagcagtggttgagagatctagtagaacacttaaggaaatgctccatagacaggctggtaagttaaaactccacaaacataggttgcacaatgctttattgacattaaactttcttaatgccaatgaaaaaggacaaacagctgcagaaagagagtggactacggagaaaactgctgaactgaatcaaccagtatacttcaaagatgtactaacctcggtatggaagcctagacattggggtaggggttttgcatttgtttccacagaagaaaaactttggataccatcaaagttgattctagttgaaagattcaagttgaaaaagacaaacctctcgaaaagaatgagtaacaggtattttactgaagtatatctcataaactggatagaaacctcacaaaggaaagggaagttttttgcttctatcttcacaggagaactcatctccagaagtccaagaacactacatgggtagatgcttaagaagagaagaaagctataaccatcaaacaaaaggaatgtgccatttggtaaactttatagctgtctctcaaaaaactctatttctctttatttttctagtccctattcaagtaaatctatgtttgatttagagttggatctggctttcctcccctaaaatccaagcacgttgtttaactaaactttagagtttttgtattgtatcaagaagccaattggtgtaaaacagaataagagaatttggggactgtctttgtctttcttggctctttccttcaaggtgtacaccatctcataatcattattgttccacgattgccttttccagcatatatacatacatatacaaggaaacatttctctgttagcagttatgtttgagtcccacacagccaatgaagatctgcctgacagcaatccttggacgctccagaaggaaactgggccatacctcctcaactgcactggatccaacttactctgtttcaactgacacttggagcagagctgtactgacttcaatcaagttgaggatttcaacctagatcttcaatcaagcaaatcccatctaacatggactggatataatccattcaagactttcaccatactaacattttcttcccacaagactccacgaggctacccccatcccatttcaacaggaagtaagttggaggatgctatgcccccgtcccccattattgtctattagggtagtataagcctagttgaggataacttactattgtttagggttgtgattggaaggagatgttcaggtttggatacctctttcagatgactttagggtttagctgaaatagacatggttaggatgtgcaatagcggattattatatcttcttgtatttcacttttatgattggtaattttggatactttacactattaagttttaatcctcttttagactaacaggggaattgtagggggacactgtaaccacacctcctaagggctggccacaggtgtgcatattgggtttttaagggggacccccttctctctggcctggctgcctttctgcctctagcacactctggcttgcatttgactgatatctgaataaagatatcttaaccttaaagaccacagaatcatcagctcttataataacagccagtaagtgtttcaaatatgaaaattaaaatacatacatgcttcaagaaaatcttgctacaaaacaaagcaaatcctcaaacattaaggaaagctctatcaggttcagcatgatcacaaattcaagaagaaattccaagcacccattccgatttgaggacagcccttgttccttattcaattaaaaagacactgcagggaacagtggcaatacacagctttcctctctcttacatacatgtggttaagtcctaggagcccaacatcaaggctaccagtctggctggactcctgggactcattgtgactatgatttgtctattggaattatccatgtgatcacagaggtaacacaatctcttgcttgcttttagaattttcaaaggatgaaatgaagacagatgtcttcaaaattccaaagtaagccttaggtttctttgtcccccaccccttttaaaatagtgttaaggatcaaactcagagttacacacagactagacatatgctacaacattaacctatatgcctagactccaagttttgttttttcttaacagaaacatataatcattagtaatcaacactagcaacatggaagaggtttatggaataaaaaataataa

SEQ ID NO: 628 - DNA, 10314 bp, Cricetulus griseus
  misc_feature (3171)..(3232): n is a, c, g, or t
  misc_feature (5653)..(5667): n is a, c, g, or t
  misc_feature (5728)..(5750): n is a, c, g, or t
  misc_feature (5834)..(5850): n is a, c, g, or t
  misc_feature (6347)..(6388): n is a, c, g, or t
  misc_feature (6401)..(6420): n is a, c, g, or t
  misc_feature (6423)..(6435): n is a, c, g, or t
  misc_feature (6550)..(6590): n is a, c, g, or t
  misc_feature (7075)..(7097): n is a, c, g, or t
  misc_feature (7123)..(7140): n is a, c, g, or t
  misc_feature (7224)..(7249): n is a, c, g, or t
  misc_feature (7337)..(7362): n is a, c, g, or t
  misc_feature (7364)..(7380): n is a, c, g, or t
  misc_feature (7406)..(7424): n is a, c, g, or t
  misc_feature (7612)..(7633): n is a, c, g, or t
  misc_feature (7984)..(8009): n is a, c, g, or t
  misc_feature (8540)..(8566): n is a, c, g, or t
  misc_feature (8647)..(8679): n is a, c, g, or t
  misc_feature (9090)..(9113): n is a, c, g, or t
aggacagctaaagctacttagagaccttatctcaaaaccaaaacaaaacctcattgcctgctgggcttggtggtgcacacctgtaatcccagcacttgagagactcaggcaggacgactactaccatttggaggttgcaaagccattaccaggctagctaggattacatagttggactctctcaaaaataacattgggctgaacagatggctctgggttaagagtacactgtgctcttgaaggcctgtattcaagttcattcccagtaagtgtgttcaggaggctcaggcctgaaactcaggtccagggcattggctacctctggccacttcatgaatctgcactcacatgaaactacctacagacacatattgtaagcatattgatgggggatcggatgagatggccagggattctggcacttggaagccaaagaatactgagtgttacagctcagacggaaaggtattctggccatccggagccaaggaatactacagtaaatatagcagcttgcagctctgcttcagggaacagtgtatcagctctgctccagcataagaggctttcccaggctaagttgttacagttggctctggtccctaagagaacagactttgcccagagaaggtcttgcccaaaagtcattcaagagatttattcagagggaagaatccaggagagagcctgccctctggcagggtagcagaggacagccgggtttatattgggcttcttgggggcgggggcccggagttttccagggtggggattggtcagatttcaatccttgagtttaggatggctagctctcctgctcagagattggttagttttctgtacaggtttagggtcagatttgactctggtttcagggccaaagtgtgtttctttcactggttctttttagccttttggctctaattttagggccagggtgtatttctttcactggctctgattccagggacaaagtgcgtgtctttggtcctggtttcagggtcagggtacatttctttggtttgggttgcatggccaaagtgtgttttttggctctgctcagggtgtgtttctttggctggtcctttccccctacacatgcacataattaaaaaataaaaacaaaccttcaaaaatcacaacgaagcaaaaccaaaacctgtgaaaaccatgaaggtgatctcttgtttactaagctttgtattggggcttttgtatttctcacgtgaatcgttttaaaactgatgttacagtgcccgatacttttttttctcctttctttcttcgtagggttgtccgattcccctagctttttgctcaaagagaaaggctgggaagattaccaggggcttcagtcccctgtccctagacttcaggagacatttttctttcccggggtgggctgagggttgggggtggggggcgtgagtggaggtgggggtggggaaatcctttcttggctctctccacagcactacaacccccagcaggcaccgcgcgggccaccctgccacggaggggaaaacctgggttgccgttggttctaaagcagagctgagccagagactctggtgccaggactcgctcccgctaacctagtctcactactctggcccccgagaaggctcacagtcaatccctggcctgcggctggctggtctccccacctcgttgttccgggtttcttttcagtttcccgcgggaaccgactcttgaagagaaccaaccgcggccaagagttttgcagcctggccaaccagagccgcggtgggcggtggcggggacagagtgttgagcttctggtcaccggctgcgtcctgtgggggggtccgctgcccaagtgggcagcctcctagcgtcgtgaggcggcggcgggaccagcatcacccatcagaagacctcttccggtaaccggctcaacctcggcgacaatgtccagccagatcatgtcagccctctcacaaacatcttctagtaccctggacctgtggaaggataagaatgaccggctcgttgaacaggctagggtaagatggttgttgggaccctcgctgtatcctcaagatcccagaaagtgggtttgcaatgatttcatcctagcctaggggaaggagcagaacttggtcgctgtccaaagaacccgaagtgactggaaaatgtgtccctcccttgtctgctacgagcgagaaggactgattcgcgccccccttctaatttcagcagctgactgggggttctcgtctgtctctgaggcgacagcagttggctcaagacacactagaagggtttagggagctcctcctcactttgcaaggtaagaaagagcttccaggaggctcatttgctctccttagcagccaaagatcagcttctcttacgtggttctggggttgaggtgtttattctggggtttaggaagtcatgttttgtctggtgttctatattgtgcggatgatcaaagaaagaaggtcactccaagataaattttaggccctttgcagcaggggaggtccagcctctgatggactgagccttaaacagccctgcaaaggcatatttgttgactgttcaccaaagttgctttttgggtaaaatgcgttcctcatatcaaagcccctgatctagtctttatgctcttttgaaggaaagcctcacacccttgccactttagtcccttattgtgcactgtttgcagtgcccaataattccaggtatgccaaggttttccccaattcctaaggctttatctttaccatcttatggagacaggtccccagtactgtgtacacctgaactaacacaggtggtggacacaggcctgaggctgcttcatgcaggctgctcagtctttgtgaccaaagtcatgcaaaggctgtaaagctctttcagaaaaaacagctctgtagataacaggaaacaatcactgttttcctcaagatctaagtacttctagacaacaactacttcattctgatgtttacctagatacaatggaaaacaactattccattctaatgtttagcctagatatagtggaaaacaactatttattctaatgtttaccctagatacagtgatcagtgattctgctatcttttctccacactgtttaaagcacagaagacacagggatggaattgtctttcaataggtgaattccccctcaccttnnnnnnnnnnnnnnnnnnnnnnnnnnnnnnnnnnnnnnnnnnnnnnnnnnnnnnnnnnnnnngcaacatttgaagaatggattttcaggagattttaagaacttcttgttctttccaagttgtctgagcaaaagatgaattccatattgtagccatcttggttggcatggggttgatctctgggttgttaactatttgggctgtatttcatgggacagcctgtgagaccagcatctgttgctccaggactccctgctgctgttcctgctctccccttggagctgactgtcatctgtaattacataatcctgggggctagcctggcccagggtttcactgaagaccttacccaggatgtccaaaggggcctagagagaggtaaggcctcccatgcctctggcatttccagcctggatttgtggtgagacttgggggtaggggaggagtgagaggcacaaaccttccactgagacagcttttctagttccccgtctgtttttcagaccagatgtattattgtaatctttgggattttatttattatgtacacagtgttgtgcctgcatgtgtgcctgcatgacagaagagggcaccagatctcattacagatggtagtgagccatcatgtggttgctgggtattgaattcagaacctctggaagagcagccagtgctcttaacctctgagccatctctccagccccaatctttgggattttaaagaaaggaaaaaccagagagtgtggggagataagtgatggctgtatgtgtgtgctttacagtgctggagacccagagtcagctggagcccaagttgcagcagggactccaggggctgtggcactctgtgctctctgcctcctccctcctgccaaagctgctacctgccttacactgcctggccagccttcaagctatcttctggatgtgtactgaccacctgggggacctggccttgttgctgcaaaccctaaatggcatccaggtaaccggggaagtgaagatgaacatgcctaccctcctctcttccccatagctgcagtattttacctagggttttacacatgctggacaagcactctaccactgagatatattttctatctcctcctgcccactttttaagaaaacttatttttatgtgtgtaagtgtttgacctacacacacatatgtgggctatgctcatgcctggtacccatggaggtcagaagaggggtcagattccctggagctggggttacaaatagtgagacactacatagatgctgggtcctctgtaagaacaaatgctcttaaccactgagctctctctctagtccatcacccctgccccttcctctctatacacatttttggagacagggtctcactatatagccttagctctcagggtagaccatgctgggttcaaactcacaaagatccacctgcttctgcctcctaagtgctgggattagaggagtacacaaccataacaggtttcctacttcttttttgagacaagctttctgtgtacccaggtcccaaacttaatgcagtcctccttgcctcagcctctccagtgctgagatttacaggtgtgagctaccacacccaggtctcaactttcattgctttttaattggagatagatagaaccttaatgaggtatccagtctagccttgaacttactctgtagccaaggctactcagtagcccaggttcaagatcttgaacctatgatcctttttgccttagcctctagagcagtggttctcaacctgtgtgttgtgacccctttgagccccgaatgaccctttcacggggtcatctaagaccatcagaaacatagatatttacatcatgattcataacagtagcaaaattgcagatatgaagtagcaatgaaataatcttgtggtgggtcatagcattagaaaggttgagaagcactgttgtagagcctgagttgctatgacaacaggcctgcaccaccattctcagcatacagcctcattatatgctgggaaggctgctatgatggttggcaaaacaacaacaaaccagaaacaaagaaacaaagtcagtatttttgagttatcttgctctggttagcttctcattggggggttttcaaaatagcttaataaagccacatcaggataaggctcttgtgactgctaaagctacctcccagcctcagtcctctcatagtaacccagtttttgttccatgtccgcctgggcatatgagagacaggggacttcagtcagcacttcctacgatttttcttgctgtccacatcattgccccatagttatctttctcttataatgggggaacagtaatcaggactcttgggctcaaagactgggtgggatagactgacaggaaaagatgggatgtttataggattagaacctctgactgtcctctctctttccagactgagacctctgaggatctgctactactgataaaatcctggagccctccccctgnnnnnnnnnnnnnnncattgattctgcaggatgctgagggtttgagggatgtccttttgacaacacttgcctgccnnnnnnnnnnnnnnnnnnnnnnnatcccttctttccctaaggggtcctctgggcttatgctctctgtatctccatggagtttctctaggttcttatttcccatcatnnnnnnnnnnnnnnnnncttttctaagaataccatgattgttcccaggcctccaggagctaatcacagggagcctaccccgagcactgagcaggctgcatgaagcagcctcaggcgtgtgtccaccatctgtgttagttcaggtgtacacagcgctggggacctgtctccgtaagatggtaaagataaagccttagggatggggaaaccatggcatcatgctttgtaagggtagctgaggcctgcattttcttttcatacagggaaatccacagagagcactgctctacttgactgcagccttgaaggtgggtacaacctgtgcccttccacttctggaggcgtctagaatatatcggcaactaggagacactgcagcagagctggagagtttagagctgctggttgaggtgaggagcttccaggtggagacagcttgtggaggactgctcgtgtgcttgtgttggggtgacttgtcaagacagaagtacacagccgggtggtggtggtgcacnnnnnnnnnnnnnnnnnnnnnnnnnnnnnnnnnnnnnnnnnnagcgagttcgagnnnnnnnnnnnnnnnnnnnnctnnnnnnnnnnnnngctccaaagccacacagagaaacccagcctccccccccccgaaaaaaaacatcccccccaacaagacagaagtacaaagatttaaattctttctgttctttttaggccttgagtnnnnnnnnnnnnnnnnnnnnnnnnnnnnnnnnnnnnnnnnntattgaggtagaattgctacttccaaaacctgacccagcctctcctcttcattgtggcacacagagccaggccaagcgcctgctagcaagtcggtgtctacagacagggaggtgagtctccccactgctcaccaagccccccttcccacttctgatgcttttgctgggcatgtgattctctctaaaattttatttatttttggaatgtgtggtatacctctgtggcaatgttgggggagcttccacttggctattttggggtgtgtaaaagctagagattgatattaggtatcttcctctattattacctactgtaattttggagatagggtttctcaatgaacctggcgctcactagttttggctagactggctggccagtgatttgcctctctcttactactccctcacccctagtgctgtggttaaaaatatgtattgtattctggtggtggtggcgggcggcagtggtggcggtgcttgtnnnnnnnnnnnnnnnnnnnnnnntagagtcaggtgaattcaagttgagnnnnnnnnnnnnnnnnnnttacagagtgatttccaggacaataggtgttttgcccagaaatcctgtctcaaaaacaaacaaaaaagtgtattgctgtaccannnnnnnnnnnnnnnnnnnnnnnnnncaagacatggtttttctgtgtagctttgaagcctgtcctggaactagctctgtagatcaggctggcctcaacctcacaaagatatgtnnnnnnnnnnnnnnnnnnnnnnnnnnannnnnnnnnnnnnnnnngtgctccaccactgcctggctgtacnnnnnnnnnnnnnnnnnnnccagagtactggagctctaaatttattgtgtctgcataacgagcactttgtccaccgaaccatgttccccagaccccatttttctcttgtgtgattgcttattcctgtgactaaagtagctttctgccttaaagtgggaccttaattgagaagtcatcatctagacagtaacagcttctatttgaaannnnnnnnnnnnnnnnnnnnnncatcctgaaatgggatagatgcatggtcagccatggttggagctcccaaaccctgctctcttgctttacactacagggtccagggcatccctccattaggcaagagagtattctcactggagcgtttatggggggcagggtccttggtaaagtgaaattcacaggctgactgactctccagggcagaagatgctgcagaacattacttggacctgctagctatgttgctgggtagctcagagccaagggtaagtgtgacttaaggttctctgcagttgagtgggtggtttgggacctcccctaccttcattggtcttcctggggaaccagttctctcttaatggtactggnnnnnnnnnnnnnnnnnnnnnnnnnnggctcatgccacttcaagacactgtccccctttctccaccccagttctccctgcccacctcctctccagggccttgtataccagagttgtgtctggaggctgcagcggcgctgatacaggcaagccgagccccagatgctttgactgtatgtgaggagctgctcagccgaatctcatctctaattcccaagacgtccttgtgggaaaatgccagaaaaagaactaaagaactgccatactgcccgatctggatctctgctacccacctgcttcagggccaggcctggtcacaactaaaggctcgaaaagaagcacttagtgagtttagccagtgagtccaggaagatagagcattggggaggtgttggaagcatggctttcagatccagaccttggttggtggactttattcttagtagttaccttaatttctgaggccagctctttattcctgctatttatatcctgcttcaggtgtcttgagctcctctttcgggccctgcctgaggacaaagaacaaggtgatttaannnnnnnnnnnnnnnnnnnnnnnnnnntgagactgggtttttctgtaggttttggaggctgtcctggaacttgctcagtagaccaggttggcacagatccacctgtcnnnnnnnnnnnnnnnnnnnnnnnnnnnnnnnnngccaccaccacctgtctgagatttaattttataacttttgctttcttttatttttacataacaggttctcatatagaccaggctgacctcaagcttactattttagtcaaggataaccttggatttctgatcctcctgcctctactcccaagtgctggcgatatagatgttttgccaccatgcctgactctaatttagattgtcaatttttcttaagtcctgaaagtggtgtgtgggttccctttccattgcatctcaatttgccagactgggagacttcaggggacatgctggggcatggtagcgtatacctttcatcctagcactcccaacaggtagatctctgagtttgagatcatcctgatttacatagtgagttctgagtcagccatgactatgtggtgagacctnnnnnnnnnnnnnnnnnnnnnnnnttagggaggacaggaggaggatagggactggggtgtttggtgactgtgtctgggatgatgggaagatgcttgctgactttggtggtgatctctaggggcaggctccaactgtgagcagaagtgttggcctgatgtggcactgaaacagcttcaagtagctgctctgcttagtcgtgggctggaatggatagccagtggccaggataccaaagccttaagtgacttcctccttagtgtgcagatatgcccaggtatgtacatttgcatgataattggctatgtacaggaggggtggtacttggaccgaagtgtaaggatggtattctcagatagaaagactgaatagggttatgctgtatatacctaggaggtacccatgtgttcatatgcaaacaaacatgtatgcaagaatcctaagagttccctggtctccctgttgtcttcagacaaagatctagactatgtggggatggttttgtaggaacagggctagttgaacactttgtaccgggcaggcagtggcttctgggagagcatggttatggaataatatagttttggttttatatgtgtgtgtagacaagatgcttcccctctctaggtctaaggctatattagcttctaagtctttgtactttggggtggggttataggcaatagagatggttccttttacctgcttcagactctgaaaagattggaacggaggaatgaggccgctgctttttggagggaggcccaaaatcaaccactacaggaagaagccacttggtaaggtttagtcttcctggcttggggctggggggcaattggaatcctgtagtgggggtgatgaggaacagaaggaaggaaggatgtcaaatctatgtctgtctttcattcttaggcatcaccattcttccttttcaggtctcttccactgtacttagaaacctgtttgagctggatccatccccctaactgtgaagctctccttaaggagtttggaacatctctgctataagtctcgtgattattagcttccttgtttccaggagcttgagctggggctcctgtggaccatctccatggggagggtttttttctgccttgtcctctttggataatatggctggagctgattgttcctaagtcactcctccactgatatgaggttggtggtcttgtgaaccttggtctacttattgccagtctagttcca

SEQ ID NO: 629 - DNA, 381 bp, Cricetinae gen. sp.
atgttgtatacatctcagctccttgggcttttactcttctggatttcagcctccagaagtgacatagtgctgactcagactccagccactctgtctctaattcctggagaaagagtcacaatgacctgtaagaccagtcagaatattggcacaatcttacactggtatcaccaaaaaccaaaggaggctccaagggctctcatcaagtatgcttcgcagtccattcctgggatcccctccagattcagtggcagtggttcggaaacagatttcactctcagcatcaataacctggagcctgatgatatcggaatttattactgtcaacaaagtagaagctggcctgtcacgttcggtcctggcaccaagctggagataaaa

SEQ ID NO: 630 - DNA, 417 bp, Cricetinae gen. sp.
atggcatggagctgcattattttcttcttggtatcagtaattacaggtgtccattcccaggtcaagctgcagcagtccggttctgaactagggaaacctggggcctcagtgaaactgtcctgcaagacttcaggctacatattcacagatcactatatttcttgggtgaaacagaagcctggagaaagcctgcagtggataggaaatgtttatggtggaaatggtggtacaagctacaatcaaaaattccagggcaaggccacactgactgtagataaaatctctagcacagcctacatggaactcagcagcctgacatctgaggattctgccatctattactgtgcaagaaggccggtagcgacgggccatgctatggactactggggtcaggggatccaagttaccgtctcctca

SEQ ID NO: 631 - DNA, 1880 bp, Cricetulus griseus
  misc_feature (137)..(151): n is a, c, g, or t
ttgcttgaaaggaagggagaccttccttataacgcaactccgagaaattgaaaattataaaccagattattttaatataacccgaaaatgtcgagatttgtgcaagaccttagcaaagctatgtctcaagatggtgnnnnnnnnnnnnnnnaagtcattctccaagaactagaattatctgtgaagaaagaattagaaaaaatacttacaacagcaacctcacatgagtatgagcatactaaaaaagatcttgatggatttcggaagctatatcatagatttttgcaagaaaagggaccttctgtagactggggtaaaatccagagacctccagaagattcgattcaaccctatgaaaagataaaggccagaggcctgcctgataatatatcttctgtgttgaacaaactggtggtggtgaaactcaatggtggtttgggaaccagtatgggctgcaaaggccctaaaagtctgattggtgtaagaaatgagaatacctttttggatctaactgtgcagcaaattgaacatttgaacaaaagctacaatacagatgtccctcttgttttaatgaactcttttaacacggatgaagacacaaaaaaaatacttcagaagtacaatcattgccgtgtgaaaatctacaccttcaatcaaagcaggtatccgaggattaataaggaatctttacttcctgtagcaaaggatgtgtcttcctcaggggaaagtacagaagcttggtaccccccaggacatggagatatctatgctagtttctacaactcgggcttgctcgacacctttctagaagaaggcaaagagtatatttttgtttctaacatagataacctgggtgccacagtggatctttatattcttaatcatctaatgaacccacccaatgggaaacgctgtgaatttgtcatggaagtcacaaataaaacacgagcagatgtaaagggtggaacactcactcaatatgaaggcaaactgagactggtggagattgctcaagtgccaaaagcacatgttgatgaattcaagtctgtgtcaaaatttaaaatatttaacacaaacaacctatggatctctcttgcagcagttaaaagactgcaggagcagaatgccattgacatggaaatcattgtgaatccaaagactttggatggaggcctgaatgttattcagttagaaactgcagttggagctgcaattaaaagtttcgagaattctttaggtattaatgttccaaggagtcgttttctgcctgtgaagaccacgtcagatctcttgcttgtgatgtcaaacctctatagccttaatgcaggatctttgaccatgagtgaaaagcgggagtttcctacagtacccttggttaaattaggaagttcctttaccaaggttcaagattacctaaggaggtttgaaagtatacctgacatgctggaattggatcacctcactgtttctggagatgtgacatttggaaaaaatgtttcattaaagggaacagttatcattattgcaaatcatggtgacagaattgacatcccccctggagcagtgttagagaacaagatcgtatctggaaatcttcgaatcttggatcactaagataagcgctgccggatacactttatactaattatgggttaaacagtttcttgtaataaaatgtcctctaagattctcaaatgagcaagtacttttactgtgcagtgttgattttttagagttttctgcaatgtgcttttagcctaaagagaagatagatggagcagtactgtccttttttgatgaagagcctagagatgagttcatctaaaagtgcaatattatttaatcgtagaactgggccagctcggcaatcttttaacaga

SEQ ID NO: 632 - DNA, 1106 bp, Mesocricetus auratus
  misc_feature (1081)..(1106): n is a, c, g, or t
gccgccgcctctaccgccgcgacggtccgggccgcggtcgcccagggactttgaatatgtcggggattgccctcagccgacttgcccaggaaaggaaagcttggaggaaggaccacccttttggctttgtggctgtcccaacaaagaaccctgatggcacgatgaacctgatgaattgggagtgcgctattcctggcaagaaggggactccatgggaaggaggcttgttcaaactacggatgcttttcaaagatgactatccgtcctcaccaccaaaatgtaaatttgagccaccactgtttcacccaaatgtgtatccttctggcacagtgtgcctgtccatcctggaagaagacaaggactggaggccagccatcacgatcaaccagctctttataggaatacaggaacttcttaatgaaccaaatatccaagaaccagctcaagcagaggcctacacaatttactgccaaaacagagtggaatatgagaaaaggttccgagcacaagcgaagaagttttgcccctcctaagcagcggcacttgttgctcccatgacggaggaagggattggcttggcaagaacttgtttacaaacttttgcatatctaagtcgctgcgtacaagttactagtcacctgggagggttgagcgggcgccattttccatttctgccactggcatttacagtctcaattcgctgaattgccccagttttcatacagggtctcttccttcagtcttttgtatttttgattgttatgtaaaacttgcttttattttaatattgatgtcagtatttcaactgctgtaaaatgataaacttttgtacttggtaagcccctaggagctagtttcttcgcgctcggatgcaggcatgcttcccactgttctctggcctccagctggctgtatgacagatccacactgtccctctctccccatcctcgtcctcctcagaaacctgggctgttgcttatgagcctcagatccaaagttggccagcgtctccattctgcacctcttcctttgtgtttatatggcgttttgtctgtgttgctgtttagagtgaataaactgnnnnnnnnnnnnnnnnnnnnnnnnnn

SEQ ID NO: 633 - DNA, 2045 bp, Cricetulus griseus
  misc_feature (1185)..(1199): n is a, c, g, or t
  misc_feature (2013)..(2045): n is a, c, g, or t
gcgctgcagccatttccggtttcggggaggtgggtgcggtgcggagcgggagttggcgccgcagccgcctccagagcctgccctgctgccgggtgctgccgggacgatgcggccggaacccggaggctgctgctgccgccgcccgctgcgggcgaacggctgcgtgaagaacggggaggtgaggaacgggtacgtgaggagcagcaccgccacagccgcggctgccggccagattcatcatgttacagaaaatggaggactttataaaagaccgtttaatgaagtttttgaagaaacacccatgttggttgctgtgctcacatatgtagggtatggcgtactcaccctctttggatatcttcgagatttcttgaggcattggagaattgaaaagtgccaccatgcaacagaaagagaagaacaaaaggactttgtgtcattgtatcaggacttcgagaacttctatacacgaaacctctacatgaggataagagacaactggaaccgacccatctgtagtgtgccaggagccagggtggatatcatggagagacagtcccatgactacaactggtcattcaagtacacagggaatataattaaaggtgttataaacatgggttcctacaactatcttggatttgcaaggaacactggatcatgtcaggaagcagctgctgaagttctcaaggagtatggagctggagtgtgcagcactcgccaggagattggaaacctggacaagcacgaagaactggagaaactggtagcaaggtttttgggtgtggaagctgctatgacttatggcatgggatttgcaacaaattcaatgaacattcctgctcttgttggcaaaggttgcctgattctgagtgatgaactgaaccatgcatcactggttctaggagccagactgtcgggagcaaccattcgaatcttcaagcataacaatatgcaaagcttggagaagcttttgaaagatgccattgtttatggtcaacctcggacaagaaggccctggaagaaaatcctaatccttgtggaaggcatatatagcatggaagggtctattgttcgccttcctgaagtgattgctctcaagaagaagtacaaggcatacttgtatctggatgaggcacacagcattggggcccttggcccttcagggcgaggtgtggtagactnnnnnnnnnnnnnnnccgaggatgtagatgttatgatgggaacattcacaaagagctttggtgcttctggaggatacattggaggcaagaaggcgctgatagactacctgcgcacacattctcacagtgctgtgtatgccacgtcaatgtcaccacctgtgatggagcagatcatcacctccatgaagtgcatcatggggcaggatggcaccagccttggcaaagaatgtgtacaacagttggctgagaacaccaagtatttcaggagacgcctgaaggaaatgggattcatcatctatggcaatgaagattccccggtggtgcctttgatgctctacatgccagccaaaattggcgcctttgggcgggagatgctgaagcggaacgttggtgtggttgtggtgggatttcctgctaccccaatcattgagtccagagccagattttgcctgtcagcagctcataccaaagaaatacttgacacggctttaaaggagatagatgaagttggagacctgctgcagctgaagtactcacgccgtcggctggtgcctctgttggacaggccctttgatgagactacctatgaggagacagaagactgagcctttttggtgctccctagaggaggaaactccctcccaggacagtgtgtggcctttctgagccagttccagaaccacacttcagtgaccacctcatgtgaaagacatttccgaagctactgaaggtggacacctccactccaaatggcattttgtaaatagtaaaaaaagaaacaaactgcttcacattcttccattgtttgctaagtctcacctttatatannnnnnnnnnnnnnnnnnnnnnnnnnnnnnnnn

SEQ ID NO: 634 - DNA, 2697 bp, Cricetulus griseus
  misc_feature (918)..(935): n is a, c, g, or t
  misc_feature (2606)..(2625): n is a, c, g, or t
  misc_feature (2665)..(2697): n is a, c, g, or t
ctgaccatggcgatggcggcggagcagtgggtgctggtggagatggtgcaggcgctgtacgaggctccagcataccatcttattctggaggggattctaatactttggataatcagactggttttctctaaaacctacaaattgcaagagcgttctgatcttacagccaaggaaaaggaggaactgattgaagagtggcagccagaacctctcgtccctcctgtctcgaaaaaccatcctgctctcaactacaacatcgtttccgggcctccaacccacaacatcgtggtgaatgggaaagaatgtgtaaactttgcctcctttaattttctcgggttgctggccaacccccgggtgaaggctgcagctctagcatctctaaagaagtatggtgtgggtacctgtggacctcgaggattttatggcacatttgatgtccatctggatttggaagagcgcctggcaaaattcatgaggaccgaagaagccatcatttactcgtatgggttttccaccatagccagtgcgattcctgcgtactctaaaagaggggacattgtttttgtggacagtgcagcctgctttgctatccagaaaggcttacaggcatcacgcagtgacattaagttgttcaagcacaatgatgtagctgacctggagcgactgctgaaagaacaagagattgaagatcaaaagaatccgagaaaggctcgtgtgactcgacgcttcattgttgtggaaggattgtatatgaacactggaaccgtctgtcctcttccagaactggttaagttaaagtacaaatataaagcaagaatctttctggaggaaagcctttcgtttggagtccttggggagcacgggcgtggagtcacggagcactatgggatcagcatagatgacatcgacctgatcagnnnnnnnnnnnnnnnnnntctcgcctctgtcgggggcttctgctgcggcaggtctttcgtggttgaccatcagcgcctctctggccaagggtactgcttctcagcttccttacctcccctgctagctgctgccgccatcgaggccctcaacatcatggaggagaatccaggcatttttgcagttttaaagaaaaaatgccaacacatccataaatctctacaaggcatttctggtttaaaagtggtgggggagtccctttccccagcacttcacctccagctggaagagagcactgggtcccgggagaaggatgtgcagctgctccaggaaatggtcattcactgcatgaacgagggcatcgccttgactcaggcgcgctacttggacaaggaagagaagtgccttcctcctccaagcatcagggttgtggtcacggtggagcagacagaggaagagctggagagggctgcgtccaccatcagggaggctgcccaggctgtgctgctgtagggtgcagcccggtgtttcctgccacatcacctgcgggcagaactgctcagactcctccagctgcccacggagtggattgctgcccgccatgcagctgtgacttgagttcacagacataactaatgaatggattttttttataaaggcaggagctgactttagaagaacacagatgacagcatataactgctatttactttgtgccattgggtctgtttggatgctttactatctgtcatttatattcatttttgtttcaaactggagcttcagttttcttctcccatctgtggtaatgatccaataagcactccttcgtattttgtagaaaaggacttagcagctaagaggagctctcgtgtaccacagttaactgtggcagagggagtcaactgcatcttcccagtccctcaggtagagctcaatggtggctgctatgcggagagcactttctgagagttagaaaattcatatagcatattggaatcctagagccttatatgcactagttattattgatgttgtcatttctaatgtgagcttctcttaatagaaaaatattcatactgcttcctaagcaataatatgaatcaaacattattttatttttgtgtaattgactttatatttttatatattctctagtcggttttgtgaagagggttattattctggtccccaaatacagatcatgccctgggtatttttgaatttgtcagatgtcctttttcatggtggttttgtttgggagcatagaactgtgggctttttctaagctgagaaaagtgagaacttttttcatcctgtaaattgctgatgcctcagaaaaacaggatgctctgaaagtgaccttcgagctgtacactggctgctgttctccttggtgagcatgctgagcagtgtaaggcttgcgatacttgccatggagcatgtacatagaaggaaggccgccattccttctcgtgtgcatgggcagagaatcgggtcgctaaaggtcgattccttctcgtgtgcataggcagagaatcgggtcgctaaaggtcgttttatgatgtgcattcatgttacagtgaccggcatcttttgaagtgatctgtgacatttttaatgtttctatttcatacgtgccttgtgattgctgctgctgtgagggctatggtcctgttggggatgggtcnnnnnnnnnnnnnnnnnnnntgaaataaacctccaggagcccacattcctgaaaaagaannnnnnnnnnnnnnnnnnnnnnnnnnnnnnnnn

SEQ ID NO: 635 - DNA, 740 bp, Mesocricetus auratus
  misc_feature (6)..(6): n is a, c, g, or t
  misc_feature (9)..(9): n is a, c, g, or t
  misc_feature (12)..(12): n is a, c, g, or t
  misc_feature (15)..(15): n is a, c, g, or t
  misc_feature (21)..(21): n is a, c, g, or t
  misc_feature (71)..(87): n is a, c, g, or t
atgccnctnccnccncayccngggagccctggctatatcaacttaagctatgagaagtcacattctcaggnnnnnnnnnnnnnnnnnactgcattagtgcttacccctttgaagtggtaccagagcatgataaggcagccgtatccttcctatggttacgaacccatgggtggatggctgcaccaccaaatcatccctgtgctgtctcaacagcatccccagagtcacacccttcagcctcatcaccacctcccagtggtgccagctcaacagccagtggccccccagcaaccaatgatgccagttcctggccaccactccatgactccaacccaacaccatcagccaaacatccctccatccgcccagcagcccttccagcagcccttccagccccagcccatttcaccccagtctcatcagcccatgcagccccagtcacctctgcaccccatgcagcccctggcaccacagccacctctgcctccactgttctccatgcagcccctgtcccccattcttcctgagctgcctctggaagcttggccagcgacagacaagaccaagcgggaagaagtggattaaaaaattcagaaaatgagagaaccgaagtggatacttcggttgtttttaggaataactcaagaacacaatgatttgtgcctacaatcacttagtaaattctgtaactaaaaataagtatcattagcagataataaaatgttttaaaaatcaaaaaa

SEQ ID NO: 636 - DNA, 1740 bp, Mesocricetus auratus
  misc_feature (771)..(804): n is a, c, g, or t
caaagacagctgctactcctagagaactctctgattcctgcttccagttcaggaagggagctcaatgctgtgcctgctgccattcagacctctaactcctggaaacaaaactcctttccaggagtgactgacagaccagaaaagactcacttgctgtacagcaccatcctgtggtctggaatcacaaagtaagcgaaaaggagagaacagcagactgccttccccggagtgacattacatcaaacctgctcccactgtgatccacttcctgtcttgaccatgcctgcatggagctgcttggtgacaggagcaggagggtttctcggccagaggatcatccgtatgttggctcaggagaaagagctgcaggaggtcaggaccttgttcaggtccttcaccccgaaacacagagaggaattatccaagctgcagacaaagaccaaggtgacagtgctggagggagacattctggatgcccagtgcctgaggagagcctgccagggcatctccgttgtcatccacactgctgccgccattgacgtctttggtgccattcccagacagactgtcatagatatcaacctgaaaggtactcagcacctgttggatgcttgtataggagcccgtgtgcccgtcttcatctacagcagctcagtggctgtggctggaccgaactcctacaaagtgatcatccagaatggctctgaggaagaaaatcatgaaagcacatggtctgatccatacgcatacagcaaaaagatggctgagaannnnnnnnnnnnnnnnnnnnnnnnnnnnnnnnnngatggtggcactttgcatacttgtgccttaagactcccattcatctatggggaaaaaagcaaattcatttcagatacaatggatagagcactgaagaacaatggtctaattaacggttttagcagattctctgtgatcagctcagtgtatgtgaataatgcagcctgggcacacgtcctggctgccaggggcctacaagaccccaagaagtcaccaaacatccaaggacagttctactacatctcagatgacacccctcaccaaagctatgatgatttatgttacactctgagcaaggactggggcctccgccctgattccagttggaaacctcctgtggccctgctgtactggtttggcttcctgctggaaactgtgagcttcctgctgcgtccggtctacaactaccagcctccctttaatcgccacttggtcacactcttaaatagtgtgttcaccttctcctacaagaaagctcagcgagatctgggctatgagccccttgtcagctgggaggaagccagggagaaaacttcagagtggatcgggtcactggtggagcagcacaagggaacactgaacataaaggctcagtgatgtgaagatggaggggacatgtcctgggtgctctcagctccttcagaaagggtctaagacacaatccaagtctttgacatactggccaacttgttttcagtcaccagaagccttgccagtcactggcccagctacaaaccttctgccctaaaaacctgcccagcaacatacaggctgtgcctcagctgctataaccaaaggctcagttgtagtgctgaactgcccagagcctcctgtaccttagaattgcatcagagcttccaattcccctcttgtctgagaaaatttccattgcttcatgaatctcaaggaaaagtacaataaaatcgtttaatgcct

SEQ ID NO: 637 - DNA, 1732 bp, Cricetulus griseus
  misc_feature (114)..(133): n is a, c, g, or t
gttcctgcgcggatgccggggctgtaaggcgccaggaggtcggctggttgtggatcgcagaaggaggacgctggggcccgccgtccatccgctgctactatgattcctgtgtcnnnnnnnnnnnnnnnnnnnngtggttggactgccgtctacctggccgacttggtgttgaagtcatctgtgtattttaaacattcttatgaagactggctggaaaagaatggattgagcatctctcctttccatataagatggcaaacttcagtttttaatcgtgccttttacagttggggacggcgaaaagcaaggatgctttaccaatggttcaattttggaatggtgtttggtgtaattgccatgttcagctcattttttctccttggaaaaacactgatgcagactttggcgcagatgatggctgactctccctcttcttcctcttcttcctcttcctcctcctcctcttcctcttcctcctcgattcacaatgaacaggtgttgcaagttgtggttcctggtataaatttacctgtcaatcagctgacttacttcttcgctgcagtcctcattagtggtgttgtacatgaaattggacacggtatagcagctattagggaacaagttcgatttaatggctttggaatttttctcttcattatttatcctggcgcttttgttgatctgttcaccacacatttgcaacttatatcaccagtccagcagctaaggatattttgtgcaggtatatggcataattttgtccttgctctccttggaattttagctcttgttctcctcccagtaattctcttgccattttactacactggagttggggtacttatcacggaagtcgcagaggactcacctgccattggacccagaggcctttttgtgggagaccttgtcactcatcttcaggattgccctgttactaacgtgcaagattggaatgaatgtttagataccattgcatatgagccccaaattggttactgtataagtgcatcaacgttacaacaattaagcttcccagttagagcatacaaacgactagatggttctactgaatgctgtaacaatcacagcctcacagatgtgtgtttctcctacagaaataattttaataagcgtttgcatacgtgtctacctgcccggaaagcagttgaagctactcaagtttgtagaaccaataaagattgcaaaaccagctcaagttcaagtttctgtatagtaccatcgttggaaactcatactcgattaataaaagtgaaacatccacctcaaattgatatgctgtatgtagggcacccactacatcttcactacacagtgagcatcacaagttttattccacgcttcaactttctaagcatagatctgccagttattgtggagacatttgtcaagtatctgatttctctttccggagctctggctatcgttaatgcagtgccctgctttgccctggatggtcaatggattttaaactctttcctggatgctacccttacctcagtgattggagacaatgatgtcaaagatctgataggatttttcatcttgcttggtggcagtgtacttttggctgccaatgtgacactgggactctggatggttacagcacggtaatatttgttctcatccaacagaaaatatggagtacaactatgtgggagtatcatttgctgttgaaattcctactaggtatgaagtgtaaagtgtttcctta

SEQ ID NO: 638 - DNA, 275 bp, Mesocricetus auratus
atggaaagtgtctttgaaccggtggtcaggcagagtcaacgccttcctgcgagaaaagaatcaaacaaaatctcacatgtaaattccatggggattgtgtcagatttccttgctagtgtcccaaacttgggtgagtgtcacttcccaagcaaaagagatgttctaattgtcatttgtatcttcaagtatcaactattaaggcaatggatgccaaagaatcatcccatatcaacaccatagtttcacttatagggagatattttacatagtttttt

SEQ ID NO: 639 - DNA, 523 bp, Mesocricetus auratus
  misc_feature (27)..(27): n is a, c, g, or t
  misc_feature (348)..(348): n is a, c, g, or t
  misc_feature (395)..(395): n is a, c, g, or t
ccttggagaaactaccatgcaaaaatnacagtttgaccccttcagtcccagaatttctctttcagaatcttcctctaccagacaaaggtaatagatctgtggggttttttttgaaagggttagatgagaaaaattgtgagcaaatgcactaatctataaataagagatacactcaagtgccagagtttagtattagctgacattttactaagatactattagtgcaatcacacaatacatgatggagacaactagagaaagacagtgctagaatgaagatcttaatgacacgcaccacaattaatgacagtgggagaataaaatgttcctaagttgctgtttcactgnctttaataagtggaagtcaatggaaagaaactatgagggcaagaganacagtttcaaaagtgtgcttgtggccttgggaagtcacttccttgaagacttaaaatgaatgtcagacatatctgactcaaaaacaccttaccaaacagctccctgaaagtccccttcgtgcccaata

SEQ ID NO: 640 - DNA, 667 bp, Mesocricetus auratus
  misc_feature (489)..(489): n is a, c, g, or t
ggagagtaaacatggtgtcagtgaggcattaaatatggaggaagagcagagaaatgcttcattctaccttctgtttgcagctcagagcattatgtgtgctcacactacgggaccccctcgataatttttaaaataatgcgtgttgggggcagaggaagtgagaaacaaaattaataccaaaatcatcaacactgtaaatgaataaggcataaaacataacataatatgtcacgttgccctaattttattcctggagtgtgagttttcatctcagtacactttaagtacaattatttacctgttatatacatatatatatatattcatgttcatttttggtccattcagtgctgaaatattgtatgttacatatgatagttcatgtctttgatagtggtacaattgttagactgtgcaacacacaaacatttcttaaattttgaagcagtactaaatcatgaatttcagaaattaattcctaagcctttnttgaatgtaaagcataaaaatacaaatcctcattttatacataggtttatagcaatagactgaaaccctgagtctatatcataattattactgatcctttggaagttttacatcatgtaccccaattctgctcacctcccaggtcctccatatctgccctcacccctgaagtgtccgt

SEQ ID NO: 641 - DNA, 759 bp, Mesocricetus auratus
ggaaaatgctggccctactcttcctgttggcccttctcttgcctcctgaagccggagctgaggagattattggtggtgtggagtcaaagccacactcccgcccttacatggcccatttggagatcgtcactgagagaggctttactgccagctgcggggggttcctcataacgccagaatttgtgatgacggctgcacactgcaaaggaaaagaaattactgtcacccttggagctcatgatgtgagcaaggcagaatccacacagcagaagataaaagtcaaaaaacaaatcgctcacccaaactacagcttctactccaaactgcatgacatcatgttcttaaagcttcaaaagaaagctaaagaagacccctctgtggacacaatccccctgcctagtccgtctgactttcttaaacctgggaaaatgtgccgggcagctggctggggaaggactggagtgacagaaccgacgtcagaaaggctgagggaggtcaaactgagaatcatggacaaaggggcctgtaaaaactattaccactatcattatgacttccaggtctgcgtgggcagccccagaagggtcagatcagcatacaagggagactccgggggacctcttctgtgtgctggggtggcccatggtattgtatcttatggacgtggagatgcaaagccccctgcagtcttcacccgaatctcctcatacgtgccctggattaatatagtcataaaggcaagcagttgaagagccagcc

SEQ ID NO: 642 - DNA, 1208 bp, Mesocricetus auratus
aaacatgccagccaagtcctgagctcgccatgtccaaaccagcctggcgaccatgccatgccaccagtgccggggagcagcgcacccaacagccccatggctatgctcactcttaactccaactgtgaaaaagaggcgttctataagtttgaagagcagagcagggcagagagtgagtgcccaggtatgaacacgcactctcgagcgtcgtgcatgcagatggatgatgtaattgatgacatcatcagcctggagtcaagttataatgaagaaatcttgggcttgatggaccctgccttgcaaatggcaaacacgttacctgtctctggaaacttgatcgacttatacagcaaccagggcctgccacccccgggcctcaccatcagcaactcttgtccagccaaccttcccaacataaaaagggagctcacagcgtgtattttccccacagagtctgaagcaagagcattggctaaagagaggcaaaaaaaggacaatcacaacttgattgaacggagaagaagatttaacataaatgaccgcattaaagaactaggtactttgattcccaagtcaaatgatccggacatgcggtggaacaaaggaaccattctaaaggcctctgtggactacatccgaaagttgcaacgagaacagcagcgtgcaaaggaccttgaaaaccgacagaagaagctggaacatgctaaccggcatctgttgctcagagtacaggagcttgagatgcaggcgagagcgcatggactttcccttatcccatcctctggcctctgctcgcctgatctggtgaaccggatcatcaagcaagaaccagttcttgagaactgcagccaggaacttgtgcagcaccagacagacctgacatgtacaacgaccctggatctcacggacggtaccatcaccttcacaaacaacctcggcaccatgccagagagcaaccccgcctatagcatccccaggaaaatgggctccaacttggaagacatcttgatggacgatgccctctcgcctgttggcgtcactgatccactgctgtcatcagtgtccccaggagcttctaagacaagcagccggaggagcagtatgagcgcagaagaaacggagcatgcatgttagcgagcccaccttgctctgcctctgcacaaactgcttcctctcttcttcagtagacttcataatttacctgaaga

SEQ ID NO: 643 - DNA, 217 bp, Cricetulus griseus
ggaattcctccaggaggcccgagaacggtggaacttcgagcttcgtcaccgagcgccgctggagggtcaactatgtttgggagcgcgtttgggacctagggctgcccaagctctacctgagccctgggtcccgcggatggccgtgacgacctgggaggggacaagcggcccagcacctcctctgccttgctgcagggtcacccccgacgaccatgtg

SEQ ID NO: 644 - DNA, 222 bp, Cricetulus griseus
aacaattccacagcctcccggactgctgcacgtccccacgggccaaggatcctttgcccgtggggacgtgcagcagtccggaggcttgtggaagtgtttatttatattgtccttttttaccgaagatatgcatactccatcgatgttgtattcacagtggctgaggaattcttgtacccagtttctttggcttcaagtccgattaaaagaccgtgtgaaacg

SEQ ID NO: 645 - DNA, 260 bp, Cricetulus griseus
tggcgcgctgtcttcccgcccgcgtcagggacctgcccgactcagcggctgccatggcatcagatgaaggcaagcttttcgtgggagggctgagcttcgacaccaatgagcaggcgctggagcaggtcttctccaagtacgggcagatctctgaagtggtggtggtaaaggacagagagacccagcgatccagaggctttgggtttgttacctttgagaacatcgatgatgctaaagacgccatgatggctatgaatggg

SEQ ID NO: 646 - DNA, 192 bp, Cricetulus griseus
tcaagcatgcctcggtacccacaggctttacaagaattacctattgtttgcttctttggattgacatgcagatcggtttcaggattctcatactcaggacaaagaatgtacagagtttatgatgtgtgtcaagcatgcctcggtacccacaggctttacaagaattacctattgtttgcttctttggattga

SEQ ID NO: 647 - DNA, 179 bp, Cricetulus griseus
tgcgaagccctcaagcacagatgcaaatgtactctctgggactcactggctggcactgatattcgcagtcagatccgtagcacggatccaggagctccacgcactctccatccaccaactcaaagccatcatagcagagacattcaaagccgcccttggtgttgacacagcgctgccgg

SEQ ID NO: 648 - DNA, 3514 bp, Cricetulus griseus
  misc_feature (39)..(82): n is a, c, g, or t
  misc_feature (1792)..(1821): n is a, c, g, or t
  misc_feature (3121)..(3220): n is a, c, g, or t
  misc_feature (3279)..(3348): n is a, c, g, or t
ggtaccagaacccctgcccccgccccattctgactaatnnnnnnnnnnnnnnnnnnnnnnnnnnnnnnnnnnnnnnnnnnnncagcagagcatagaatgaaagtaggttagaagggcaggtaaaagcactttagacaagagcaggtataagggccttggactccctccccagaacacacacatgaaggtaaacgatggttaaaggatacagataggatgtcgaagctggacgatcacttgcttttgtgtgcttgaagtgacaggctgtggctttcgggttcatggggtctgttgttgagttcacagtctcaccatgttagcaagcatgtcactattaagctctatccccgccccccttttttgagacatggtcttgctaacatacccagaccggcctaggaagcactttgcagtctcagctcccctgagtgctatgatcactcgtgtgagctacagtacccaaaccagaatatgtgtgttgggtgttatgagagttacacattgctgccttgaatgctgctctgcttgagttcctgtaggaagctgagctgggaacctaagcttcctcctcccagatagcagtaaccctgcagagacctcccaccaagactagctaacccctccttcttgtgctgtacttagcaagaacccaaggttctgggtccttgtgctacagttccagaagagtatgaacaatcttagcttttctgtatatgtgtctgtgtctgtcctgtcagatcaagtcccagcctcactgtatgcaacatgaaaggctgtgaaaactgtgcattttgagaatgaacatcattattgtctccagtaagttcaaaaacaaatgaaggcagccactcataagggtctttaatgaggcaagggggcaaaagggtggtttctgtttgttcaaagaagcctgtcatacattttcagaaaatttagaaacacgtatcatgtcatttcacgttagtatgaagtccttataattcatttcatattaaatgatttcctttggttagaagcaaaattatgcataaaatgtgttcctttgtgtttggagcaaaattacaagttcacattattagttaatattctagttcttatttttcccaatctccaagaagcaaaatattcccctaaaccctaaagcatcaaattatcctatcacacagtgaccagtcatcgtaacctaaatattaaagcatcagattatcctgtctatggtgaccagtcattgtaacctaaatattattgtaatgtggattagagttaactataccttttcatcacactataatgtaaacactctccaaatctttcaaagtcttgaaaacacaatttataaatactgtgttctgtttgttttgagacctgatccggttaggaatttcaggctgtcctcaaactcatcatcttcctgcctcactcaggtcctaagtgctgagattaaaggtctatgctaccacagccatacgaatgccatgtctccatcagcttatcacttcttaacttttttcttttcttcttctacatactgctgagtaggagcatcgatgacctcagcctagtaggaatggttcccatgtgaacccttaatctgtaggaagatgctggacttcttccattaagactgatctccatttgaacttgacttgtctctctcttgtgtggagctaccatcccatatataatcttctggtttataaacagattgctttaccctcaagatcctttgctagcgcagcaatgtaagttttaatacaaacagtaaggtctctgattggagtgtcatggtttnnnnnnnnnnnnnnnnnnnnnnnnnnnnnngttaagggctcaaccaccaagtgatgcttgtggataggaggcagggcctagtggacagtctttaggtcatggagctatgctgttgagggggactgtggggtcctggtctttttcccactcctttttaggtcctagctatgaggtgagtggttttgtcctatcaagcacctctgtcctgccatggtgtaattgattataactacaacctctgaaactaagccagtataacctatttatctcaagatgtaacttacaggtaatggtaagataaagctaacaaaagacaaattgttataatccaggcaagcctggccccatcccttgggggcatggcacagagtgtgtcacccatctgtgcatggcaagcagtaccctgactctgtatgctgattcaaaggtcccttaaagcaaactcctcccacttcctctctttttctgccatttctctgaggagggaggccactgtctctctgtctctctctgtgtctctttttctatcttcctctccctctcttccctttccccaataaactttccacattaagttttgtctgaaggtatctgtttgtctctcacccgccttttaggccccacctaccatgggatctgccaaaggtctcacctcgagctgtattcataacacaaatgacagacaaagatcaaccctgaagactagtaggatgtagaaggcctggagctgacctgaagaacactgctgacttcaacattgcccatccgtcagttatgtagcattaaagttatagtggttcctcagaaagcagtctcctttgaaaacttctcgttttgtgtctaaatggaattaaataccttgttcccgaataattgttttagttctcttgaaagatcccgtatacttactattaagatgtatataaacctcaagctgaaagaatgacttcccctatggccagatcacaagactctccactgatgtgcccgttgcaacctgattagaggaagagggtcaaagttccccaagattcagctgagttcatgcaagttttagaaaaaaaacaagatgttcctccacagttagaaaggagtggggctggagggatgactcactgagaaaggttattgtcgtacaagcatgaagacctgagctcgaagcctggcacccatgtaaaaagaaaccatgcatggtagtgtgcatcttcaatcccagcattggggagacagagaaagagaaagggacatccctagagcttcctggtcagccagccttggcaagccagtgaactccaggttcagtgagagacctgtctggggaggaaaaagnnnnnnnnnnnnnnnnnnnnnnnnnnnnnnnnnnnnnnnnnnnnnnnnnnnnnnnnnnnnnnnnnnnnnnnnnnnnnnnnnnnnnnnnnnnnnnnnnnnntgaggaagatacctgatatcaacctcacacactcatgtacccatgtatgtaggtacctnnnnnnnnnnnnnnnnnnnnnnnnnnnnnnnnnnnnnnnnnnnnnnnnnnnnnnnnnnnnnnnnnnnnnngatggtgttgaattctaaggctcttatccacacatatatggagacaaatagaagaattacagtcgtccctgcctttgacgctactctgtttctccaaccctgcttcccagatatttttcaacatctactcagccttgagtggttgcactctgaccccaggacctct

SEQ ID NO: 649 - DNA, 240 bp, Cricetulus griseus
ccactcgaccaggttctgggctgacaaatatcaagacggaagagatctctgaagtgaagatggatgcagagttcggacacgattcaggatttgaagttcgtcatcaaaaactggtgttctttgcagaagatgtgggttcaaacaaaggcgccatcattggactcatggtgggcggcgttgtcatagcaactgtgattgtcatcaccttggtgatgctgaagaagaaacagtacacatcat

SEQ ID NO: 650 - DNA, 172 bp, Cricetinae gen. sp.
agttatcccaaaatgatagcagaagactttcccggaattggcaacaaagttgatgctgttttccagaaaggtggatttttctatttcttccatggaaaaaggcaatacaaatttgatcccaaaactaagaaaattttgactcttctaaaagctaatagctggttcaactgca

SEQ ID NO: 651 - DNA, 272 bp, Mesocricetus auratus
ttctggctcacgcttttcctcctggaccaaattatggaggggatgcccattttgatgatgatgaaacctggacaagcagttccaaaggttacaacttgtttattgttgctgcccatgagcttggccactccctaggtctggaccactccaaggacccaggagccttgatgtttcccatctatacctacactggcaaaggccatttcatgcttcccgatgatgacgtgcaaggaatccagtttctatatggtacaggagatgaagaccttaac

SEQ ID NO: 652 - DNA, 828 bp, Cricetulus griseus
ccaagctcatcaggccaggcacacgggagagaaaccctacaaatgtgaggagtgcgggaagagctttactcgggcctccacgctcctggaccatcagcgaggccacactggcaacaagccctaccagtgcgacgcttgttggaagagtttctgtcacagctcagagtttaacaatcacctcagagtgcacactggagaaaagccctacgtgtgtgaggagtgtgggaagggcttcagccaggcctcgcatctcctggcacatcagagaggccacactggggagaaaccctacaagtgtggcacgtgcggaaagggattcagccggagttcagatcttaatgtccattgtcgaatccacacgggagagaaaccctacaaatgtgagaggtgcgggaaggccttcagtcgagtgtcaattctccaagtgcatcagagggtccacagtgacgagaaaccctatcagtgtgacgcgtgtgggaagggcttcaccgtggagtcacaccttcaggctcaccagaggtcccacactggagaaagaccctatcggtgcgaggagtgtggcagaggcttctgcagagcttccaactttctagcccaccgtggagtccacactggagagaaaccctaccgatgtgacctgtgtggcaaacgcttccgccagaggtcctacctccacgaccaccaccgggttcacactggcgagaaaccgtacaagtgtggggagtgtggcaaggtcttcagctggagctcctacctcaaagcccaccagagggttcacactgggcagaaaccttaccgatgtgaggcgtgcggcaaagggttcagctg

SEQ ID NO: 653 - DNA, 1146 bp, Cricetulus griseus
  misc_feature (771)..(790): n is a, c, g, or t
atgatgttctcgggcttcaacgccgactacgaggcgtcatcctcccgctgcagcagcgcttccccggccggggacagcctgtcctactatcattccccagccgactccttctccagcatgggctcccctgtcaacgcacaggacttctgcgcagatctgtccggctccagtgccaactttatccccaccgtgacagccatctccaccagcccagacctacagtggctggtgcagcccaccctggtctcctccgtggccccatcgcagaccagagcgccccatccctacggagtccccaccccttcggctggggcttactccagggccgcaatggtgaagaccgtgtcaggcggcagagcgcagagcatcagcagaagaagcaaagtagagcagttatctcctgaagaggaagagaaacggagaatccgaagggaaaggaataagatggctgcagccaaatgctggaatcggaggagggaactgactgatactctccaagcggagacagaccaacttgaagacgagaagtctgcattgcagactgagattgccaatctgctcaaagagaaggagaaactggagttcattttggcagcccaccgacctgcttgcaagatcccggatgacctgggcttcccagaagagatgtctgtggcttccctggatttgactgggggtctgcctgaggccactaccccagagtccgaggaggccttctcactgcctcttctcaatgacgctgagcccaagacatcactggagccagtcaannnnnnnnnnnnnnnnnnnntgaaggctgagccctttgatgacttcttgttcccaccatcatccaggcccagtggctctgagacgacggccagatctgtgccagacatggacctatccggttccttctacgcagcagactgggagcctctgcacagtagctccctggggatggggcccatggtcacagagctggagcccctgtgtaccccggtggtcacctgtactcccagctgcacaacttacacgtcttcctttgtcttcacctaccccgaggctgactccttccccagctgtgcagctgcccaccgaaagggcagcagcagcaacgagccctcctctgactcactgagctcacccacactgctagccctgtga

SEQ ID NO: 654 - DNA, 90 bp, Cricetulus griseus
ccccggatgatctccagtggtctggggtgcaggcttcaaacctgtagctgtttagcgacagagtggttcatttccacctttcgggcgcca

SEQ ID NO: 655 - DNA, 1902 bp, Cricetulus griseus
atgccggagatcagcctccgccacgtcgtgtccggcagcagccaggactcgacccattgtgcagaaaaccttctcaaggccgacacctaccggaagtggcgggcagccaccgcaggcgagaagaccatctctgtggtcctacagttggagaaggaggagcagatacacagcatagacattgggaatgatggctcggccttcgtagaggtgctggtgacccggtctgccggagggggcggggccacagccatcgagcaggactatgaggtccttctggtcacctcctctttcatgtccccttctgagagccgaagtggctcaaaccccaaccgcgttcgtatgtttgggcctgacaagttagtccgggcggcagcggagaagcgctgggaccgtgttaaaattgtgtgcagccagccatacagcaaggactcaccctatggcctgagttttgtgaggtttcacagccctccagacaaagacgaggcggagactccatcccagaaggggaccgtgaccaagctcggccagttccgtgtgaaagaggaggatgatggtgccagctccctaaagccaggggctctcttcttcagtcgcatcaacaagacgtcttcagcctctgctcgcggcccagcaggacccagctatgcagcagctacactgcaggcttctaatgcaacctcctcggcctcttcggtctccaaggctttgggtagctcttgcaagcctcaggagtctcccaaagggaagaggaaactggacttgaatctagaagacaggaggcctgccagcaaaccttcagcagggccacccaccctcaagagacccaaactgactgttcctagtcgctccccagctgcagccgcagcctctaccccagcacagaaggcagccccagggaagccccgagaaggcacggagcccaggggagcccgagctggcccccaggagctggggaagattctgcagggtgtggtggtggtgctcagtggcttccagaaccccttccgctcagagcttcgggacaaagccctggagctgggggccaagtatcgtccagactggaccccggacagcacacacctcatctgtgcctttgccaacacccccaagtacagccaggttctgggcctcggaggccggattgtgcggaaagagtgggtgctggactgttaccgcctgcggcgccggctgccctcccgcaggtacctcatggcagggcttggctccagcagtgaggatgaggaggacgactctcccggtgagagtggtgaagacgaagctcccaagctttcccggaagcggcctcaggccaaagccaagacccaagcagcaggacccagctcgccccagagaccacccactccaaaagagaccaaatcgccctcaccagaaccccaggacaatagtgacactgaaggggaacagtcagaaggacaggacaatggggcggaagattccggagacaccgaggatgagctgaggagggtagccgagcagagggagcagaggcagcccccagctccaggggagaatggtgaggacccatatgctggctccacagacgagaacacagacaacgaggcttccacagaggctgacctgccaattccagagctcccagacttcttccagggcaaacacttcttcctgtacggggagttccctggggacgagaggaggaagcttatccgatacgttacagctttcaatggtgaacttgaggactacatgagcgagcgggtccaattcgttatcacagcccaggagtgggaccccatctttgaggaggccctgatggagaacccttccctggccttcgtccggccccggtggatctacagttgtaatgagaagcagaagttactcccccaccagctctatggagtggtgccacaggcctga

SEQ ID NO: 656 - DNA, 750 bp, Mesocricetus auratus
gtccttaatactcctatcgcgttggcctagctctgagataatgcacaccacacgttgcatcttggctttgttgctctgcctcactcaggctatgtctggctgctactgccagggcacactcattgaagaaatagaaaatctgaagaaatattttaactcaagtagcttagatgtcgtgaatggaggggacctcgtctttaatatcttgacgaactggcaaaaggctggtgacacaaaaatcattgagagccagatcgtctccttctacttcaaactctttgaagccttgaaggacaaccaggccatccagaggagcatagacaccatcaaggcagacctgtttgctaacttcttcaacagcagcatggagaaactcaatgactttgtgaagctcaccaagattccggtaaatgaccttcaggttcagcggaaagctgtcaatgaactcatcagtgtgatgcctcacctgtcacgaaaacttagcctaaggaaacggaaaagaagtcggtgctgttttgggggtggaaatcgtcccaacaagaatattcttgccagcaatatttgaatttaaaacttaaacctatttattaatatttaacattatttatatggaaatttatatttttagaataaccaaccaaagaagtatttatgatagcaacttttctgtgatgaaaatgaatttctattaatatatatatgttatttataatttctgtatcctcaactatctcacctgaccatttattg

SEQ ID NO: 657 - DNA, 80 bp, Cricetulus longicaudatus
gctgaaaggtgactaaaattgcttagagttattgtaccctggtcaagcggtacaaccccaaaatggttaaggttgcaagg

SEQ ID NO: 658 - DNA, 2148 bp, Cricetulus griseus
  misc_feature (1562)..(1589): n is a, c, g, or t
  misc_feature (2098)..(2148): n is a, c, g, or t
ggcacgagtgggaacgcggagcggacgaattcgattcaacggggttccggaccaggctatggagcaggtgaatgagctaaaggagaagggcaataaggccctgagtgctgggaacatcgatgatgccttacagtgctattctgaggcaattaaactagatccccagaaccatgtgctctatagcaatcgctctgcagcctatgccaagaaaggagactaccagaaggcctatgaggatggttgcaagactgttgacctgaagcctgactggggcaagggttattcaagaaaagcagcagcccttgagttcctaaatcggttcgaagaagccaagcgaacctatgaagagggtttaaaacatgaagccaataacctccaactcaaggaaggcttgcagaacatggaggccaggttggcagagaggaaattcatgaatcctttcaacttgcctaatctgtaccagaagttggagaacgatcccaggacaaggacactgctcagtgaccctacctaccgggaactcatagaacagctacggaacaagccttcagacctgggcacgaaaatacaagatccccggatcatgactactctcagtgtcctccttggggttgatctgggcagtatggatgaagaggaagaggcagcaacacccccacccccacctccttccaaaaaggaggccaagccagaaccaatggaagaagaccttccagagaataagaaacaggcactgaaagaaaaagagatgggaaatgaagcctacaagaagaaagacttcgacatggccttgaagcattatgacagggccaaggagctagaccccaccaatatgacttacataactaatcaagcagctgtgcactttgagaaaggtgactacaacaaatgccgggagctgtgtgagaaggcgattgaggtgggcagagagaaccgagaggactaccgacagattgccaaagcttatgccagaatcggcaattcctatttcaaagaagaaaggtacaaggatgctatccatttctacaataagtctctggcagagcacagaactccagatgtgctcaagaagtgccagcaggcagagaaaatcctgaaggagcaagagcgactggcctatatcaaccctgacttggctttggaggagaagaacaagggcaatgaatgcttccagaaaggggactacccccaagccatgaagcactatacagaagccattaaacggaacccaaaagatgccaaactgtatagtaaccgagctgcctgctacaccaagctcctggagtttcagctggcactcaaggactgtgaggagtgcatccagctggagccaacctttatcaagggttacacacggaaagcagccgccttggaagccatgaaggactatacaaaagctatggatgtgtaccagaaggcgctagaactggactccagctgtaaggaggcagcagatggttaccagcgctgtatgatggcacagtacaacagacatgatagccctgaggatgtgaagcgacgggccatggctgaccctgaggtgcagcagattatgagtgacnnnnnnnnnnnnnnnnnnnnnnnnnnnntgcaaaaggatccccaggctctgagcgaacacttaaagaaccccgtaatagcacagaagatccagaagctgatggatgtgggtctgattgcaattcggtgataacttgcttttcccctcttcccttcgccaatgtggaaaggcgagctgggacggtggcgagcagcactgggcagagggggggggaagaaaggcttatctttatatttatacatgcctgcaaggaagacagactcatccagcgccacctcggaccctctcagcacacgcatggtctcttcactgctgcccttgagtgtccttccctgtcctacccaaacacccccacccccctgccccacccccgtcactgtctcggctgctcccctatagttggttattttttatttggggcagtgggttcatacggggaggggagggaattcttccctacctggggtcccagctgtcttcacttgttgttaccccacgtccttcaataaaacaagccagtcaggcgtggttatatgnnnnnnnnnnnnnnnnnnnnnnnnnnnnnnnnnnnnnnnnnnnnnnnnnnn

SEQ ID NO: 659 - DNA, 1330 bp, Cricetulus griseus
  misc_feature (178)..(204): n is a, c, g, or t
  misc_feature (1058)..(1075): n is a, c, g, or t
atcgagccatttaacatggcggaggatgtttcctcaacggccccgagcccgcggggctgtgcggatggtagggatgccgaccctactgaggagcagatggcacaaacacagagaaacgaccaggatcagttcgaatgccaggaactgctcgagtgccaggtgcaggtgggggcccccnnnnnnnnnnnnnnnnnnnnnnnnnnntcgggcctggtggccgaggccgaggccgtggctgccggctggatgctccatttcctctgcctctctctttgccgagctttccgcgacggccgctccgaggacttccgcaggacccgcaacagcgcagaggctattattcatggactatccagtctaacagcttgccagttgagaacgatatacatatgtcagtttttgacaagaattgcagcaggaaaaacccttgatgcacagtttgaaaatgatgaacgaattacacccttggaatcagccctgatgatttggggttcaattgaaaaggaacatgacaaacttcatgaagaaatacagaatttaattaaaattccggctatagctgtttgtatggaaaatggcaactttaaagaagcagaagaagtctttgaaagaatatttggtgatccaaattctcatatgcctttcaaaagcaaattgcttatgataatctctcagaaagatacatttcattccttttttcaacacttcagctactaccacatgatggagaaaattaagagttatgtgaattatgtgctaagtgaaaaatcatcaacctttctaatgaaggcagcggcaaaagtagtagaaagcaaaaggacaagaacaataacttctcaagataaacctagtggtaatgatgttgaaatggaaactgaagctaatttggatacaagaaaaagtgttagtgacaaacagtctgcggtaactgaatcctcagagggtacagtatccttattgaggtctcacaagaatcttttcttatctaagttgcaacatggaacccagcaacaagaccttaataagaaagaaagaagagtaggaactcctcaaagtannnnnnnnnnnnnnnnnngcagaagagccactgaaagcagaatacctgtttcaaagagtcagccggtaactcctgaaaaacatcgagctagaaaaagacaggcatggctttgggaagaagacaagaatttgagatctggcgtgaggaaatatggagagggaaactggtctaaaatactgttgcattataaattcaacaaccggacaagtgtcatgttaaaagacagatggaggaccatgaagaaactaaaactgatttcctcagacagcgaag

SEQ ID NO: 660 - DNA, 392 bp, Mesocricetus auratus
ccagtcagccagacccacatgctccgagagctgaggactgccttcagccaggtgaagactttctttcaaaagaaggaccagctggacaacatactactcactgactccttactgcaggactttaagggttacttgggttgccaaaccttatcagaaatgatccagttttacctggtagaagtgatgccccaggcagagaaccacgggccagaaatcaaggagcatttgaactccctaggagagaagctgaagaccctcaggaggcaactgcagcgctgtcatcgatttctcccctgtgaaaataaaagcaaggctgtggaacaggtgaaggataactttaataagctccaagagaaaggcgtcttcaaggccatgaatgaatttgacatctt

SEQ ID NO: 661 - DNA, 399 bp, Mesocricetus auratus
gcaagactctgagccactcacgactgctgcttcacaagaaggaaaatggaatttggtccactgatattttaaaggaccagaaagatcctaaaaataagaccttcctgaaatgcgaggcagcaaattactctggacggttcacctgctggtggctgactgcaatcagcactgacttgaagttcaacgtcaagagcagcagtagctcctctgattcccgggcagtgacatgtggagcagcgtctctgtctgcagagaaggtcacagtggaccgaaaggactatcagaagtactcggtggcctgccaggaggacatcacctgcccgactgccgaggagaccttgcccatcgggctggtgatggaggcccagcacaagtataaatacgagaactacagcaccg

SEQ ID NO: 662 - DNA, 416 bp, Mesocricetus auratus
atcctgtcttgcactgacgctcgcactccttgtcagcagtgcacccacttcaagctctaaaaaggaaacccagcagcacctcgagcagttactgctggacttacaggagcttctgaaagggatcaataattacaagaatccgaaactccccatgatgctcacgtttaaattttacatgcccaagaaggccacagaattgaaacatctccagtgcctggaagaagaacttggagccctgcagagcgtgctggatttggctcaaagcaaaagctttcacttggaagatgctgagaatttcatcagcaatatcagagtgacagttgtgaaactaaagggctctgaaagcacattcagatgtgaattcgatgatgagacagtaactgtggtggaatttctgaacagatggatcaccttct

SEQ ID NO: 663 - DNA, 1780 bp, Cricetulus griseus
  misc_feature (1758)..(1780): n is a, c, g, or t
gtggccgccagcggagggagggcgcgggccgtgtcgcggccgggtccgcgctacgccaagccgagaggcctgcgctccacgactcgcggggcgggggcggggcggtccgggattgcgggcctgcgagccccaggcctgcgaaaggactcggcccccaactctggaaggctccggtgctcccagcacagttctgagacagccgggaatccagtgtccccttcctgatacaggggaatggggggtgtcgtggcagaggcccctgacccctgcccactacctcccagccccaggatgctcccttttgcctcctgccttcccgggtctttactgctctgggcgctcctgctgttgctcttgggagcagcgtctccacaggattcggaagagccggacagctacacggaatgtacagatggctatgagtgggacgcagacagccagcactgccgggatgtcaacgagtgcctgaccatccccgaggcctgcaagggcgaaatgaaatgcatcaaccactatgggggctatttgtgtctgcctcgatctgcggctgtcattaatgatctacatggcgaaggccctccaccaccagtgccccctgctcaacaccccaatccttgcccaccaggctatgaacctgatgaacaggagagctgtgtggatgtggacgagtgcgcccaggctttgcatgactgtcgccctagccaagactgtcataacctgcctggttcctaccaatgcacctgccctgatggttaccgaaaagttgggcccgaatgcgtggacatagacgagtgtcgctaccgatattgccagcatcgatgtgtgaacctgccaggctcttttcgctgccagtgtgagccaggattccagctgggtcctaacaaccgttcttgtgtggatgtgaatgagtgtgacatgggagccccatgtgagcaacgctgcttcaactcctatgggaccttcttgtgtcgttgtaaccaaggctatgaactgcaccgggatggcttctcctgcagtgatatcgatgagtgcagctactccagttacctctgccagtatcgctgtgtcaatgagccgggccgcttctcctgtcactgcccacaaggctaccagctgctggccacaaggctctgccaagacattgacgagtgtgaaacaggtgcacaccagtgttctgaggcccaaacctgtgtgaacttccatgggggctaccgctgtgtggacaccaaccgttgcgtggaaccctatgtccaagtgtcggacaaccgctgcttctgccctgtctcgaaccccctgtgtcgagagcaaccttcatccattgtgcaccgctacatgagcatcacctcagagcgaagtgtgcctgcagacgtgtttcagatccaggcaacctccgtctaccctggcgcctacaatgcctttcagatccgtgctggaaacacgcagggggacttctacattaggcaaatcaacaatgtcagtgccatgctggtccttgccaggccagtgacaggaccccgggagtatgtgctggacctggagatggtcaccatgaactctcttatgagctatcgggccagctctgtactgagactcaccgtctttgtgggagcctacaccttctgaaggagaccctcagggaagggctgggtggggcccccctctttctccctctcatagcttaaggagcctggggttgaggagtgactgttctgcttaaagagacaatgatgtgaaggacaataaagggagaaaggaggnnnnnnnnnnnnnnnnnnnnnnn

SEQ ID NO: 664 - DNA, 926 bp, Mesocricetus auratus
  misc_feature (904)..(926): n is a, c, g, or t
actcagagactattggagaactccagggaggtcacccacaccgttcaggatgaaaactgtagtgctggccgtggctgtgctcttcctgaccggaagccaggctcggcacttctggcagcgagatgacccccagaccccatgggacagagtgaaggatttcgccactgtgtatgtggatgcggtgaaagacagcggcagagaatatgtgtctcagtttgaaacctccgccctgggcaagcagctgaacctgaatctcctggagaactgggacaccctgggctcaaccgttggtcgcctgcaggaacagctgggcccagtgactcaggagttctgggataacctggaaaaggagacagaatggctgaggcgggagatgaacaaggacctggaggaggtgaaggcgaaggtgcagccctatctggaccaattccagaccaagtggcaggaggaagtggctctttaccgccagaagatggagcctctgggcgccgagctgcgcgatggtgcgcgccagaagctgcaggagctgcaggagaagctaacccctctgggcgaggatcttcgtgaccgcatgcgccaccacgttgacgctctgcgcacaaagatgacgccctacagcgaccaaatgcgcgaccgcctggctgagcgcctggcccaactcaaggacagccccaccctggctgagtaccacaccaaggccgctgaccatctgaaggcgttcggcgagaaggccaaacccgctctggaggacctgcgccagggcctgatgcccgtgtttgagagctttaagaccagaataatgagtatggtcgaggaagccagcaagaagctgaatgcccagtgaggctcccatcttcataccccacccctacattggctttcttagaataaacctttccaaagnnnnnnnnnnnnnnnnnnnnnnn

SEQ ID NO: 665 - DNA, 171 bp, Mesocricetus auratus
cccatgaatgcatttatggtgtggtcccgtggtgagaggcacaagttggcccagcagaatcccagcatgcaaaatacagagatcagcaagcagctgggatgcaggtggaaaagccttacagaagccgaaaaaaggccctttttccaggaggcacagagattgaagatccta

SEQ ID NO: 666 - DNA, 2747 bp, Cricetulus griseus
  misc_feature (91)..(91): n is a, c, g, or t
  misc_feature (104)..(105): n is a, c, g, or t
  misc_feature (211)..(211): n is a, c, g, or t
  misc_feature (311)..(311): n is a, c, g, or t
  misc_feature (479)..(610): n is a, c, g, or t
  misc_feature (1337)..(1353): n is a, c, g, or t
  misc_feature (1775)..(1803): n is a, c, g, or t
  misc_feature (1968)..(1984): n is a, c, g, or t
  misc_feature (2005)..(2043): n is a, c, g, or t
  misc_feature (2334)..(2334): n is a, c, g, or t
  misc_feature (2344)..(2344): n is a, c, g, or t
  misc_feature (2454)..(2454): n is a, c, g, or t
taaataatacataaataaatgtaaaaaaataaaaccctaaaagccatatataatgccaccagtattatatctgaagtggttatcagggccnaagttctcctgtnntgtaacttctttttccccctagtttgttagaatcagagttcaaagctccgtattatgtttggttcatgagttcctttacatttctttccaggtgtggagtggtttngcaaagtatttgttaaaacaataagccttgctccacttttgggctgcataacatgtggccctctctgatgtggtgaaggatgccagcccctcccaccagnatgtagcctgggaatagtgtcagcctatgctcagctccttggtgctctctgttgtggtctgttatgtatccatgtcctcctaacagctgttaatagtagagtccagtgtgttcgtaataataaagtaagtctagttattctcacttttcttcctttgtggtttaatgnnnnnnnnnnnnnnnnnnnnnnnnnnnnnnnnnnnnnnnnnnnnnnnnnnnnnnnnnnnnnnnnnnnnnnnnnnnnnnnnnnnnnnnnnnnnnnnnnnnnnnnnnnnnnnnnnnnnnnnnnnnnnnnnnnnncttgtctcatcttctgtatatgtagggagacaccgtaaccacgcctcctaaaggctggcaacaggtgtgcctgaccacgcctgtcagggcatggtcaagtgagatcaggatgatgcgtgttacaactgttgcagatgggagcctctgcttgtgagaaggagcgagaagctttcatcagttgaggaggagcctggggtgaaccaagatagaaaagttgaggttataaaaccattagtggaggaaactgagagtgcaatcagagctacattcatgcttgggacctctgggaccagccctccagtggcactgaggacacaggagcctgaaatagaactctccagcgagcctcggcctaatgaagaatgtcttcagatactggagagtgccgagaaaggtgcaaagttccttagcgatgcagaaatcatccggttggtcaatgccaagcacatcccagcctacaaattgggaactctaatggaaactcatgaacatggtggatctattcaccctttaagaacctaacacgagtcatcctgacctcaccttgaccacgcccagcccttaggaggtgtggctacgatgtctccctacatgtataaactctaaaagtgatttggcctcaggaaagataccttacgttatctggggaagacttcatcaggtgtgtgggttggcctaaggagaacagatctttatatgctaacagctttctgtccacctgtgagtnnnnnnnnnnnnnnnnntctactctgtgatctagcagcatttgctgtgtggccctgtgtatgcatttgaggcatttcttactctctagctattgtcttttgttttgaaaccttgtcggtcatcagtgggtcttctcgttcatttccaggtgtcctgttgttgcatttgggaaatgaagacttcaaaagaggagggaggccctggtagagtgtttccattttccatatataactcctaacatttatatatacagtacatacttccttttttgtggaagctgatagtccagagaaggctaagctgtttaatgttttcaaaaaaggtcaaaacaagaactaagtttggcagttcacacttgtaatcccagcagtgaggaaactgacacaggaggagtgccacaaatcaaagctagcctgggctgtaccaagactctgtctgnnnnnnnnnnnnnnnnnnnnnnnnnnnnnaactaaccaaacaaagcgaaacatcaaagcataatttcatggttaaaatctgaaaatctggggcctggcaagatggctcaaagctaagagcacacaagtgctcttgcagagaactcgagtttagttcagagcatccatgttggcagctcacaaccacctgtaatnnnnnnnnnnnnnnnnnacaattgatgccctcttccannnnnnnnnnnnnnnnnnnnnnnnnnnnnnnnnnnnnnnaacagacacgcatccatataaataaacacgaaaagttgaagtcatctttcctatcttcttcaatcctttgccaaaatttactctggatgcctgaattttgaaaagtcctccattgtgtttgttattcgtggatcctgaatgatcatgatctgcagcttagtccttgaggttctaatggctttcccaccaactccacctttcacacaacacagcccaagtttctcattgtgtccagcccctgcccccgcttcttttggacaagagttggattaaagcaaaccaccttggcancttttgtaanccccaatagcagtttcggacagcactgaccagtaggcatggtgcccggagcccaagctgaggacctgcctgccttgctctcatttcgcttacgatagagcattttccctncagcaactaataacgtttatttggtttggaaacttaggtttcctaatccacaagagacagactgtccagaaatgctgggtggtcctcagcgtgtccaattccaacagcttcagaccagcacgtcagcccagcaactgcctcagctggagcctttccatggatgctttcctgtggagagccatccgccacatgtccacaaaggaggctgattcagtgagccatgcagactgatgctccacaccctgcaccctcccagcttgaacagttccccacatggctgtgtggccttttag

SEQ ID NO: 667 - DNA, 138 bp, Mesocricetus auratus
tggaaagtgttaccacaggggttcaaaaatagccccaccctcttcgatgaggccctccaccacgacttggcagattttcgcatcagacatccgtcattgatcctgctccaatacatggatgacctgctgctggccgcc

SEQ ID NO: 668 - DNA, 138 bp, Mesocricetus auratus
  misc_feature (7)..(7): n is a, c, g, or t
  misc_feature (85)..(85): n is a, c, g, or t
tggaaantgttgccacaagggttcaaaaatagccccaccctctttgatgaggccttacatcaggacttggccggatttagagtcnaccaccctgaggtcctcctcttacaatccatggatgacctcctgctggcctcc

SEQ ID NO: 669 - DNA, 138 bp, Mesocricetus auratus
tggaaagtgttgccacagggaatgttaaatggtcctactttatgccaggattttgtacaaaaaccattagaaataacccacaaacaatttctgcaatctataatttatcattacgtggatgacctgctgctggcctcc

SEQ ID NO: 670 - DNA, 138 bp, Mesocricetus auratus
  misc_feature (4)..(28): n is a, c, g, or t
tggnnnnnnnnnnnnnnnnnnnnnnnnnatagcccaactttgtgtcaatattttgtgcataaacctctggaaataattcttaaaaaatttccacatttgttaatatatcattacatggatgacatcctgctggcctcc

SEQ ID NO: 671 - DNA, 204 bp, Mesocricetus auratus
ggacccaatggaatccttgcccatgcctttcagccaggtcaggggattggaggagacacccattttgattcagaagaaacatggactgaagattccagaaattacaacctgtttctcgtggctgctcatgaatttggccattccttaggactctcccactcctctgatcccggtgccttgatgtatcccaactatgctttcagg

SEQ ID NO: 672 - DNA, 3960 bp, Cricetulus griseus
  misc_feature (884)..(901): n is a, c, g, or t
  misc_feature (1171)..(1200): n is a, c, g, or t
  misc_feature (2581)..(2598): n is a, c, g, or t
  misc_feature (2778)..(2795): n is a, c, g, or t
  misc_feature (3281)..(3300): n is a, c, g, or t
aagcttgctatatagaccaggctggccccaaattcagagatctgcctgcttctgcctcctggagtactgggattacaggtttgatagcccatctggctttacttttactttttgtctaacatttccacagataaatataaatataataaatataaataaacagcaagtaatgtcattataagaaaaaactgtcaccccaaaccaaaacaaaatgtgataaatgcacattaaaatggcctattagaagtaaaaaaaaaaaaaatcaacaaaaagatgttttaacgatttagaaaaaaaatcccttactggcctaggttttaagacatcgtctttgcaagcccctaattttgagacaaggtcacacatagcacagggtgtccttaaactcccaagtgccatgattacatactgtaccacaactcagctttctttccaacatctctatacaggctacttaggttttagagatgtgcatgttcacatacagtcgtcagaatcaattcaacttatgcatgcctcctactctttagtgactttgtctgtgatcccaaggaaccctgcacaaggtcatctttttggatttaatacatagtaactacagcagtacaactgtcagcagcttcccctttaaagtaactcagtcccagtgcctaaaagagggagtcccaaagacacatatatttctactatgtaacctgaaacatcacacacaggtccatgcagcttatatgtgtgtgctggtgctttgggagatgataggcaagatacaatttgtaaataatcgctattgagaattgtgcagtgtctggtgctttcgcatagttcccaaaacccactgatacccatttccattctaaatgtaatgaaaaagacacctgaaacannnnnnnnnnnnnnnnnngtaacttctgatacccgttctgctgtcctttctcattctaaacaattatagtgtaatctctttgtgcgactatagagcagtctcagaacactttattttcgaatgttcagcacataaaaggtgctcaataaaacctgaatacagccgggcatagtggctcacacctttaatgctggcacttaggaagcataggcagacggatctctatgagtccgagaccagcctgtcctacaaggcaagttccgggatagtcagagttacaaggtgagnnnnnnnnnnnnnnnnnnnnnnnnnnnnnngtgcccgaacgaacccactacgtccatgtgcattgggatacttatgtccatacgtctgtgacacttttagccgtcagccaaacgcgaatcaagtttttgtataagggaatctgggcgcaagcctgtgacagcaacactcgggaagctgaagcaggcaacaggctagaatatcgggaaacggctccccgttgcaaaaaaccctgtaaacgggacaaggcgccgcaaccccggccgcagccactcacctgtgcccggggccgtgacgtaagtgcgccgcgggttcgccagcaccttgccgtcgcgcaccacgcccacgccgatcttgttggcgctgccttcgaaccccagcaccgcgggcatggtgcaccccggctcgggatctgcggatggcaggactagtcgtaaccggcagtaccacgaacagcccagaaccaagcgatgggaccttcaggcgccctaagtgacgtcatgaggtgccaggtggaccaatcacaacactcctgatccacgtggggggaggggcgacctcggatcacgtgaccacaccaagctcccacgtggggacaggctccattctttgtgctgtgagcggcttcctggcttcgttggtaggtccggtagcttgtgctagctggttcggcggccctgctcgcagaagggcctaacgggggcgaggagctgcggggctgggatgcacgtggcgaggaaggctgggtgaaccgattgcacccccctcccccggtgtgcgagcgcctgatttcgccgtttcttatctgtaggcaacgctgtaaacactgcttcggtgctccaggcgcctaagggctttcgtcacagggatgccaaagcgtgggaagagagcggcggcagaagacgggaaagaacccaagtctggtaagcaggtgaaagtagcgcgtgggttaccccacctccaaatttaggactctactagaccaccatgagctacgctaaatatggaccacgttacattgcgggagtccgagaagttagggtaactagagcgcctcgtggggttggaaaccgctagctcttactttactcattttatagagccagagaccaagaagagtaaaggagcagcaaagaaaaacgagaaagaggctgcaggagagggccctttcctgtatgaggacgctccagataataaaacgtcacccggtggcaaacttgccacactcaagatatgctcctggaacgtggatgggcttcgagcctggattaagaagaaaggtttagatgtgagtacaattcaggagggaagtagattttccttgacagcctaaagaattatcttggagttggggctgtagtggcgcacgccttgaatcccagcagaggcaggcggatctctgtgagttcctgnnnnnnnnnnnnnnnnnntgcaagttccaggacagccaggactatacagaaaccctgtctcgataaaacaaaaacgtgtttactgtgagcccagaggatgttattttttttcttgcctgtagttggggctgggagcaagaaatgtcccttcgatcccaatcaccttgtctcatattctttttaactattcgctggaannnnnnnnnnnnnnnnnncccaataactactaaagatctcagtgggggaggggctggagcacttcgctctgcttcggaattaggtttctagtacccaagtcaaatggctcagtccattcacataccctaaaagtccctttgtcattcacatggtttacatataccctgctgcttgaattccttatgtactgggatccagtgtgtatactatgtagcacataagatttttcttaacttttcacgtttcattagtgggtaaaggaagaagcaccagatatcttgtgcctccaagaaaccaaatgctcagagaacaaactccctgcagaacttcaagacctgcctggactcacccatcagtactggtctgctccatcagacaaagaaggatatagtggcgtgggcttactttcccgccagtgccctctcaaagtctcttatggcattggtgagactattgatttttatgtctgagtgttcttcagcaagttaactctgctgcttagnnnnnnnnnnnnnnnnnnnntttatgctggatttcatttctgtaggtgaggaagagcatgatcaagaaggccgggtgattgtggcagaatttgactcctttgtcctggtaacagcctacgttcccaatgcaggcaggggtctggtaaggctggagtaccgacagcgttgggataaagccttttgcaagtttctgaaggacttagcttcccgaaagcctcttgtgctatgtggggatctcaatgtggctcatgaagaaattgaccttcgtaaccccaaaggaaacaagaagaatgctggctttactccccaggagcgccagggctttggggagttgctacaggctgtaccacttactgacagcttccggcacctctaccccaacaccccctatgcctataccttttggacttacatgatgaatgctcgggctaagaatgtcggatggcgccttgattactttttgttgtcacactcccttttgtcttccttgtgtgacagcaagatccgctccaaagctcttggcagtgatcactgtcccatcaccctttacctagcactgtgacacccctgctgaagtaacttacacctgggaaatagcctcctctcaagtccagtgtcctttaggccccggggttttgattttttgtgtaccccctgttttaaatgttaaaccaagctt

SEQ ID NO: 673 - DNA, 1137 bp, Cricetulus griseus
  misc_feature (1114)..(1137): n is a, c, g, or t
gggcggcgacggtttcctggtggccgcgcgctgctctgtgagcggcgggtggcagacggacctgggccctcaccccagacgcaccgcggatctggcatggctcacctgatgacaatgcagttgctgctcctgctgatatgggtatctgagtgtgcccaatcaagagctactcgggccagaactgaactgctcaatgtttgcatggatgcaaagcaccacaaagaaaagccaggccctgaggacaatttacacaaccagtgcagtccctggaagaagaattcctgctgttccaccaacacaagccaggaagcccacgaggacatttcctacctgtaccgattcaactgggaccactgtggaaagatgacattggaatgcaagcgacactttatccaggatacctgtctctatgagtgttctcctaacttgggaccctggattcagcaggtggaccagagctggcgaaaagagcgaatccttgatgttcctctgtgcaaagaggactgtcagcgatggtgggaggactgccgcacctctttcacctgcaagagcaactggcacaaggggtggaactggacctcggggtataaccagtgccctgtgggagcctcctgtcgccacttcgacttctatttccctacacctgctgctctgtgtgaggaaatctggagtcactcctacaaactcagtaactacagccgagggagtggccgctgtatccagatgtggttcgacccagcccaaggcaaccccaacgaggaagtggcaaggttctatgctgaggccatgagtggagctgggcttcacggggcctggccactaatgtgcagcctgtctttagtgctgctctgggtgttcagccgagttcctttaaccttctgatccccaggaactccctgccgggcttagactcccagctcccaacctcctttgtggtggggcctctgacaggcattcaatatctctcttatgaattatttgggtgtgaatgggaatataattattttgcatcctacttaccactgattgaagttgtttaaacttggttagttccctgctctaacacttactgtgggcaagttaaataaacttaattttcctgtgctgttccacnnnnnnnnnnnnnnnnnnnnnnnn

SEQ ID NO: 674 - DNA, 6023 bp, Mesocricetus auratus
  misc_feature (221)..(246): n is a, c, g, or t
  misc_feature (3856)..(3877): n is a, c, g, or t
  misc_feature (5539)..(5559): n is a, c, g, or t
cgcagtttttgcttggattcagcccccacctcctcagcaccgacttgcgttcccccccagagctcacctaccttggtaatccggagctgcccctgctcaaacaaccgccccccccccgccgccccctggccccagctcaaaaccaagcaaacgacctcttcaggcatcccttggcagggaggttttgcacaatgtttacccgtcagtgtctcgggggctgnnnnnnnnnnnnnnnnnnnnnnnnnnccattcattcatccatctgtgttctgaaggaagaacgcacccccacccccaccccccagaacacagatggatgaatgaatggcctcagtatcataggtaaagtaggttactgtacacttatttagaattcttcatttgctgcttccagccccagtcctggggttaattgaggccaggggctgagaaaattataacatttttttttgcactgatttgcggtgggcaagcttttcaagcctttagggctgcgtaccagtttctcctaatatcagattcagaaatgtcccaaattcctggacaatggaaaggaggcgacccccgccccccccaccccagtttcatggccctgacctgggaacagggtccacattgaatcaggtgcgaatgttcgctcgccttctctacctttcccgcctcccctcccccggccgcggccccagctcccccctcccccgcgctgcaccctcagagttggctgcagccggcaagcagttcccgtcaatccctttcccacaggatgtccatattaggacatctgcgtcagcaggtttccacggccggtccttgtagacctgggggtgacgatccccaaaatcctacatgcggagagtccaggagaccccctaagacccctattgtgaacacaaatgggtgaaaattacatgtcaagacggaggcgggggacccggggcgcggagttgacgccagggcggccgcagaaggcctgggggcgcgcggctcccctccgtcgccacagttccgcccagtgacgtgtaatgttcattcacaagcgcttctataaaggcaccggctgaggcgcctactactccaaccgcgactgcagctagcgactgagaagactggatagagccggcggcgggaacgagcagtgaccgcgctcccacccagctctgctccgcagctcgcaccagtgtctacccctggacccctcgccggactttccctagatctcgaccatgatgttttccggattcaacgccgactacgaggcgtcctcctcccgctgcagcagcgcctctccggccggggacagcctttcctactaccactccccagccgactccttctccagcatgggctcccctgtcaacgcacaggtgagtttgccttcgcgcagccgctgggtccgcgctgagggtctagaagaggggacaccggggtgggacactcgggatgtcagttggagggggctcttcccttttagcttgggaaggagactgttggtcagagcagccccagcctgggaatccaggactcatctgagcgcttgcacgcttgtcatagtaagacttagtgcccccttccccgcgcggcaggtttattttgagtggcctacgctcttctctcggtgacttgtctctgagatcagccggggccaaggagtctcaagcaaagactcgctagctagagcctgggaggcggcaaacagcggcaattcccccctcctggggcagcctggggccgggaggagggaggagggtgcctgcgggcgggtgtgtaaggcagtttcattgataaaaagcgagttcattctggagactccggagcggcgcctgtcagcgcagacgtcagggatatttataacaaaccccctttcaagcgagtgatgctgaagggataacgggaacgcagcagtaggatggaggagaaaagctgcgctgcagaattcatgggaggaaattgggagagctttcatctcggatgagatgcatacaggaagacacaaggagtactgtgacccgaatgtttctctctctccctgctgcatgcgacactaaggccacttgctccaccgctgtctggaacctgctcgctcacctccagtttcttctttttgttttgcttcaggacttctgcacagatctgtccgtctccagtgccaactttatccccaccgtgacagccatctccaccagcccagacctgcagtggctggtgcagcccaccctcgtctcctccgtggccccatcgcagaccagagcgccccatccctacggagtccccaccccttcgactggggcttactccagggcgggaatggtgaagaccgtgtcaggcggcagagcgcagagcatcggcagaagaggcaaagtagagcaggtgggcagcgattctggaccaggggttgagaggcacgggggcggggggggggaacaacacacatcaaaaaagggaaaaccccaatgcaactgactgcacttccccctctggagccatggctccaacccctttccctccctttttaaattctaacccttggccccaaaaatttctctaaacagtttcccaaacagcttcctacctctttctttattctgggagcttcatgtccccttgctaaagatcttactttacatgcaaatcacactcagcctgccaactgctggttagaaaaactgcttcacctagaggtgcgggtactgcaggcgccagtttcactggggtggctgaatgcaggggacgccagacaaccttactgaatgaatgttggtcctttttctattattctagttatctcctgaagaggaggagaaacggagaatccgaagggaaaggaataagatggctgcagccaaatgccggaatcggaggagggaactgactgatactctccaagcggtaggtagagcctgctggctacttctgaaagttcaaagctggagtttgggactaagggatgggggtccttgagtgagactgtgtcttacgcggtccttcgtctctccttgtgcaggagacagaccaacttgaagacgagaagtctgcgttgcagactgagattgccaatttgctcaaagagaaggagaaactggagttcattttggcagcccaccgacctgcctgcaagatcccagatgacctgggcttcccggaagagatgtttgtggcttccctggatttgactgggggtctgcctgaggctactaccccagagtccgaggaagccttctcactgccccttctcaatgaccctgagcccaagccatctttggagccagtcaagagcatcagcaatgtggagctgaaggctgagccctttgatgacttcttgttcccagcatcatccaggcccagtggctctgagacgacggcccgatctgtgccagacatggacctatccggttccttctatgcagcagactgggagcccttgcacagcagctccctggggatggggcccatggtcacagagctggagcccctgtgcaccccggtggtcacctgtactcccagctgcacgacttacacgtcttcctttgtgttcacctaccccgaggctgactccttccccagctgtgccgctgcccaccgaaagggcagcagcagcaacgagccctcctctgactccctcagctcacccacactgctggccctgtgagcagtcagggaaggggaggcagccggcatctgcaagtgctgctgcctgagctggtgcattacagagaggagaaacgcgtcttccctccagggttcctgtagacctagggaggaccttatctgtgcgtgaaacacaccaggctgtgggcctcaaaggacttgaagcatcctgctctggactcaagtcctcacctcttccggagatgtagcnnnnnnnnnnnnnnnnnnnnnnccgcatggagtgtatggttcctagacacctgagagttggtagttagtagcatgagagccaggcctgggtctgtgtctcttttctctttctccttagtcttctcatagcattaactaatctgtccggttcattattggaattaacctggtgctggatattttcggattgtatctagtgcagctgattttaacaatacctactgtgttcctggcaatagtgtgtcccaattagaaatgaccaatattaaactaagaaaaaatagaactttattttctagtagatagaactaagtagctgtatccatgtactgtagtccctcttcaacgtcaatgttcatcgtgatgtcactgatcatgcattgtcgaggtgatctgaatgtgctgacattaacagttttccatgaaaacgttttattgtgttttcactttatttattaagatggattctcagatatttatatttttattttatttttttctaccctgaggtctttcgacatgtgaaaagtgaataggaatgaaaaatttaagcattgtttgcttattccaagacattgtcaataaaagcatttaagttgaatgcgaccaccttgttgctctcttttgttcagatggttacgtgtggtttctggaaggcattactggagaccagtttgtcaagatgggtaggtcctggaggagacacacctctgcctgttccttatcacacagaaggaaacgctagttcgggacatttgacagatacgtgtgttcatattgcattgctgagattttctacctacctgccctgggggacgaaagctgcatgtaacagcttgagtaagaccacactttcctgcttctcttttctgctttctggggagagcagtcttaaatttatgtgctcatcttacatttagcagttttcatgggaaaggaatcctttgaatagagagccagttctataaaaactactttagctttcttttttgtattgtttgagataggatcttgctaggtaggtagcccacagtgtcctcaaactcacagtaatcttcttgcctcaggcttgtcagtgctggttattacagataaccagcaaatttagctttttattcctacaaatcatgtgaagatttactcttagaagcaagtgagttgaagaatggttgaaataaacgactttccacactgtaacccatgtcaccgcttcccacacttgcccaatctaggcttaactgcctcttttttaagattaagttttaaaattgcatttatttatgtgtggaaggctttaagagcaacctccagaagctgtgaatcctggagattgaaatcaggttgtcaggcatgaaacaagcacctttacccacgaagcaattttgccagccctgaatttcctccttcatttttatttattgttaagaatgttttgggggcatgtatgtttatgcaaaatgtgcatgcagtcccacagaggccagaagagggcgatgggttcccttggaaatggagataagagacaatggttttagcctccatgccagtggtgggaaattgagcctgggtcctttgcaggattttcaagtgcttttagttgctgagccatttttccagcctttgaacaaaattttaataattggctttaaaagttctcccttgaataaggtggtagtggtacatnnnnnnnnnnnnnnnnnnnnnaaggcagagttggtgtatatttgtgagttcgagggcatcctggtttacaaagcaaattccaggacagccagagctcttatacagagaaatcttgtcttgaaaaaccaaaaaagtttttccttggttaaaaacaacagcaatttttcaattgtttatttttgagataggttctaatgtggtctagtttgctatacagctgaggctgggtcctgaactcctgatctttctggttatatctctcaagtgctgggatcacaggcatgcaccaccatacctggctcactctaacatatgttcatttggtcaaccctttttattctcagaaggaggaattgtcctaccacacagcagaaaccaaattctaatttttgatgttactttaatgccaagtacaattcagattacagttggggggagctgactattcaaagacctcatgcagcataaataatggctgaccaacc

SEQ ID NO: 675 - DNA, 1881 bp, Mesocricetus auratus
  misc_feature (449)..(465): n is a, c, g, or t
  misc_feature (1636)..(1675): n is a, c, g, or t
atggcggaccagagaatggacatctcttcaacaatcagtgacttcatgtccccaggccccaccgacctgctctccagttccctgggcaccagtggtgtggactgcaaccgcaagaggaaaggcagtgccaccgactaccaagaaagtatggacacagacaaagatgaccctcatggaaggttagaatatgcagagcaccaaggaaggatcaagaatgcaagggaggcccacagtcagattgaaaagaggcgtcgggacaaaatgaacagtttcattgatgaattggcttctttggtaccaacatgcaatgcgatgtccaggaagttagataagctcaccgtgctgaggatggctgtccagcacatgaaaacgttgagaggtgccacgaacccatacacagaagcaaactacaagccaacatttctctccgatgacgaactgaaacatcnnnnnnnnnnnnnnnnngatggatttttgtttgtcgtaggatgtgacagagggaagatcctcttcgtctctgagtctgtcttcaagatcctcaattacagccagaatgaccttattggccagagtttgtttgactacctgcatcctaaagatattgccaaagtcaaggaacaactatcttcctcagacactgcaccccgggagcgactcattgacgcaaagactggacttccggttaaaacagatataacccccgggccatcccgactgtgctctggagctcgccgctctttcttctgtaggatgaaatgcaacagaccttcagtaaaggtggaagataaggactttgcctctacctgctcaaagaaaaaagcagatcgaaaaagcttctgcaccatccacagcacaggctatctgaaaagctggccacccacaaagatggggctggacgaagacaatgagccagacaatgagggctgtaatctcagctgcctcgtggcaattgggcgactgcattcacatgtggttccacaaccagtgaacggggaaataagggtgaaatctatggagtatgtttctcggcacgccatagatgggaaattcgtttttgtagaccagagggcaacagctattttggcatatctaccacaggaacttctaggaacatcatgttatgaatattttcatcaagatgacataggacatcttgcagaatgtcacaggcaagttttacagacaagagaaaagatcacaactaattgctataagtttaagatcaaagacggttcctttatcacactacgaagtcgatggttcagtttcatgaacccgtggaccaaggaagtagaatacattgtatcaactaacactgttgttttagccaatgtcctggaaggcggggacccaaccttcccacagctcacagcgtcccctcacagcatggacagcatgctgccctctggagaaggtggcccaaagaggactcatcccactgttccaggcattccagggggaaccagagctggggcaggaaaaataggtcgaatgattgcagaagaaatcatggaaatccacaggataagagggtcatcaccttccagctgtggctccagcccgctgaacatcacaagtacacctccccctgatgcctcctctccaggaggcaagaagattctaaatggagggactnnnnnnnnnnnnnnnnnnnnnnnnnnnnnnnnnnnnnnnnaagagaccccaggttatccatattctgatagttcttctattcttggtgagaacccccacataggcatcgatatgatagacaacgaccaaggatccagtagtcccagtaatgacgaggcagcaatggctgttatcatgagcctcttggaagcagacgcgggcctgggtggtcccgttgactttagcgacttgccatggccactgtag

SEQ ID NO: 676 - DNA, 1317 bp, Cricetinae gen. sp.
gtcctgtagtcacacctgtgctgaggttttagctgtagggttcagcatgtccaccgtcaaggagcagctaattcagaacctaactcaagaagataaaacctcccggtgtaagatcactgtggtgggagttgggaatgtcggcatggcgtgtgctattagtatcttactgaaggatttggccgatgaactggcccttgttgacactgataccgacaaactgaagggagagacgctggatcttctgcatggcagtcttttcttcaacacttcaaagattgtctctggaaaagattacagtgtgtctgccaactccaaattagttatcatcacagccggtgctaggcagaaggtgggggaaacacgccttgacctggtccagcgtaacgttgctatcatgaaatccatcgttcctggcttagtgcaacatagtcctgactgtaaaatgctgatcgtctcaaacccagtggatattttgacttatgtggtctggaagataagtggcctgcctgcaactcgtgtaattggaagtggctgtaacctagattctgcccgtttccgttacttgattggagagaagttgggtgtccaccctacaagttgccacggctgggttcttggagaacacggtgactctagtgtgcccttatggagtggtgtgaacgttgctggcgtacttctgaagtcactgaacccagcgttaggaagcgactcagaccaagagcactggaaaaagatccacaaccaagtggtggagagtggctatgaggtcctccggctgaagggctatacatcttgggctattgggctgtccgtgacagatctggcaagatcaatcctgaagaatcttaggagggtgcatcccgtttccacactggttaagggcttatatgagataaaggaagaaatctttctcagcattccttgtatcttgggacaaaacggcatcacagacattgtgaaagtgaacctgaatcccgaggaggaggcccttctcaggaagagtgcggaaacactctggaacgtccaaaaggacctcaaattgtaaagtttcagaattcgactgctgagcagatatgtgattgcgtattgcacatctcaaacctttccaaataataaatagttgaacaaactatcagagacctatgacataacagcatcctgttgagatgagacagacacagacgtttcctccttcccctctcttcgctacagagccctggctgcctggagctgcagactcagctcgcctcagagatctgctaacctcgaagttaagggcgtgcaccaccatgaccagctgaagtctctgcctttttc

SEQ ID NO: 677 - DNA, 90 bp, Mesocricetus auratus
atgactgaatataaacttgtggtagttggagctggtggcgtaggcaagagtgccttgacgatacagctaattcagaatcattttgtggta

SEQ ID NO: 678 - DNA, 1228 bp, Cricetulus griseus
  misc_feature (1135)..(1170): n is a, c, g, or t
  misc_feature (1201)..(1228): n is a, c, g, or t
ggcacgaggtctgaggtggctttgggcggcctctgagcgtttgtgtccctcgcccgctaccttccttcctttggttcccaccatgccgatgtaccaggtaaagtcctatcatggaggcagcgcacctctgcgtgtcgagcttccaacctgcatgtaccggctccccaacgtgcacagcaagactaccagccccgcgaccgacgcgggccacgtgcaggaaacatctgagccatctttgcaagcccttgaatcccgccaagatgatattttaaagcgcttatatgagttgaaggcagcagttgatggcctttcaaagatgattcacactccagatgcagacttggatgtaaccaacatcctgcaagctgatgagcctgtgcctttaaccacaaatgcactggacttgaatttggtgcttggaaaggattatggggcactgaaagacatcgtgatcaacgcaaacccagcctccccacccatttccctgcttgtgctgcacaggctcctctgtgaacgctacagggtcctgtctactgtgcacacacattcgtcagtcaagaatgtacctgagaatcttctcaagtgcttcggggagcaggccagaaaacagtcccgccatgagtatcagctgggcttcactttaatttggaagaatgtgcctaagacacagatgaagttcagcgtacagacaatgtgccccatcgaaggagaagggaacattgcacgattcttgttctctctgtttggccagaaacacagcgctgtcaatttaaccctcattgacagctgggtggatattgccatgtttcagctgaaagaagggagcagtaaagagagagcagctgttttccgctctatgaactctgctctggggaagagcccatggctggttgggaacgagctcaccgtggcagatgtggtgctgtggtccgtgctacagcaaactggggatggcagtggggtagcacccgccaatgtgcagaggtggctgaagtcctgtgagaaccttgtccccttcagtactgccctccagctccttaagtaagttctagcagcttgtcttacagggttcaacataagaatgatacagcttcaagtttgttgtcaggaaagggacttgtcctagaatcacaannnnnnnnnnnnnnnnnnnnnnnnnnnnnnnnnnnnagataatctgtggattttattttaagtcagnnnnnnnnnnnnnnnnnnnnnnnnnnnn

SEQ ID NO: 679 - DNA, 4199 bp, Cricetulus griseus
  misc_feature (130)..(150): n is a, c, g, or t
  misc_feature (4177)..(4199): n is a, c, g, or t
tgttcgcggcagaggcgccgttcccccgggcccgccgacctcgagcctgaggcggacgcaggtcggccctcagagtggtttcttgggcatccccactagatttgggtctgtggtgcaaatggagtctagnnnnnnnnnnnnnnnnnnnnnatgagagaagcccctgtccaagatggagaagaagcggagaaagaaatgaaagcctctttttgggccaagctgtgggtgaccatgggactgaggttttctttacgttggacaagtctgtaggatggctgatcagtaaggttgcagcttttagccaaaacagaaattcacttctgatcaaggaagaacctagtgcgatttgaatttatgcaattttatgaccatattcacttaggaccatgaagctcatcaacatctggcttcttctgctggtggttttgctctgtggaaagaagcatctgggtgacaggctggggaagaaagcgtttgaaaaggcatcatgccctagctgttcccacctgactttgaaggtggaattctcctcaactgtggtggaatatgaatatattgtggctttcaacggatacttcacagccaaagctagaaactcatttatttcaagtgctctgaaaagcagtgaagtagacaactggagaattatacctcggaacaacccatccagtgactaccctagtgattttgaggtgattcagataaaagagaagcagaaggccgggctgctcacacttgaagatcatccaaacatcaagcgggtgacacctcaacgcaaagtctttcgttccttgaagtttgctgaatctgaccccattgtgccatgtaatgaaactcggtggagccagaagtggcagtcatcacgacccctgagaagagccagtctctccctgggctctggattctggcatgcaacaggaagacattcaagccggcgattgctgagagccattcctcgacaggttgcccagacattgcaggcagatgtgctgtggcagatgggatacacaggtgctaatgtcagggttgctgtttttgatactgggctcagtgagaagcatccacacttcaagaatgtgaaggagagaaccaactggaccaatgagcggaccctggatgatgggctgggccatggcacatttgtcgcaggtgtgattgccagcatgagggagtgccagggatttgccccagatgcagagctgcacatcttccgggtctttaccaacaatcaggtgtcttacacatcttggtttttggacgctttcaactatgccatcctaaagaagattgatgttctaaaccttagcatcggcgggcctgacttcatggatcatccctttgttgacaaggtgtgggaattaacagctaacaatgtaatcatggtttctgctatcggcaatgatggacctctttatggcactctgaataacccagctgatcagatggatgtgattggagtgggtggcattgactttgaagataacatcgcccgcttttcttccaggggaatgactacctgggaactaccaggaggctatggtcgcgtgaaacctgacattgtcacctatggtgccggagtgcggggttccggtgtgaaagggggctgccgggcactctcagggaccagtgtcgcttccccagtggttgctggggctgtcaccttgttagtaagcacagtgcagaagcgggagctagtgaatcctgccagtgtgaagcaagccctgattgcatcagcccggaggcttcctggtgttaacatgttcgagcaaggccatggcaagctggatctgctgcgagcctatcagatcctcagcagctacaaaccacaggcgagcttgagtcctagctacatcgacctgactgagtgtccctacatgtggccttactgttctcagcccatctactatggaggaatgccaacaattgttaatgtcaccatcctcaatggcatgggagtcacaggaagaattgtggataagcctgagtggcggccctatttaccacagaatggagacaacattgaagtggccttctcctactcctcagtgttatggccttggtcaggctacctggccatctccatttctgtgaccaagaaggcagcttcctgggaaggcattgcacagggtcacatcatgatcacggtggcttccccagcagagacggaagcaaaaaatggtgccgagcatacttccacagtgaagcttcccattaaggtgaagatcattcccacccctcctcggagcaagagagtcctctgggaccagtatcacaacctccgctaccccccaggctactttcccagggacaacttgcggatgaagaatgatcctttagactggaatggcgaccatgtccacaccaatttcagggacatgtaccagcacctgcgcagcatgggctacttcgtggaggtgctcggtgccccattcacgtgctttgatgctacacagtatggcactttgctcatggtggatagtgaagaagagtacttcccagaggagattgccaagctgaggagggacgtggacaatggcctttccctcgtcatcttcagtgactggtacaacacttctgttatgagaaaagtgaagttttacgatgaaaacacaaggcagtggtggatgccagatactggaggagccaacatcccagctctgaacgagctgctgtctgtgtggaacatggggttcagcgatggcctttatgaaggggagtttgccctggcgaatcatgacatgtattatgcatcgggatgcagcatcgccaagtttccagaagatggtgttgtgatcacacagactttcaaggaccaaggattggaggtcttaaaacaagagacagcagttgttgaaaatgttcccattttggggctttatcagattccagctgaaggtgggggccggatcgtgttgtatggagattccaattgcttggatgacagtcacagacagaaggattgcttttggcttctggatgcactccttcagtacacatcatatggcgtgaaccctcccagcctcagccattcagggaaccggcagcgcccacccagtggagctggcttggcccctcctgaaaggatggaaggaaaccaccttcatcgatactccaaggttcttgaggcccatctgggagacccaaaacctcggcctcttccagcctgtccacacttgtcatgggccaagccacagcctttgaatgagactgcgcccagtaatctttggaaacatcagaagctgctctccattgacctggacaaagtagtgttacccaactttcgatcgaatcgccctcaagtgagacctttgtcccctggagaaagtggtgcctgggacattcctggagggatcatgcctggccgctacaaccaagaggtgggccagaccatccctgtctttgccttcctcggagccatggtggccctggccttctttgtggtacagatcagcaaggccaaaagccggccgaagcggaggaggcccagggcaaagcgtccacagcttacacagcagacccacccaccaaggaccccgtcagtgtgatcatcacagtggccagccacagaagccaacaagccttggaccactctgatggccacacagggcatcagaagagcatcctgggaggtgcctatttccaagggaccccatctccagcttgtggctgggttagtgtgttctccccaggcatctctgagttacatcctgaagtacctcactgtgctgggctcttgacaggaggtgctcagtagctcagcctccagtggtgtcagcaggcccagtgacagtgcaccaaagacacagagcctggaagggctgtcgggacacactttctacataaagcttacaatcctgaccaagcgaagaaatgcttgttacaggctattttctatatttattgtggggagagtcactttaaagacttgtactgtttggaagcaaagctgttgtgtttgtcagttgagtgcagttttctgcagtgacatcataaggagtcagatcccatgacctttttgatgagaggacagactgaactgaagggcatgtgcacagatctgggaaatgcaagccttcgctttatttttataagtatcaactgccatcatgttttgtaatttggggtcttgatttcaccattgttggtgaaagaaattttcaataaatatgcataaccnnnnnnnnnnnnnnnnnnnnnnn

SEQ ID NO: 680 - DNA, 1671 bp, Cricetulus griseus
  misc_feature (468)..(489): n is a, c, g, or t
  misc_feature (1651)..(1671): n is a, c, g, or t
ctctaaagggagcggcggcagcggcggcaggagccaagaagcaggctccggacgctgcttaggaaccgggggacccaggagtgcccgcaccctgagctctcagctccggaggcgtcatggccgagtacgggactctccttcaggacctgaccaacaacattacccttgaagatctggagcagctcaagtcagcctgcaaggaggacatccccagcgagaagagtgaggagatcactacaggcagtgcctggtttagcttcctggagagccacaacaagctggacaaagacaacctctcctacattgagcacatctttgagatatcccgccgtcctgacctactcactatggtggttgactacagaacccgtgtgctgaagatctcagaggaggatgagctggacaccaagctaacccgtatccccagtgccaagaagtacaaagacattatccggcagccctctgagnnnnnnnnnnnnnnnnnnnnnnccccaccaaagaaggcttgagcaaaggggagaagaagaagaaggttggatcttcatcagaccactcccttccccatcctcaatgggaggggctagggcaaccccctgccccgtacccacttactaacttggtcctaacccccttactatgcgcgtgtgtgtgcgtgttcacacgctctggctgtctgtctgtctagctcatctagttcctcctcctcgtgaggggactggagtcgggaggggggggcttaatttccccactatagggggaagtggaacctatttctatgtaaataaaaatgggcacattcctccttctcccctcccctccactcttcccgcattttcctacactgaggagctaaggttaagatgaggtatgggagagatggtgagagttaaaaccaatggggaaggaaggtaagaggctactcagcctctacctgggaaggggaaagaaaacccagaattcagggtttgtagatctatgctggactggctagaatccagtttcttgttattccttaggctgaagtcctaagagccaataggccctcttttatgcccttgtcatgggcctgggatgggtatgagccagaaatcttaatgagaagaccactagagcctttcctggcccccaaaatcaaaccccatggagaagccagcatttgatgtccccaacttctgctctggagagactatgctgggaccatgtactactgagcctgagatagggatgcaggtggagacaggcccaacttctactcctttattcctaaatacagactgttgaatatactgaccctgagcctaaggaggtttgggggaatgagatctataggttttaacctcaacctgcccatacctacagggtcccaatatggatattgtaggtaaccttcacaccagtctccagtttagaataccccaacaagaaagaagttaatcatagtggtttcctttgcacctattaccaccccagttcaatccaggaagggacttggttaaacctttctcaattgggtttgtggatgcctccaagccaagtcactagagtacagtgagtgaacccagcctcctacctgtcccaagatgcccttccccatcttgaccgtgctaactgtgtgtacatatatattctacatatatgtatattaaacccnnnnnnnnnnnnnnnnnnnnn

SEQ ID NO: 681 - DNA, 353 bp, Cricetulus sp.
aagcttaacgaggtgtatagtctcttgtagtatatatgtatatgctgttacatacactgtacagaatctgtactcctgtttggtgtgtaatataccacttagctttgtatgataggtcataaacttctaatttttgagagaaccacataaaaataaacagtctgtattatattagacaaaatagtaagctttataaaaagttatttttggtaaatagtaaagaattagtgtggaatgtgatgaaattaaaatatagctttgatataattttatgtgttacttcaacatatactgaaaatcaacatgatttgaataaataaaatgtattttgtacttggaaaaaaaaaaagctt

SEQ ID NO: 682 - DNA, 360 bp, Cricetulus sp.
aagcttaacgaggccaagcctagcactattgccaccagcatgcgggattccctcattgacagcctcacatgagtcaccttccatgctgctgtgtgggctcctggctctggactttggctcatttaccatgcctgagctagtatgtaccaaacgctggcagcagggcgtggcagagagcttaccagagctgaatggttgagcgcgcccaacccttcttcatccgtgccatctctagactattgttataaaaaggcttgccgtgtcatgctggctttgagttgtggctcctggatgagagttctgctgtcttgtgtcccaccccattaaagtactgcctccccccataaaaaaaaaaagctt

SEQ ID NO: 683 - DNA, 496 bp, Cricetulus sp.
  misc_feature (39)..(64): n is a, c, g, or t
  misc_feature (66)..(79): n is a, c, g, or t
  misc_feature (84)..(121): n is a, c, g, or t
  misc_feature (171)..(190): n is a, c, g, or t
aagcttctcaacgaggcggccgagcggcagacgctaacnnnnnnnnnnnnnnnnnnnnnnnnnngnnnnnnnnnnnnnntcttnnnnnnnnnnnnnnnnnnnnnnnnnnnnnnnnnnnnnncaagatccaagataaggaaggcattccacctgaccaacagagrctgatannnnnnnnnnnnnnnnnnnnggatggccgcaccctgtcagactacaacatccagaaagagtccaccttgcacctggtgcttcgccttcgtggtggcatcatcgagccatcccttcgtcagcttgcccagaagtacaactgtgacaagatgatctgccgcaagtgctacgcacgcctgcacccccgtgcggtcaactgtcgcaagaagaagtgtggccacaccaacaacctgcgccccaagaagaaggtcaaataaagctttggccataccaggcccatgaccctgggaccaaataaagtccccttccatcgaaaaaaaaaaagctt

SEQ ID NO: 684 - DNA, 346 bp, Cricetulus sp.
  misc_feature (18)..(42): n is a, c, g, or t
aagcttaacgaggacgannnnnnnnnnnnnnnnnnnnnnnnncagaacccacgacagtacaagatcccagactggttcttgaacagacagaaggacgtgaaggacggaaagtacagccaggttctggccaatggtctggacaacaagctgcgagaggacctggagcgactgaagaagatcagagcccacagggggctgcgccacttttggggtcttcgtgtccgaggtcagcacaccaagaccactggccgccggggccgcactgtgggtgtatccaagaagaaatgagycgctgggccttcactgttaataaatagtttatatgcctgtgaaaaaaaaaaagctt

SEQ ID NO: 685 - DNA, 1082 bp, Mesocricetus auratus
  misc_feature (703)..(731): n is a, c, g, or t
  misc_feature (1062)..(1082): n is a, c, g, or t
gtccctggaggttggctgtaggattcaggtggcttgctcaggctgggatcaaggacacagtgagcagatcaaccttaacctcagcccctcccctcgccacaggaggacactggtgtcagcagcatgaagctgaatttcactggtctcagggctctggtgaccggggcagggagagggattgggcgaggcactgcgaaagccctgcatgcctcaggagccaaagtggtggccgtgtcactcatcaacgaagacctggtcagcctggccaaagagtgtccgggcatagagcctgtgtgtgtggacctgggtgactgggaggccacagagaaggcactgggccgtattggccccgtggacctgctggtgaacaatgcggcggtggcgctagtgcagcctttcatacagtctaccaaggaggtctttgacaggtccttcaatgtgaatgtgcgctctgtgctgcaagtgtcccagatggtagccaagggcatgattaaccgtggagtggcaggatccattgtcaacatctccagcatggtggcctatgtcaccttccctggtctggccacgtacagctccaccaagggtgctataaccatgctgaccaaagccatggccatggagctgggaccatacaagatccgggtgaactctgtaaaccctaccgtggtgctgactgacatgggcaagaaagtctctgcagacnnnnnnnnnnnnnnnnnnnnnnnnnnnnnccacccactgaggaagttcgcagaggtggaggacgtggtcaacagcatcctcttcctgctcagcgacagcagcgcctctaccagcggctctggcatcctggtggacgctggttacctggcctcctagacggcccaggtgcaggggactcctggagacttccctggcctcacccttacatcaagaccccgccttcaacccaacccaataattttgttcgaatcctgtagagccccaccccacacacatccatccccaactttagactccgggatcccgccattccataccagctatgctgagataatttgattaaataagtatcccaaaccnnnnnnnnnnnnnnnnnnnnn

SEQ ID NO: 686 - DNA, 1695 bp, Cricetulus griseus
ctgtgacccaccctggtggcctgcacgtgcacctactccctgcacgtgcaccgcctgtaggcgctgacgccgagacactgccagcccaaggagatgttgtcggatgtccgcccgcatctctgctaccctgcagtagagcttggcctgcagaaggagcaaaggagacaggattcagggatcccccaggccatggatacgccccgagcagccaagggacagtgtccctggcgtccatgcctcatagggctgttgctgcagctgctgtttgctctgtgcttcttctcctacatccgagtatcccatgaccaacccggccccccagctcctgatagctccacaggaccagcctccaccccaactacccctgtccccagacccttcctcatcttactgtggacatggcccttccacagcccactgactctgtacccctgttccaagatgctcccaggcaccgccgactgccagatgactgtcaaccggagcttgtacccccaagcagatgcagtcatcttccaccaccgagaaatcagccccaaccccaggtcactgctgccaagtcagccgaggccgccaggccagcgctgggtgtggttcagcctggagtcacccagccactgcagcaggctgtcagccctggatggacacttcaacctaaccatgtcctatcgcagcgactctgacatcttcacaccctatggctggctggagccgtgggcagagcctccagtccaaacccaggtcaacatgtctgccaagactgacctggtggcctgggctgtgtccaactggaaccccaagtcggctcgggtgctgtactatcagaagcttcagagtcacctccatgtggacgtgtatggccgaggacatatgcccctttcccgaggggacatgatggggacgctggccagatacaagttttacctggcgtttgagaactcacttcacccagattacatcacagagaagctgtggaagaatgctctggaggcctgggctgtgcccgtggtcctggggcccagcaggaagaactatgaacgcttcctgccccctgatgccttcatccacgtggatgactttgagagcccagcagacctggctcagtacctgcagaagctagacaaggacagccagagctaccagcgctacttccgctggagggagacgctcaggcctcgcttgtctagcatggcccttgccttctgccaggcatgcaggcagctgcagtgggaccagaggtaccagacggtccacagtgtggcctcttggttccactgaggtggctggccagagtcctgcaggcagtgtcccactcaaaattcatcctctgttgcccctgtgttgtgctctatcgtgctgggtagttttatttcaatttgatacaaactagagtcatgtgggttgatggagccacaattgagagaatggcaccaccagattgacctgcagggcattttcttaattagtgattgatggtaaggcctcagctcactgtgggtggtaccatccctgggctgcttgtcctgggttctataagaaagcaggctgagcaagccatggggagcaattcagtaagtggcctctgcctcagctcctgcctccaggttcctgcctgactctgtgaatgatggagtgtgactgagaaatgtaagctgaaataaaactaaagttacttagccatcatggcattttagc

SEQ ID NO: 687 - DNA, 1045 bp, Mesocricetus auratus
agatgcccatgttgagcccccactccctgaaacctgacaccctgcacctgccacctgggacctcggagttcctaggctgccagcggcgccacacactccctgccagcgagttccgttgccttaccccccaggatgccatcagcgtgtttgagattgagcgtgaagcctttatctctgtctccggtacctgtcccctctacttggatgagatccgacacttcctaactctctgtccagagctgtcgctgggctggtttgaggagggtcgccttgtggccttcatcatcggctcactttgggacaaggagagacttactcaggagtcactgacactgcacaggcctggaggccgcaccgcccacctgcacgtcctggcggtgcaccgcaccttccggcagcagggcaagggctctgtcttgctgtggcgatacctgcaccacctggggagccagccagccgtgcgccgggctgtgctcatgtgcgaggacgcactggtgcccttctatgagaaatttggcttccaggcggtgggcccgtgcgccgtcaccgtgggctccctcaccttcatggagctacagtgctccttacggtgccatgccttcctgcgcaggaacagcggctgctgacccaagctgcccactcggccacggagagggtggggagcagcaggcttggggttcctaattcccacgccacaccctcctctgcctagagcccatccaagtagagctggctagcatgaagggagagacggcagccgccagctggagtgcagaggtaaggatcaatgcagagggcaggaggtggccctgcctcagcacaggctgccatctgtccccaaaggacctcttgcattctgaactgtgcacaaagccaagaccaggatgggaaaccagagcggtgggaggtctgtccccacacacttctgcctctaccagctctgtttccgcaccccagtgcagcgccctgattcttggggtccttgctctccccagactgacaccccttcctggatcctaactgggaatgaggggcagccaggagc

SEQ ID NO: 688 - DNA, 1747 bp, Cricetulus griseus
  misc_feature (1)..(131): n is a, c, g, or t
  misc_feature (667)..(681): n is a, c, g, or t
nnnnnnnnnnnnnnnnnnnnnnnnnnnnnnnnnnnnnnnnnnnnnnnnnnnnnnnnnnnnnnnnnnnnnnnnnnnnnnnnnnnnnnnnnnnnnnnnnnnnnnnnnnnnnnnnnnnnnnnnnnnnnnnnnnnagtccagcaatgcagccgggaccagcgttgcaggccgtgttgctggcggtgctgctgtcagaaccacggagttcgaagggtcggctgctgagcgggcagctggtctgccggggagggactcggaggccttgctataaagtcatttacttccatgatgcttttcaaagactgaactttgaggaagccaaagaagcctgcaggagggatgggggacagctcgtcagtattgaaacagaagatgagcagagactgatagaaaaattcattgaaaacctcttggcatctgatggtgatttctggattggcctcaggaggctggaggtgaagcaggtcaacaacacagcctgccaggacctttatgcttggacagatgggagcacatcacaatttaggaactggtatgtggatgagccttcttgtggcagtgaggtctgcgtggtgatgtaccatcagccatcggcaccacctggcatcgggggctcatacatgttccagtggaatgacgaccggtgcaacatgaagaacaatttcatttnnnnnnnnnnnnnnnagaagccaagtacaacaccttctataaggcctggaggtgaagcaactgagccaccaacaccagtacttccagaagaaacacagaaagaagacaccaaagaaacattcaaagaaagcagagaggctgctttgaatcttgcctacatcctaatccccagcattcccctgttcctcttactagtggtcacttcagctgcatgttgggtttggatctgtagaagaagaaaacaagagcagccagatcctaccacaaaggagcaacacaccatttggcccactcctcaccaagaaaacagccccaacctagatgtttacaatgtcatcagaaaacaaagcgaagctgatttaactgagccccgcccagacctgaagaacatctcatttcgggtgtgttctagtgaagcccctcctgatgatatatcttgtgactatgacaacatggctgtgaacccttcagaaagtgggtttgtgactctggcaagtatggagagtggatttgtgaccaatgacatttatgagttctcccctgacagaatggggaggagcaaggagagtggatgggtggaaaatgaaatatattactaagacatatgaaaaactggcaaaaatgagaaaacaaaagcaaaagcctcctatttctcacaaggaaaatgttcagaaagtttatgaagatgctcagaccagttcttaaggtgagcacagaatctccacaagttcctactggggtccccaagttctggtatgtatcccttatcccagagcctcacccagctcagccttgtgagaaggcaccttgcctaggggctgccatacagcagaccctcaataactgtcagccagtgtgctgcaactgatgttcaagggctgatgcttccaatggtcaggataaaggtgtcaccaaggagtttggaaagcccgcctctaggctccttgctctctacagcagcacgtgcaatcatagaaagacataaactctggaatcttctcaaaggctatgtatggaagccccaggctggcctgcccagcaacaattcccatatcttcccctagcccaaataaaatccaat

SEQ ID NO: 689 - DNA, 201 bp, Mesocricetus auratus
atgactgagtacaaactggtggtggttggagcaggtggtgttgggaaaagtgctttgacaatccagttaatccagaaccactttgtggatgaatatgatcccaccatagaggtgaggcccattttaccagctggccctggctcccacttttggctctttcttaccaatgtgtcctctgtttttcgatactaaagaggagag

SEQ ID NO: 690 - DNA, 178 bp, Mesocricetus auratus
gtatttacattcctctagctatgccccaccaccaccacctcaacctttcacattcccaggattcttaccgaaaacaagtggtaattgatggtgagacttgtctgttggacatactggacacagctggacaagaggagtacagtgccatgagagaccaatacatgaggacaggcgaagg

SEQ ID NO: 691 - DNA, 403 bp, Cricetulus griseus
  misc_feature (383)..(403): n is a, c, g, or t
acctttgaggagccggttgctgtttggagcgagttagcggtgcggagatgtggttcgagattctccctggcctcgccgtcatgggtgtgtgcttggtcatccccggggtggccactgcgtacatccacaagtacaccaacgggggcaaggaaaaaagagttggtcgccttcgttaccagtggtatttgatggaaagagatagacgtgtctctggagtcaatcgctactatgtgtccaggggcttggagaacattgactagagaagcattttcctggcggatgaaaaaattacttggttattcatctgttcctgctagaaggcaaatgcagcatattatatactatgcgcatgttatgtaatgcttaataaaatttaaagaacnnnnnnnnnnnnnnnnnnnnn

SEQ ID NO: 692 - DNA, 297 bp, Cricetinae gen. sp.
tcatggacatacggctggccaccggttaatcttattagctggatacaccctagccaagggatgtcaaaacacctgaaggatgaggccagcctagtatcaattaaacttatgacaagggaacaaataccaaacgatagatgggtcactgtggctagctgtaaaggtttcaactcattagtagcagctgcccagtgccatgtgaaggaacaaactggtttttggttttcttttccctttcagttttaatgttatgtaatgtatttaaacccctatttaaataaaacttgtttaagaaat

SEQ ID NO: 693 - DNA, 398 bp, Mesocricetus auratus
  misc_feature (347)..(361): n is a, c, g, or t
ccaaggacgcagctttctatcctggccactctgaggtgcatagcgtaatgtccatgttgttctacactctgatcacagcttttttgatcggggtacaggcagaaccatacacagacagcattgtcccagaaggagactccgtcccccaagcccactggactaaacttcagcattccgttgacacagccctccgcagagcccgcagcgcccctggtgcatcaatagcggcccgtgtgaccgggcagacccgcaacatcactgggacccaactgtttaagaaacggagactccgttcaccccgtgtgctgtttagcgcccagcccccacccaccttcgcggacactctnnnnnnnnnnnnnnnggcccatggtacaatctccttcaacaggactcaccgg

SEQ ID NO: 694 - DNA, 389 bp, Mesocricetus auratus
  misc_feature (278)..(278): n is a, c, g, or t
gctgatccaggcggatatcttgaaaaacaagctctccaagcaaatggtggatgttaaggaaaattaccagagccccctgcccaaagcagaagcccccagagaacccgagcagggggagtccaccaggtcggaattccagcccatgactgcaagggacacagaactactgcggcaacagagacgctacaattcgccccgggtcctgctgagtgacagcacccctttggagccgcctccgttatatcttatggaggattatgtgggcaacccggtggtanccaacagaacatcttcgcggcggaaacggtatgcagagcataaaagtcatcgaggggagtactcagtgtgtgacagtgagagtctgtgggtgaccgacaagtcctcagcca

SEQ ID NO: 695 - DNA, 489 bp, Mesocricetus auratus
tgcgatgatccttgtggatgggcagccacgccaggccaaaggggagctagggctctctcagatgctccacatcgccagtcagatagcctcgggcatggtgtacctggcctcccagcacttcgtgcaccgggacctggctattagaaattgcttggttggagccaacctactggtgaagattggtgatttcggcatgtccagggacgtctacagtactgattactacaggctctttaatccatctggaatgatttttgtatatggtgtgaggtgggaggacacaccatgctccccatccgctggatgcctccttgaaagtatcatgtaccggaagttcaccacagacagcgtgtgtggagcttttggggttatactttgggagatctttacctatgggaagcaaccatggttccagctctccaacacagaggtcattgagtgcatcacccaaggccgtgtcttggagagaccccgagtctgcccaaaaga

SEQ ID NO: 696 - DNA, 297 bp, Mesocricetus auratus
  misc_feature (155)..(155): n is a, c, g, or t
  misc_feature (157)..(157): n is a, c, g, or t
  misc_feature (274)..(274): n is a, c, g, or t
tggcggtctggtgacttcgttgatgctggcttgtgcttgcgccgcatcctgtcgtgagacctgctgtcccgtgggcccctcggggttgcgctgcaccagggcagggaccctgaataccctccgcggcctgcggggcgccgggaacctgacggagntntatgtggaaaaccagcgggatttgcaacgcctggagtttgaggacctgcagggcctgggggagttgagaagcctaaccatcgtgaagagtggcttccgctttgtggcccctgatgcnttccatttcacccctcggctcaa

SEQ ID NO: 697 - DNA, 380 bp, Phodopus sungorus
atgaagttgatccagctttgcatcctattctggtgctggcgagccatttgctgccaaggctgtgagttaaccaacatcaccatcgcagtagagaaagaagagtgtcgtttctgcataagcatcaataccacttggtgtgcaggatattgctacaccagggatctagtgtataaggacccagccagacccaatacccagaaaatatgcaccttcaaggagctggtgtatgagaccataagactacctggctgtgctcaccactcagactccttctacacatacccagtagccactgaatgtcactgtggcaagtgtgacagcgacagcactgactgcactgtgcgaggcttgggacccagctactgctccttcggtgaaat

SEQ ID NO: 698 - DNA, 384 bp, Phodopus sungorus
atggagaggctccaggggctgctgctatggctgttgctgagccccagtgtggtgtgggcatccaggggtcccctgcggccactgtgcaggcccgtcaacgcaaccctggctgcggagaacgaagcgtgcccggtctgcatcaccttctccaccagcatctgtgccggctactgtcctagcatggtccgagtgttgccggctgccctgcctcctgtgccccagcctgtgtgcacctaccatgagctacacttcgcttctgtccgcctccctggctgcccacctggggtggaccccatggtctccttccccgtggcccttagctgccgctgtgggccctgccggctcagcacctctgactgtgggggtcccaggactcaaccaatg

SEQ ID NO: 699 - DNA, 5855 bp, Mesocricetus auratus
  misc_feature (3852)..(3871): n is a, c, g, or t
  misc_feature (4529)..(4560): n is a, c, g, or t
ctaccaggagcgcgtggctcacatggagagctcgctgggccaagcccgcgagcggctgggccgagccgtgcggggcgctcgggagggtcgcctagagctgcagcagctgcaggctgaacgcgacggcctccaggagcgcagagaggcgctggaacagaggctggagggccgctggcaggaccggctgcaggccactgaaaagttccagctggccgtggaagccctggagcaggagaagcagggcctacagagccagatcgcccagatcctggaaggggggcagcagctggcacacctcaagatgtcccttagtctggaggtggctacatacaggaccctgctggaggctgagaattcccggttgcagactcctggccgaagttcccaggcttcccttggttttcaggaccccaagctgaagctgcgtttccttgggacaccagagaaccagcacctgggatctgtgctccctgtcctcagcccaacacccctcccttcccccttgcctgatacccttgagacacccgtgacagcctttctgaagacccaggaatttcttcaggcccgaatccccaccttggccagcacacctatcccacccatgactgaggctccctgtcttgcaaaagcagaggtcagagcccaggatgcccctctttccctgctccagacacagggtgagaggcagcaggctccagagcctctctgggccaaagccacagcgtctgtttccaccggtgtcctcacagaactagaggaggctggaggccagcagccaggccacttccctgaggatgcgactgcctcagctccatccctcagtcctcatcaccctgttttagaggctaaagatggagactccactgagtctagaggatctagcatattccaggaagatgaagggcaaatctgggagctagtagagaaagaagctgccatagagttaaaagtagagagcagcttggcacaggaaacacaagaagatggtctacacacagaagaaatccaggattcccagggtcctttgcaaaaggaaaccctagaggctctaggagaggagccacttatgtccctgaaaatccagaaccatgagacccctgggaaggagaattgcaattctctgaggtctgtagacgagaaccagggaacactaaaaagcccagaagaagaaaaacaaacactactcaagtctttagaagaaaaggatgtagaggtagagaaaactctggaaaagggggttcctgaactgtctaagcctttaggaaaagaagacccaagaatcgaggatcaagaattaatgtctcctgaaggtacactagagacgctttcatttataggaaagagaaatgaagaggtagtgaggtcttcagaagaggagaacatagagtcattggcagcttttaaaaaggagagccagcatcctctgggatgcccagaagaagagatccagagggttgagaggctgatagaaaaggagggtcaggagtccctgagctctccagaagaggaggaccaggagacagatagacctttggagaaagagaatggagagccgctaaagcctgtagaagaagaggaccagctgtttgagacactgatagaaaaggagggtcaggagtctctgagctctccagaagaggaggaccaggagacagatagacctttggagaaagaagaggaccagctggttgagagactggtagaaaaggagggtcaggagtccctgagctctccagaagaggaggaccaggagacagatagacctttggagaaagagaatggagagccgctaaagcctgtagaagaagaggaccagctgtttgagacactgatagaaaaggagggtcaggagtctctgagctctccagaagaggaggaccaggagacagatagacctttggagaaagaagaggaccagctggttgagagactggtagaaaaggagggtcaggagtccctgagctctccagaagaggaggaccaggagacagatagacctttggagaaagaagaggaccagctggttgagacactgatagaaaagcagggtcaggagtgtctgagctctccagaagaggaggaccaggagacagatagacctttggagaaagaagaggaccagagagttgagaggctgatagaaaaggagggtcaggagtccctgagctctccggaagaggaggaccaggagacatacagacttttggagaaagagaatggagagccactaaagcctgtagaagaagaggaccagagagttgagaggctgatagaaaaggaagatcaggagtccctgagctctctgaaagaggaggaccagaggattgtgaaaactctagaaagagagaattgggaatctctgcggtctcttgatgaaaacctggacactgttatgccactagaaagcaagaaccagaagccactgaaatctctagaagcagaagaggagcagagaattgtgaaacctctagaaaaagtgagccaggactccatcgggtctctagaaaaagagaatgtggagctactgaggtctctagaagacgaccagataactgagagtctattaaaaaaagggactcaggagtccctggaatctcatgaagatagaaaccaggagacccaagatccacagagatttctagaagaggagggccaagggattgtgaaacagctagaaaaagaaaaccagggcttcctggggtctctagaagaagagaaggtggtcaagagatctctagaaagagagaaccatgaaccactgagttctgtagagaaggactgggtgactgagagcctgctagaaagagagagtcaggactcaggaaagtctcttgagggccaggaggcctttagatgtctgggaaaagaggatccagagtccttgcaatttcctgaagttcaggaccaagagatacagagatctcttcaacaagagactcagcagacactgggggctctcggagatgagcagatggcatcggaaccaccagaaaaggtgggtccagagttactgaagtttcttgggaatggccaggaaatagttagatctcttgaagagcagaaccaagagtcactggtgtcagtgaaagaaacaagtgtggagacagcgaagtcttcagacatggaggacatagaaccgctgaagagtgcagacgaggacctggaaataatcaactctgcaggagctcaagagtcactatggtctatggaagtgactagagagacaacgagacccctagaaaaagaagtccaagaatcactggggtttgtgggtgggaaccaagagatactgagaccccttgagagggggaatgaggagttgggatctctgggcaagtggaacctagaggctgtggactctccagaagcggtggaggagggcaggcaacccctgggagaggaagcatgcctagagatgggagaacaccaggaaccgccgaggtctctgggagaggtggagcaggggctgcctggctctggaaatcaacaaaagtgggaggacagggcagtggagaacgcagcagccgatcagggcccaaccctagggaggacgggaatagaaagtgaggatgaggcagagctgcccctgagtgggcaaggagagaaggaagaagatgctgaggagagggagctgcaactagacgccatgggggaggcctggagcctggcgagctctgagccccaggagccgagggtccctagtgagggagggagtgctggggccccccaaggcttggagggtcagtcagagcaggtgggggtcctaggggtcccagttggtcagggaatgccagaggtgacagagcccctgttgcaagaggatgtagcccaagcaggtaagcgagacccgannnnnnnnnnnnnnnnnnnngacgctgctaccagagccgggctgggcctggagcaggaagtggcagggtcaggagggtcaaggcatctggccagggaggaggccatccacccatccctgggggaggaaagtgtagaggcaaagatagctcacgacttggaagggcctggaaaagaaccgaaggaggcaggtgccctggagtcagagatctctgaattgcccaggactagcagtgatgttctggaatccaagggctgcaagcagtcagagcctgtgttgggatgggcagtggaggaagcctcggtggaggcctcagaccatgagggcagtgatgcccctgagcccaggccctcagagacagagggagatgagggtgcacaggcagcactagcaccccctggtcccaagctcatggaaccctgttcacccaccccaatcctgaaagatgcctatgagtggcagccccaggctgagggcacccgggaaactgggcggcagctagaaggtgggtctgcatcactggaaagggtagaagatgagcaagagtttggtcttggggggatccccgagggcctccaggattgggaggagagcagagaggaaagcgaggctgatgagttaggtgaaactctccctgactctactcccctgggcctctacctgaggtcccctacctccnnnnnnnnnnnnnnnnnnnnnnnnnnnnnnnnctcccctcaaggggaggccaggaaggaaggctggggtcctgctgtcccggctgcccagggcctcagcaacccaccgggggaggaggagcgaggccatgactctgacctatcatctgaggagtttgaggacctggggactgaggcctctcttcttccaggacttcctaaggaggtggcagatcatctgggccaggtacccccagggccagagcctgaatgctgggatcagggtggggagtctgatgggttcgctgatgaggaagagagtggggaggagggagaggaagaagagcatgaggacgggactgagtcaggggctcaatggtgggggtcaggaccctccaaggtccaacatgtcacccaaagaggggacctccaggaacacgagtctgtgggtatcagtggtccctgggatgatggctggagaggtgctgcagctggtatctctgtgactggcctggaaactgagtctcaggacagtgctgagccttctgggtcagaggtatctgagtctgtctcctcagagggggaggatcaagcccctgaccatttggataccccccaaggggtgactaacgtggtcccaggggcaggagacaccttcggtatcagtggccaggcccccaacttggagtcagaacacatgaacgggaggttggagaatgggttagagcagtctgaggggcagggagtcctggacaggcaccaggatcaaggacacccttcgcagcaacaggaagtgggtgccttaaaggcccctttgttagggtctcctgtgcaccgaggcccaagccagtccctggagttccctttgagtggggcagatagagattcctggtcctcgggggaagactagacagtgctcctctgatgctgagggcttcatggtggggggatgtcctcccttgctcggggccagcaccctcagtttcgatagcttgacctgtggtgtctgtcctggagaggtgtggcgggctgagggagatgaggtcctgtcagggccatcttgcttggattgtcctgaaggctcaagctgagtcccggcactaggccccctttcttctgcatctccctgccaggagaggcctggctctgagctttcccctggggctgctctggccaggtcttgctaaccctgcctgtctacagtagagccatcctcaccatgtctggtctggcctatacccagaggagctgagggcagcaattgtgaccaccgacctatcatcttatctcagcctgctgagattttgttctgctcttccttgtttgaataaagttgtgtccctccctac

SEQ ID NO: 700 - DNA, 2815 bp, Cricetulus griseus
  misc_feature (174)..(202): n is a, c, g, or t
  misc_feature (2794)..(2815): n is a, c, g, or t
ggcacgaggaaatgagccatttacttggtggaagaaaatagcttgacttaattaagtataatattattaaatataattaaatataaatgatggaaaatctgattatagccacattctttttgttgttaatttgtgtgggctttatttgtttgtttgtttttggatagagttttnnnnnnnnnnnnnnnnnnnnnnnnnnnnnctcttcctgccttcatctctcaagtgctgggattctgtgtgtgagccatcacacatgtccaagtcaaatcgtggaggatgttacatgttctgtggaccttctggatcttggtggccatgacagatctctccaggaagggatgttctgctcaggcatctctgtcatgtgatgctgctggtgtgtgtgatggccgctctaggtctttcacctccatcccctcaggactcacagcagccatgaagagccttgacctgtctaacaacaagatcacctccattggccatggtgaccttcgggggtgtgtgaacctccgggccctgatattgcagtccagtgggatcaacaccatagaggaagatgccttttcttccctgagcaagcttgaatatttggacctgtctgataatcacttatccaacctatcttcctcctggttcaggcctctttcctctttgaaatacctaaacttgctgggaaatccttataggatactgggggaaacaccactgtttctcaacctcacacatttacagacccttagggtaggaaatgttgccaccttcagtgggatcaggagaacagattttgctggactgacttctcttgatgaacttgaaatcaaagcgctaagtctccagaattatgagcccggaagtctgcagtccattcaaagcatccatcacttaacctttcacctaagtcagtctgatttcctgctgggggtttttgaagatactctgagttctgtgggatatttagaactgagagatgctaacttggacagcttctacttttcagaactgtccacggatgaaatgaattcaccgatgaaaaagctggcattccaaaatgcagatctcactgacgaaagttttaatgaacttctgaagctgttgcgttacactccagaactgttggaggtagaatttgatgactgcaccctcaatggagtgggcgattttcagccctcagagtcagacgtagtgagagagctaggcaaagtagaaacgctaataatacggaggctgcacatccccagattctactcattttatgatctgagtactgtatataccctcctggagaaagttaagagaatcacagtcgagaacagcaaggtttttctggtcccttgtctgttctcacagcatttaaaatcattggaattcttggacctcagcgaaaatttgatggttgaagaatatttgaagaacgcagcctgtgagggcagctggccttccctgcaaactttaattttgaggcagaaccgtttgaaatcaatagaaagaactggaaagattttactgactctgaaaaacctgactgcccttgatatcagccggaacagctttcagtctatgcctgactcttgccagtggccaggaaagatgcgtttcctgaacttgtccagtacagggatacaggcagtaaaaatgtgcatccctcagactctggaggtgttggatgttagtaacaacaatctcatttcgttttctttgtttttgcctctgctccgagagctctatatttccaggaacaagctccacactctcccgatgcctccttgttccctgtgttactggtcatgaagatcagagagaatgccataagtactttctctaaagaccaacttagttcttttcccaaactggtgagtctggaagcaggtggcaaccacttcatctgctcctgtgaactcttgtccttcaccttggagcacccagcactggtccaggtcctggccggctggccagacagttacctgtgtgactctccctcccgcctgcgtggccagagggtccaggatgcccggccctcagtcttggagtgccaccagactctactagtgtctggtgtctgctgtgcccttgtactgttgatcctgctcataggtggcctgtgccaccatttccatgggctatggtacctgcggatgatgtgggcgtggctgcaggccaagaggaagcccaagaaagctccttgcagggacatttgctatgatgcctttgtttcctacagcgagcaggattcctactgggtggagaacctcatggtccagcagttggagaattcggaacctcccttcaagctatgtctccacaagcgggactttgttcctggcaagtggatcattgacaacatcatcgactctattgagaagagccacaaaaccctgtttgtgctttctgagaactttgtgcggagcgagtggtgcaagtatgagctggacttctcccacttcaggctctttgatgagaacaacgacgccggcatcctggttttgctggagcccattgagaagaaagccatcccccagcgcttctgcaagcttcgcaagataatgaacaccaagacctacctggaatggcccttggatgaaggccagcaggaagtgttttgggtaaatctgagaactgctataaagtcctaggttctccacccagttcctgtcatgtgctatgacatgaactgtaacaaagtttattctgacttaattatttaagtgccatagaattgtacccttgaagatttaagtataactaataattgtgagctttatcgtgaatgctgttataaaaatattttatattnnnnnnnnnnnnnnnnnnnnnn

SEQ ID NO: 701 - DNA, 772 bp, Cricetulus griseus
gctggggagatggccaccgggacagaccaagtggtgggatttggcctcgtcgctgttagcctgatcatcttcacctactacaccacttgggtgattcttttgcccttcattgacagccagcatgtcatccacaaatacttcctgcctcgtgcctacgctgtcctcatcccgctggccacgggcctcctgctgctcctatttgtgggattgtttatcacctatgtgatgctgaagagccgaagactgaccaagaaggctcagtgagggtccagcagggatgaggataccagccttctccatatctcctccagggaagggaccaagtgtcacatcctgatacagtcagcctgactgctgcagtcctctttaggaggtggggctgcttacagctcaactctgacaaactggagccctctcctctcttattcatccttctggaagccaagaggaacgtgggttgggaaacctctccctcatggcttcgggctcagggcctgaacattgctggtcctgtccacctacagtcaaagctctctgccactcccacaaggttctgctctcttgcctgtttttcctcctgtcatgtgctgatagatgctgcaggctccccgtttgtgtgcagcctcccctcgccgtacaacctatctcttcacatggcagctcttttgagtctgacactgtccagactccatgaggacttctgcacccagaaagccctagtcccagctggcctgtgtttgggaaaacttacaaataaatgttgatcatgttg

SEQ ID NO: 702 - DNA, 2010 bp, Cricetulus griseus
  misc_feature (176)..(196): n is a, c, g, or t
atgggtcgcatgcacgctcccgggttaagcccgcggcaccaagtcgggttgtggggctgagctggggcgcggggcaagagaagaagggtgcgggctgcaggcggggcgacggcggggctgcttgaggctctgcgcgggccgccagttgactcattatgcttctgttctcagaaagnnnnnnnnnnnnnnnnnnnnnccctaccgccgtagcgtccccactgtgagtaaagcgagggcagcgtggggcggtgtagggatcagtgtacgtgaggttggggtccgaggtacaaggtctgtcgcgttcttttatgctgaggcccgatttatgttccctgtacagtggctgaagctggcgtctgacgacgtgaaggaacaaatttacaaactggccaagaaaggcctgactccctctcagataggtgagtgttgtcagtgttcagcttctgcgcccgtgtgactggaaagacaaatgtgtctagtccttacgttgaaaatgcgtgtccctgcttcacggctaaacgaggagcatctgggatcgagtcacatctagctgtgaattgacttaaactgctgtcattgtgtcacatggcaaataagttatgtgtgaatatggttcgtaggcctaggataactggttataggaggaaaacatccgcgataaggccatgattttactgacagatagggaggggggctaaaagaatctgaaaatggactcagccaatcaaataatttgaggtttaaaaggaataacatgcagttttaaagattggtataaataaacattaagctggttcctttggtcagctttgttctagcagactcagtgtgatcatggtgttccaacattcgcattttccacgagaagggcttcttccatgttgggtagacttgcaagcacttaagttggctatttgcaggaaactggaagagttgggctttactacatgctcgtttattaagttacatgtttttttcaggtgtgatcctaagggactcacatggtgtggcccaggtccgttttgtgactggtaataaaatcttaagaatccttaagtctaagggccttgcccctgatctccctgaggatctctaccatttgattaagaaagctgttgctgtcagaaagcatcttgagaggaacagaaaggtaaggtgaggaaacaaacttgttgtgtaggcgatgcttgtacctgactcttaggacactaggaactgcatttaagtttaagttctttggctctagatactaactagtcagcactgtcgtttccttgcaatgggtagtttgatcttcagtgtcctaaacatgatacccagttggttccaaatgttgggtgttcttttgtagccttgtcaccattcctaaagaccttattctagaacctcaaattgcctatatgggtttggtaatgtgtgcctgtaatttcagcaaggctggtggttctctgagttgaggtcagcctcgtctagccaagttataatataaccagggctgtatacactattttaaaggctttgaggacttaaccatagaagatactgagttacttacttggtggctttcttaattctctttctaggataaggatgctaagttccgcctgattctgatagagagcagaattcaccggctggctcgttactataagactaagcgggtcctcccacccaattggaaatagtaagtataagccattttgttggggagaatcaaccagatggtaaataacatggtagtgggtgtagtaaaccacttcgtggcagatattttgcctttctgggtcctatgcttaagtgccatttcagctcatctctgtcatagtagtggcaaaagcttacaaacttttaaattctcagtttggtgatgcattgtatgcagttaggtatttagctgtttggggatagctccagtagcaaagaaagttgttgcagtagatatcaaaaactaatactaattccccagtttccttcagtgagtcatccacagcctctgctctggtggcataa

SEQ ID NO: 703 - DNA, 3332 bp, Cricetulus griseus
  misc_feature (28)..(44): n is a, c, g, or t
  misc_feature (519)..(536): n is a, c, g, or t
acaaattacagtaaaccgtagccatgannnnnnnnnnnnnnnnncaggccggccaatgtggcaaccagatcggtgctaaggtaagaatttttaaattggtaccggatacgcgtgaggatgagaaatccaggttaatcatgattaatgttaccgggtgttagcattctccctccgccggctttggcccctcaaagttctgcgcgaacaattataacccatatttgtagcttgcgttctgagaaatatttatcttggcacattttccgaaagccattaaaagagacgcctgggtttaggggacggagagtctgaggagggactggagtgcttatctaaaagaggggatttctatcggttcgagaacgggagaggagagatgcggaaacgatccgagacaaagccgaagcgaggttttccccttgcgccacccccacccagcctggagggccttagcggagcaggactgtcgggggcaggggagaggttgggcggcagctgcagaggtctccgggccgcatnnnnnnnnnnnnnnnnnntggagaccctcgcgatctcgccatcccctggctcgcttttaggtggatggtgatgattccgtgcggggggctccttttacttcattgccgttaagaaatcttagggtgtgacctgatgggaaagtgagaggtttgtgtgtctataagaggtccctcgggactatgtgtgtgtttgggggaaagctatttagggaagagaaggtagcaaaagcaaaaaaaaaaaaatctgaggccatggttttctctttttttttggcgcgcaattacaatgtagcgggggatgggtggagaggaggaagtcggccgctagattgtagccgaagggtgggaccctttgggggcggggctagcgcccctggcgcgcagggacaatgcagcccttgctggcgggggcgcgctggcgccgcccctcgtgccaggcccgcccacgctgctcccgcctttgtgggctgctggaagagcggcccgccaccgcagtcacgtggaacgcgtaaggggtgggcgactgcagtggccgcaccttcctaccccatccctcttttggtgctggcctggaggggcggtgcccaccctgaagcgcttggctgggtgctgagccgagggggcggatggcagttcagtcagcccatatgggtgcttgcaaccctcagccccttgaactgtccatcacttgaccagggccacaaaggtggcgaccttccccggttggaggttcggtcgtggaggctcggcaggcagataacggaattgcagtatcaacccgtccgcctcgtttgagcacgtctagagttgaaatgcgggcggggaggcatcccttaggacttcagccattgaggcctggctcattgctcattgctctgtctagttctgggaggtgatcagcgatgaacacggcatcgaccccaccggcacctaccatggagacagcgacctgcagctggaccgaatctctgtgtactacaatgaagccacaggtgagggagggaatccagcttcttttttctctgttaacacttatccctggtctttttaaaccctgcgcccttctgttgagacagggtctcgttatgcagccatggctgccctggaacttacctccctaatgctgcttttaaaggcggccgcaccacgccctgttttcccacgttaagtgcctgttaacccggttgctggggtctcacccttttccattagacacccaccataagtgggccaaagattagctctgctgccgccgggtggcagggcctggaatggcagactaggggtttgtggtatttcccaccccagatttcatcctcgctgcagagggctctgacagttctacttgaatccctgtaggtggcaagtatgtccctcgggccatattggtggatctagaacccgggaccatggactccgttcgatcaggtccttttggccagatcttcagaccagacaactttgttttcggtgagttacatggaatgaattcctttgtacccaagggcatgattccagaggtgaaaggtgaagattagtaatgataatgacgtaatttttttcccttctcaccacattccaggtcagtctggggcaggcaacaactgggctaagggtcactacacggagggagctgagctggttgactctgtcctggacgtggtgcggaaggaggcagagagctgtgactgcctgcagggcttccagctgacccactcgctgggtggaggtaccggttctggtatgggcaccctgctcatcagcaagatccgagaagaatatcccgaccgaatcatgaataccttcagtgtggtaccctcacccaaagtgtctgacaccgtggtggagccctacaatgccaccctgtctgtccatcagctggtggagaacaccgacgagacctactgcatcgacaacgaggccctgtacgacatctgcttccgcactctcaagctcaccacgccgacctatggggacctcaaccacctcgtctcggccaccatgagcggggtcaccacctgcctccgcttcccaggccagctcaatgccgacctccgcaagttggcggtcaacatggtccccttcccacgtctccacttcttcatgcctggctttgcccctctcaccagccgtgggagccagcagtatcgggccctcactgtgcctgaactcacccagcaggtcttcgatgccaagaatatgatggcagcctgtgacccccgccacggccgatacctcaccgtggctgccgtcttccgtgggcggatgtccatgaaggaggtggacgagcagatgctgaacgtgcagaacaagaacagcagctactttgtagagtggatccccaacaacgtcaagaccgccgtctgcgacatcccaccacgcggcctcaagatggccgtcaccttcattggcaacagcacggccatccaggagctcttcaagcgcatctccgagcagttcacggccatgttccgccggaaggccttcctgcactggtacaccggcgagggcatggacgagatggagttcactgaagccgagagcaacatgaacgacctcgtctccgagtaccagcagtaccaggatgccaccgcggaagaggaagaggatttcggggaggaggcagaagaagaggcctaagccagagagagagagccctgcgtcttctcctcaggctacttagttccctcagctttcttcagctgcccgtttttctccttcagagttttcttttctgctgcctctgtcctgtttttttatttttttccatgggggggtaaacagtgcctggcacatagtaaggcgctcaataaa

SEQ ID NO: 704 - DNA, 1255 bp, Cricetulus griseus
  misc_feature (512)..(548): n is a, c, g, or t
cgagcggctgtcgcctgaggaggcctgaggaggcctgaggaggccttcgcggccgacttgggacggtcccccgaacctgagcgtctctccagggggccgcacggaggcgtcggggagccgagacgccctggggctccgagccacgccgggtgacgcagttccgcttccggcgccgggcgcagacctgtcatggcctccccgggggcgagtcgcggcgcctccgccgccaccgccgccgccgcgtctccccggccgccgcagggccgctcctcgcgacgggacaagtactcggttctgctgcccacctacaacgagcgcgagaacctgccgctcatcgtgtggctgctggtgaagagcttctccgagagttcaatcaactatgaaattataatcatagatgatggaagcccagatgggacaagagaagttgccgaacaactggaaaagatctatgggccagacagaattctcctaagaccacgggagaaaaagctcggccttggaactgcctnnnnnnnnnnnnnnnnnnnnnnnnnnnnnnnnnnnnncatcattatggatgctgatctctcacaccatcccaaatttattcctgaatttatcaggaaacaaaaggagggtaattttgacattgtctctggaactcgctacaaaggaaatgggggtgtttatggctgggatttgaaaagaaagataatcagccgtggggccaattttataactcagattttgctgagaccaggagcgtcggacttaacaggaagcttcagattataccgaaaagaagttctgcaaaaattaatagaaaaatgtgtctccaaaggctatgtctttcagatggagatgattgttcgagcaagacagttgaattacaccattggtgaggttccaatatcatttgtggatcgagtttatggtgaatccaagttgggaggaaatgaaatagtctctttcctgaaaggattattgactctctttgctactacataaaagaaattactcatttatacttaccatgttcatttcaattaaaagtaagagaagcctgggtcactgatttttgtcaatgctctcttgatacatgagccaaaggtaaggtgcatttcatactggtcatttctctggagaaactccattttatatttcaaactaaaatttaaagttaggtttaataagcaatgttctcgatttttatgtacattgtgctgtattaagacctataaataaatgtatataggtttgtgtaaaaaaaaaa

SEQ ID NO: 705 - DNA, 299 bp, Cricetulus griseus
gttaaactagaacctttaagacgtgctttaaacggtaatcagctatgggttaccggtatcagatctgagcaatctgtaaacaggcacgatatgaccaacctggagtgggatgagcaaaatcagttgatcaagtttcatccgatctttttctggtcgcttgatgaggtgaaggaatacattaaaaagaataatattgtttacaacacattacatgataagggtttccctagtataggatgtgctccttgtacaagagcagtaacacagggcgaggatttagagctggcgttggttgtgga

SEQ ID NO: 706 - DNA, 1632 bp, Mesocricetus auratus
  misc_feature (1294)..(1309): n is a, c, g, or t
  misc_feature (1601)..(1632): n is a, c, g, or t
ctaaaggggctttgaccacctataaaacttagcaatgggaaataaaaaagccctcaaggaggaagccttcttggggagcgcagaagaaggagctgattttgaccaagccatgttccctgtgatggagaccttcgaaatcaatgatcccatgcccaagaagagaaactgggggagcttttgcacggcagtcatggccatccacctgatcctgctcacggcaggcaccaccctgctgacgcttaaagttctcagtctgcagaagtggatcctggagaagtacttagacaatgagacactggctgctgaggacaggtcattcttctcactacagctggcaagtcccgaaacgcacctggtacccagaacaccggggctgcaagccctgcaggtccagctcacgcaggtccgcaccagccaggagcaactgcttcagcaggtggacaacctcactcggaacccagagctgttccggattaagggtgaacgaggctccccaggtatcccaggtctccagggcccgccaggcatcaagggagaggcaggcctccagggacccatgggtgcaccaagggagccaggagcaactggtgccccaggacctcaaggagagaagggcagcaaaggtgacaagggtctcattggccccaagggggaacatggcacaaagggagacaaaggagacctaggccttccagggagcaaaggggacatgggcatgaagggagtcacaggggtcatggggccccctggagcacagggaaataaaggcgatcctgggaaaccaggcctaccaggtttggctgggtctcctggagtcaaaggtgatcaaggacaacctggattgcagggtgttccaggcactcctggtgcagcaggaccttcaggtgccaagggtgagccaggccaccctggtcctcctgggccaacaggaccccaagggatctccgggagtccaggagccgcaggtttgaaaggaagcaagggggacacaggaattcaaggacagaaaggcacaaaaggagaatcaggagtcccaggccttgcaggtagaaagggagacactggaaaccctgggctggcaggccccaaaggagaaccaggacgacccggcctgaagggagaccctggaatgaaagggtcttctggccagcaaggacaaaagggagagaagggtgagaaaggccaatccttcaaagaggtccggattgtgggtggcaccaatcgaggccgagctgaaattttctataacaacgcctgggggacaatttgtgatgacaactgggataataacgannnnnnnnnnnnnnnncgcatgctcggttactccagtggcaaaggattcacctttggtggtggctctgggaacatctggctggatgacgtgaactgtcaggggacagaggacagtttgtggaactgcaggaagaacaactggggctctcacaattgcaaccataacgaagacgcaggcgtggagtgccgctgacgtgggtgccgcagatgtcaccctgcgtccccaggtgtctttgggctccaccctcatggagatctgtgggctccatcactctgttgaggggagattaataaagccctgctggggnnnnnnnnnnnnnnnnnnnnnnnnnnnnnnnn

SEQ ID NO: 707 - DNA, 864 bp, Cricetulus griseus
ctgtcacgtgcacggtcagtgtccgtgaggtgtttactttcatgtgacctttcaatatctgttgttttctgtctagattttgggggttcctctttagcccatggactttgatgtatgtctcaaagtttaatttccccctgaacctttgccttttatccttctctcctattctctgcatctctccaggggacatggaactttctttcctcacattcctttcttggcttttgaaaataatcttctgaagccaggcacagtggcatacgatgtattcccagctgtttgggaggttgaggcaggattgcttaatgccagcctgggcagcataacaagacctgattctcacacacacacacacaaaaatacagcccagtggggtgacacacacctataacttcagcactggggcgcctaaaacaggacgaacaaaagttcaaggccatccttggctacacagtaagatttctgagagggagaggtggggggggggagaaaggtgtgggagagagggggagggaggggcaggccagtgcaggcttttaatcctagcacttgggaggcaggcacattctgagttcaaggacagcctggtttacagagagaattgcaggacagccaaggctacatagagaaatcctgtcttgaaaaaccaaaagaaattaaaccttctggtgtgtagatgccaatcctgttgttggtggctgccctctcccataatacttggcatccagagcaggtgtttttcctcagacccccactctgaccttggttcattagttggcttgccctctgaccttagattctttttcctttcttacagtactccccttccctaaataagcaattttggcagctggcaaaaac

SEQ ID NO: 708 - DNA, 5571 bp, Cricetulus griseus
  misc_feature (905)..(923): n is a, c, g, or t
  misc_feature (1500)..(1560): n is a, c, g, or t
  misc_feature (3463)..(3480): n is a, c, g, or t
atggtggataagaatatttacatcattcaaggagaaattaacattgttgttggcgccatcaaacgaaatgcacgatggagcacccatataccactggatgaagaacgggatcctctgctgcacagtttcagtcatctaaaggaggtcttaaacagtgtaacagaactctcagagattgagccaaatgtattccttcgtccatttctggaagttattcgctctgaagataccactggtcctatcactggcctggcgctcacctctgtcaacaaattcctgtcctatgcactcatagatccaactcatgagggcacagcagagggcatggagaacatggcagatgctgtcactcatgcccgttttgtgggtacagaccctgccagcgatgaagttgtcctgatgaaaatcctccaggttcttcgaactctgttgctaaccccagtgggtacccacttaacaaatgaatctgtgtgtgagattatgcagtcttgcttccggatttgctttgaaatgaggcttagtgagttattgagaaaatccgcagagcacactctcgtagacatggtgcagctgctcttcacaaggttacctcagtttaaagaagaacccaagagctatgtgggaaccaacatgaagaagctgaaaatgagagcgggaggcatgagcgactcatccaagtggaaaaagcagaaaagatcccctcggcccccgcgtcacatgaccagagtcacaccaggttcagagctgcccgccccaaatggagccaccttatcctgtaacctcaccagtggcatgcctttcattgatgtgccctcatccatctcctctgcaagttcagaagctgcctcagcagtggtcagtccctgtacagacagtggcctggaattatcctcccagaccacctnnnnnnnnnnnnnnnnnnncctagagcaagctggttccccaagggaaagcacaaccacagagtctgggagcaatgagataggagtttccgatcagcttgaccctcaggaagggtcccatgtggaaaaggcccagtcagcatcggtggaatctatccctgaagtgttggaggagtgcacatctcctcctgaccactctgcctctgtccatgacatggattatgtcaatccccggggtgttcgcttcacacagtcctcccagaaggaaggcacagctttggttccttatggtcttccttgcatccgagagctcttccgcttccttatctccctcacaaacccacatgaccgccacaactcagagggtatgatccacatgggactgcatttgctgacagtggctctggagtcagcccctgtagcccagtgccagaccctcttgggtctcatcaaggatgagatgtgtcgccacttattccagctactcagtgtagagcgattgaacctgtatgctgcttccctacgggtatgcttcttactctttgagagcatgcgggagcacctcaagttccaattagagatgtacatgaaaaaactnnnnnnnnnnnnnnnnnnnnnnnnnnnnnnnnnnnnnnnnnnnnnnnnnnnnnnnnnnnnngaggccatcgtgcagctctggcgcatccccagctttgtcactgagctctatatcaactacgattgtgactactactgcgccaacctctttgaagacctcactaagctgctgtccaagaatgcctttcctgtgtctggtcaactttataccacacacctactgtcccttgatgccctgttgacggttattgacagcactgaggctcactgtcaagccaaagtcctcaacactcttacccagcaagagaagaaggagacatccagacccagctacgaggcagtggatagcacccaagaagcaaacagtactgaaagagccaccattgatgggaaagccacaggcatggcctcagatgccctaggccttcatcttcaaagtggaggatggctgtcagcagagcatgggaagccaagatgcaatgatgtggaagaagctggtgactctggggctgacaaaaagtttaccaggaagccgcctcgattttcctgtcttctgccagatccacgggaactaattgaaattaagaacaaaaagaagctgctgatcactggcacagagcagttcaatcagaaacccaagaagggcatccagtttctacaggaaaaaggtctccttaccatcccaatggataacacagaggtggcccagtggctccgagagaaccctcggctagacaagaaaatgattggggagtttgtgagtgaccgaaaaaacattgacctgttggagagttttgtgagcaccttcagctttcagggtctacggcttgatgaagctctccgactctacctggaagccttccgtttgcccggggaagcaccagttattcacaggttgctggaggcattcacagagcactggaggagttgtaatggctccccatttgccaatagcgatgcctgctttgccctggcctatgctgtcatcatgcttaatactgaccagcataaccacaatgtccgcaaacagaatgtacccatgactctggaggagtttcgaaaaaacctaaaaggtgtgaatggaggcaaggactttgagcaagacatcctggaggacatgtaccatgccatcaagaatgaggaaatcgtgatgcccgaggaacagacaggcctggttcgtgagaactatgtgtggagtgtgctgctgcaccgaggtgccacccctgagggtatattccttcgtgtacctcctggcagctatgatcttgacctcttcactatgacctggggcccaactattgctgctctctcttatgtctttgataaaagcattgaggagaccatcatccagaaagccatctcaggtttcaggaagtgtgccatgatctctgcccactatggcctcagcgatgtgtttgacaatctcatcatctctttgtgcaagttcacagctctcagtagtgagtctattgagaaccttcccactgtgtttggaagcaaccctaaagctcacattgcagccaagacagtattccacttggcccatcgtcatggtgacatccttcgggagggctggaagaatatcatggaggctgtgctgcaactcttccgtgctcaacttttaccccaggctatggtggaggtagaagattttgtggatcccaatggtaagatctctctacagcgggaggagatgccatcaaaccgaggagagtcatcggtacttagctttgtgagctggctgacgttgagtggtcctgagcagtctagtgtacggggcccctccacagagaaccaggaggccaagagagtggccttggactgtatcaagcaatgtgacccagaaaaaatgatcacagaaagcaagttccttcagctggaatcattgcaggagctcatgaaggctttggtctcagtgacagcagatgaagagacatacgatgaagaggatgctgctttctgtnnnnnnnnnnnnnnnnnnattgtgttggagaacagggaccgtgtgggctgtgtatggcagactgttagagaccatctataccacttatgtgttcaggcacaagatttctgctttctcgtggagcgggcagtggtggggctgctacgcctcgcgattcggctactccggagagaagagatcagtggccaggtcctgctgtccctgcgcatcttgttactgatgaagcccagcgtgctgtccagggtcagccaccaggttgcctacgggctccatgaactcctcaagaccaatgcagccaacatccactcgggtgacgactgggccaccctcttcacattgctggagtgtattggctcaggcgtgaagcctccagatgctctacaggccacagccagggctgatgctcctgatgctggagcgcagtcagacagtgagctcccatcctaccatcaaaatgatgtcagcctagaccgagggtacacttccgactcagaagtctacactgaccatggcaggcctggcaagatacaccgatctgccacagatgctgatatggtcaacagtggttggttagtggtggggaaggatgacattgataactccaaagcaggagcagggctcagcaggcccagcccttcacccctggttaatcaatatagcctcacagtgggcctggacctgggaccacatgacactaagtccctgctcaagtgtgtggaatcactgtccttcattgttcgtgatgctgctcacatcacccctgacaactttgaactctgtgtcaagactctccgcatctttgtagaggccagtctgaatggtgggtgcaaatcccaggataaacgtggcaagagtcacaaatatgacagcaaagggaaccgcttcaagaaaaaaccgaaggagggctcagtgcttcggcggccccgaacctccagccagcatggcactcggggtggacatagtgatgaggaagaggatgaaggagtgcctgccagctaccatacggtgtctttacaggtcagtcaggacttgctggacctgatgcacaccctgcacactcgggcagcctctatctacagctcatgggcagaggagcagcgccacctggagtcaggtggccgaaagattgaagctgactcacgcaccctctgggcccactgctggtgccctttattgcaaggcatcgcctgcttgtgctgtgatgcccggcgccaagtgcggatgcaggccctgacgtatctgcagcgagcacttctggtgcatgacctacaaaagctagatgccctggaatgggagtcctgctttaacaaggtgctgtttcctctactgaccaagctgttagaaaatatcagccctgcagatgtgggtgggatggaggagacccggatgagggcttccacgctgctctcaaaggtcttcctgcagcacctgtcccctctgctgtcgctgtccacctttgctgccctgtggctcaccatcctggacttcatggacaagtacatgcatgcaggctccagtgatttgctgtcagaagcaatccctgagtccctgaaaaacatgctcctggtgatggacacggccgagatcttccacagtgcagatgcgagaggaggcagcccctctgccctctgggagatcacctgggagcgcattgattgctttttgccacacttacgtgacgagctcttcaagcagactgtcatccaggaccccatgcccacggaacctcacagccaaaacgctctggcctccacccacctgacccctgctgctggtgaccccggccatctaccttccccagagataccctcagaagtgggggcctgtgactcagagaagcctgagggtacccgagccaccagcagcagctctccgggatcaccagtggcctccagccccagtagactgagtccttccccagagggacctcccccattggcccagcccccactaatcctgcagcccctgacttccccgctgcaggtgggcgtgccacccatggctctgcccattatcctcaaccctgcactcatcgaggccacctctccggtgcctctcttgtccactccccgtcctacagaccctattcccacctctgaagtcaactaa

SEQ ID NO: 709 - DNA, 695 bp, Cricetulus griseus
aggcacggtaggcgccgcttcccagcatgcaaggcgctatgcaaatgaggctacttattgtaatctagtgggataattcgcggcatatttgtaaagaaaagcatgttttcgctaaaacatgtgagaagaatgttgaaaatactagaattggtcgtgtgttattaaaaaaagtagtcaccacaagtgtaaaaatttctgttttttgacctttatatatgtgtccgaaaatagatacttctgcccggatgatctccagtggtctggggtgcaggcttcaaacctgtagctgtttagcgacagagtggttcaattccacctttcgggcgggagtatctatcccattttgcttcctgcaaccggtactatgtgacaaactcctctaaatccccctctattcgtatttattcctcttcgtcattacttttttccggtcccggaaggatccaacacatctcagaagtgtatttaaatttgtcttctacagttctagcgtattcctgtctgtctctgatgtctctccttcaacgatttatttattattcatccagtcatttgctcgattatgtatttaatcatgcgtgcagctcttagtcatatatttgttcatttgttcactctggctcagtcctgtctctctatttgagctgtatggatggggacacagttgtgatcacacccttagccctggtctcatg

SEQ ID NO: 710 - DNA, 654 bp, Cricetulus griseus
  misc_feature (339)..(351): n is a, c, g, or t
  misc_feature (353)..(385): n is a, c, g, or t
  misc_feature (453)..(475): n is a, c, g, or t
  misc_feature (481)..(512): n is a, c, g, or t
ggtagggactggagagagggctcagcagttaagagcactgactgttcttccagaggacctgggttcaactctcggtacccacatggcagctcacaactgtctgtaactctagttgcaggggatcttgttaccttcaccccaatgcatataaaataaaggtcaaataaattatattaagaaaattaaaaggttaagtgcagggtttggtgcctggtgcttagaaagtgctgagtattcttaagtaggattctgtatacagtttatagttcttgagatttgtaaaaaaaatttttggcccagatgatttccagtggtctggggtgcaggcttcaaaagctnnnnnnnnnnnnngnnnnnnnnnnnnnnnnnnnnnnnnnnnnnnnnnacaggcggatctctgtgagtttgaggccagcctggtctccagagcgagtgccaggataggctccaaannnnnnnnnnnnnnnnnnnnnnngggggnnnnnnnnnnnnnnnnnnnnnnnnnnnnnnnngttggagagatagaaggcttggtggttaagagtctcactgctcctccagagaacctgagtttgattcatgacctcatgacagacagctcacaaccacctgtaactctagcttcaggaatctaattccttctggcctctgcag

SEQ ID NO: 711 - DNA, 1764 bp, Cricetulus griseus
  misc_feature (474)..(500): n is a, c, g, or t
  misc_feature (801)..(821): n is a, c, g, or t
  misc_feature (1230)..(1280): n is a, c, g, or t
  misc_feature (1421)..(1474): n is a, c, g, or t
tctagaaacttatgtaagcttatataaatcaaaccaacgttgaaatcagaacaaaacaaatattagtatgaaaggggagcaatatatgttgctaattgacaatgaaagtatcggggtctttcaaggataaacttaagcatgcaatatgaaatttaagtaattcattcagagcaccagaggtttccaaattctgatcagcacaggctgcatagtggaatactgtctctaaaaacaataccaacaacaggaataaaaagtaaattacttaacaaaagtctctaataaatagcaatcaataaatactaataaacaatggaaaatcatgatactctgactcccaaagttgtcaaattgggagattgtattccaattttcattcacattatgaagtcccaaatgaacaagtgatataaaatctaatagcagcacatgaaacaaaatgtgtaagatagaggtacagaaaacaataactannnnnnnnnnnnnnnnnnnnnnnnnnntagacctactaaatatttgaaaaacataaggacattcacggaaaagtaagaccatctacacgggaacaggaccaacctacagcagtgatgcttcatcaagtggagaatgccaactgggagacaggaatgataagaacaagccacagagaaaacctgcacaagaaaagtatagtgactgaggcgaccatttcaacagaatggctcaatgatagcttgattaagcaaatgaagtaaccctaagcttaaagatttgtgaattgaaactattcggtctgaaaagcaggagaaaataagaacggtnnnnnnnnnnnnnnnnnnnnngctaggacactaaagagcaaatcaatgtcacatgattggtccagtgagaaaaaaaggggagggtggtaggagaaaaacaatgaaattcaagatctaacactgaagtacttcttaataatcaagaataaaccaaggacatattttcttggccttcacagcattttactagcaattgtgactaggaggctcagttaaaggggaaagagcacaaaacaagagacatttaaaatcaaaggaaaaataaactctgtttatggatgaaatgatctgatataaagattcctagagactggatgatcttcaaacctgtagctgtttatagacagtggttcaattccacctttcggacgggagtatctatcccattttagccgggagttggtagcacacgcctttaatgccagcactnnnnnnnnnnnnnnnnnnnnnnnnnnnnnnnnnnnnnnnnnnnnnnnnnnncagagccagtgccaggataggctccaaagctacatagagaaaccctatctcgaaaaaccaaaaacaacaacaaaaaagattcctagaaatttcaaaaaaagtgtttggatctgatgaacaaaattcagcaaagtggcagtnnnnnnnnnnnnnnnnnnnnnnnnnnnnnnnnnnnnnnnnnnnnnnnnnnnnnncaatacaaaaaacatatgtaacagcaatggttgatctaaaattgaaattaatgaaacacttccattcatcatagcatctgtgactaagataaaaatgaatgcagtgaagaatgtacaatatttgtacattgaaaactacaaaacatagttgcaagtgactaagaaacaaggaagaaaacataatattttatggaatataagggtcaatactgttaaatattatcagctatctaaatatttagtgcaatcactgtcaaaattcccataagttttatctaagaaatggatga

SEQ ID NO: 712 - DNA, 532 bp, Cricetulus griseus
  misc_feature (481)..(517): n is a, c, g, or t
catcttgcccaaaaacaactaactggaggaaaggtttacttgggttatagttccaggctacagtggaccatttcaggaagtcaaggctggaacaagtcacatcccatgcatagctaagaagagagcagggaaagcacccatgcttcccacctgctgctacttagccatctttctcctctcctatacagttcaggacccctgcccagggaatggtgtcacccacaatgggctaggtcttcctacagcaattaatgattgagacaatccctcccacacaccagacatactggccaactgaataaagacaactactcaattaaaactcttctgttgggctcagatgatcctcagtggtctggggtgcaagcttcaaacctgtagctgtttagtgacagagtggttcaattccacctttcaggcatgagtatctatcccattttgcttcgtaaaaccagtatttcctggctttggtggtgcacannnnnnnnnnnnnnnnnnnnnnnnnnnnnnnnnnnnngatctctgtgaattc

SEQ ID NO: 713 - DNA, 302 bp, Mesocricetus auratus
tccatggagcacttccgctggggcaagccggtgggcaagaagcgacgcccagtgaaggtgtaccccaatgtcgccgagaacgagtcagcagaggcctttctctagagttctcgagggagctggcgggcgagcggcccgacggcttggagccggtcctggagccggacgccgagaaggaagagggccctatcgggtggagcgcttccgctggggcagcccgcccaaggacaagcgctacggcggcttcatgacctccgagaagagccagacgcccctggtgacgctcttcaaaaacgccatca

SEQ ID NO: 714 - DNA, 218 bp, Mesocricetus auratus
gcgatgagccctggcgggcgggccctacatacatccagaggggccatggccatgctggcgcggaaattcccgcgtacccggctacccgtgggagccagtgccctctgtgtggtggtcctctgttggctctatgtcttccctgtctaccggctgcccaacgagaaggagatcgtgcaaggagtgctggcgcagcgcacagcttggaggaggaaccagac

SEQ ID NO: 715 - DNA, 3910 bp, Mesocricetus auratus
  misc_feature (1783)..(1851): n is a, c, g, or t
  misc_feature (3885)..(3910): n is a, c, g, or t
aagtgaggcggtgatgcgggcgctggcggcctgggctgcgcgagagcggagacacaggctcaagatggcagattcccactgaggctgagggggccgagctcgcgcgccgcttcccttctccgttgccatgaaccgcggacaccccggccccgatggcccccgtgtacgaaggtatggcctcacatgtgcaagttttctcccctcacacccttcaatcaagtgccttctgtagtgtgaagaaactaaaagtagagccaagttccaactgggacatgactgggtacggctcccacagcaaagtgtacagccagagcaagaacataccaccttctcagccagcctccacaaccgtcagcacctccttgccaatccccaacccaagcctaccttacgagcagaccatcatcttcccaggaagtactggacacatagttgtaacatcagcaagtagcacttctgtcaccgggcaagtcctcggtggaccacataacctaatgcgtcgaagcactgtgagcctccttgacacctaccaaaaatgtggactcaagcgcaagagtgaggagattgagaacacaagcagcgtgcagatcattgaagagcatccacccatgattcagaataatgccagcggggccactgtagccactgccaccacgtctactgccacctccaaaaacagtggctccaacagtgagggtgactatcagctggtgcagcatgaggtgctgtgctccatgaccaacacctatgaggttttagagtttttgggcagagggacatttgggcaagtggtcaagtgctggaaacggggcaccaatgaaattgtggccattaagatcctaaagaaccacccttcctatgcccggcaaggccagattgaagtgagcatcctagcccggctgagcacagagagtgctgatgactacaactttgttcgggcctatgagtgcttccaacacaagaatcacacgtgcttagtctttgagatgttggagcagaacctctatgactttctgaaacagaacaagtttagccccttgcccctcaagtacattcgcccagtcctccagcaggtagctacagccctgatgaaactcaaaagcctgggtcttatccatgctgacctcaaaccagaaaacatcatgctggtagatccatccagacagccataccgagtgaaggtcattgactttggctcagccagtcacgtgtccaaagccgtctgctccacctacttgcaatctagatactacagggcccccgagatcatccttggtttgccattctgtgaagcaattgacatgtggtcccttggttgcgtcattgctgaattgttcctgggctggccgttatatccaggagcttctgaatatgatcagattcggtatatctcacaaacacagggtttgccagctgaatatttattaagtgcagggacaaagacaactagatttttcaaccgtgacacagactctccgtatcctttgtggaggctaaagacaccagatgatcatgaagcagagacggggattaaatcaaaagaagcaagaaagtacattttcaactgtttggatgatatggcccaggtgaacatgacaacagatttggaagggagtgacatgttggtagagaaggcagaccgacgggaattcattgacctattaaagaagatgctgaccatagatgctgataagaggatcactcccattgaaactctgaaccacccgtttgtcacaatgacacacttgcttgattttccccatagtacacatgtcaagtcttnnnnnnnnnnnnnnnnnnnnnnnnnnnnnnnnnnnnnnnnnnnnnnnnnnnnnnnnnnnnnnnnnnnnnccttcatcacacacgtggcccccagcacatctactaacttgaccatgacatttaacaaccagctgaccactgtccacaaccagccctcagcggcatccatggccgcggtggcccagcggagcatgcccctgcagacaggaacagcccagatttgtgcccggccggaccccttccagcaagctctcatcgtgtgtccccctggcttccaaggcctgcaggcctctccctccaagcatgctggctactcagtgcggatggaaaatgctgttcccatcgtcactcaagctccaggagctcagcctcttcagatccaaccaggtctgcttgctcagcaggcctggccaggtggggcccaacagatcctgcttcctccagcctggcagcagctgactggcgtggccacccacacatcggtgcagcatgcagctgtgatccctgagaccatggcaggcactcagcaactggccgactggaggaacacacatgctcatggaagccattacaatcccatcatgcagcagcctacactcttgactggacatgtgacccttccagcagcccagcccttaaatgtgggtgtagcccatgtgatgaggcagcagccaaccagcaccacctcttccaggaagagtaagcagcaccagccttctatgagaaatgtctccacctgtgaggtgacctcttcacagtctaccagctcccctcagcgatccaagcgtgtcaaggaaaacactcccccacggtgtgccatggtgcacagcagcccagcctgcagcacctcagtcacctgcgggtggggtgacgtggcctccagcaccaccagagagcggcagcggcagacgattgtcatccccgacacccccagccccacagtcagcgtcatcaccatcagcagtgacacggatgaggaggaagagcagaagcacgcccccaccagcacggtctccaagcaaaggaaaaatgtcatcagctgtgtcacagtccacgactctccctactccgactcctccagcaacaccagcccctactcggtgcagcagcgaacaggacacaacggcaccaacaccttggacactaagggggctctagaaaatcactgtaccggcaacccccgcaccatcatcgtacccccactgaagacccaggccagtgaagtgttggtagaatgtgacagcctagggccagcagtcagtactggtcaccattcgtcctccttcaagtgcaagtcctccagcaccgtgacctccaccagtggccactcttcagggagctcctcaggagccatcgcctatcggcaacaacgtccaggcccccatttccagcagcagcagcccctcaatctcagccaggctcagccgcacatggctacagaccgaactgggagtcaccgtcggcagcaggcctacatcactcctaccatggcccaggctccatacaccttcccgcacaacagccccagccacggcacggtacacccccacctggctgcagctgcccaccttcccacccagcctcacctctacacctacacagcgcccacagccctaggctccacaggcaccgtagcccacctggtggcatcccaaggctcagcacgccacaccgtgcagcacactgcctacccggccagcatcgtccaccaagtccctgtgagcatggggccccgggtcctaccctcgcccaccatccaccccagtcagtaccccgcccagtttgcccatcagacgtacatcagcgcctcgccagcctccaccgtctacactggatacccactgagtcctgccaaggtcaaccaatacccttacatataaacactggaggggccgcagggagcggggtggaggagcccccagcagacctggggagccgggtttctctactgcaggtgcctgccgcactcaaacaatgcaaatggggcagggagggacagctgggacacagatgaaacttgaactagaagtgggaggacttagagcagagaagagagcattttagaaggaagggattcaggagtgggaaatctatgctttttannnnnnnnnnnnnnnnnnnnnnnnnn

SEQ ID NO: 716 - DNA, 1097 bp, Mesocricetus auratus
ctaaacggactgctaaaatagcacctgtaatcccgagcatttacaaggcggctgacctcctacaagggagtaaatatgaaaaagcgcctgtcgggagggctcgaggtctgttcaaatgctagttcagtggatagaagcaatttcctcagaaagctgaaggcaccaaaggttatatttgttagcatttcagtgtttgccaaattcagcacagattccctgtttcccagcgcttcaaacttcagaagcccctagctacgactctgggtagtgtcactactgatgcccactacgcccccctcgctagtactgttaaagctgccggcctcgagttagaggagctgctatcctgaggtcaggatctttggtttagctgtgtgcacacgcttgctcagagactctggtctcgccatcgtgcctgagtgggagatgaccagtagctctgtaccctggggtgaaagttgctgtgacagtgagaaaggcggacacaccgcttcacctggtccccaccctttggtggtggatgttaagggaacctttttgggagctgagcttatggtaggaccacaataaagctttaagaacccgtacagtagaattccgaccctaatcatgaagctttactggaaagaactaggactgccactacccactgtctgcaccgaactcagacagcagcggccggctctggagcagggtgagccttgggttcctccgccttcagaaccttcaataaatcaaagacaggtgtctttgcttgctaccccgccccagtctacaccacgtggggcccgagctccgagcgaaaggggggccgagaaactctctgtggagggaacctttgcgaccacacctctctcggttattcttaaattccccgcaaccactgaaccgtaggaccaccgacagaaaagcgccgtttgtgcaaccccgcctcttccgctacaagcttggttcgcttcgatcccgccccttcctccgtgccgaccccgccttttcccgccgcggactctcaatgtccggggtcctgacgcttttctgagccgccctacatcgaagttcccgcacgtgggaggcccggccggatcttgagcgcgatg

SEQ ID NO: 717 - DNA, 4171 bp, Mesocricetus auratus
  misc_feature (1226)..(1247): n is a, c, g, or t
  misc_feature (1646)..(1661): n is a, c, g, or t
  misc_feature (4142)..(4171): n is a, c, g, or t
gggaggcccggccggatcttgagcgcgatgccccgcgcgccccgttgccgggccgtgcgcgctctgctgcgcagtcaataccgtcaggtgtggccgctggcaaccttcgtgcggcgcctgggacctgagggcaggcagcttgtacaacccggggacccaaaggtcttccgcacgttggtggcccggtgcctagtgtgtgtgccctgggactcacaacctccacctgctgacctttccttccaccaggtgtcatcactgaaggagctggtggccagggtcgtgcagagactctgcgagcgcggcgagaggaacgtgctgacttttggcttcgcgctgcttaacggagcccaaggcggtcctcccatgacattcacaaccagcgtgcgcagctacctgcccaactcggtgactgagtctctgcgcgtcagtggtgcttggatgcttctgctgaaccgagtgggcgacgacttgctggtctacctgctggcccgctgtgcgctttacctgctggtgcccccgagctgtgcctaccaggtgtgcggctcacccctgtaccaaatctgtgccaccgcagaaacctggccttctgtgtcccgcatctacaggcccacacgacccgtgggcagaaattttactcatcttggatccacacaccgggtcaggaacagcagtcaccaggaagcatggaaacccccgcccttgccatctcgagaggcgaagcggagtctaagcatcaccaatagaagtgtgcctccatctaagaaggccaggtgcgatctggccccgagactggagaagggaccctacaggcaggcagttccaaccccatcagacaaaacatgggtgccaaatcctgccaagtcccatgcagtgcctattagtagaactaccaaggaagatttgtcttccggggtgaaggcacctggcctgagtcgctctgggtcagtgtgctataaacacaagcccagttccacatccctgcagtcaccactgtgccaaaatgcctttcagctcagaccatatactgagaccaaacgcttcctctactctagggaaggtggccgagagaggctgaacccctcgttcctactcaacaacctgcagcccagcttgactggggccaggagactggtagagatactctttctaggcatgagacctaggacatcgggaccactctgtgggagacgccgcctatcgaagcgctactggcagatgcggccccnnnnnnnnnnnnnnnnnnnnnnccatgcgcggtgcccgtatgtccggctcctcaggtcccattgcaggtttcggaccgcagcccaccaggtggcaggtgccttgaacaccaccagcccacagcgcctcatgaatttgctccgtctacacagcagtccctggcaggtatatggctttcttcaggcctgtgtcggaaagctggtgcctccgggtctctggggttcccggcacaaccagcgacgcttctttaagaacgtgaagcggttcatctccttggggaagtatgacaagctgtcgctgcaggagctgacgtggaagatgaaagttcaagactgcaggtggcttcgcagcagcccagggaacaactgtgtcccggctgcagagcaccgcacgagggaaaggatcctggctgtgttcttgtnnnnnnnnnnnnnnnngtacgtggtagagctgcttcggtcattcttttacgtcacagagaccactttccagaagaaccggctcttcttctaccgaaagagcatgtggagaaggctgcagagcattggagtcaggcatcaccttgagagagtgcggctacaagaactgtctcaagaagaagtcaggcagcgccaggaggcctggccagccatgcccatctgcagactgcgtttcatccccaagcccagtggtcttcggcccattgtgaacatgagttatatgggcaccagagcctttgacaaagggaagcaggctcagcatttcacccagtgtctcaagactctgttcagcgtgctcaactatgaactgacaaaacatactaaccttctgggggcatctgtactgggcctgaatgatatctacaggacctggcggaccttcgtactgcgtgtgcgcactctggacccagcacccaggatgtactttgttaaggcagatgtgacaggggcatatgatgccatcccccaggacaagcttgtggaggttattgccaatatgatcagacacccagacaactcgtactgtatccaccaatatgcagtggtccaaagagatagacaaggccaaatccacaagtccttcaggagacaggtctccaccctctctgacctccagccacacatgggccagttcttgaagcatcttcaggactcagacaccagtgcgctgaggaactccgttgtcattgagcagagcttatctctgaacgaggccagcagcagcctgttcgacttcttcctgcgctttgtgcgtaacagtgtcgtgaagatcggtggcaggtgctatgtccagtgccagggcatcccccagggctccagcctgtccaccctgctctgcagtctgtgtttcggggacatggagaacaagctgtttgctgaagtgcagcaggatgggctgcttttgcgttttgttgatgactttctgttggtgacacctcacctggtccaggcggaagccttcctcagggccctcgtccgtggcatccctgagtacggctgcatgataaacttgcagaagacagtggtaaacttccctgtggacgctggtaccctggatggcacagctccacaccagctgcctgctcactgcctgtttccctggtgtggcttactgctggacactcagactctggaggtgctctgtgactacactggttatgcccggacctcaattaaggccagcctcaccttccagcgcaccttcaaggcggggaggaacatgcgacagaagctcttagctgttttgcggttgaagtgtcacagtctgtttctagacttgcagatgaatagccttcagacagtctgtatcaatgtgtacaagatcttcctgcttcaggcctacaggttccatgcgtgtgcgcttcagcttccctttgaccaacatgttagaaagaaccccgcattctttctgagcatcatctccaacatagcatcctgctgctactccatcctgaaggtcaagaatgcaggaatgacactaaaggccaagggtgcctctggctcatttcctcctgaagctgcacgttggctctgctaccaagccttcctgctcaagctggctggtcattctgtcacctacaagtgtctcctgggacctctcaggacagcacaaaaacagctgtgccggaagctcccaagggcaacaatggccatccttgagactgccgctgacccagccctaagcacagactttcagaccattttggactaacccctccccttcagctggatgaacatgggcattgtagcctcaccactcctggatgcatgccacaagagggactgacctgttgtgaggccagtttgccctccaaaacatgtgccagggctgtagtatgggggttgtccctgtgccgtgtttcctgtggtggacttgatttctttcctgatgcctccggggaagcagctcccacccctctcggtggcagggatccactagccagtaacaccagacagaggagaagatgcctgggcactgggacagtgtgcacggatctgagatgcccggccctgtgtctcttcacatctaacccatggagcctttcccaacggggtcacagtagaaagtgtttttggggggcttacagttttaaaggtttagaatctatgatcatcacggtagggagcatggcagcaaggaggcaggcatgtgtcttctcacgcctaaccgaggagccttttccaatgggccagtggggtcagaatgtctcagagatgaaaacaggactttgaactgatgtgggggtttgaagatgtgtagtccccacagacccgtgtgttcaaatgcttggcctattggaatgtcactattaggaggtgtggcttgttggaggaagtgtgtctgtcactgtgaggacagggctttcaggtctcatatatgctcaaactgtgcccaatacacagacgacttctgctgctatgaataaagatgtagaactnnnnnnnnnnnnnnnnnnnnnnnnnnnnnn

SEQ ID NO: 718 - DNA, 3371 bp, Cricetulus griseus
  misc_feature (44)..(68): n is a, c, g, or t
  misc_feature (326)..(340): n is a, c, g, or t
  misc_feature (1179)..(1195): n is a, c, g, or t
  misc_feature (3353)..(3371): n is a, c, g, or t
ggcacgagatctagcctcctgagatagggtagatacattctagnnnnnnnnnnnnnnnnnnnnnnnnntgagaatgctaaggttgccactctcacttcctctcacccttagcccagaacattttttaatatagttctttcagaggggcacccgcccagagagaagaggccggtgccccagggactctgccttgccaacggctacagttagttcatcatgctttctcacggcctcggctggttgcagaaaatgccaggatgatgccttctttctgcctggctgggacactgatgatggcattgttcctctcctccctgagacctgannnnnnnnnnnnnnntgtggaggtggattctaacactagctaccaatgcatggatcggaatctcaacaaaatccctgacaacatcccttcttcagtcaagcatttagatctgagcttcaaccccctgaagaccttaggaagccatagcttctttaattttccagaactcaagttgctggatttatccaggtgtgaaattgagacaattgaagacaaggcatatcagggtctacaccagctcacaaccttgatactgacaggaaaccctatccagaatttatccaagggaactttttctggactagcaaatttacagaatctggtggctgtggagataaaactggcttctctggacagcctacctattggacaccttgtaactttaaagaaactcaatgtggctcacaatcttatacattccttcaagcttcctgaatatttttccaatctgaccaacctagaacacttagacctttctaataactatatccaaacaatttactacacagatttacagactttacgtgaaaatccccagctcaatctttctttagagctgtctttgaacccaattgactttattcaacctggagcctttcaaggaattaggctccatgaactgactctaagaagtaattttaatagcacaaatgtaatgaaaacttgcattcataacctggatggtttacaagtgcatcggctgatcttgggagaatttaaaaatgaaaggaatgtagaaaggtttgaccgctatgtcatagaaggactgtgtaaggtgaccattgaggagttccggttcacatatgcaaatgagttttcagaagatatcactgattttgattgcttggcaaatnnnnnnnnnnnnnnnnnggcaaatgtgtatctaaagcgcctagaagacattcctaaatatttcaaatggcaaaccttagcagtcattagatgtgaacttaagcaatttccacctctggaactcccctttcttaaaaggttgatttttattaccaacaaaggggctaccagttttccagaagtgaatctgccaagccttacatttctagatctcagtggaaatggtatgagctttaggggttgctgttcttacactgatttgggagcaagaagcctgaaacacttagacctcagcttcaatggtgtcatcagcatgagtgaaaacttcatgggtttagaacagctggaatacttggattttcagcattccactttaaaaaaggccactgaattttcaatgttcttaccccttgaaaaactgctctatcttgacatctcttatactaacaccaaaattgatttcaatggcatattttttggcttgaccagtctcaacaccttaaaaatggctggcaattctttcaaagacaacatcctttcaaatgtctttacaaatactacaaacttgacattcctggatatttctaaatgccagttacaacaagtatcttggggggtgtttgacactctccatagacttgagttactaaatatgagtcacaacaatctactgcttttggatctattccattataaacagctgcattccctcaagactcttgattgcagtttcaatcacatagagacctccaaaggaataatgcaacatttcccaaagagtctagccttcttaaatcttactaataatccctttgcctgtatatgtgaacatcagaacttcctgcagtgggtcaaggaccagaggttgttcttagtgaagactgaacaaatgacatgtgcaacacctgtagagatgaaggactccctggtgctggactttaggaatgccacctgttatgtgcagaagaccatcatcagtgtgtcggtgatcagtgtgcttgtggtatccactatagcatttctggtctacaaattctatttccatctgatacttattgctggatgtaaaaagtacagcagaggagaaagcatctatgatgcctttgtcatctactccagccaggatgaggactgggtgagaaatgagttggtaaagaatttagaagaaggagtgcccccctttcagctgtgcctccactacagagactttattcctggtgtggccatcgctgccaacatcatccaggaaggcttccacaagagccggaaggttattgttgtggtgtctagacactttattcagagtcgctggtgtatctttgaatatgagattgctcagacatggcagtttctgagcagccactctggcattatcttcattgtcctggagaaggtggagaagtccctgctgaagcaacaagtggagctgtatcgacttctcagcaggaacacctacctagagtgggaggacaatgctctggggaggcacatcttctggagaaggctcaaaaaagctctgttggatggaagagcctggaatccagagggagcaacagaggcagaaaacaatcaacaagaaacaacaacttccatctgaggaggacaaaacatcttggtctaatactcattctgtttacaagtattaaatattacagctcaccatggattatgttgtagacaagggtcccatggtgcacaaggtaccaaaaggctggtaaactaatggaccttacaaagcagaaagtgataatattatgctgaaactccatgccttccaggggtgctctttcaccaactcaggcaaagaatcataaccaagaaagtcagctcctactgtatcaagctgaaggaaaagaggctaagccccagtgagaccaaaaaggagcattagttatcccttggccttttgagtctatataatatatcatgtactatgtttcaactaccaactgaactgaatgtttatttactttcccttcttactacttaatgcaatttaaattccactggctctctttgtgtgtttgattccaagttcatgttccattatatgtcattttcttttttacctatttctttaggaaacctgattaatacatgctcatggacatcctggccaatacttagtatgctgtatttattaaataaaaattcctaatatacttttatttttatnnnnnnnnnnnnnnnnnnn

SEQ ID NO: 719 - DNA, 2713 bp, Cricetulus griseus
caggaaccggatgtgtcctgttgctccaacgaaacgctggggagatggtgagctcggggtgcagtacctctgtgatttggggataccaggggtccggctcggagtttcctttggagttgggggttgggctttccgaatccggattgcttacccgaccactttgcggacaggtgacacggggctccgcgcggtttgctagtcagcccccgtgtacagctgttgaatgaacgaggagcttggagtgtaaactggcggcgcggaccctccattagtgcactccacgtagagtcgcctcaccagctgagccttcctttttctccaggccaccgggacagaccaagtggtgggatttggcctcgtcgctgttagcctgatcatcttcacctactacaccacttgggtgattcttttggtatgtgtcctcccccaccccacccaagcccacgtttatcctgccccggatctcttaacaaaccgactgctaacacaacttaagcagcatctacatgccaggcactgtgctggatgcttggcctgccctaatttcgcgaaatccactgtgattgttgatggtgtctgcattttatagatgaggctgagatccgggcagaatggtaaggctcagactcaactgctgcactgtaaggttagccagctcctcctgggtgtagcaatcgcccgtggattttactaataccttgaggctttctcttttttagttgtgaaaaggtctgttagttattgcttagaagtgcattgtgtttgaaagcaggtatcttgcagtacttggtatcctttagagagaaaagttaggagggctggagagatagctagcacagcggttaagagcagttggctgctcctccagaggatcagggttcaagtcccagcaccaacatggccacttccaggagatccagcaaaagtgcctggcacaccagtgctgcttaagtgttaggagttgcattggagattcagggcttggatgaggtacatcttgctcgyatgtgcacataatcaaaaaatgaaataatttaaaaagacctagaatttctggattcagaagacaggaaggtgggtctttgtgagcccagcctggtctacatagcagttccaggtgagccagggctatgtcatgagaccctgcctcagaaaacaaaaggaatggtttccagtactcagaaggctaaggcagtagttcaaggctacctgacatagtcaaaatacatacccacacccagaggcacggaggttgggaacctcgtaggttgtttgctaagctcgggatgccgtcgggcaggtcctcaggacccagtgctgttaatgggtttagccccttggacagaggaggtgggatggcctctcattgggctgggtaaaatgagcagtactcaccagagctcttgccctcggtgccagcccttcattgacagccagcatgtcatccacaaatacttcctgcctcgtgcctacgctgtcctcatcccgctggccacgggcctcctgctgctcctatttgtgggtaagtctcccattctccaaaagtctcctgactggggggcaagatgtctggaaggccagccactctcaccccaagtgtgcgtccatactttggcacttggtgttcatctgcctagaagctccttggccccaactctccctggggttttcctgttcctccttaaaggctacaagcagaaagccctctgcttgttccagtgcttcaggtttgtggggcagtaagggatgtctgtctcccttttcctgtctcagcttcatcttcacacctccgccacctacccttttgtcaccctgtcacctctcttattgcttctgtgggttggggactgtgtcttcatcattacagcattctaagctctagcgcaggagtgacgctgaacgagtgctaggagcgttcgggtgactggacgatgggacggtgctggtaggaaggagggtggatatgtgaggacatggatgggcagatcactcaccatgaaatctgaagcactcagcaaagcatgtgacagatgatgagtggccatggggcttaaggaatgactgtgaaggtgcctacagggtgtttgtttgggagccctggccatccagccttcattctggtccttttgctctgtgtgttctaggattgtttatcacctatgtgatgctgaagagccgaagactgaccaagaaggctcagtgagggtccagcagggatgaggataccagccttctccatatctcctccagggaagggaccaagtgtcacatcctgatacagtcagcctgactgctgcagtcctctttaggaggtggggctgcttacagctcaactctgacaaactggagccctctcctctcttattcatccttctggaagccaagaggaacgtgggttgggaaacctctccctcatggcttcgggctcagggcctgaacattgctggtcctgtccacctacagtcaaagctctctgccactcccacaaggttctgctctcttgcctgtttttcctcctgtcatgtgctgatagatgctgcaggctccccgtttgtgtgcagcctcccctcgccgtacaacctatctcttcacatggcagctcttttgagtctgacactgtccagactccatgaggacttctgcacccagaaagccctagtcccagctggcctgtgtttgggaaaacttacaaataaatgttgatcatgttggt

SEQ ID NO: 720 - DNA, 447 bp, Mesocricetus auratus
ccttctcagccaagctcaagagtctcctcatggcctagcactctgttctgcattttaagcccatgatgttttcccacggatggcaagagggaggctagagctgtgccttctcaccccaggttcaatcagtacatcgtgtgtctggcccatcatgtcatagcgatgtggttcattaggtgtcgactgcccttccggaaggatttcgtcccttatatcactaaggttagccaggggccatggatggtgttggacatgggcaatggacagggtcatggatggaagtgggaactggctgaggttctatggcacccaggagctggctctgctgagctggcttactggactcaacctgaggtaggcatggggagagaacttctgatttgctctcccatggtccccctcacagcttatgtctctaccccaactccagggcctgcgatccaatgt

SEQ ID NO: 721 - DNA, 464 bp, Cricetulus griseus
aagattatccaccaggatggttattcactggaagaatgcctcgagttcatagccatcatctatggcaacactctgcagtccatcctggccatcgttcgggctatgacgacactcaacattcagtatggagattcggcccgacaggatgatgcccggaagctgatgcacatggcggataccatcgaggaaggcacaatgcctaaggagatgtctgacatcattcagcgcttgtggaaagactcgggtatccaagcttgttttgagcgagcctccgagtaccagctcaacgactctgctggctactatcttctagacctagagcgcctggtgactccaggatatgtgcccactgagcaggacgtgctgcgctctcgtgtcaaaactgctggcatcatcgagacgcagttctccttcaaggatctcaacttcagaatgttcgatgtgggcgggcagcgctcggagcc

SEQ ID NO: 722 - DNA, 972 bp, Cricetulus griseus
cgcgacatgggtcacccgccgctgctgctgctgctcgcctgggccccagcctccccgggcctgcggtgcatgcagtgtgaggacagccagaactgcctggtgaaggagtgtgccctgggccaggatctttgcaggaccactgtgcttcatgaatgggaagatgataacgaactggagttggagatgagagactgcgcccattatgagaaaaccaacaggaccatgagctatcgcgtgaactcaaagatcatcagcctggccgaggtcgtgtgtgccacagacgtctgcaacaggccgaggcctggagcccgaggggttgcctttccccggggccgttacctggagtgcatgtcctgcagctccttggatcagagctgtgagaggggccgggagcagagcctgcaatgccgctatcccggagaacagtgtgttgaggtggtcaccctacggagcacggaaaggagtctgaaggatgagaactacaccagaggctgtggcagtcttcccgggtgcccgggcatagccggtttccatggcaaccacaccttccacttcctgagatgctgcaactccacccactgcaatggcggcccagttctaaatcttcgggacttaccaccgaatggcgtccagtgttacagctgcgagggcaacagcacccacgggtgttcctccaaagagacttccctcgttgactgccggggaccgatggatcagtgcctggaggccaccggcttggatgtgctggcaaaccggagtcacaccgtgagaggctgctcgacggcttcctggtgcccaggctcccatgtggcagatgccttcctcctgagccaccccaacatctcgtgctgtgatggcagcggctgtaatggacccagaagcggcgcccccaggacagaccctgctcgtctaggcctcatcgtctccctgctcctgaccgtcagactgtggggaggcactctcctctggacc

SEQ ID NO: 723 - DNA, 845 bp, Mesocricetus auratus
  misc_feature (828)..(845): n is a, c, g, or t
gattaccacataagctgcagaggaaggagtccagagacagagcaagatgagctccgagacaggtcctgtcgttgttgaccccactctgaggagaagaattgaaccccacgagtttgatgccttcttcgaccagggggaacttcggaaagagacctgcctgctctatgagatcagatggggcggcaggcacaacatctggaggcacacgggccagaacaccagcagacacgtggagatcaacttcatagaaaagttcacttcagagagatacttttacccatctacccggtgctccatcgtctggttcctgtcctggagtccctgtggggaatgctccaaggccatcacagaatttttgagtggacaccccaacgtgactctgtttatttatgcagcacgactttatcaccacacggatcagcgaaaccggcaaggactcagggacctcatcagcagaggtgtgaccatccggatcatgactgagcaagagtactgttactgctggaggaattttgtcaactacccaccttcaaatgaagtttactggccaaggtacccaaatctgtggatgaggctgtatgcgctggaactgtactgcatccatctaggacttccgccctgtttaaagataaaaagaagacaccaatacccacttacgtttttcagacttaatcttcagagttgccattaccaaaggataccgccccacatcctttgggctacagggtttatatgacctctgggagttggagatgaataaaatgactcccttgtatgtgtactgtttggacagcaagcaatggtgacctattaaaaagtatcaagctnnnnnnnnnnnnnnnnnn

SEQ ID NO: 724 - DNA, 1344 bp, Cricetulus griseus
agcagtggtaacaacgcggagtacgcggtggggtctgtctacttggtgacaaactgtacgctgttgggggttacgatggacagacctacctgaacatagtggaggcttatgacccccaaacaaatgaatggacccaggttgctccactgtgcctaggaagagctggagcatgtgttgtgactgtgaagatataactttatgctttgttctctaaatgacgatgccctccctctccctttattaatataagggcagtcctatcagcggattcatttttaatgaacattcgatgccacattcctaggcacaaagtgcctcatttcaaaatgaagatgttgaaacaatggaggaaggaatggatggaccaggatgagatacttcgttcgtctcttagtaaactaaagctgcagctagcagactgaaactatacctgtctgaaatgcaatatgaaggcaagtgcactgctctacaacaatccagcactaactgggaacttcatctatttttagtcaggcacattttattcacattgtccagagttattacagtacaaacatataaacttccaaaatactactttataagtttgtcataatgagcttccatactttttattatttaatcaaaccactattttaatgacatactaaagactatgctgtctggttttttcaggtacaatgatattaaatatgctctagttgtgaattttattactaaaattggtttaacccaagaataaagaaaaacacttaaagcattaaaaaaataagactgaccaaataaaaacttgataggatctctaggtcctacttaaatagccattccatcccatctagatccacggagaactgtgtgataggctatgaccgaaattaaagcgggatgctttacattaagatatgcaagtttatgtagagaaaacaaatactatagactctataatgttcttccacctaactagtatttaattatgtggatttcttttatactacaaaagattgtttgagtttgtctttttgatactgatgcaattgtttggctgttcttacattctgtctgctgctgcctgttgtctcacattttgacccattgtgttaagaacctattgtgctcctttgtaatcaaaaaattgggggggatgctaattgaatatttgaaaaataagtataaagtgtttgttactcaaaattttatacatttgtaaattctaattacatatgtgaatggtaatagtctcagtgaattgattattggttgcaaatgcccctggcagtaatattggatgaaactttctttaaggcagaagacattaccttaatataaaatagatgtaaactaaaa

SEQ ID NO: 725 - DNA, 562 bp, Mesocricetus auratus
  misc_feature (422)..(454): n is a, c, g, or t
cagtttggcatcatgcctctcgctgcctttgtcctgggcaaggtcttccatttgaaaccaattgaggcactggccatcctcatctgtggctgctctcccggggggaacctgtccaacctcttcaccctggccatgaagggggacatgaacctcagcattgtgatgaccacctgctctacctttgctgccttgggcatgatgcctctcctcttgtacatctacacaaaagggatctatgacggagacctcaaggacaaggtgccctatggaggcattatgatatcactggtcatggttctcattccttgtagcttagggatcttcctcaagaccaaaaggccacagtatgttccctacatcatcaagggaggaatgaccatcactttcttactcagtgtggcggtcacagtcctgtctatcannnnnnnnnnnnnnnnnnnnnnnnnnnnnnnnncaccgccattactggccacctcctccctaatgcctttctctggcttcctactgggctacgctctctctgctctcttccagctcaatccaaggtgcagacgcaccatca

SEQ ID NO: 726 - DNA, 4089 bp, Cricetulus griseus
  misc_feature (597)..(630): n is a, c, g, or t
  misc_feature (2233)..(2250): n is a, c, g, or t
  misc_feature (2959)..(2976): n is a, c, g, or t
ggtggacggcaagcagaaccgcggtcggtagccccgcgcgacgacaacatgagcgcgcgccacccggccctcggcctcctcctgctgctgctgtgccctgcgcaggtgttttcacaatcctgtgtttggtatggagagtgtggaattgcatttggagataagaagtacaactgtaaatattctggtccaccaaaaccattaccaaaggacggaaatgacttgctacaggaactctgcccaggattcttcttcggcaatgttagtctctgctgtgacgttcaacagcttcagactctgaaaagcaacctacagctgcccatgcaatttctgtccagatgtccatcatgtttttataacctaatgaccctgttttgtgagctaacatgtagccctcaccagagtcagtttctgaatgtgacagcaactgaagattatgttgatcctaagacacaggagaataaaacaaatgtaaaggaattagagtattatattggacaaagctttgcgaatgaaatgtacaatgcctgccgtgatgtggaggcccctgcaagtaatgagaaggccttaggaatcctgtgtggaaaggatgctagtgcnnnnnnnnnnnnnnnnnnnnnnnnnnnnnnnnnnaataaaaacaatggacaggcgccatttaccatcactcccattttttcagatcttccgatccttgggatggaacccatgagaaatgccaccaaaggctgcaacgagtctgtagatgaggtcacagggccatgtagctgccaggactgctccattgtctgtggccccaagccccagcctccaccaactcccgtgccctggaggatcttgggcttggatgccatgtatgtcatcatgtgggtcacatacatggcatttctgtttatattttttggaggacttttggcagtgtggtgccacagaaggcggtattttgtgtctgagtacacgcccattgacagcaatatagccttttcttcaaacaccagtgacaaaggggaggcctcatgctgtgacccactaggtgcagcatttgatgactgtctgagacgcatgtttacaaagtggggagctttctgtgtccgaaaccccacctgtgtcattttcttctcattggtcttcatcactgcatgttcttccgggctggtgtttgtccgggtcaccaccaaccctgtggagctctggtcagcccctcacagtcgggcccgcttggagaaggagtactttgataagcactttgggcctttctttcgcatggagcaacttattatccaggcccctaacaccagtgagcacatctatgagccgtacccctcagggtccgatgtgtcctttgggcctccactgaacaaagagattctccaccaggtgcttgacttacagattgctattgaaagtattactacatcttacaacaataagaccgtgacacttcaagacatctgtgtggcccctctctctccgtacaacaagaactgcaccattataagtgtcttaaattacttccagaacagccattctgtgctggaccaccaagtaggcgatgacttctatgtatatgccgattaccacacacactttctgtactgtgtacgggctcccacctctctgaatgacaccagtttgctccatgatccttgcctgggtacatttggaggacctgtgttcccatggcttgtgctgggtggctatgatgatcagaactataataatgccactgcgcttgtgatcaccttccctgtcagtaattactataacgacacagagaagctccagagggcccaggcctgggagaaagagtttattgattttgtgaaaagctacaagaatcccaatctgaccatttccttcattgctgagagaagcattgaagatgaactcaatcgggaaagtaacagtgacgtcttcactattgccatcagctacgccatcatgtttctgtatatttcccttgccttgggacacataaagagctgtagcagacttctggtggattctaaaatctcactgggcattgcggggatcctgatagtactgagctcagtggcctgctccctgggcgtcttcagctacatggggatgccactgaccctcattgtcatcgaagtcatcccattcttggtgctggctgtcggggtggataacatcttcattctagtgcagacctaccagagagacgagcgtcttcaggaggagacactggatcagcaactgggcaggatccttnnnnnnnnnnnnnnnnnnatgttcctttcttccttctctgagacctcggcatttttctttggggcactgtcctcgatgccggctgtccacaccttctctctgtttgcgggcttggcggtcctcattgacttcctccttcagatcacctgctttgtgagcctcttggggttagatattaagaggcaagagaaaaatcggctggacatcctgtgctgtgtgggaggcactgacaatggaagaggcatccaggcctctgagagctacctgtttcgcttcttcaaaaactcctttgccccctttctgctgaaggactggctgcgaccaattgtgatagccgtatttgtgggtgttctgtcattcagtattgcagtcatgaacaaagtggaaatcggattggatcagtctctttcaatgccaaatgattcttatgtgattgactatttcaaatcgctcggtcagtacctgcactcgggtccacctgtgtacttcgttctggaggaaggtcatgactacactacccacaaggggcagaacatggtgtgcggcggcatgggctgtgacaatgactccctggtgcagcagatatttaacgcagctgagctggacaactatacccgcataggctttgccccctcatcctggatcgatgactactttgactgggtcgcgccgcagtcctcctgctgtagactctacaacgccactcaccagttttgcaatgcttctnnnnnnnnnnnnnnnnnnatccgctgcagacctctgactccagagggcaaacagaggccacaggggaaagagttcatgaaatttctgcccatgttcctttccgataaccccaaccccaaatgtggcaaagggggacatgctgcttacagttcagctgttaatatcatcggagatgacacttacgttggggccacttacttcatgacctaccacacggtccttaagacctctgctgactatatcgatgctatgaaaaaagcccaacttgtagccaggaacatcacagaaaccatgaattctaaggggagtaactaccgagtgttcccatacagtgtgttctacgtcttctacgaacagtacctgaccatcattgatgacaccatctttaacctcagtgtgtctctgggctccatatttctggtgaccttggtggttctgggctgtgaactgtggtctgcagtcatcatgtgtatcaccatagccatgatcctggtcaacatgttcggggttatgtggctgtgggacatcagtctgaatgctgtgtccttagtcaacctggtgatgagctgtggcatttctgtggagttctgcagccatataacaagagcattcaccatgagtaccaaaggaagccgagtaagccgagcagaagaggcgctggcccacatgggtagttctgtattcagcggaatcacacttacaaaatttggagggattgtggtgttggcctttgctaaatctcaaatttttgagatattttactttaggatgtacttagccattgtcttactcggagccactcacggactgatatttcttcctgtcttactcagctacgtaggaccatcggtaaataaagctaaaagacacaccactcaagagcgatacaaagggaccgagcgagaacggctcctcaatttttagccttgtagcaggctttggtgactttgtctatggagaggtcaagtttctgcaggaaagctgtactgtcaaggccatgctggattctggttgttcctaggcattaggctgtgtcacagctgtggcaaatgcagctccacccacgtttttaaactcaggaatgcacctgtgacttgtgaagcagtattatggaaactgaaggtgacagaa

SEQ ID NO: 727 - DNA, 249 bp, Mesocricetus auratus
ttctcagaagtattttcctagaagtacttcaaccctttctgtgactacacctacccatggtagagaccatcttaaattcccattttttccagccttcatcctagagccttccagacttgatcaaggagaaaagcccaaactgctggctcctatcacagcatctctcccctgtcttcctacagctacctgaagtccaagaagggccagtctgcctcccgtcttaaaaaactaatgatcaagagagagggg

SEQ ID NO: 728 - DNA, 14465 bp, Cricetulus griseus
  misc_feature (135)..(152): n is a, c, g, or t
  misc_feature (195)..(219): n is a, c, g, or t
  misc_feature (248)..(268): n is a, c, g, or t
  misc_feature (271)..(287): n is a, c, g, or t
  misc_feature (1549)..(1619): n is a, c, g, or t
  misc_feature (1745)..(1762): n is a, c, g, or t
  misc_feature (3769)..(3794): n is a, c, g, or t
  misc_feature (4999)..(5061): n is a, c, g, or t
  misc_feature (8288)..(8303): n is a, c, g, or t
  misc_feature (8306)..(8322): n is a, c, g, or t
  misc_feature (8367)..(8385): n is a, c, g, or t
  misc_feature (11044)..(11061): n is a, c, g, or t
  misc_feature (11751)..(11771): n is a, c, g, or t
  misc_feature (13500)..(13516): n is a, c, g, or t
tctccagggtctaaggaccccacttgacgcaatgaattttgtttcaggataagctagaagccagaagctgctaaagaaagttaccatctgttaaaaactgcagccaagatttgttgtttgtttgtttccgagaannnnnnnnnnnnnnnnnnccttgctgtccaggaactcagagatccacctgcctctgcttcnnnnnnnnnnnnnnnnnnnnnnnnngctgactacaggcaagcttgtttgtttannnnnnnnnnnnnnnnnnnnncannnnnnnnnnnnnnnnnatagctctggctgtcctggaacttgctctgtagaccaggctgtccatgaagtcacagagatctgcctgcctctgtctccctcctgagtgctgggatcaaaggtgtacaccatcacccagtccccactcccccccccacctcccagcacaggcaaggtttttaatgtatagactctgcataatattccagttcctttggccatatatacaaggatggaaaaaatacctgaaaataatggtttttattttggtcatggaattttaatacatttttctttattcatttcagtgtctttcaaatcctaacattttggctacagaattaaaaaaaataataactgaccttaaacttccatgtctgtgataagggtacatttgttattattggaggataaactgttacttcaccaaatgttacttgtaaatgtgctgttcaccatgcatctggctgcagtttctctaggccctttggcctattgattgttgtctgcttcttaagttagctcctaggacctctggacagcctcatctggagctgcggctgctgttgcccttcctctgtagctgtccatgttgcctctgcagtatttgctttccttgtccttgtttgtgctgttcattgctagttgtactccaatatgcaaatttttgaaaactttttcagtaacattatcctaattgttccttttcgtttataagtagtttactttctttacataattttcttaggactgatgcatttcaattggcttttttttgtgacagggtctcttgttgctcaggctagccttgagctcccagttctcctcaaatcctcaaactttatggtaaagaagacctaagtttatcatgggcagccatatatgctgattatcctttccttataatatataatattgttattcatgtagaaggagctctttaatgccattttgttaaacagccaactatttagcatattagctgttcatattttatagtttttaagagctctttttggggatcattatgaatttatagagaaaagtttggtttaactagttagccatagaaatggatagactattcagttggataggaagcagtatgttacttatgctgtcataattgcagtgtacaagaacccagcaaaatggtagtggtgttggggaggaaaagtgacaacattgactctttggtggacagcagagcatagctatattatttggtttttcgagatagggtttctcttgtagctttggagcctatcctggtactccctcnnnnnnnnnnnnnnnnnnnnnnnnnnnnnnnnnnnnnnnnnnnnnnnnnnnnnnnnnnnnnnnnnnnnnnngtgtgccaccaacgcctgacattaagttttctgacactgtcaggaattgtcacttctgcttctcagtttccttctctgaaaaatgaggagaaaggtatctaggctgcctcctcatttctgactagnnnnnnnnnnnnnnnnnngagacagggtctctctcatttggtagtcttggctggtgtggaaccaggcttatcttgaactcacagagatccatctgcttctacgccttgaatgccgggattaaaggatgtgcataatttatagactagttttaggaagggaaaaaaaaaagactatggtagaagaaattgtggaagtgttttattatacctgaaagtcctttgtggcaattttggcatggttaggcaaagtttaaacatcccagtcatcaaatagattacatcacgacattcctatggcttatcccggactcataaaagtattttatgattcacttaaagatttaatagtgatttggattacttgtgtgggaaaacacaaaatgaggctgtagtatcttacagtgtcagaaacaatactttaaaaacctactgggatcctgttagaggacccttaaagaggccccactgggcagagctagaatcagatgagccacgagagaaggaatgtggactattgcttttaagtatgaagtgagcccacatctctgctataaatgatataaatgaatgggggggtagtctaccttatggaagaactccaaaactttatgtagctcttgcaacttcatggagaaagtgaagtatggtatcctgaactgggatctagaatacaaagatgacatgtgcagaaagcattctaaagtccaagtgaagtttggagtttaaccaatgttaatttttaattttgacaagtgtaccatggaaataaaaaatattaacagttggggggagggagctaggagaatgagaaggggaaaagaggaggggtgtggaggacatgagggagcagaaaggttgagtcaggggaagaatagaagataacaagaatggagataccataatagagggagacattttaggattacagagaaatcaagaaactagggaaatgtctggagatctacaaagatgacactagctaacaatctaagcaacagaggagaggctaccttaaatgccctcccctgataatgagattgatgactgacttatatgccacccggcacccacaactaatcactgaactgaactggaatccagttgcagagaaagacaagtgatgaccaggctggtgaaacccacagaaacagctgacctgaacattggggagctcttggtccccagactgaatgctgagataacagcatgggactgatccagaccccagaaacatgggtttcagtgaggaaaccttggaaatctacgggacctcctgtagtagttcagtacttatccctagcataggtgtggagtttgggagcccattccacatagaggaatattacctgagccaagacacatgggggtgggcctaggccctatcccaatagactctgatgacaccctatttaaagcctcaccatccagggggagcaggaaggatatgtgataggtagggttttagttgggggtggtggtggtaagggaggatgggtgggtgtgggaactgggattgtcatgtaaaacaatcttgtttctaattcaaataaaatctacagaaaaaatagtaacagttgggaaaatgagtaagaagtagtcaggatctttctattctgagattaaagtttacccttttagaaaaggctggggatataacttagtggtagagtgcttgccttgcatgtccaggtccctaaattcaagccccagtactacagagatacatacatacatagaagatttaacagactgtgcttgcagacccagtttcattttagccagagatatagtgaaactctatctcagtatgttcctatcacccgcatggttagaaatagttgattttaaatataaaatctaagtgaacttgtagagaatatgaggaattaaaagtagaaggttgattttggttcaaagggatttccagttccccaagtggtacaagatgtttgcaagggggcacagtaaagaaactgtgctgacataaacacactatgatatgataactgtttttattgtagggannnnnnnnnnnnnnnnnnnnnnnnnnaagagaaagagtgatttaacaagtacttgtgatactgaaggagcctggaggctgtcatgggttttgatatgcaatcacaggtatatatcagtggagagccatatgtaccttctgccagaggtaagggtaaggaaaatgagtcattttggcagactgaaactggtttcccaagttcctgagaaattctggtgtttaactaccagaaattctatagtctggcttgagttcatttctgggtatacagactgccttttggagtttgggatttggagtttatttcctttggactgacagttgaaaatacaaatcacctcacttggttatcatctttggattttgactgctttttagatgaaacttgttcccatgaccatgcagacatcattatggtgtgtatgtgtatatgtaattatgatgctgtatatactcagttttgtagatttaattttaactatgtattttccaagatttaattttaactatgtattttccagtccacaagtaattattagactactttatggaccagataccaagataagtacacttgggataatggatgagtgagaatgctgtgggtctttgtttggaggttgttgatatctagggagagatgatgtactatctagggatgatgattgtgagagcatgtaaatcgtagaaccaatgacatgtctgtccttcaaggcaagtgaaagaaggaagcagtagactggtgcaatgggagctggaatacagtgttcacttggaggcagagcatcagctagtgctgaagcctcatagtgtgaagcgccagggaggaacagtgtctggagtgcagagaatgggcctttagaaaggaatagccagagactgaagaaatagcaaagtaagagcttaatcatgaaacttagcctgggcgttcccttgaaagtgatggaactcactgagaatactaaagctaggcagtgataaaaggagcctgctgtggtgtgggcaaatagatgggcaagtggtgagaagtcctggacctggtagtgtgttaaaagtgatagtaaaatacaagctgtttgtaattgctgcctgctgggaaaggaaaaagtcacttttttccccaatggagtgtcaatgggtatatcaactacactccacaaaatgaactccatgaaatttttatgggctttttgttttatttgttttgttagagagagagagagatagagatnnnnnnnnnnnnnnnnnnnnnnnnnnnnnnnnnnnnnnnnnnnnnnnnnnnnnnnnnnnnnnnaagaggcctttagagagacaattaattttgggtttgtggtgaggtagggaagatctgggaagagttggggaggagaaaatatgaccaaaatatattgtatgaaaacaagatattgtaaaacaggagattattgctagaatataacagttgaaatgctaggagttggagttggttgcttttataactgataatgaagttgggtgttcctacctcaggtaaaaaaaactccagcacagtaatccaagagtagccatttgtacagtgtccttgtttgtagttttaagagcaaaagaaattgttttgtagtagaaagttgtggtgttgctcagaaaccaaataaaggaattctgagttagaatctttttatttggcaacagcatgctgactgtgagagatgacaagctgcttttgactgtattgttttacttggtatccaccaatagcattggtggtactattctactgagatgtgccagcaccatgtcacattgggtaccataaactcactagccatacattgagaatctttgggaaaggctggtttagaagctgtgatgactattcttggttgtcaacttaactatatctgcaatgaactgtaacccagagatggagggcacacacatgatccggatcttgagactggttgacacgtcctttaatccagcccttgcttgaggctggagggtacacctttaatctggctacaccttctgctggaaggacaattgaggaaagaaggggtgtgtttgttcttggcctgttttccctcgtcttgtcagcacatccatttctttcactggtattggagtctacttctttgggattttatcatatacagaagaccagttgagatgctgagtctcctgggactggatccttggactttttattcacaggtaggcattgttggactgcagcccttaagtcattccaatatgggaatatatatattctaaaagttatatatgaatgaatatatatattcattctataagttctgtgactctaagagacctgactaatacagaaactttttaaacactttttagttttcattgtatgtatgttttgtatgtgcttgtgagtgcagatgctcatggctgcagaggtatggagtccctacagtatttaacattgttaaatttcttttcctgctttcaccactacttctgtcgttaactggcttgttgtgataggtggctgtcctagttagggtggctattgctgtggtgaaacaccatgactaaagcaacttggaggaaagggtttgtttgactcacaattttatgtaacagtccatcattataagcaatgagagtaggacctcacacagggcaggacctggcagaacccatggaggaatgctgcttactggcttgttccccatggcctgctcagcatgattacttatagaacccaggaccaccagctccagtatggccccacccacaatgggttgagtccccccacggtaaccactaattaagaaaatgccctacaagcttgcctatagcccaaccttatgaaggtattttttcatgtgacaaggtgacataaaattagtcagcacagtggccaagcctgtatctttgagactcccaggccccagctttgcctaactgtatttaatgtctgcctgttggagagaagtccagatgctttcaaatggtctactcagacttatttttagaaataaactattccaaagttcatctggtacttattctaagcaaggtcatgctcttcatgcatttgatagccttcaccctgttgtcagttcccttgtaaacattttctgcacccatatccccaggctgtttatttagagcaacctacttaatgctagtagaattagaggaccgcccaaatgggtgcattcatgtaacaggaaggtggtacattcagagaaaattaaaatacgttaaatttatgcagtgctgtgatttggaatgttttaaatgtactaggaaaaagaacttggagatctgttggttcctgcctggataaaatgagcctaagtaccaatgaaatcctgaaaataccgaattggtattactggaaagaagtgtttgttttttattacactactggacttggctatttgtatctaaaatcccatctgcaaatgttgccttagcacagtaaaacagtaaggtattgaaaaggttcaaaaaagtgcaagtcattgaatactgtgttatatttgctctaccccttggttaggtgtgaaggagtgagcataacaaatcctaagtgagtgagtcagttgtctgtttttctgttgtgtatttgttttgtgattcttgatttctttaaaagattttatttatttattgtatacaacattctgcttccatgtatatctgcacaccagaagagggcaccagatctcataatggatggttgtgagcccccatgtggttgctgggaattgaacttgggacctttggaagaacagtcagtgctcttaacttctgagccatttctccagccccgtgattcttgattttatcttctactttctgcagaaaatattttaaaactggaattagatggtttggctctttggctttccattccaattgagtacatttaaggctgtaaatttccctttaggtaatattgaatctttatgctgttatctttagttatcatcatcattgttattttaccttttacaatagtatttactttagtggacatgaccaggctgagctgggctatgtgggacagggaggggaggggagagaggaaccaactgcagcacccaggaggccaaagggacaagagggaaaggggtgggtaaccaaaatgtctggtttgtataggaaaaagctctggaggaagggtggggaatgacagccataccttggaacagttagggactgaggatgctggaagaacctgttggccatatctagctttaatatgttaaataggcacctcagctgtttgtcctggatttgaaatttaacaaaaagatagtagttttcttaggtcattagtgttatatgtgaccaggaggctggagcaccacaatatcacaatacaaataatctggtttagccaggcttccatatgaggttgatgtttgactagaaaagggtttgcaagccctgtgtgttacctcctggcttgtgattttggttcttcagagtttcccccttaagccttaactgcttgttgtgttcaagaattcaggacttttagccaggcttggtggnnnnnnnnnnnnnnnntcnnnnnnnnnnnnnnnnnaggccaacctggtctacagagcaagttccaagacagcctcgcaannnnnnnnnnnnnnnnnnncctggaaaaacaacaacaacaacaacaaaaacaaaataaaagaatgggcaggctttgaggtttccagtgctgacatactgtccagtgtctcagttgatgtcttgttgcctacaaaatgtaagaactctcagctcctccagcaccacgctgccatgtctcgccatgatgacaatgaactggacctctgaaactataattgagccaccccaattaaatgttttccttatatatataaaaaaaaagaattctgaacttttcttttgttcccttcccttctaccacaccctaattgtaatccattttaatttcctggtcacagtcctgtctctccttccattgtaccttgcccttttctaaagagcgactgcaaagtatgtttgcgtaggtgaggatctaaaactttatgaggtacgaacatcacagaattactttgtaatttcagtttattgtaggcttggctttttggggagggtttacgtcttagacctcttagtgcttctttgtttcatggtgttctaacttcgaagcatctctgtagctttaatggattccttttctgaaagctttgctctctttcttccccctcggctttctcttaggcaagagggctaactgtaaagtaaggcttactgccttgtgtttccaaatgtgtccgaagaggaagtgtcttctgtgaatcctgttatgcatgaataacaggaaatagaaagaaattcactttcattattataaaagtaatatgttcgtttaaaaaattctaatgaagagctggagatgcaacccaggggtagagcacacactcagcatgcaggaggccctgggtccaatcttggaatctcctctcagttaacctgatctctagctgattagtagtgagtgcaagcccactttcctcttctgcctcattgctcagtgataacagctgttaaactttgtcttattctaaaactacctctgtgcaaatgctagcacaataatatatatcatatgcacatgattttttttttatcttgaaaagtaagtcagtatagctacaaagttcacttggcattgtcaacatttcacaggcgtaatattcctcctctagtactgtcctcttcattctttgtgaccaagtttggagagagtgcacaaatgccagggaggtttgtgggaaggtttctcatgttctggtaaggcgagtaagaaaatagtctcatgcaggtgaaatgagtgctatgcagtatatattataccagagaacagcaaatgaccaaattcacactgaactagttcagtaaaattggctttgtcaaagctttccttgcttaaaatgtaattccctgtcatcctagttctggtctggattcttttcctggagtcttgacttccagattccctgtggacttttgtttgagtttcaagcttttgaaatatagaaacctatctaacttaacaaacttgggagagaaaagactccagaacaactgaaaacagaccaggctaaatgaatagactttattcctctcttcttacctgcagttttcagatatgcagagttggagcggatcttagaggttgattcattcatgcctgaagaaaacacattttatagaccctgtgcccaagttcgtggtggacatcaccctttatttactaattgcactacataacaggcattttagaagactgctccagtcagagaccccgccttagaggaatctgtaaaccctgaactcctatcactcatgagcactagttatgtttggaatgccgtattaaaacaaaagttacatttctaaacttaaaattttctagcacagagacagtgggagtagctaactttgatagacatttttctactaaaagtctttctaagtacataatcttctgtaagttggaaaacagcaaaatagaacgtctcctacgtagttaatctttttgcataatttgcacatgtaggagttattagtatacgggtaagttttcactttttcccccaactggagtgtcttgtggctgggtttgaaaaagggaacgggaggccgctggaggggattggtaaatgagataaaacaccactcattcaactcagtgactcagcatttaaattttccataaaaggattaaaggaaaattaaacaaattcttaaagccaagactctggagaaacttgttggtgtgctttagttttcactgttatgactcatgaatttatgcataaattagtacatttataaaaacatagcctttttagagttttctgtttggctaaagtgccattgttagcatttggaattacctttttatgtcttatattttttccaaataaaaataaatgtttctgctgtcttactactgaaactacgttgtgagcactttaaatttctcaaagcagtttcgcctgttatacttggcgcttagtcatcgtcgtacacaacaggacctgattaagaaggctgtgctgcctctaagccgggctagattgtagccactagcaaccaggctgcaataatttccctttgatgacatcatccactgtggaagaacccagttgcttcagccagtcgaactatacagttccaacctcatcaaatatggcatctcccttgcctgctatagcagggggaggaaaaaatgccaccatctttttaatctagcaagcttctcttttcttcannnnnnnnnnnnnnnnnnaaaaaaattctgatcatggatgcttcttccgatccctatttgccttatgacgggggaggagacaatatccccttgagggaattacataaaagaggtaagagcatccccttgctctgaatcctctgttggttgttgtgcatgcggctgggcggttctggggacaggctgtctgttgtcctcttgctgcaatgtgctgcttagttgccctgccttgttgctgtgggagaatgcgaccttcccagcagggctggccctccctgattgtttgctctgtgcagattagccctgcttcagatcacatagggctgcagactccatcttctgtgtgaaaatgctttcggtttgattgcagaaataagctgcctttacagccagctaaagtcctggtggttggttggcacctgcaaagtagtatttttgtacctctggaaacttatattttctttacacagcaatatcaagtgccggtatgccattctgttttggctgctgccaattaccatgtagactttgcaccacagagtaatagtaaaagctcctagctgcattttataacatttaaaaatagcaggaaagaagaattatttttgatttaacatgtttttgtcatttaacgtcttaactgattgacatactatattgtctgtctcgtgggtatcttgtacaacttgataggataaagcaatttannnnnnnnnnnnnnnnnnnnnatacatccagaatgtaagtcgtcagtagttttcgaacagataagtaatggtgttaatcttttggcaggctttgccttggtctccttaaagctaattaggtgttacttaattaaactgctcttttgctcattttcttaaattatttttttaaaagatagttggcatttgctgttctagaaataaacttcaagaaacattctttagccagatgacttcatgtatgagccatgttagtttgaattatttgcttggtgttataaactttatggtttaataccaacttttattatgtttacaaggtaaataaggaaaatttcaagtacattttgtatcctgagaacaaatttaagttccatagaatttaggaattacaatgtattcaacagatacttacttgtcatactgtgcctgcaaaacaataattagactctgaacaggtgcaacaattttctgtagaattctgtgcttagtaaaaggttgctttttatattttgagagaaatctatttaaagatcatggcccatattttgtgcatatttttttctgtataccatttccatatatgtgtgtgtgtgtacatatatgtatatatataaaatgttagaacatttgaggaaatagctaaaagtacaaaagtaatgttttctaattttttactccccgaggttatttcttttttccttgttttcctttctctttgttcctatcatcagtttctagtaatactcttattgaacagtgattattcaaatgtcacattatttattaatcagcatttaaatggtaaaaccagacagaccatactttctctgagtgatgacaacatccatttttagtaatgataaactagaagggtcaggcttgatagtctttgtcaggactaatttatagactgtaaaggccaaaagaaataagaaatgtcaaaactcttgtgaaactagacatacagatattaccaagagagaaactagaaaaaaaaattctgtgacatggccttaatttgccaggcaccatcgtgaaggcctaaacccctcttagaagctcactcagatgccatcctgcttctctgatgagacttcctgtcaatacaaacatggtttaggaagaatgagtgtttgcagtataaaccagttatttactagccttactttaagaatatactgtagtgtccttgagagagaaggtgtttgttttctgtaatttatgacccttttgaaaccatagatcagcacaaaggaactggggatatggaaatgggaacataacttaaatccagaaaagtgaatcagattccctgtgaggacaaaatgcaatatttagaaataggatctttaggctgggagggagaaaagaggaaaaaaatgaaagtataacatttttcataagtataagatttcataaaaaaatgaaatctataacatagagggtgttgataaagtaagcatggatatgtttagtaaagccgacagagctaagaattagctttgtgagtaattggacttaatcaaacttttcaaggtgggatacaaatgaataattgtagaataaatggataaaagaatatgaataaaatgaatagtgagtaaaaattaaaaatgaagctttttacttaagtgcatattgtagtggctagaacaaatagattcaaaatagaaatcatttatatattcttgattagaagataaaatgttattttagaaatagccatctttggaagtaaatttgctannnnnnnnnnnnnnnnnttcataatttgtctcttattttttttcaggaagaaaaaaaaacttgacttatttgtactgctaagttttattcaatgtgcttgcttgcttaaatttttaatgaagttttagtcatttggtggtcaaattccttttatctactaatcgcttttcgtggctttggcttttaaaattgtatttactgcatttatttgtgtgtattaggagtcaggtggccatatgtgccatggcatgtgtatggaagcacttgtggacatgaatcttctctttccacatgtgtgggccactggaatcaaactagtgtcaggcttggcagcaatttttaatgcactgagccttctcaccaccccctggacttttgtggggcagaaggggacaagtttaatattttatttactccatgtagaaagcctttaaaaaatgtagaaagcctttaaactacctattgttttatttgaattatgaagctcttgtgtttatataaattacagttaggtactgtggagactaatggtagctacaatagtaatattaatagctaaaacttagtagaatctgattgagttaatttggccctttccatcataaggtactcttcccaagcatcacatgacctgtgcttaagtctggtgggggcttatggctttgatattgaaaacaaatcgtcaaggatgttaatttcttgttactgctattacactgaattttctatggctctttaggagaggaagagacaagtcttcttttggcaggtgttactaagtaggccatttcccaaggaacagggaatttgccaggcttttgtggtggagagaatagaatgaataaatgctgtggggagtaaagagcttgtcagaagatgattagttctgtggcaccaaaaccaagagatcagttttcctgtgagaagtaaaggaagcattgtagaaaaatagatgtgttgaagtct

SEQ ID NO: 729 - DNA, 396 bp, Mesocricetus auratus
  misc_feature (263)..(279): n is a, c, g, or t
tggagctggagctgtcgttgctgctcccgtagtcctgggtgctgtgggcttcactggggcaggaattgcagcgggatccatagcagccaacatgatgtcagcagcagcaatcgccaatgggggtggagttgcagcaggaagcctggtagccatactgcagtctgtgggggttgctggactctctacatcatccaacatcatcctgggctctgttggggctggctctgttggggcagctcttctggccttgctttgaacttacnnnnnnnnnnnnnnnnnttgaacctactgcctataaggaatatccagaagacagtgtaccacatgatgatccccatatccatcactgaagtcagagaaagatgaaaaataaaggttaatgcttgtaaaaaaaaa

SEQ ID NO: 730 - DNA, 555 bp, Mesocricetus auratus
gcccgtgggaggaccctgcagaggagcccaggctcctgtcctgcgcttctggggagggcggagccactgtagacaatgtgcagcccttccccctcacaggccgggtgcatagtggggacagttatagcccacacaggagagaggctccagactgtgagaagaagcacatcatctatctagatccttgctggctttgtggagtgggtcagcaggctcgggtgagcgagaagcagagagtgggccgcgtaacgctccagtcctggacttgatgagatgctggactgcagagtgggcagcccaggttctaggcccttccctgactgtgcgcatacatccacagcgggttccctgctggggagtcagtggttgggaccgatctctgagactggtgggaaaggaaagccgtatctcctaaggtaagtagagggagacagccgttaggtcgcaggacacactgggtccttgatctcacaaacgggtggccggcctcccctttccacccacgttccgccctcaccccacacttggtgccgagcgctgtttatgggatccggg

SEQ ID NO: 731 - DNA, 540 bp, Mesocricetus auratus
gtgggatggactggccacacagcctgctattccttcttgccatctctatcttcctggggccaagccagccccgcaacaccaaaggcaaaaggaaggggcaagtgcggcctggccccttggcccctgggcctcaccaggtgccactggacctggtgtctcgagtgaagccctacgcccgaatggaagagtacgagaggaaccttggagagatggtggcccagctgaggaacagctctgagccagccaagaggagatgcgaggtgaacctgcagttgtggctgtccaacaagagaagcctgtctccttggggatacagcatcaaccacgaccccagccgcatccctgcggacttgcccgaagcgcgttgcctgtgtctgggctgcgtgaatcccttcaccatgcaggaggaccgcagcatggtgagtgtgccagtgttcagccaggtgcccgtgcgccgacgcctctgtccaccacctccgcgccctggaccctgccgccatcgcgtcgtcatggagaccatcgctgtgggttgcacctgca

SEQ ID NO: 732 - DNA, 1257 bp, Cricetulus griseus
  misc_feature (1030)..(1047): n is a, c, g, or t
atggctgggcctgaggaagcagtccgtggaggctgtgacacccatcctccctttgctggtgggaaatctgtgctgtgctttgggcagagccagtacacagcagaggaataccaggctatccagagggctctgaggcagcggctgggcccggagtacatcagcagccgcatggctggaggaggccagaaggtgtgttatattgaaggtcatcgagtaattaacctggccaatgagatgtttggttacaatggctgggcacactccatcacccagcagaatgtggattttgttgacttcaacaatggcaaattctacgtgggagtctgtgcatttgtaagggtgcagttaaaggatggttcctatcatgaggacgtgggttatggagttagtgagggcctaaggtcaaaggccttgtcactggagaaggccaggaaggaggctgtgactgacgggctgaagcgggcactcaggagttttggaaatgcacttggaaactgcattctggacaaagactatctgaggtcactaaataagcttccacgacagctccctcttgaagtggatttaactaaagcaaagagagaagattttgaaccatctgtggaacaggcaagatataatagctgcctacagaatgaagcaccgggacccccaaaaccacaagaagcggcttccccttgcagaccaagccacccacatgattcgaacattaggctgcagggggctaaggactgcagcagctcctgcagtctggccgcccccatggagagtgatgccattcaccagcgcaagctccggaagctccggcagaaacagctgcagcagcagttccggcagcagatggaggcccacctacagggccacacacctgccgtaaaagtgaaagccgagcgtgaggcagtgcttccagaccttcctccaaaacacagtacccctgtaactgctgcctcagaactcctcagggagaaagccatttttccagataaccctgaagacaaccttgaaatgtgggacctgactccggatttannnnnnnnnnnnnnnnnnttgtctagaccagaaccacctcaaacctctgccaccagagtccaggtgatccaggatggtgtcctacacggcctttgccaccagatgccaccagaaaaacatgaagctggtcacctgcaggcccacagcactcaccagcatgtattaggaaactctgactctcataggaagagccaggacctgaagaaaaggaaaggtgatccatcctga

SEQ ID NO: 733 - DNA, 1287 bp, Cricetulus griseus
aagctacagcatgagagccggtgccgcccctcgcggtcggtggacgcgtggcgagctgaggcggccgctcctgggccctgcatggggacgccggggacccggcaacgcgcacgagtgcgcccaggctggagattacgccggagctcctctgcgctggctgcagccgggctgctctgcaccgctttgaccgcctgcatctgctggggacagctgccgccactcccctgggcatctccagccccgccgcgcccggtgggagtgctgctctggtgggaaccttttggggggcgcggcggccaccctaggtctccccctgattgcagcctgcgcttcaacatcagcggctgtcgcttgctcacagatcgcgcggcctacggggaggctcaggcagtgctgttccaccaccgcgacctggtgacgggactctccgactggcccccgccctggggagcccaagtgcgcagggacgaggctctggagcaacgtgtgttcgacgaccaggagggagcggcgatgctagcaggcgaagccctggagaccgcaggctctagacccccgggtcaacgctgggtgtggatgaacttcgaatcgccctcccactcccctgggctgcggggcttggctaagaatcttttcaactggacgctgtcctaccgggccgactcagatgtcttcgtgccctatggcttcctctaccccagaagccatcccactgaccagccgccaggcctgagccccccgctggcccgcaagcggggcctggttgcctgggttgtgagccactgggatgagcgccaggcgcgggtccgttactaccgccagttgatccagcatgtgcctgtggacgtgtttggtcgggcggcagtcgggaaaccagtgccagccagcgggttgctacacactgtggcccgctacaagttttacctggccttcgagaactcacaacacgtggattacatcactgagaagctgtggcggaatgccttcctggctggggctgtgccagtggtgctaggtcctgaccgtgccaactatgagcgcttcgtgcctcgtggatccttcatccacgtggatgacttccctagtgctgcctccctggctgcctacctgctctttctcgacagaaacctggctgtctatcgccgctacttccactggcgccggagctatgcggtacacattacctctttctgggatgagccatggtgccggacatgccaagctgtgcagacctctggggaccagcccaagagcatccaaaacttggcaagctggttcgagcgctga

SEQ ID NO: 734 - DNA, 600 bp, Cricetulus griseus
atgtcttcaggaaatgcaaaaattgggtatcctgcccccaacttcaaagccacagctgttatgccagatggacaattcagagacatctgcctaagtgaatacagagggaaatatgtcgtattcttcttttaccctcttgattttacttttgtgtgccccactgagatcattgctttcagtgatagggcagaagaatttaagaaactcaactgccaagtgattggagcttctgtggattctcacttttgtcatctggcatggattaatacacccaagaaacaaggaggattgggacccatgaacattcctttggtatcagatcccaagcgcaccattgctcaagattatggagtcttaaaggctgatgaaggtatctctttcaggggcctctttattatcgatgataaaggtatccttcgacagatcactataaatgatcttcctgttggaagatctgtggatgagattctgagactagtccaggccttccagttcactgacaaacatggtgaagtgtgcccagctggctggaaacctggcagtgataccatcaagcctgatgtccaaaagagcaaagaatatttctctaagcagaagtga

SEQ ID NO: 735 - DNA, 476 bp, Cricetulus griseus
gcgcgcgagagttcgagctccagcgagagccggcgccggccaatcagcgcgcgccaccccgggtacttaagggcgacctggcgggcggctgccagtctaaccctgaattctgagagctgtgggtactgtgctttcgtctccgcccgctgtttttctcgctgacttccagcgggcgggaaagtccagacctgcagcgggccatcgcgcgttttccaccacaaaaaaatgtcagcgctgggctcatgtgcctggagccttgcggccggccgcccagccccgcacccgcctgaggccgcggtcggcctggagtcctcgggctccgctgccgccgcgaagagctagactctgtcagccgcggggcgtcaggggctggggcgagccccggcagcgccgcaagcagagaaacggagctggtcccgtgaacggtgacttccctgagttgtgggaaatgcaccaggaactcggttcccacaacc

SEQ ID NO: 736 - DNA, 1705 bp, Cricetulus griseus
  misc_feature (1505)..(1521): n is a, c, g, or t
cacagtgaagtggttctacacccgtctctgctgcccatgctgttctctacagtaaaaaattatgacatcaacatccaaaggcattcttcgtccattcctaatcgtctgtgttatcctggcctgcttcatggcatgtctgcttatttacatcaagcccaccaacagctgggtgttcagtccaatggagtctgccagttctgtgctgaaaatgaaaaatttcttctccacaaaaactgattattttaatgaaaccactattcttgtttgggtgtggccatttgggcagacctttgaccttacatcctgccaagcgatgttcaacatccaagggtgccatctcactacagaccgctcactgtacaacaaatcccatgcggtcctgatacaccacagagacatcagctgggatctgactaacttacctcagcaggctaggccgccctttcagaaatggatttggatgaacctagagtctcccactcataccccccaaaagagtggcattgagcatttgttcaacctgactctaacatatcgccgtgattcagatatccaagtgccttatggcttcttgacggtgagcacaaatccctttgtgtttgaagtgccaagcaaagagaagctggtgtgctgggttgtgagtaactggaatccggagcatgccagggtcaagtattataatgagctcagcaagagtattgaaatccatacctatgggcaagcctttggagaatacgtgaatgaaaaaaatctaattcccaccatatctacttgtaaattttatctttcttttgaaaactcaattcacaaagattacatcaccgaaaagctctacaatgcatttttggctggctcagtacctgttgttctgggaccatccagggaaaactatgagaattatattccagcggattcattcattcatgtggaagattataactctcccagtgagttggcaaaatatcttaaggaagttgacaaaaacaataagttgtaccttagttatttcaactggaggaaggatttcactgtaaacctcccacgattttgggaatcacatgcatgcctggcttgtgatcacgtaaaaaggcaccaagagtataagtctgtgggtaatttagagaaatggttttggaattaatgtttccctcattttcaaatttaaggaaatgtattaacatgacatcatataagttgtaaggataagaagagaaacaccttgctttcaaatcacagtttattttaattgccctcccttgagtaacatgtatattttgatggaaaatttttaagagctcagaattagcaatcacttcatttggattaaattatcctgtatatacgtgataatgagcactgaaaataatttattctccactctcatttgtaaacattcttttttcacatcttatagttgtctgtaaagtaagtttatgattcaattgtttctacatcaatcagatctttagtctgtttgggaaatggaaatgggtgtcctaaaatannnnnnnnnnnnnnnnngtattataatgtctagattctagtttgcataatggtaacaaagaagtattagagtatcacttaattcttaacctctttgagttcagagttgacactgtgtgtaattgatgtactttttaactgtttaccacatttgtgaagacagactgactcatgttgtaaataagaaagatatgaagcagaa

SEQ ID NO: 737 - DNA, 448 bp, Cricetulus griseus
atgggtccgaagctgcttgagtcccgactttgtctcctgctgctgctgggatttgtcataatggttgacaaggcttcattccagatcccaaggggtttaaccccttcccagtggtttgcagtccagcatttaaatatgaccaaccctcaatgtactacagcaatgcagagggttaaccgttatacaggacgttgcaagggcatgaatacttttcttcatacacgatttgctgctgttgttcgtgtgtgtggcagaagaaatactacttgccgtaatggtcttacaaattgtcataatagcataactcgggtacctttaactgtctgcaaccttacaactccaaacgacaccagcaacaaagttctacagaattgcttgtgactatagaagggcacaagacagtcgtatttatccagtggttccagttcacttggatgggacattttag

SEQ ID NO: 738 - DNA, 1251 bp, Mesocricetus auratus
  misc_feature (108)..(122): n is a, c, g, or t
  misc_feature (606)..(622): n is a, c, g, or t
atggagctgcgtgtggggaataagtaccgcctgggccgaaagatcggcagtgggtcctttggagacatctacttgggtgccaacattgcctctggtgaggaagtagcnnnnnnnnnnnnnnntgtgaaaacaaagcacccgcagctccacatagagagcaagttctacaagatgatgcaaggaggagtggggatcccgtccatcaagtggtgcggggctgagggtgactacaatgtgatggtcatggagctgctggggcccagtctcgaggacctcttcaacttctgttcccgaaagttcagcctcaagacagtgctgctgctggccgaccagatgatcagccgcatcgagtacatccactccaagaacttcatccaccgggacgtgaaaccggataactttctcatgggcttggggaagaaaggcaacctggtctacatcattgacttcggcctggccaagaagtaccgtgatgcccgcacccaccagcatatcccctaccgggaaaacaagaacctgactggcactgcccgctatgcctccatcaacacccacctgggcatcgagcaaagccgtcgagatgacctggagagcttgggctatgtnnnnnnnnnnnnnnnnntgggctccctgccctggcagggtctcaaagccgccaccaagcgtcagaagtacgagcggatcagtgagaagaagatgtcaacgcccattgaggtcctctgcaaaggctacccctccgagttctcaacatacctcaacttctgccgctccctgcggttcgatgacaagcccgactactcctacctgcgccagctcttccgcaacctctttcaccggcagggtttctcctacgactacgtcttcgactggaacatgctcaaattcggtgcagcccggaatcccgaggacgtagaccgggagcgacgagaacacgaacgggaagagaggatggggcagttgcgggggtccgcgaccagagccctgccccctggcccacccacaggggctactgccaatcgactccgcagtgcagccgagcctgtggcttccacgcctgcctctcgaatccagcaagctggcaatacttctcccagagcgatctcacgggccgaccgggagaggaaggtgagcatgcgactccacagaggcgcacctgccaacgtctcctcctcagacctcactgggcggcaagaggtctcccggatttcagcctcacagacaagcgtgccatttgaccatctcgggaaatga

SEQ ID NO: 739 - DNA, 1122 bp, Mesocricetus auratus
  misc_feature (233)..(259): n is a, c, g, or t
atggcccagacatgagtggccccctagaaggggctgaggggggaggagaccccaggcctggagaacctttttgccctggaggagtcccgtctcctggggccccacagcaccggccttgtccaggccccagcctggctgatgacactgatgcaaacagcaatggctcaagcggtaatgaatccaatggacacgagtccaggggtgcatctcagcggagttctcatagctcttcnnnnnnnnnnnnnnnnnnnnnnnnnnncctggagaccactgagagcagcaagagtacaaactctcagagtccatccccaccaagcagttccattgcctatagcctcctgagtgcaagctcagagcaggacaacccatctaccagtggctgcagtagtgaacagtcagctagagccagaacccagaaggaactcatgactgcaattcgggagctcaaacttcgattgccaccagaacgacggggcaagggccggtctgggaccctggccacactgcagtatgccttggcatgtgtgaggcaggtgcaggctaaccaggaatattatcagcagtggagtctggaggagggtgagccttgtgccatggacatgtctacttacaccctggaggaactggagcatatcacatctgaatacactcttcgaaaccaggataccttctctgtggccgtgtccttcttgacaggccggattgtctatatttcggagcaggcaggtgtcctccttcgttgcaagcgggatgtgtttcggggtgcccgcttctcagagctcctagctccccaggatgtgggtgtcttctatggctctactacaccatctcgactgccaacctggggcactgggacctctgcaggttcaggcctcaaggacttcacccaggaaaagtctgtcttctgcagaatcagaggaggtcctgaccgggatccagggcctcggtaccagccattccgcctaactccatatgtgaccaagattcgggtatcagatggagctcctgcacagccatgctgcctactcattgcaaagcgcatccactctggttatgaagctccccgcatccctcctgacaagaggatctttaccacgcggcacacacctagctgcctcttcc

SEQ ID NO: 740 - DNA, 5362 bp, Cricetulus griseus
  misc_feature (679)..(696): n is a, c, g, or t
  misc_feature (762)..(777): n is a, c, g, or t
  misc_feature (812)..(830): n is a, c, g, or t
  misc_feature (1210)..(1264): n is a, c, g, or t
  misc_feature (1311)..(1342): n is a, c, g, or t
  misc_feature (1465)..(1484): n is a, c, g, or t
  misc_feature (1486)..(1521): n is a, c, g, or t
  misc_feature (1553)..(1572): n is a, c, g, or t
  misc_feature (1822)..(1864): n is a, c, g, or t
  misc_feature (1878)..(1892): n is a, c, g, or t
  misc_feature (1989)..(2001): n is a, c, g, or t
  misc_feature (2003)..(2022): n is a, c, g, or t
  misc_feature (2126)..(2178): n is a, c, g, or t
  misc_feature (3338)..(3358): n is a, c, g, or t
ctaaagagcgcgcgtgcgcggcctgggtcaatggcgggcgggcaagcctggcggaagcaatagttccaacatggccggtgaggcggacggaccgttcaaacgagtgctggtgccagttctcttacctgagaaatgctatgaccaacttttcgtccactgggacttccttcatggtgagttttattcagccttcaaagtctacttcaagtaaccttggaccgtaatttggcgagagtagtgcaagtgacaggtggctaacatcacgcgaagctgggcggaaggcgcttctgaagagggcggaagtgttctgggccctgcatagagaaggtgccatatttgggcatgagggggagtcgcccgaaaaagtaatcaaatttgtgttttacagtctggaaagtctgtaccctccccccaccccttctgagctggggatcgaactcagggccttcttcgtaccactctgaaccaagttctatcccccagcctggaaaacgtaaacattttataaaacaaaattaaaattccagccaggagtgtgtagactcactcctttcatcccaacactgaactgacagaggcaaatgtttcttttatttgttttcttgctgttggtttttttgttttttttcgagaccaggtttctctgtattgctttggtggctgtcctggatcttgtttnnnnnnnnnnnnnnnnnntaaactcacaagagatccacctgcctctgcccacccccaacctccagtggctggaattaaagcttnnnnnnnnnnnnnnnngcccttgtttgttttttgctttgttttgtttttcnnnnnnnnnnnnnnnnnnngctttggaggctgtcctggaactctcttgtagaccaggctggtctccaactcacagagatccacctgcctctgcctcccaagtgctggaattaaaggtgtgcgccaccaacgcccagcgtttgtttgtttttaaagataaatctcacccagccccagcttttagaacttggtgtgtagtgcaggctgccgtgaactagcagccgtccttcctgggccaccagagctctgggaatacagggatattcccactaccttccttccctcctgtaacaccctgggcaagctcttggcccagggttacaggagccatcagagcctttggtaagtgcatctgtctgctctagtcaggtcatatactcagaggacactgttctagtgnnnnnnnnnnnnnnnnnnnnnnnnnnnnnnnnnnnnnnnnnnnnnnnnnnnnnnnggattcaatgttagaggaactgccaggaacaacgacccaccttactnnnnnnnnnnnnnnnnnnnnnnnnnnnnnnnnaggaccactgagttcaaggacatcttagtctactgggtgagttctaagatgggtaggactacacagagaaagaaaccttgcctcaagaaaccaaaataaacaaaaaaataaataaatgatagnnnnnnnnnnnnnnnnnnnnannnnnnnnnnnnnnnnnnnnnnnnnnnnnnnnnnnngagtgagtgccaggatagataggctcccaaannnnnnnnnnnnnnnnnnnnattgaaataaataaatcaaaataaataaataaataaataaatgatagagatagtggatgaacaggggataaaagcaagccctgaagagtaggccactggataagggctaggaacaaccagaaggttcaggaatgtattctgtgatttgtctttggaaggaggccatctgaagtgggttattgagaagagagaaaaaaagactcaggaactcttgagcaatgcctgtgtaactgaaaagcaatggcagacnnnnnnnnnnnnnnnnnnnnnnnnnnnnnnnnnnnnnnnnnnntgcaaggctggtgnnnnnnnnnnnnnnnctggaaaccacaaaaaggcccacaaagttgtcctctgaccgtcatacatgtacctatgtgttcacacacggtattatcatatttatatagattgtannnnnnnnnnnnnannnnnnnnnnnnnnnnnnnncctgtgaatgcaggggcctgaagatgccaggggcacaagatatcaccggaactgaaattacaggccaccacccaacatgggtgctggaaatgcaattccctgannnnnnnnnnnnnnnnnnnnnnnnnnnnnnnnnnnnnnnnnnnnnnnnnnnnnaaaattcatttttgttgtgtttgttgtgcacatctacttatacatgctcaggttatcagacttagcatcagagccatcttgctggcatcttgctggcacaataattttttgtctgttttacatgcattggtgttttgttttgcctacctgcatgtctgtgtgagggtgccagatccctaaaactggagttacagttgtgaactccatatgggtgctgggaattgaacctgggtcctctggaagagcaagcagtcagtgctgtgcgggggtgaactccatatgggtgctgggatttgaacctgggtcctctggaagagcaagcagtcagtgcttttaaccactgagccatcttttcagccccttatttttacttttttgagacagggtctctctacagagctctagctgtcctagaactcactatgtagacaagctggctttgaactcaccaagatctgtctgtctgggcctgtgccatcatacctggcaatagtttttaaatatttaagacagagtctcactgtataatcctgactggctttgaactcagagtttaaatgaaattaaaggcatgtaccacaacacacagccctaaggactttttaaaaaatttagtagtgtatagtgttctgcctgcataccagaagagggcaccaaatctcatagatggttgtaaaccactatgtggttgcttggaattgaactcaagacctctggaagaacagccagcgagtgctcttaacctctgagccatctctccagtccccctagtgactttttaaaaagacaaatttttagtacatttttattaggctcatgcatggaagtcagaagacaaattttggaattggctctctgcttctaccatgtggatcctggattgaactcagatcattagctatcctgttagccctaaaaagtatattatttcaatgtgtatgtataggaaatggaaggtggagtaggaaggaaggcatgtatttacgttgaagccattctggcaacacacctagtctggatgtaacatgtttgcatcaggaggatccctgccccatcattcccacctgtcccctaaacagagagtcactggggtggtggtcatgccaaggggagggggagggaagagctcataagagcatggcaaaccctcacctgggttnnnnnnnnnnnnnnnnnnnnnttctctctccacagttccctgcctcaagattctcctcagcaaaggccttggactgggcatcgtggctggatcacttctgggtaggtatagttccttctttctgtcagagtagggggggggtggctgctgggaagctaatgccaagggctcggtgctttagctctttcctcagccatgccgttcttcctctagtaaagctgccccagatatttaaaatcttgggcgccaagagtgccgaaggactgagtctccagtcagtaatgctggagctggtagcattgacaggaactgtgatctacagcatcaccaacaacttccccttcaggtgagggccccactcttcatccccaaggccaaaccccaaattcttttttattacagttattaattggggggtgtcagagaacaacttgtaggagttggttctctccttccagcgcatggattctggggctgaagtcaggtggccaggcttggagtcaagcacctttacctgctgagctacttcaccagtcctagcacacacagctcaataagtgttgagaacacttcagcccttccagtttagtcacaccgatggaagtagtgataaagtgagcattctctaacccagccaggcatggtgggggctggggcagcacaagcctgacgatggctatggaggctctccaggccttcctctttccctccccctctcgcctctgcagctcttggggtgaagcgctgttcctgacactacagacaattaccatctgcttcctggtcctgcactacagaggagacactgtgaaaggtgcggggatgtgctggagagcgggcactgggtcttgggaaccttgctggggactcaggaggctcaagagggctccttgtctccctgacccccaggagttgctttacttgcctgctatgcgacactcctgctggctctgctttctccactcacgcctctggctgtagtcaccatgctccaggcctccaatgtacctgctgtggtggtgggcaaggtgggtactcggaagtgaaacgaggtgtgtgtggtggcggcgggatggaaccccaaagtatgcagtattggttttcgagaatgagggattagtgatgggaacacaggggaggttcagatgacagaaccaaacaaaagtgtggatttctcctctagttgctccaggcagccaccaactaccacaacgggcacacaggccagctttcagctatcacagtgtttatgctgtttgggggctccttggccagaatcttcacttctgttcaggtagtgcacctctgcttctagagggcacttaaacctcatactcccagtggaacctttctagactggtggctctccttaacaggaaactggagaccccctcatggctggagtctttgtggtctcttccctctgcaatggcctcattgccgcccaggtcctcttctactggaatgcaaagcctccccacaaacataaaaaggagcaatagtgctgagctagcttctagaatcattcattccacttccattcagccactcaacttgagggtcttccccacttgacgtggtctgctggtgcaactcagtcgtcctccattcctgcataactgcaacctcctgagccagggtttgtgtaaagagtaaaaagcttttccaagtcctgtattcactcgtttcaccaatggctgaggtccctcctttataagcagctattttgttattggagcagacgccttgccttgtccacttaccttctttcaggatggaggacagagcctggacaaatgtggttgggagcttgtggctgcgtccctctgccagctggttgggacagtctattggaccctagttctgaaggtgggggaggggagaatgactcaggtaaaggcctcagggtggagtagggaggttcctgctgtggcaggtccacgaagggtgtggagaaggcacaggttgctgttgtagtgggaatacagatgggacaataaagactcggagacgtgctttcattgt

SEQ ID NO: 741 - DNA, 3078 bp, Cricetulus griseus
  misc_feature (320)..(355): n is a, c, g, or t
ctaaagggcgagcgcaggagtaaacagcggcggagtgagtgtgcgagccgctgcagaagggaaaaaagaaagagccatgcagggattcgtgaggttacggcgccccagctgcaagatgcactagccggctgaagccgggcgggctgacttgttggaaccgcggtgctcggccaccggagcgtgtgcaggaggagttgaagagttgctctctcccccccgggctcgttctcctgacgccgccgagagaggaatcggagcggcgaggcaagccaggcactcggtcattgccattgattgggtatcgggagcttttgggctgnnnnnnnnnnnnnnnnnnnnnnnnnnnnnnnnnnnnctccttcgccgctcgctttctttccctccgtcttgttgcatgcaagcaagcaagcaagcaagcaagcaaatcgccggccgctgctcgctcccccgcccgccctggctgcgagacctcccgcccggctccctcccgtgcattgtgcagcccgaagatgaaagaccggaggggagaaagttaaagaaatcgcccacatgcgctggatcagtccacggcttggggaaaggcatccagagaaggtgggagcggagagtttggagtctttacaggcgggaagatggcggactggagctcaaagtgttgattgggaaacttgggtgattcttgtgtttatttccaatcctcttgacccaggcaggacacatgcaggccaaaaaacgctatttcatcctgctctctgctggctcttgtctcgcccttttgttttatttcggaggcgtgcagtttagggcatcgaggagccacagccggagagaggagcacagtggtcggaatggcttgcaccagcccagtccggatcatttctggccccgcttcgcggacgctctgcaccccttctttccttgggatcagttggaaaacgaggattccggcgtgcacgtttccccccggcagaagcgagacgccaactccagtgtctacaaaggcaagaagtgccgcatggagtcttgcttcgatttcgccctttgcaagaaaaacggcttcaaagtctacgtgtacccgcagcagaaaggggagaaaatcgccgaaagttaccaaaacattctagcggccatcgagggctccaggttctacacctcggaccccagccaggcgtgcctctttgtcctgagtctggatactttagacagagaccagttatcacctcagtatgtgcacaatttgagatccaaagtgcagagtctccacttatggaacaatggtaggaatcatttaatttttaatttatattccggcacttggcctgactacaccgaggacgtggggtttgacatcggccaggcgatgctggccaaagccagcatcagtactgaaaacttccgacccaactttgatgtttctattcccctcttttctaaggatcatcccaggacaggaggggagaggggctttttgaaatttaacaccatccctcctctcaggaagtacatgctggtattcaaggggaagaggtacctgacagggatagggtcagacaccaggaatgccttatatcatgtccataacggggaggacgtccttctcctcaccacctgcaaacacggcaaagactggcaaaagcacaaggactctcgctgtgacagagacaacacggagtatgagaagtatgattatcgggaaatgctgcacaatgccactttctgtctggttcctcgtggtcgcaggcttgggtccttcagattcctggaggctttgcaggctgcctgtgtccctgtaatgctcagcaatggatgggagttgccattctccgaagtgattaattggaaccaagctgccgtcatcggcgatgagagattgttattacagattccttctacaatcaggtctattcatcaggataaaatcctagcacttagacagcagacacagttcttgtgggaggcttatttttcttcagttgagaagattgtattaactacactagagattattcaggacagaatattcaagcacatatcacgaaacagtttaatatggaacaagcatcctggaggattgttcgtgctcccccagtattcctcttacctgggagacttcccttactactacgctaatttaggtttaaagcccccctccaaattcactgcggtcatccatgctgtgacccccctggtctcccagtcccagccagtgttgaagcttctcgtggctgcagccaagtcccagtactgtgcccagatcatagttctgtggaattgtgacaagcccctaccagccaaacaccgctggcctgccactgctgtgcctgtcatcgtcattgaaggagaaagcaaggttatgagcagccggtttctgccctatgacaatatcatcacggatgctgtgctcagtcttgatgaggacactgtcctttcaaccactgaggtggattttgccttcaccgtgtggcaaagcttccccgagaggattgtggggtaccctgcacgcagccatttctgggataactctaaggagcggtggggatacacctccaagtggacaaacgactactccatggtgttgacaggagctgctatctaccacaaatattatcactacctgtacacccattacctgccagccagcctgaagaacatggtagaccaactggccaattgtgaggacattctcatgaatttcctggtgtctgctgtgacaaaattgcctccaatcaaagtgacccagaagaaacagtataaggagacaatgatgggacagacttcccgtgcttcccgctgggctgaccctgaccactttgcccagcgacagagctgtatgaacacgtttgccagctggtttggctacatgccgctgatccactctcagatgaggctagatcccgtcctctttaaggaccaggtctccattctgaggaagaaatacagagacattgaacggctttgagggatcccactgagtgggggaggggaagaagataggactggagtccagctgctctctcttcccggtgcagagccactcagctcatcgatggagccagactgtgccaagtatcaaaaatt

SEQ ID NO: 742 - DNA, 2894 bp, Cricetulus griseus
ggcacgaggtgggtgcgcagcgcagctggctgtcccgggaggaccccagctcggacgggcgagccttgtgtagctagctccccgagtgcctggactggaggcggtggaaagcgccaggcagcggccagacctggcaagcttcggcgtgagacatgccatcgtatctcacaaggcagaagacccgaaaaattttctcatgggttggcaggccattgccagatcgaaaacacaaccaccaaatctacaaagaaatgcgaatgaaagtcaatgattgttccactgagattcacatcaaggttggacagtttgtattgattaaaggaaataataatgcaaagccctatgttgctaaactgattgaattatttgaagatggatctaaatttcattccaagaaatgtgctcgagtacagtggtgtgtccgattctctgagattcctatctctaaaaggcatttgttaggccggaagcctgctgcacaggagatattctggtatgacgatcccgactgtggtaacaacatttgtgtggagaccatcattggtcctgttcaggtagtggctttagccccagatgaagtgatccctatggatcagaaaagtgaggacacactgtttgtgaagctatcctggaatacaaaaaactttgaaccactgtcaccagaagtacttgcagcattgaagaaactagaagatagccctaagtgccagaaacctttagaaggcaagagtaagaatgtaaaaaacccttcttggaacgcaacagaacaaatggtcaaaaggattgaatcaagtcactctacctccaaatcttgccagacatctgctcatcctgtctcccccaatgcaaggaagccgctggaactcagtgactcagacattcccaggaagcctaacatgaggctatcacagaagatcttgtgtgactccttggattctcaaaaaaattctaaacgaaaaacagccttctctgagacagcctcaccacctaaaagatgtcagcctggtgaaatcaagaacttgtcacctttgaaaactctggaaaagaatggacaggctcattccttttgtgacaaaggtagcatgattctaagagcgcaagacccatctttcataactacaaagattagtatggagagggcactcgaccctgtcaggagcagattgaggccttcagtgatgctcacttcaattctgacaccaaagcggactgggagggaggcgggaaaacaagaagctcacacagaacccacccgtacttcccatcgtgttcatagaaggagctctctcttgactttgaatcggattaggcagcagctttggcttctcgatgatgataagagtgaccaagaagaggaagagtccatatcctcagcagaggtgtcagactccactagtgaggaggaagatgattctattccttcccttctaaagagaaattcccagccgcagtccaggaaccggagaatggcctcaaagccatcattgcagaccccctccaagacaccaaagaaaactactcatcatccaactcctcagattcggggtagaaatatcgctgtccaggagccaacaagtgtgcttgaagaggcccggctgatgctgcatgtttctgctgtgcctgactctcttccctgtcgagagcaggaattccaagacatctatagctttgtggaaagcaaacttcttgatgggactggagggtgtatgtacatttctggggttcctgggacagggaagacggccactgtaaacgaggtcatacgctgtctgcagcaggcagcccaaacaaatgatgttcctccctttgaatatgttgatgtcaatggcatgaagctgacagagccccaccaagtctatgtgcagattttacagaagctgacgggccagaaggcaacagctaatcatgcagcacaactactggcaaagcgattctgcagccaagggtcccaacaggagaccactgtgctgcttgtggatgagcttgaccttctttggacttccaaacaagatgtcatgtacaacctctttgattggcctactcacaaaggagcccggctgatagtcctggccattgccaacaccatggacctgccagagaggatcatgatgaaccgtgtatctagtcggctgggtctaaccaggatgtccttccagccctattctcacaaccagctgaaagagatcctagtgtcccgactcaagcatttaaaggcctttgaagatgatgccatccaattggtagccagaaaggtagcagccctctctggagatgcacggcgctgcctggacatctgcaggcgtgccaccgagatttgcgagctttcccataatcatggcaactctctgggcccagtgactgtgtcccacttaatggaggctatagatgaaatgttctcctcatcctacatcactgccatcaaaaactgttccctcctggaacagggcttcctgagagccattattgcagaattccgtcgatctggactagaggaagcaacatttcaacagatatacagtcaacatgtggctctgtgcaggatggagggactgccttaccctaccatgtcggagaccatggctgtgtgctcaaatctgggttcttgtcgcctcctcctggtggagcccagcaggaatgacctactacttagagtaaggctcaatgtgagccaggatgatgtgctctatgctctgaaagaagagtgaagagcttcacagacttctgctgtttctcagcctatttatttttcttcagaacatgaataatagcaaaatatacagaatggaaatgattgttgtagattttggcatttatgttatttagtttgctttttccagagtgtttgagaaatttgtggtaatgtactatgtatataaataaataaaaataaatat

SEQ ID NO: 743 - DNA, 2791 bp, Cricetulus griseus
  misc_feature (292)..(321): n is a, c, g, or t
tgaatttgcaagctgcagaatgcatagcaccttacaaggttggccataatgagcacactgcagttaaaggaagctaaggtgctggatgttcaatttgtgggagatgataatgttctcaatcacatttttgatagagaaggaggaactaaattaaagaaggagaaagctcagcttttggttaatccccagaaaataataaagaagccagaatgtgaattggagaagagtgaccaagaagtcttaaaggatcagaactatgtggaagttttgggaagaaatattcaagattccnnnnnnnnnnnnnnnnnnnnnnnnnnnnnnaataaagtttattcttttcaacatagaaaacactctgaagagatggctaaattagctttagaactagcaaaaacatcaagaaaagttccgtttgactcaaaggctgatcctgaaattaagaaaaatgtcactcagaaaagcaaggggcattcaacttcagagaaagtacaactggagaacaataacaaaactgaatttctgtcagcaccacctcgtagtctaagaaaaagaataatagtgccaacatctcattgtgacagtgaaagtgaatattctgcttccaactcggaggatgataaagaggttgcaagagatgatgaagacgacactgaagcagttgggctctctcaaaagagtcgagttcagagtagagtacttccggcttctgtttccaagcggacaccgcttaagaaaatgaaaagagacaaagccagtgacttggtggaagaatattttgaagcccatagcagttccaaagttttgacatctgatagaaccctgcagaagctgaagagagccaaactggatcagaaaacgctacgtaacttattgagcaaagtctcaccttccttttctgctgaaattgaacaattaaatcaacagcatgagaagttgtttcataaatggatgctacaactacaccttgggttcaacattgtgctctatggtttggggtccaagagagatttactagaaaagtttcgagccaccatgcttgaagattccattcatgttgtcatcaacggcttctttcctggaatcacggtgaaatcaatcctgaattctataactgaagatgtcctcaatcatatgggcactttccagagtgttctggatcagcgagactggataataaacaaatttaaagaagattcttctttagaactcttccttcttatccacaatttggatagccagatgttgagaggagacaatagccagcaaatccttggacagttgtcgtctttgtgtaacgtgcaccttctagcatctattgatcacctccatgctcctctcatgtgggatcatgcaaagcagagtctttataattggctttggtatgaaactactacatacagtccttatactgaagaaacatcctatgagaattcccttctggttaaacagtctggatctctcccgcttagttccctgattcatgtcttacgaagccttacccccaatgcaagggggattttcaggctacttataaaattccagctggataaccaggacagcccttcctacattggactttcttttcaagatttttaccagcagtgtcgggaggcattccttgttaatagtgatctcacacttcgagcccagctaactgaatttagggatcacaaactcataaaaacaaagaagggaactgatggtgtagaatatttattaattcctgttgacagcggaacattggctgatttcttggagaaggaagaggaggaggcttagactgtcactttttaggtggaagagtcattgttccccagctgccgatccttagtaagaatgctcttttacatccaacattagatcattctgtccagcatacaagttttaccattgaaggggcatgtcatcaatttgaacttggattagcctggctggtgtactgtctctgtggtcattgagctgggggaaaaaatgtgcctttaatttattacctctctgaggacttcttgctggatgaagagtgtgctcagggcttatttggaaccggatgtttggggattattttacactgaatgcaatccctgattgttgagggcagtttagcactacccaggctgaattactgcaggtgcacttgttcacatcttgaaagtacaaagaaagatggggcacacagaacttatgaggaaggaggcggtttatttgctttttctgaaatgataaaaggtatttagtgggttaagatggtcctgctttctccttgtggacttaggctgcacataattgggacagttagtgctattccaccaaaatagtgggagaagtataaggactagataaggcatgtgcccaatctagaacgcatatttaaaatagttaatatctgtaccatgatcttgatttttatgatagaaatgagaagccaggctaaaaaataaaatcccgatttacatgttagtaattgttttcatgacaatagataaaaaaagcatttcattattcttgtacatgaacattttttattttcataaaaaacacataagtatagatggcacacccctttagtctcaccattctggagtcagaggtaggcagattgcttctcaatcctttcaaaacaacggtagcaagacaggagctcacatttgtaatcccaacaccaagaaggctgaggcaggatgaaacatgagatcaaggcctggactagttaaggagttctaggtcagtctgaactacaatgatgccctgtttcagaaaacaacaaactaaataaatacacagtgataacatg

SEQ ID NO: 744 - DNA, 432 bp, Mesocricetus auratus
ccacattctggcctgagctcccagaaaagatcgatgctgtgtacgaggccccgcaggaagagaaagctgtgttctttgcagggaatgagtactgggtctattctgccagcaccctggagcgagggtatcccaaaccactgaccagcctggggttgccccctgatgtccagcgagtagatgctgcctttaactggagtaagaacaagaagacatacatcttcgctggagacaagttctggagatacaatgaggtgaagaagaaaatggatcctggtttccctaagctcatcgcggattcctgggacgccatccccgacaacctgagtgcagttgtggacctgcagggcggtggtcacagctacttcttcaaaggtgcctactacctgaagctggagaaccaaagtctgaagagtgtgaagtttggaagcatca

SEQ ID NO: 745 - DNA, 14619 bp, Cricetulus griseus
  misc_feature (2751)..(2765): n is a, c, g, or t
  misc_feature (5981)..(5999): n is a, c, g, or t
  misc_feature (6573)..(6594): n is a, c, g, or t
  misc_feature (7283)..(7317): n is a, c, g, or t
  misc_feature (7320)..(7334): n is a, c, g, or t
  misc_feature (9420)..(9510): n is a, c, g, or t
  misc_feature (12124)..(12151): n is a, c, g, or t
  misc_feature (13563)..(13585): n is a, c, g, or t
  misc_feature (14598)..(14619): n is a, c, g, or t
gatggccacaacctcatctccctgctggaagtcctctcaggggacagcctgccccgagagaaggggaggatgcgtttccacaagctgcagaatgttcagattgccctggactatctccgacatcgccaggtgaagttagtgaacatcagaaatgatgacattgctgatggcaaccccaagctgacccttggcctgatctggaccatcatcctccacttccagatctcagacattcaggtgagcgggcagtcggaggacatgactgcaaaggaaaagctgctgctctggtcacagcgtatggtagagggctaccaaggcctgcgttgtgacaacttcaccaccagttggcgtgatggtcgtctcttcaatgctatcatccaccggcacaagcccatgctcattgacatgaacaaagtgtatcgtcagaccaacctggagaacctcgaccaggccttctccgtagcagagcgggacctgggagtcacaaggctcctggacccagaagatgtggatgtccctcagcccgatgagaagtctatcatcacctatgtttcatccctgtatgacgccatgccccgtgtgcccggcgcacagaatggggtgagggccaatgagctgcagctccgctggcaggagtaccgggagcttgtgttgctgcttctgcagtggatccggcaccatacagctgcctttgaggagcgcaagttcccctccagctttgaagagattgagatcctgtggtgccagtttttgaagttcaaggagacagagctcccggccaaggaggcagacaagagccggtccaaaggcatctaccagtctttggagggggcagtacaagcaggccagctccagatccctcctggcttccacccgctggacgtggaaaaggaatggggcaagctgcacgtggccatcctggagcgggagaagcagctccggggcgagtttgagaggctggagtgtcttcagagaatcgtcagcaaactgcagatggaggctgggctgtgtgaggaacagctgaaccaggccgactccctgctgcagtcggatattcggctgctggcctcaggcaaggtggctcagcgggctggggaagtggagcgagacctggacaaggctgatggcatgatccggctgttgttcaacgatgtgcagacccttaaagatgggcggcacccacagggtgaacagatgtaccggagggtgtatcgtctgcatgagcgcctggtagccatccgcactgagtacaacctccggctgaaggcaggagtggctgcccctgtgacccaggtgaccgtgcagagtacacagaggcgcccagagctggaggactctacactccgctacctgcaagacctgctggcgtgggtggaggagaaccagcgtcggatagacagtgctgagtggggtgtggacttgcccagcgtggaggcgcagctgggcagccaccggggcatgcatcagtctattgaggagtttcgggccaagatcgagcgggctcggaacgatgagagccagctctccccagccacccggggtgcctaccgagagtgcctgggccgcctagacctgcagtatgcaaagctgctgaactcctccaaggcccgcctccggtccctggagagcttgcacgggtttgtggcggctgccaccaaggagttgatgtggctgaatgagaaggaagaagaggaagtgggctttgattggagtgaccgaaacaccaacatggctgccaagaaggagagctactcggccctgatgcgtgagctggagatgaaggaaaagaaaatcaaggagacccagaacactggagaccggctgctgcgggaggaccaccacgcgcggcccacagtggagtccttccaggccgccctgcagacccagtggagctggatgctgcagctgtgctgctgcattgaggcacacttgaaagagaacaccgcctacttccagttcttctcagacgttcgggaggcggaggaacagctgcagaagcttcaggagaccatgcgcagggagtacagctgcgaccgctccatcaccgtcaccaggctggaggacctgctgcaggacgcccaggacgagagggagcagctgaatgagtacaaggggcacctctcaggcctggccaagcgggccaaggccattgtgcagttgaagccacgcaaccctgcccaccctgtgcggggccatgtgcccctgatggcggtgtgtgattataagcaggtggaggtgactgtgcacaagggtgaccagtgccagctcgtgggccctgcccagccgtcccactggaaggtgctccgcggacccagcagtgaggcggccgtgccctcggtgtgctttcttgtgccgccgcccaaccaggaggcccaggaagctgtcgctaggctggaggcccagcatcaggccctggtcacactgtggcaccagctgcatgtggacatgaagagccttctggcatggcagaatctcagtcgtgacatacagctcatccggtcctggtccctggtcacgttccgcacgctgaagccagaggagcagcgccaggccctgcgcaacctggagctgcactaccaggccttccttcgagacagccaggacgctggcggcttcgggcccgaggaccggctggtggcagagcgggagtacggatcttgcagccgccactaccagcagttactacaaagcctggagcagggcgagcaagaggagtctcgttgtcagcgatgcatctcggagctcaaggannnnnnnnnnnnnnnggaggcctgtgagacccggaccgtgcaccgtctgcggctgcctctggacaaagagcctgcacgggagtgtgcccaacgcatcgctgagcagcagaaagcgcaagctgaggtggaagggctgggcaagggagtcgcccgcctctctgctgaggcggagaaagttctagcgctgccggaaccatcacccgctgctcccaccctgcgctcagagctggaactgaccctgggcaagctggagcaggtccgaagcttgtctgccatctacttggagaaactcaagaccatcagcttggtaattcgcagtacccagggggcggaggaggtgctcaaagcccacgaggagcagctcaaggaggcgcaggctgtgcctgccacgctccaagagcttgaagccaccaaggcctcactaaagaaactgcgggcccaggcagaagcacagcagcctgtattcgacaccctaagggatgagctgcggggggcacaggaagttggcgagcggctgcagcagcggcacggagagcgggacgtggaagtggagcgctggcgagagcgtgtcaatcagctgctggagcgctggcaggccgtgcttgcccagattgacgtgcggcagcgtgagctagaacagctggggcgccagcttcgctactaccgcgagagcgctgacccactgagctcctggctgcaggatgccaagaggcggcaagagcagatccaggctgtgccaatacccaacagccaggctgcacgggagcaactgcgccaggagaaggccctgctggaagagattgagcgtcacggtgagaaggtggaggagtgccagaagttcgccaagcagtacatcaacgccatcaaggactatgagctccagctggtcacctacaaggcacagcttgaacccgtggcctccccagccaagaagcccaaggttcagtctggatcggagagtgtcatccaagagtatgtggatctgcggacacgctacagtgagctgaccacactcacaagtcagtacatcaagttcatcagcgagaccctgcgccgcatggaagaggaagagaggctggctgagcaacagcgggcagaggagcgtgagcgactggctgagggagaggctgcgctggagaagcagcggcagctagctgaggcccacgcccaggctaaggcccaggcagagctggaggcgcaggagctgcagcggcgcatgcaggaggaggtggcacggcgtgaggaggcggcggtgaacgcgcagcagcagaagcgcagcatccaagaggagctgcagcacctgcggcagagctcagaggcagagatccaggccaaggcccagcaggtggaggctgcagagcgcagccggatgcgcattgaggaagagatccgagtggtgcgtctgcagctggagacaaccgagcgtcagcgtggaggggcagagggtgagctgcaggcgctgcgtgcacgggccgaggaggccgaagcccagaagcggcaggctcaggaggaagccgagcgcctgcgaagacaggtgcaggatgagagccagcgcaagaggcaggccgaggcagagctggccctgcgcgtgaaggcccaggccgaggcagctcaagagaagcagcgggccctgcaggccctggaggaactgcggctgcaggccgaggaggctgaacggcggctgcgccaggcccaggcggagagagcgcgccaagtgcaggtagctctggagacggcgcagcgcagtgcggaggtggagctgcagagcaagcgtgcgtcctttgcggagaagacagcgcagctggagcgcacgctgcaggaagagcacgtgacagtgacccagctgcgcgagaaggccgagcgtcgggcccagcagcaagcggaggctgagcgagcccgcgaggaggctgagcgggagctggagcgctggcagctaaaggccaacgaagcgcttaggctgcggctgcaagcagaagaggtggcccagcagaggagtctggcgcaggccgatgcagagaagcagaaggaggaggccgagcgtgaggcccggcggcgcggcaaggccgaggaacaggccgtgcggcagcgagagctggccgagcaggagctggagaagcagcggcagctggcggagggcaccgcgcagcagcgcctggctgcggagcaggagctcatccgcctgcgggccgagacggagcagggtgagcagcagcggcagctgctggaggaggagctggcccggctgcagcgggaagcgaccgcagccacgcacaagcgccaggagctggaggccgagctggccaaagtgcgggccgagatggaggtgctgctggccagcaaggcgcgagccgaggaagagtcccgttctaccagcgagaagtccaagcagaggctagaggccgaggccgaccgctttcgagagctggccgaggaggctgcgcgtctgcgcgccctggcggaggaggccaagcggcagcggcagctggctgaggaggacgcagcgcgccagcgggccgaggcagagcgagtgcttacggagaagctggccgccatcagtgaggccacgaggctcaagacggaggcagagattgccctcaaagagaaggaggccgagaatgagcgcctccggcgcctggctgaagacgaggccttccagcggcggcggctggaggagcaggcggccctgcacaaggccgacatagaggagcgcttggcccagctgcgcaaggcgtcggagagtgagctggagcgccagaagggcttggtggaggatacgctgcggcagcggcggcaggtggaggaggagatcctggcgctgaaggtgagctttgagaaagccgccgccggcaaggcggagctggagctggagctggggcgcatccgcagcagtgccgaggacacaatgcgcagcaaggagcaggcggagcaggaggcggcgcggcagcggcagctggcagccgaggaggagcagcggcgtcgggaggccgaggagcgcgtgcagaagagcctggccgctgaggaggaagccgcgcggcagcggaaggctgcactggaggaagtcgagcggctcaaggccaaggtggaggaagcgcggcgcctgcgagaacgagcagagcaggagtccgccaggcagctgcagctggcccaggaggctgcccagaagcgactgcaggcagaggagaaggcgcatgcctttgtggtgcagcagcgggaagaggagctgcagcagannnnnnnnnnnnnnnnnnncatgctggagcggctgcggggtgaggcagaggcggcgcggcgagctgccgaggaggccgaggaggcccgggagcaggccgaacgggaggcggctcagtctcggaaacaagtggaagaggcggagcggctgaaacagtcggcggaggagcaggcccaggcccgggcccaggcccaggccgctgcagagaagctgcgtaaggaagctgagcaggaggcagcgcgtcgggcacaggcggagcaggcagcgttgaagcagaagcaagcagccgacgcggagatggagaagcacaagaagtttgcagagcagacgctgcggcagaaggcccaggtggagcaggagctgacgacgctgaggctgcagctggaggagactgaccaccagaagagcatcctggacgaggagctgcagcggctgaaggccgaggtgaccgaggctgcccggcagcgtagccaggtagaggaggagctcttctctgttcgcgtgcagatggaggagctgggcaagctcaaggcccgcattgaagccgaaaaccgggcactcatcctgcgtgacaaggacaacacccagcgcttnnnnnnnnnnnnnnnnnnnnnnatgaaacaggtggcggaggaggctgcgcggctgagtgtggctgcccaggaggcggcccggctgcggcagctggccgaggaagacctggcgcagcagcgggccctggcagagaagatgcttaaggagaagatgcaggcggtgcaggaagccaccaggctcaaggccgaggccgagctgctccagcagcagaaggagcttgctcaggagcaggcccggcggctgcaggaagacaaggagcagatggcccagcagttggtagaggagacgcagggtttccagcggacgctggaggtagagcggcagcggcagctggaaatgagcgcggaggccgagcgcctcaagctgcgcatggctgagatgagccgggcgcaggcccgtgcggaggaggatgcccagcgcttccggaagcaggctgaggagattggcgaaaagctgcaccgcactgaacttgctacgcaggagaaagtgacattggtgcagacgctggagatccagcgacaacagagcgatcacgatgccgagcgtctgagggaggccattgctgagctggagcgggagaaggagaagctcaagcaagaggccaaattgctgcagctgaagtctgaggagatgcagactgtgcagcaggagcagatcctgcaggagacgcaggcgctgcagaagagcttcctgtctgagaaggatagccnnnnnnnnnnnnnnnnnnnnnnnnnnnnnnnnnnngcnnnnnnnnnnnnnnntttccaggacgaagtggcaaaagcgcagcagctccgggaggagcagcagcggcagcagcggcagatggagcaggagaaacaggagctggtggccagcatggaggaggccaggaggcggcagtgcgaggccgaggaggccgtgcggcgcaagcaggaggagctgcagcatctggagctgcagcggcagcagcaggagaagctgctggccgaggagaaccagaggctgcgagagcggctgcagcgcctggaggaggagcaccgggccgccctggctcactctgaggagattgcagctactcaggctgccgccgcgaaagccctgcccaatggccgcgacgcgctggatggcccgtccatggaggtggagcctgagcacgccttcgagggactgcgtcagaaggtgccggctctgcagctacgggaagcgggcattctgagcgcggaggaactgcagcggctggaacagggccacaccacagtggctgagctctcgcagagggaagatgtgcgccagtacctgcagggccgcagcagcattgcggggctgctgctaaagcccaccgatgagaaactgagtgtctacacagccctgcagaggcagctgcttagccccggaacagctcttatccttcttgaggcccaggcggcctcaggcttcctgctggaccctgtgcggaaccggcggctgactgtcaacgagcccgtgaaggagggcgtcgtgggtcctgagctgcaccacaagctcctgtcagccgagcgcgctgtcactggctacaaggacccctacacgggggagcagatctccctcttccaggccatgaagaaggacctcctcgtcagggaccacgccatccggctgctggaggcccagatcgccacggggggcatcatcgacaccgtgcacagccaccgcgtgcccgtggacgtggcctaccagcgcggctacttcgacgaggagatgagccgcatcctggctgaccctggggacgacaccaagggcttcttcgaccccaacacgcatgagaacctcacctacctgcagctgctggagcgctgcgtggaggaccccgagacgggcctgcacctcctgccgctcacagataaggccgccaagggtggtgagctggtgtacacggatacagaggcccgtgacgtctttgagaaggccactgtgtctgcaccgtttggcaagttccagggcaagaccgtgaccatctgggagatcatcaactcagagtacttcacagcggagcagcggcgggatctgctgcggcagttccgcacgggccgcatcacggtggagaagatcatcaagattgtcatcacggtggtggaggagcaggagcggaagggccagctctgcttcgagggcctccgagccctcgtgcctgctgcggagctcctggagagcggggtcattagccacgaactctaccagcagctgcaaaggggggagcgttctgtgcgggaggtggccgaggcagacagcgtgagacgggccctgcggggtgccagcgtcattgcaggagtgtggctggaagaggcagggcagaagctgagcatctatgaggccttgaagaaagacttgctgcagccagacgtggctgtggccttgctggaggcccaggctggcactgggcacatcattgaccctgccactagtgcccggctgaccgtggatgaggcggtgcgcgccggcctagtgggtcccgagctgcatgagaagctcttgtcagctgagaaggctgtgacaggctatagggacccctactcgggacaaagcgtgtcactgttccaggccctgaagaagggcctcatcccccgagagcagggcctgcgcctgctggacgcccagttatccaccggcggcatggtagaccccagcaagagccaccgtgtgccactggatgttgcgtatgcccggggctacctggacaaggagaccaacagggccctgacgtcacccaggaatgatgccagagtctaccttgaccccagcagccaggagccagccacctacagccagctgcagcagcggtgccgtgctgaccagctgaccgggctgagcctgctgccagtctcggannnnnnnnnnnnnnnnnnnnnnnnnnnnnnnnnnnnnnnnnnnnnnnnnnnnnnnnnnnnnnnnnnnnnnnnnnnnnnnnnnnnnnnnnnnggttttaagggcaggacaatgacagtgtgggagctcataagctctgagtacttcacccaggagcagcggcaggagctgctgcggcagttccgcacaggcaaggtcaccgtagagaaagtcatcaggatcgtcatcaccatcgtggaggaggtggagacccagcggcaggagcgactgtcctttagtggcctccgtgcccctgtgccggccagtgagctcttggctgccaagatcctcagcagagctcagtttgaccagctcaaggaaggcaagacatcagtcaaagacctgtcagaggtgggctctgtgcggacactcctgcaaggcagcggctgcctcgctggcgtctacctggaggactctaaggagaaagtgaccatctatgaggccatgcgccggggcctcctcagacccagcacagccacactcctgctggaggcccaggctgccactggctttctggtggaccctgtgcggaaccagcgtctgtatgtgcatgaggctgtcaaggcgggagtcgtgggtcctgagctccatgagaagctcctgtccgctgagaaggcggtcaccggctataaggacccctactcaggcaccaccatctcactcttccaggccatgaagaagggcttggtcctcagggagcacgccatccgcctgctggaggcccagatcgccacggggggcatcatcgaccccgtgcacagccaccgcctgcccgtggacgtggcctaccagcgcggctacttcgacgaggagatgagccgcatcctggctgacccgagcgacgacaccaagggcttcttcgaccccaacacgcacgagaacctcacctacctgcagctgctggagcgctgcgtggaggaccccgagacgggcctgcgccttctgccgctcaaaggggcagagaagacagaggtggtggaaaccacacaggtgtatacggaggaggagactaggagggcgtttgaggagacgcagattgacatcccgggtggtggcagccacggtggctcctccatgtccctgtgggaggtgatgcagtcagacatgatcccagaggatcagcgagcccggctcatggctgacttccaggctggccgagtgaccaaggagcgtatgatcatcattatcattgagatcatcgagaagaccgagatcatccgccagcagaaccttgcctcctatgactacgtgcgccgccgcctcactgccgaggacctgtacgaggcccggatcatctccctcgagacctacaacctcttccgggaaggcaccaagagcctccgtgaagttctggagatggagtctgcctggcgctacctttatggcacagggtcagtggccggggtctacctgcctggctctcggcagacgctgaccatctaccaggcccttaagaaggggctgctgagtgctgaggtggcccgcttgttgctggaagcacaggcagccacaggcttcctgctggatccagtaaagggtgagcggctgaccgtggatgaggccgtgcggaagggtctggtaggccccgagctgcatgatcggctgctgtccgcagagcgggctgtgactggctaccgtgacccctataccgaacagaccatctcactcttccaggccatgaagaaggagctgatccctgctgaggaggcgctgaggctgctggacgcccagctagccacaggaggcattgtggacccccgcctggggttccacctccctctggaggtggcttaccaacgcggctacctcaataaggacacacatgaccagctgtcagagcccagtgaggtgcgcagctacgtggacccctccacggatgagcgcctcagctacacacagctgctcaagcggtgccgccgtgatgacggcagtggccagatgctcctgccgctctctgatgcccgcaggctgaccttccgaggcctgcgcaagcagatcactgtggaggagctggtgcgttctcaggtcatggacgaggccacggcgctacagctgcaagaaggcctgacctccatcgaggaggtcaccaagaccctgcagaagttccttgagggtaccagctgcatcgccggagtcttcgttgacgccaccaaggagcggctgtcagtgtaccaggccatgaagaagggcattatccgccccggcacggcctttgagctcctggaagcacaggcggccactggctatgtcattgaccctatcaagggactcaagctgactgtggaggaggctgtgcgcatgggtatcgtgggccccgagttcaaagacaggctgctgtcagccgagcgcgccgtcactggctacaaggatccctactctgggaaactcatctctctcttccaggccatgaagaagggcctaatcctgaaggaccacggcatccgtctgctggaggctcagatcgccactggcggcatcatcgaccccgaagagagccaccgcctacctgtggaagtggcctataagcgtggcctcttcgacgaggagatgaatgagatcctgaccgatccctcagatgacaccaagggcttctttgaccccaacacagaggagaacctcacctacctgcagctgatggagcgctgcatcactgacccccagactggcnnnnnnnnnnnnnnnnnnnnnnnnnnnnagcgggagcggaagacgtcctccaagtcttcagtgcgtaagcgccgtgtggtgattgtggaccctgagacaagcaaggagatgtcggtgtacgaggcctaccgcaagggcctcattgaccaccagacgtacctggagctgtcagagcaggagtgcgagtgggaagaaatcaccatctcctcgtcagacggcgtggtcaaatctatgatcattgaccggcgctctggccgacagtatgacattgatgacgccatcaccgagaacctcattgaccgctccgcactggaccagtaccgtgcgggcacactttccatcactgagtttgctgacatgctctcgggcaatgctggcggcttccgctcccgctcctcctccgtgggttcatcatcttcctaccccatcagccctgccgtctcgaggacccagttggcttcctggtctgatcctaccgaggagaccggcccagtggctggcatcctggacacagagactctggagaaggtgtccatcacggaggccatgcaccgcaacctggtagacaacatcactggccagcggctgctggaggcacaggcctgcactgggggcatcatcgatcccagcacgggtgagcgcttcccagtcactgaggctgtcaacaagggcctggtagacaagatcatggtagaccgcatcaatctggcccagaaggccttctgtgggttcgaggacccacgcaccaagaccaagatgtcagccgcgcaggccctgaagaagggctggctgtactacgaggcaggccagcgcttcctggaggtgcagtacctaacgggtggtctgattgagcccgacacccctggccgtgtacccctcgatgaggccctgcaacgtggcaccgtggatgctcgcacggcccagaagctgcgtgacgtcagtgcctactccaagtacctcacgtgccccaagaccaagctcaagatctcctacaaggatgctttggaccgcagcatggtggaggagggcacggggctgaggctgttggaagccgcagcacagtccagcaagggctactacagtccctacagtgtcagcggctctggctccaccaccggttcacgcactggttcacgcaccggctcccgggccggctcccgccgtggcagctttgatgccactggctctggcttctccatgaccttctcgtcttcctcttactcttcctccgggtatggccgccgctacgcctcagggcctccagcctctttagggggtcctgagtccgcggtggcctgacccctctgcctgcaccctgccctcccgctctgcatgcggccaggctccctgtggaggcgctggggtcttttaacatgtaaaggtgtcttcctcccaagcggtgcctaaaatttaaccaaaaagaccagactaacacgttannnnnnnnnnnnnnnnnnnnnnnccagacagcctgtgtcttgggaaatggggctggcccaggcccagtgaccacttcaccactcccttgggtccccctaaccctaccacctgccactcaccactgctaggtgccttggagaatccagagctgggcactcagcctaccacgcctctctctcctgggaggattctatctgggaaaggcctccagacctctaagccaaccccgccggatgtctgcctgctggccctagctgctgaggggacctggggaacgatcctatgagcagacagctcttgggcctcttgaggcctctgtcctgagccagctgcgtctctccagtgtgtcgctgaattacctgcctattcatttgggtcttgctggcaaaggaaaggccccaagccagccatctcttccagcctgcccggagaggccccttccccgtgggaagatgaggcccggccctggccccagcctcccgcctggctcctgcagctgccattggagctatgcttttgtagctcaccggcccgtactcaccccccgcccgagacccgagcctctgcttcagcctccagcctcagctccccttgtaagtgccttctgtgtccctcttgtgccctaaagacccagacgcaggggtaggagatggactttgtggctgggcaagggcttggacggttcttcagatctgagacttcttctacccagaggccagtggctgctagcctgtggaaaccccctctgggtgctgctgcccacctctcttccagggagccttggcctctccgtggcccaaagacactggctggcccatctgtgcagacatcagcacccggccagtaccacctcccttcctgtccagccagcccctggccttggtggctcctacccctgcctccaccctctgagtgagctctgcatgttccactaacctcgagctggtggcaggtggagatgccaggcagaacactaacctgaccatgggcggagccccgcggtggccgcccctcaataaaagcaattccaacctnnnnnnnnnnnnnnnnnnnnnn

SEQ ID NO: 746 - DNA, 948 bp, Phodopus sungorus
aatcgaattcatggttggtttcaaggccacagatgtacccccaacagccacagtgaagttcctgggagctgggacagctgcctgcattgcagatctcatcacttttcccctagacactgccaaagtccgcttgcaggtccaaggagagagtcaagggctagcgcgcactgcagccaacgcccagtaccgcggcgtgctgggcaccatcctaaccatggtgcgcaccgagggcccacgcagcctctacaacgggctggtcgccggcctgcagcgccagatgagctttgcttctgttcgcattggtctctatgactctgtcaagcagttctacaccaagggctcagagcatgcaggcatcggaagccgcctcctggcaggtagcaccacaggtgccctggctgttgccgtggcccaacctacagatgtggtaaaggtccgcttccaggctcaggcccgggctggcggtggtaggagataccagagcactgtcgaagcctacaagaccattgcacgagaggagggaatccgaggcctctggaaagggacctctcccaatgttgcccgtaacgccattgtcaactgtgctgagctggtgacctatgatctcatcaaagatactctcctgaaggccaacctcatgacagatgacctcccttgccacttcacttctgcctttggggcgggtttctgcaccaccgtcatcgcctccccagtcgatgtggtcaagacgagatatatgaactctgccttgggccagtaccacagcgcaggccactgtgccctcaccatgctccggaaggaggggccccgagccttctacaaggggttcatgccttccttccttcgcttggggtcctggaacgtagtgatgtttgtcacctatgagcagctcaaaagggccctgatggctgcctacgagtcccgggaggcacctttctgagctcctcc

SEQ ID NO: 747 - DNA, 935 bp, Phodopus sungorus
  misc_feature (621)..(634): n is a, c, g, or t
  misc_feature (637)..(649): n is a, c, g, or t
ggcagcaaaggaaccaggcccatctgctgggcagcatggttggacttcagccatcagaggtgcctcccacaacagttgtgaagttcctgggggccggcactgcagcctgttttgcagacctactcaccttccccctggacaccgccaaggtccgcctgcagatccagggggagaatccagggacacagagagtgcagtaccgcggagtgctgggtaccatcctgaccatggtacgcacagagggtccttgcagcccctacagcgggctggttgctggcctccaccgccagatgagctttgcctccattcgaattggcctctacgactctgtcaaacagttctacacccccaaaggagctgaccactccagcatcgccatcaggattctggcaggctgtaccacaggagccatggcagtgacctgtgcccagcccacagatgtggtgaaggtccgatttcaagccatgatacgtctgggaactggaggagagaggaaatacaaagggactatggatgcctacagaaccatcgccagggaggaaggaatcaggggcttatggaaagggacttggcccaacatcacgagaaacgccattgtcaactgtgctgagatggtgaccnnnnnnnnnnnnnnggnnnnnnnnnnnnnactctcacctgttcactgacaatttcccctgtcactttgtctctgcctttggagccggcttttgtgccacagtggtggcctccccagtggatgtggtaaagaccaggtacatgaacgctcccccaggcagatacctcagccctctccactgtatgctgaagatggtggcacaggagggccccacggccttctacaaaggatttgtgccttccttcctgcgtttgggagcctggaatgtgatgatgtttgtaacttatgaacagctgaaacgggccctggaaagtaa

SEQ ID NO: 748 - DNA, 290 bp, Mesocricetus auratus
tctggctgaccggaagctgtgtgcggaccaggagtgcagccaccctatctccatggctgtggcccttcaggactacatggcccccgactgccgattcctgaccattcaccggggccaagtggtgtatgtcttctccaagctgaagggccgtgggcggctcttctggggaggcagcgttcagggagattactatggagatctggctgctcgcctgggctatttccccagtagcattgtccgagaggaccagaccctgaaacctggcaaagtcgatgtgaagacagacaaat

SEQ ID NO: 749 - DNA, 2999 bp, Cricetulus griseus
  misc_feature (1926)..(1943): n is a, c, g, or t
  misc_feature (2974)..(2999): n is a, c, g, or t
ggttcggtgcatcggcgcgacggacgggcgggcgggcaggcgctgtctctctcccccctgccggcggctgcgaccgtgggagcccccctgactttcgtcaaacttgctgctttgcccccgtggacatgactccttagctggcattgtgcatgccagttgtgtgtggtggaagcctccctgggtgctcagatggaggagccaatggcgttttctcccctgcttggcggtgaccggagtcccgctgatgactccttaaaaaaatatgagcagagtgttaaactttcaggcattaaaaaagacattgagaagctttgtgaagctgtacctcagcttgtcaatgtgtttaaaattaaggacaaaattggagaaggcacattcagctctgtttatttggccacggcacagctgcaagtaggacatgaagagaagattgcactgaaacacttaattccaacaagccaccctgtaagaatcgcagcagagctccagtgtctgacagttgcgggggggcaagacaatgtcatgggagttaagtactgcttccggaagaacgaccatgtggttattgccatgccgtatctggaacatgggtcatttttggacattttgaattctctttccttccaagaagtacgggaatatatgtttaatctcttcatagctctgaaacggattcatcagtttggtattgttcaccgtgatgtgaagcccagcaattttttatataatagacgtctgaaaaagtatgccttggtggactttggtttggcccaagggactcatgacacaaaaatagagcttctcaagtttgtccaatctgaggctcagcaggaagattgctcacaaagcaagtaccacggagtcactggacaaaagggctcactgagtcgcccagcacctaaaaatctggatcagcagtgtgctgcaaaaacttctgtcaaaagatcctatgccagcgcacaaactcacattaagcaagggaaagacgcaaaggagggatctgtaggcctttctgtccagcgctctgtttttggagaaagaaatttcaatatacacagctccatttcacatgagagccctgcagagaaactcataaagcaatcaaagactgtggacataatctcaagaaagccagcaacaaaaaagacagccatgtctacaaaagctgtggctagtgtgaccatgtctacaaaagctgtggctagtgcgatgaggaaaaccaccagtccttgcccggctgtcctgacctgcgactgttatggaacagataaagtctgcagcatttgcctgtcgaggcggcagcaggttgcccctcgggcaggcacaccaggattcagagcaccagaggtcctgacaaagtgtcctaaccaaaccacagccattgacatgtggtctgcaggtgtcatactcctctccctgctcagtgggcggtacccattttacaaggccagcgatgatttaactgctctggctcaaatcatgacaattcgaggatccagggaaactatccaggctgctaaagcttttggcaaatcagttttgtgtagcaaagaagtcccagcacaagacctgaggaaactgtgtgagagactaaggggtctagaccccaccactcccaagttagcagttgatccaccagggtgtgcctctctagagaacactgaccataaagcttcttccctcggacagacgcctccagcacagcactcagagggttccttgtgtaaaggggacagtgatgactgtgggagtcgtcccagggagtgcactaccaacttggaaggctgggactcggtacctgatgaagcctatgacctgcttgacaaacttctggatctaaacccagcttcaaggataacagcagaggcagccttattgcatccattctttaaagatatgagctcctgaggtggttttccatttacnnnnnnnnnnnnnnnnnntgaggtggggtagataatcacaggttcttgtttgcatccaagtccagggaaggatgactaacttatttttaaagttacaatattttgctctgatgtcagattgtaagcagatggggaattattcaagatccagggggaggcctctatgtgatcttagagttaaaccaccaagtatagtcagatctttagttccctggttttctctgcttctggagcagccttagcctgatgcacgggtcaaggaacgggtcataaaggtcacagatgtgacagggagtaaatgagtgaaaaagactgtttccagatgtctgtggcctacgctgtgtatgcctggggaactggctcttggtggtgtacaggagagacagtgatctttcctataggtgtgcatataaacacagttaccgcagggacataggggaaatgacaccactcaatatagttgtttcctgtaagttacacagtgcttactgcagagtttctggttcttcattaggtgtatttatttatattgggaacctaataatgtgcagattgttgacgaggcagaagtctttttctcgtacagctattttgtcacactatcttagtttaattaggtaattgccacaaggaaaggtgagggtacaactgggaacattactgggttttgtcttccaggagtacccagacttctgcatttctgacctaagttgaccttgctcagagagtaatggtcattgcagtctcaggtggattgggaggaaatacaatgacgtagacaaagcagcaaagggcttgcacggccatctatgcattttttacattctgaactgccctgtgtttgtgatagaatgccagggttcccaggggtcaggaggataaacttgctgaagagttcccttcgtataatcacaggtcatcagtatattcactttcctgttttgaatcctgatagatcaatgtgtgtacacactttgtcttatgctgtatttttttaagcttgaatgtttttggaatatgtatttaataaatgtttcctttcagattcnnnnnnnnnnnnnnnnnnnnnnnnnn

SEQ ID NO: 750 - DNA, 591 bp, Cricetulus griseus
  misc_feature (497)..(515): n is a, c, g, or t
ccgcggggcaggaggaggtccccaacccatgctagctagccagagcagagcccggcgtcaggtcctccacgtcacgcctacctcagggcccgcccatgccatgcccacctcagcctggctttaggcccctcccctagcgcctcagtgttgctcgcacctcggagccccaatgctcccgcgtcgagcccaccccaagcctctcctgtatccgtgcaggtcccggtcccagcggctctagcctcaggccccgcccccagctccttggctcacgggctcagaaaccgccgccccccagagcctgctgccttgggccccgcctccgccccaaccaggctccaccccgcgcacgcgccgcacgtgccgcacgcgccccgcgttcctcctccacctgtaggccccgcctcccagccaatgggcgccgccgccgccgcgtgcgtcctgccccgccccgccccttgtccctcagccccgcgtcggctggccgcagagctgagcgnnnnnnnnnnnnnnnnnnnctcgtatatccctcccgggtgaccgccgctgaggcctgctgcagctgggctcgggctcttctgccgagctaccatg

SEQ ID NO: 751 - DNA, 870 bp, Cricetulus griseus
ccagctagtgccctgagcttgagctatgcagtctactccccagcttttgagcggtcgtcagcccgcagactccccgccctcacactcaccccgacacctgggcgagtcagtgattcggtgccgggtcctctctggaccgaagctgaagcagcagagaaagcagcgaggacccgtgttcggggtgcccaacagattgcctgactagcagcctcagagacgccaaggagggccgcaggactaggaagataaaatgggcggaaaggcgttcagtgagaggaacaatgtctcccgaggttgaggatctgaatcttctgcgttgctcgaggtctggaagaacggggaggttggcactccctgacgcaggcgctcaccagcagcctaactctgtttggggacccttaccgtagtattcgaggccctggatggacgggacatcagatacgcgcagagccaatggttatggactagagagtcacggattgggcggggctaaaaggggcggggcttaggataaggggcggtgacgagtagagggggcggagccacagggctgaggggcgggacgcgcgatagtgccaaactagggtgagagtgcgaagatggcagctgctgaggagccaaagcccaaaaagctgaaggtggaagcgccacaagcgctgaggtgagagccgccaacgtggggaggagggagacggcatttgcggcgagccaaggcccacgtgggctggcgctgctgcgtggtgtttgcgttcgtggggccaacacgcgggacctgcagctcggggagttgccctcgtggctgcacattgaccccttggtttgaaccgtgctcaggtgctttcccggccctggcagccattgaccaatcag

SEQ ID NO: 752 - DNA, 469 bp, Cricetulus griseus
tactatctctaaaatattgtcctacatctaattggcaaatcagtggtttaattaaactgcgatgctaggcttatgttcaagtgaagatatagtttattttcgtatttgtgttttctaacttccttttgcttttttcttttagtgaaaatgtgttgtttggaatggggaatcctcttcttgacatctctgctgtagtagacaaagatttccttgataagtaagtattaaatgcttcatgcctacagcatcaaacatccactgattaaactgtggaattaggctggtaggatggttcagtgggtaaaaacatccctgtctagactgacaacccaagtttgatcccagggacctacatagtgaaaggagaaaactaactcctgcaggttatactctgacctccaaacacacatgcatggcatgtgcactttcacatcatgcacacgtacacatatataaatgagtagataaa

SEQ ID NO: 753 - DNA, 312 bp, Cricetulus griseus
gtgaccttcatttgtcaaatcttttattttgctgtctatgtagtataatgacttagttcacagtatatattttagattcttaatgttatgtatttacagaagaaatttaattcattttttgaatgcaaatagatgattttgggattgcactaattatattttaattagaagaacttgtagtctgtgaaaactgacatatgctaacttaacttctcctgtggtttccttgataggtttgatgaacttgtaagaaaattcaaagttgaatatcatgctggtggctctacccagaattcaattaaagtggctcag

SEQ ID NO: 754 - DNA, 433 bp, Cricetulus griseus
tatcgataagcttgttttcctcagcagtagtgcagtgttgaagttccgttcatcagcatcacaaagcttgcctttcaagcccccatacatggcagagtccgaaattatctgtactgtttctgatccatccagtcatttatgttcttacttttcagtggatgatccagaagccacacaaagcagcgaccttctttggatgcattgggatagataaatttggggagattctgaagagtaaagctgctgaggcccacgtggatgcccattactatgagcagaatgagcagccaactggaacctgcgctgcatgcatcactggtgacaacaggtaagtcattatcaaccaggagcaccctacgcgagagctgtggagactcttactaaacccaaatgacagtttgaaattcacttcaagctgataatcatttctaat

SEQ ID NO: 755 - DNA, 269 bp, Cricetulus griseus
ggctgttttccttctctcctgtcctaaaggcttgaggcacatctcaatcttcactatctacaatatcagcctttgaatttgttcatttctgtattaaatacctgacaggttttttaatcttttataagtaaaacgtatttcctacttcttgggtttttaggtctcttgttgctaaccttgctgctgccaactgttacaaaaaggaaaagcatcttgatttggagaataactgggtgctggtagagaaggccagagtatactacatagcc

SEQ ID NO: 756 - DNA, 1195 bp, Cricetulus griseus
  misc_feature (1071)..(1104): n is a, c, g, or t
aagcttcaggccagcctgggctacacaggaggattctgcctcaaaaatgatgaataattctttaaaacctctgtaattggatatttgacttaatatttatttgctggtgataaggacttcttatggtggtggggacttcctgggactttgtgctagccaagcagttgctctaccaagtggcagcatgcccacccaaaaacactctactgaggtacagaagatttaaaatattttgggtttgtttttgtgctaggaactgaacctggttcttttggtaagtcagacaaaatgtttaaagtatatcatgattatgtatgttgtgtgttagtcattatctttcagagttaacatacttgcacatttatagattaaattataaagcaaacctttgctttgaaataaaatgcatggcaggtattgaaagtgaagagaaataaagtccatcataaatgtgaagtttgggaagactcatgagaggagcttgtgtgctgttctctgtatgattaaaaatttcttttcaaatgttccctggtagatactcaggtgccatcagaagcaaaagtgttaaaatgttaataaaatttgcccttactctactgattatgaattttttcactctattaatagactaaagacattaaagagatagccaaaaaggcacaggctcttgcaaaggtgaactcgaagaggccgaggaccgtggtcttcacacaagggagagacgacactgtagtggctacaggtactgttggaactatgtgaaaaatccagtgctaaggagattaatcatgacaaattctatagtctttctatcacgtgtcttttacagtttaactatattcctctcctttcaagattacaatttacgtttattgatgtagcttgtttacttttaaagtttggggggatttttttagcccagaaatatctttcttttcaaacataatacgttttacatataaacatttattcagttatgagcaagtaaagtccaaaatgtttcttctgattttctttcctgtcattattaatttgtcttgtttttgcaatagtaggaatttattatttttnnnnnnnnnnnnnnnnnnnnnnnnnnnnnnnnnntcctggatctcactatgtacatgaagctagcctccacctcacagagattcacccacccctatctcatgcccagcctaatgctgaaaagctt

SEQ ID NO: 757 - DNA, 1122 bp, Cricetulus griseus
  misc_feature (78)..(94): n is a, c, g, or t
ctcattctgctcgggcaacccacaagcagggcagacaagtctcactcctgtagttaccaacatgctactactctgctnnnnnnnnnnnnnnnnntctccgtccatcaagttgacaatcaagattaaccttcacaatgagacttagaccagagccaccaggtggtagttgagatcttgataattgtaatgctgttatataacactcacattctctcgattttgtctgttgtagggtttctctctcaactggtctataacaagcctctgactgaatgcatccgagccggccactatgcagcaagtgtcattattaggcgaactggctgtacctttcctgagaagccagacttccactgatggaagaaagaaaactcactgggaggtgcaggctgcagtgacctcgtcctaagtgttcctgccataagaaagaataattgtactgctatttttgccaaccatgattctcattaatttagagggctcagtattgctcctagaacctttagtctttgaaatctggggggaaaatgtttatttccataatttgttagtgcctcttaaatgtcaaaaaggaatatagcatttcagtagaaacttttatttcattttccattgtttgtaaattcatctgtatttagtaaattaattggtttttttacatttctgctttaaatacaggtgcaatttaatataatagactttttaaagaaattaatgctaacatcattcttgagctttttatataaatatatttaatttggaggtatgtatatgcacacatgtcatatatatacatatatatctgataactggtagataaggtacagaaatgtttatcacaccaaattattccacataagctcttcattgtgcttcagacatatgatggacttggaacaaccgattcccccaacatttgcatcatgttattcaaatcataacctatgcttactgatggtactctgtaatttgatacaaataaattaccatataggaatcctttctgtcttggcttatgctcaataaaactaaggaagaaattgttatttagtactgggccttgtatgattttattgatggggtgagggaaggaatgttaatatattaaatataaatatgtgc

SEQ ID NO: 758 - DNA, 77 bp, Mesocricetus auratus
gcaggcttgaagacccttccatgtggtgatgggaaatgaaactcactctcccgacttttcctattttccacccacat

SEQ ID NO: 759 - DNA, 534 bp, Mesocricetus auratus
ggccagtgcggcacttgcaccaacgaccagaaggatgagtgccggccttccctggagggggcaataacctcttgttctgatatggctccccattggaaggtgcccaaccagccttcatgccaaggcgctcctccaacatcaacttcagtggtacccagtccttcaccagccccgtgcccaccatcaccaatctgtgagctcatcctaagcaaagtctttcagtcttgccacgatgtcatccctccactgccattctatgaaggatgcttgtttgacatctgtcacggcatgggctgggaagtcgtgtgctcaggtctagagctctatgcatcactctgtgcggcccacggccggtgcatcccctggagaagccagaccaacaacacctgttcattcacctgccctgctaacaaagtgtaccagccatgtggcccaaccaacccttactactgctatgggaatgatgacctcagcaccagcttgactcttcaagaagctggccccttcacagaaggctgcttctgtccggagggc

SEQ ID NO: 760 - DNA, 507 bp, Mesocricetus auratus
  misc_feature (26)..(26): n is a, c, g, or t
  misc_feature (173)..(204): n is a, c, g, or t
tctccaccgggtagtgttgaggcttnttaacagggcttctttctggggtcctcccagcggcagtctggccttgatccctctactcttccttctttttcaggtgatgatgatgggcaacacccaagtagccagactgctgctgctctacggtgcggaaccgaactgcgaggacnnnnnnnnnnnnnnnnnnnnnnnnnnnnnnnnagcacgggagggcttcttggaaactctggcgatactacaccaggcgggggcgcggctggatgtgcttgacgcccggggtcgcctgccggtggacctggccctggagcggggccactgcgatgtcgtacagtatctacgtgcggctgggaacaccccccaaggcagcgagccggcaggcgtaacttctgcccagacacccccaggtgagcacggctggtccaagagtttgaaatctgagggctcctgaaactcagttacagatggaaaagttgaagcagggtcttccggcggccttcagctcac

SEQ ID NO: 761 - DNA, 379 bp, Mesocricetus auratus
  misc_feature (148)..(209): n is a, c, g, or t
catgagcatgggtccctttttgattacttgaatagatacactgttacagtggaagggatgatcaaacttgctctgtctacggccagtggtcttgcccatcttcacatggagattgttggtacccaaggaaaaccagctattgctcacnnnnnnnnnnnnnnnnnnnnnnnnnnnnnnnnnnnnnnnnnnnnnnnnnnnnnnnnnnnnnngggactggctgtgaggcatgattctgccacagacacaattgatattgctccaaaccatagagtaggcactaaaaggtacatggctcctgaagtcctagacgattccataaacatgaaacactttgaatccttcaaacgtgctgacatctatgcaatgggcttagtgctct

SEQ ID NO: 762 - DNA, 285 bp, Mesocricetus auratus
gccctactgaacttggccacagtaagcttctctctgtccacttgcaccaccttggacttcggccacatcaagaagaagagggtggaagccattaggggtcagatcttgagcaagctcaggctcaccagtccccctgagccatcggtgatgacccacgtcccctatcaggtcctggcactttacaacagcacccgggagttgctggaagagatgcatggggagagggaggaaggctgcactcaggagaacacagagtcggagtactatgccaaagagatccataaa

SEQ ID NO: 763 - DNA, 1455 bp, Cricetulus griseus
  misc_feature (1058)..(1082): n is a, c, g, or t
  misc_feature (1339)..(1380): n is a, c, g, or t
gatgccaacatggcagcggttggggttggcggatctgccgcggcggccgggccaggggccgtatccgctggcgcgctggagcctgggtccgctacagcggctcaccggcgcctcaagtacatatccttagctgtgctggtggtccagaacgcctccctcatccttagcatccgatatgctcgtacactgcctggtgatcgcttctttgccaccaccgctgtggtcatggctgaagtgcttaaaggtgtcacctgtctcctgctgctcttcgcccagaagaggggtaatgtgaagcacctggttctcttcctccacgaggctgtcctggtgcaatatgtggacacactcaagctcgcggtgccctctctcatctatactttgcagaataacctccagtatgttgccatctccaacctgccagctgccactttccaggtgacatatcagctcaagatcctgactacagcactgttctccgtgctcatgttgaaccgcagcctctcacgcctgcagtgggcctccctgctgctgctcttcactggtgtggcgattgtccaggcacagcaagctggtgggggtggcccacggccactagatcagaatcccggggccggactagcagctgtggtggcctcctgtctctcctcaggctttgcaggggtatactttgagaagatcctcaaaggcagctcaggttctgtgtggctgcgtaacctccaactaggcctctttggcacagcactgggcctggtggggctctggtgggctgaaggcactgctgtggcccgtcgaggcttcttctttggatacacgcctgctgtctggggggtggtactaaaccaagcctttggtgggctactggtggctgttgtagtcaagtacgctgacaacatcctcaagggctttgccacctccctgtctattgtgctgtccactgttgcctccattcgcctctttggctttcacctggacccattatttgccctgggcgctgggctcgtcattggtgccgtctacctctacagccttccccgaagtgcagtcaaagccataacttnnnnnnnnnnnnnnnnnnnnnnnnntgggccctgcattcaccagcagcctcctgggcagccaccaccaccaccgcagctgtcttctcgaggagacctcatcacggagccctttctgccaaagttgctcaccaaggtgaagggttcgtagctgctggaattgaagacactggcctgccttcgttctccctctcttgccctggcccagctgggactaaactcttatcagtattaggggtagggtgagggagacatgggaattgcctgtcccaccaaccctgccnnnnnnnnnnnnnnnnnnnnnnnnnnnnnnnnnnnnnnnnnnctgaactcctgctatctttgcagtatttcttaggtaagtttctgcaaataaaatgtattttgcatcttgaaaaaa

SEQ ID NO: 764 - DNA, 517 bp, Mesocricetus auratus
tgaacttttccccaagttccaccagccccaccaaggagccaggggagcctcagcccagccgggctgttctccaggaagacgtggacatgagcagtggctccagtgggaacgaaaccaacgaaaactgctccccagggagggactctcagggcagtgactgtgatgacaatgggaaggagctgcggatgctcgtggaaccttccagcgctcacccgagccctgatgccttcagactgatgatgacagagccagaacacaacccctccacaagcggctgcagtagtgagcagtctgccaaagctgacgcgcacaaagaactgataaggaccctgagagagctgaaggttcacctccctgcagacaagaaagccaaggggaaggccagcacgctggcaaccttgaagtatgccctgcgcagcgtgaagcaggtgaaggctaacgaggagtactaccagctgctgatgtccagcgagagccagccctgcagtgtggatgtgccctcttacaccatggagca

SEQ ID NO: 765 - DNA, 1927 bp, Cricetulus griseus
ggaaaagagaagagcaaacaggcactttcaggagcaatcccctcacctccaagccgactgcgctctaggaatccaaattccgtgcctcccgaagacaaaggcgccaaagagagcggcggcggaccccagggcgtgggcccaccgcggagccgcaccgcccggcgcccgacggcggaccatgtctcccgcccctcgaccctccagcttcctgctgctccccctgctcacgctcggctccgcgctcgcctccctcgcctgggcccaaagcagcaacttcagccccgaagcctggctgcagcaatatggctacctacctccaggagacctgcgtacccatacacaacgatcaccccagtcactctcagctgccgttgccgccatgcaaaggttctatggtttgcaagtgacaggcaaggctgatttggacaccatgaaggccatgaagcgccctcgttgtggtgttccagacaagtttggtactgagatcaaggccaatgttcggaggaagcgctatgccatccagggcctcaaatggcagcataatgagatcactttctgcatccagaattacacccccaaggtaggcgagtatgccacattcgaggccattagaaaggccttccgagtatgggagagtgcaacgccactgcgcttccgtgaagtgccctatgcctacatccgagagggtcacgagaagcaggctgacatcatgatcttgtttgctgagggtttccacggcgacagtacaccctttgatggtgaagggggcttcctggctcatgcctatttcccaggccccaatattggaggggacacccacttcgattctgctgagccctggactgtccaaaatgaggacctaaatggaaatgatgtcttcctggtagctgtgcatgagttgggccatgctctaggcctggagcattccaacgatccctctgccatcatggcgcccttttaccaatggatggacacagaaaactttgtgctacctgacgacgatcgccgaggcatccagcaactttatgggagtaagtcagggtcacccaccaagatgccccctcagcccagaactacctcttggccctctgtcccagataagcccagaaaccccacctatgggcctaacatctgtgatgggaactttgacaccgtggccatgctccgaggagagatgtttgtcttcaaggagcgatggttctggcgggtgagaaataaccaagtgatggtaggatacccgatgcctattggccagttctggaggggcctaccagcatccatgaatactgcctatgagagaaaggatggcaaatttgtattcttcaaaggagacaagcactgggtgtttgacgaggcttccctggaacctgggtaccccaagcacattaaggagctaggccgaggactacctactgacaagattgatgcagctctcttctggatgcccaatggaaagacctatttcttcaggggaaataagtactaccgtttcaatgaggagttcagggccgtggacagcgagtaccctaaaaacatcaaagtctgggaaggaatccctgagtctcccagagggtcgttcatgggtagtgacgaagtcttcacatacttctacaaggggaacaaatactggaaattcaacaaccagaagctgaaagtagagcccgggtaccccaagtcggctctgcgggactggatgggctgcccttcagggggccgacctgatgaggggactgaggaggaaacagaggtgatcattatcgaggtggacgaggagggcggcggagctgtgaatgccgccgctgtcctactgcccgtgctgctgctggtgctggtgctggtggtaggccttgcagttttcttcttcagacgccatgggacccccaagagactgctttactgccagcgttcactgctggacaaggtctga

SEQ ID NO: 766 - DNA, 1720 bp, Cricetulus griseus
  misc_feature (1370)..(1410): n is a, c, g, or t
  misc_feature (1448)..(1464): n is a, c, g, or t
  misc_feature (1466)..(1495): n is a, c, g, or t
gatctacaaggatgataccaactatcgcaatctaagcaatagtggagaggctaccttaaatgtccttccccaatactgagattaatgactaccttatatgccatcctagagccttcatccagtggctgatgtaagcagaggcagacacccacagctatacactgaactgaactctggaacccagttgcaaagagggaggagtgacgagcaaagaggtcaagcccaggctggtgaaacccacagaaaaagctgacctggggagcacatgcaccccagactgatggctgggaggccagcatgggactgattcagaccccctaaatgtgggtgtcagtgaggaggcttcagcaactatggggcctctggtaggagatcagtatttattcctggtgtacgatggactttgggagcctattctacatggaaggatgctctttctgcctggacacattcagggagggcctaggccctgcccttgatgatatgacagactttgggaatcccttatggagggcctcatgctccctggggagccgaggggggatggcatgaggattagtgggggtcaggggaggagggaaaggagagggagctgggattggcatgtgaagcaggcttgtttccaatttaaattaaaaaatataaaatataaaatatggggagtggcatgtctattgtaagattattgaaaaaattatatataattcagctaaagagcctccatagtatctggattatttatggtggcatgtccttccatagcaaaaaaatgctaaaaccccagtggctgaataccatacaaatatagtttttgcacaaagtccagctcatagattttcattcagtggttcttcaggaccagcctcttcccatctcattgtattccattcagggttttaggacatttccttctagactgcagaggggaaaagagcctaaagacaacaccttggtggctttctttagcaagtccaggaactgaacacctcactcttgtcagcagtccatgaccttactcagccactcaactgcaaatgtaactgagatacccaatagaagagcatacctccatatcctaggcacagccattgcaatcaacactatatcagacattgttgattgtctcctgatgggcagcagcacactatcaaccacaagtttaatggcaatgcttttcttaacattgataaagtaaacaagtaatgaagaacaggaagagcaataagatataaaataaagaaaggacttggatgaaagggataaatattttaatgctgttgcaatggagttcagagccaatatgcagtattaaactaagagatttgattagtgttaaagagcacatctgactgttcattttcattttttcnnnnnnnnnnnnnnnnnnnnnnnnnnnnnnnnnnnnnnnnngagggttaggcttagggtgagggttagggttagggtgnnnnnnnnnnnnnnnnngnnnnnnnnnnnnnnnnnnnnnnnnnnnnnnccctactctgaaatatttgtaagatctcagtcaacatttagcctttcattctgttcttcttaagggctcgctctcctggttttttctttgttttcttttggttctgagtgtgtgatttgaaagagtcgggatgagatgagaggggagaaattctgttcatcctaagcatttctcaataaacaatattcttaggctgtgggtcacaacctcatatagaattgtgcc

SEQ ID NO: 767 - DNA, 1362 bp, Cricetulus griseus
  misc_feature (14)..(14): n is a, c, g, or t
tatataccgttgcngtgcccgctttgaagtcagacgttgttcagtttgtactcaggctcaattaatacaagttattttatttctaaatttaattatgcttctgccagcttcaatttaattggtagactgaagccaacacatataattcaggcttaggctaagagataaacaacacaatgctaataaaaacacacagcaaaaaaaaaaaaaatcacagtaagtattccccttttccttttgtgctaaggttagggttagggttgaagttggggttggggttggagttggggttagggttagccttcctccatccaaccgctcaccttctcatcttctctttcttagattcttccttcttttctgtcttcccaacagacccattgcccctttcaggtaaatatgctaatggctcagttattcccctgatgattacaactcaaatttcaacaaatgctctctgagtaagtacttcagaagggaaccttcagataatctaattaagaatatgattaaaatgttttttattaggtccaaatattctaccctactgagacttctggagtgtcttctttggataatacatcacagacacttccccctcttgttttattgatgtcactgatgaagagctttaagcatctgagtgaatgatcagaagctgaaaaatggcagaaagaaaaaatgtaaatatatggatttcacaaaatccttaaagctatttattttactcatcattgactgtgatttacttaaagtatcactatttggatttgtttcattttagcaagtcatcataatgaattttttaagagggttttaattctacttgctgtgtatttttcttgaatagagaacatttgtcttagaattttgtgaggtctgtaaccatatgtttttgcatatagtctcttatgtaaggagtttcagtgaaattttctttgttaatatcacctccagataaatctttaattaaaaggtttgaatctttattcagcagtgtgaaatgctttgataagaatttctaagcataattacttatagaaaatttgcatatggtgggaataatgttcaaagacctggaagacatttgtaaaatttgtacttcagtggagctacctaaatatataaaatataacttatgtagctcaagaagactatttttataactatgttttattttggaaaaaagcagatgttttattatctttcaggaagggaatgattttgcttaaaatgttatttcctatgatatatcactttatataaaatgtgtttaaagtaagaaaacatcttattaagactctagagatgttatatttggaaatgccacactggattaaaaagttataacttgctaagctt

SEQ ID NO: 768 - DNA, 1528 bp, Cricetulus griseus
  misc_feature (77)..(77): n is a, c, g, or t
  misc_feature (80)..(80): n is a, c, g, or t
  misc_feature (642)..(675): n is a, c, g, or t
  misc_feature (683)..(704): n is a, c, g, or t
  misc_feature (732)..(750): n is a, c, g, or t
  misc_feature (767)..(782): n is a, c, g, or t
  misc_feature (784)..(801): n is a, c, g, or t
gcttttttcaagagttgagagcagtagccccattgggatcccctgagaatgtgtctatagtatgaatgtacatattncanaatttccaaattctgtaaaaatgaaagacatccatctgccagatctcattcctccaaatgtctttaggattacagcctgctgacagtggagtttggttataaaaagaataagtaggacagtttctcactatctccttagcttgttgccaagtgatggagaagtcctttttaaaaaatttgctatttacatgatgtttcttatgaaattctgaggcttctagcacactttcaattaataaatgatcaatttcgccattgccttgtgctagtggacctggcagaaccgtatgggatctgatatgtgtaatgtatagaggattacatctgtttctgattgtttcctataaaaacaacgagattaattctgtattatcaggaacgaattctgaaatctcaatgtgaaagatgactctgtatattgggaatcagtaactatattaagaggttctgtaaaatccataagcaccatgagaattgcatataattctgccttctgtacagaagtatatggactttgaactcctttacttacctcaccagctttataaccagggttaggggnnnnnnnnnnnnnnnnnnnnnnnnnnnnnnnnnnatttttcnnnnnnnnnnnnnnnnnnnnnnttttggagcctatcctgtcacttgctcnnnnnnnnnnnnnnnnnnnaaactcacagagaacgnnnnnnnnnnnnnnnnannnnnnnnnnnnnnnnnnacatgcaccaccaacgcctggctcagactgtcttttttatgaatttaattctgtagttttgggatagttgttgctaatcattcccaaaagtcagtaagagctatttgcaatattcattatccttccataaggaggaaatttcttcattaatactataatttctgctggatgtattccagtcagttgatgaagtcttaatttgccctttaaaatgaaatcagaaatcttttctatatatgtctttaactttttattctgttttgtggcagaaatatccactccaatatggtctcttgcctctgcatcagaattccagaagtatattttttggatggcaagataaccagaatacagtctaaatcaaggtttatctgatctacatgcacatccaatattctgttttctacccattgtaattctttttctgcctttgcggataatatttgtggactgtttaggtccttaaaggccattgttaaaggctttaagtcatgaccttctaccccaataatcatctgaatttgagaaatttctcctagcaagcagcttctgaagacattatttgtaatagccagaacctggaagcaagctagatgcttctcaactgaagagtgaatagagaacatgtggtaccattttcacaatgcaagtactgctcatctggggaacaaaaactcaatgaaatcttaaaattcgaaagcaattggatggcactagaagaaacctt

SEQ ID NO: 769 - DNA, 215 bp, Cricetulus griseus
agtcagcgaatgaggcacagcaaccattctacagagaactctcccattgaaagacgaagcctaatgacctctgatgaaaattaccacaatgagagggctcgtaagagtaggaaccgcttgtcttccagctcacagcacagccgagatcactaccctctggtggaagaagattaccctgacacataccaggacacttacaaaccccataggaaccg

SEQ ID NO: 770 - DNA, 205 bp, Cricetulus griseus
gaggtccgggtgacagtgctgcggcagacaaacagccagatgactgaggtctgtgccacgacattcacaatgaagaataagttgggcttcctagatgatcccttctgcagtggtaccttcaatgaaagcaaagtgaacctcaccatccaaggactgagagctgctgacaccggactgtacttctgcaaagtggagctcatgtacc

SEQ ID NO: 771 - DNA, 433 bp, Cricetulus griseus
  misc_feature (397)..(397): n is a, c, g, or t
tgagaggaaacacatccttgacctgatattacttggaggaaagaacttcttttggttttgtttctctgcatggagtgcaagccagtgtgctgtctagggaaaaagagtgtggatggtccttggatgtccctaaaggaagaataaccactttattaagccagtaaggtcatctagagatcttatttcccagtgcacatgagtatgaaagctggtaacagaataaacatgatatttggaatgtttctagaatatacttaggacacctggcaaggctgacatagattttgctgatttgtctgcttatgaatggacaggatgccagtctggcagtttgcattggcaataaatcaccactagacattttatttaaaatttggcactggcttggaagagtganggattgtcaatttgtttttattttgaagccaggcac

SEQ ID NO: 772 - DNA, 204 bp, Cricetulus griseus
cgccatcatggacaccagccgtgtgcagcctatcaagctggccagggtcaccaaggtcctgggcaggaccggctctcagggacagtgcacgcaggtgcgcgtggaattcatggacgacacgagccgatccatcatccgcaatgtaaaaggccccgtgcgcgagggcgacgtgctcacccttttggagtcagagcgagaagcccg

SEQ ID NO: 773 - DNA, 2085 bp, Mesocricetus auratus
  misc_feature (1949)..(1967): n is a, c, g, or t
atgagcggcggcgaagtggtttgctcgggatggctccgcaagtcccccccggagaagaagttgaagcgttatgcatggaagagaaggtggttcgtgttacgcagtggccgtctgactggagaccccgatgtcctggagtactacaaaaacgaccacgccaagaaacctatccggattattgatttaaatctatgccagcaagttgatgccgggttgacattcaacaagaaggagttcgaaaacagctacatctttgatatcaacaccattgaccggattttctacctggtcgcggacagcgaagaggacatgaacaagtgggttcgttgtatctgtgacatctgtggcttcaatcccacagaagaagatcctgtgaagcccctcggcaactcctcacaggcgcccgttgattcgcctttcgctgggaacacagcgccagcctccacccagctggaagcctctccagtcacactacctccctcttaccagctcatcagcctcccgccacacccagacactctaggcctccaggatgacccacaagactatctcttgctgatcaactgtcaaagcaagaagccagaacccaccagaacccacgctgactctgcaaagcccacctcttccgagacagactgcaatgacaacgtcccttcccataagactcccgcttcctcccagagcaagcatggggtgaatggcttttttcagcagcaaatgctgtatgactgcccaccgtcccgggctgcgtccgtctctgtagactccagcctctataacctgcccaggagttattcccacgacgtgttgccaaaggaatctccgtcaagtactgaagcggatggacagctttacatctttaataccccgtctgggacttcgagtgtagaagcccagatgagacatgtgtcaatcagttacgacattccaccaacacctgggaacacttaccagattccacggacatttccagaaggcacactgggacagtcatccaagctggacaccattcctgatatccccccacctcggccaccaaagccacatctaactcatgaccggtctcctgtggaaacgtgtggcgccccacgcacggcctcagacactgacagcagttactgtgtccctacggctggcatgccaccatccaggagtaataccatttctaccgtggatttgaacaagttgtggaaggatgctagttctcaggactgctatgatattccacggaccttcccgagcgatagatctagttccctggaaggcttccataaccagtctaaaatcaaaaatgtgttgacagtggcaagtgtctcaggtgaagaaccggatgaaaactatgtccccatgaaccccaactcgccaccacgacaacattccagcagctttacggaaccaattcaggaaccaaactatgtgccaatgacccctgggacatttgatttttcttcatttgggatgcaagtccctcctcctgctcatttgggcttcaggtccagcccaaagacccctcccaggaggccagttcctgttgctgactgtgaaccacccccagtggataggaacctcaagccagacagaaaagccaagccggcacctctggaaataaagccgctgccggagtgggaagagctacaagccccggtcagatctcccatcaccaggagcttcgctcgggactcctctagattccccttgtcccctcgacctaactctgtgcacagcacgacatcgagcagcgactcccatgacagcgaagaaaactacgtccccatgaacccaaatctgtccagcgaagatccgaatctctttggcagtaacagccttgatggagggagcagctctatgatcaagcccaaaggagataaacaagtcgaatacttagatctagacctagattctgggaaatccacgccacctcggaagcaaaagaacagtggttcgggcannnnnnnnnnnnnnnnnnnggtggactacgtggtggtggaccagcagaaaactctggccctgaagagcactcgggaagcctggacggacgggaggcagtccacagagtcggaaactcccaccaagagcgtaaagtga

SEQ ID NO: 774 - DNA, 885 bp, Mesocricetus auratus
  misc_feature (639)..(664): n is a, c, g, or t
ttcatcggcacagatgtggtactgcactgtagttttgccaacccactgcccagtgtgaagattacccaggtcacatggcaaaaggccaccaatggctccaagcagaacatggccatctacaacccaactatgggcgtctccgtgctgcccccctacgagaaacgagtggagttcctgcgaccctccttcattgatggcaccatccgcctctcccacctggagctggaggacgagggcatgtacatctgtgaatttgccaccttccctacaggcaaccgtgagagccagctcaatctcactgtgatggccaaacccaccaactggatcgagggcacccaggcagtgcttcgagccaggaagggacaggatgacaaggtcgtggtggccacctgcacctcagccaatgggaagcctcccagtgtggtgtcctgggaaacacgactaaagggcgaggcagagtaccaggaaattcggaaccccaatggcacagtgacagtcatcagccgttaccgcttggtgcccagccgggaagcccaccggcagtccctggcttgcatcgtcaactatcacctggaccgcttcagggagagcctcacactcaacgtgcagtatgaacctgaggtgaccattgagggcttnnnnnnnnnnnnnnnnnnnnnnnnnncagatgtgaagcttacatgcaaagcggatgccaaccccccagccaccgagtaccactggaccacgttgaacggctctctccccaagggtgtggaggcccagaacagaaccctcttcttccgaggacccatcaactacagcctggcaggaacctacatctgtgaggccaccaaccccattggcacccgctcaggccaggtggaggtcaatatcacagaattc

SEQ ID NO: 775 - DNA, 188 bp, Cricetulus griseus
cagcttgaatctgacgagaaggcagctatcacaagcatatgggataaagtggacttggaaaaagttggaggagaaactctgggaaggtaggatctgagaccagggcaggggaggaatggagagaatatgtgcttggcactaaacatcaggcttctttaggggttgtgactatctgactttacgctatg

SEQ ID NO: 776 - DNA, 173 bp, Cricetulus griseus
  misc_feature (25)..(41): n is a, c, g, or t
  misc_feature (136)..(150): n is a, c, g, or t
gagctcacacacttgaccctgtgcnnnnnnnnnnnnnnnnngtgttgctgtcatgaatgtagttcaccctgatgagccacaccctggcattggcaaacagctcacacagggcagagagggaaggagccaggacagnnnnnnnnnnnnnnngaggaccagtttcaactccaatt

SEQ ID NO: 777 - DNA, 208 bp, Cricetulus griseus
tctctggctcttttctccttcttaggttgctgattgtctacccttggacccagagattctttgaaaagtttggagacctgtcctctgcctctgctgtcatgagtaacccccaggtgaagcgccatggcaataaagtgatcacctcctttgctgatggcctgaaacacctggacaacactgaaggcacctttgccagtctgagtgagct

SEQ ID NO: 778 - DNA, 148 bp, Mesocricetus auratus
gagctcagccagtgctggggacaggagggcgcccctgaggagccagccccaggccacagtcacggaggaagcccaagggtctcaggaggcctgtgcaggctccaggagttcagattcctcccacggcagccatgggacccatgtcaat

SEQ ID NO: 779 - DNA, 1262 bp, Cricetulus griseus
gtagcccacccccctcttaaagccgcggcgggaagatgaggtttctgaggccggtcctgggcggcagcgccgcgatgccgggcgcgaccctgcagcgggcctgccgcctgctcgtggccgtctgcgcgctgcacctcggcgtcaccctggtctattacctctcgggccgcgacctgagccgcctgcctcagctagtcggggtttcctctacacttcggagcggcacgatcggcgccaccgccaacaagcagccccccggcgcgcggccgccgcctcctgtgggagtctcctcgaagcctcgcccgggtcccgactccagccctggtacggcttttgaccccggcctgaagagcaactggacttcggtcctagtgccccctaccactgcactgttgacgctgcccgcttgccccgaggagtccccgctgctcgttggccccatggtgattgactttaatattgctgtggacctggagcttttggcaaagaagaacccagagataaagatgggcggtcgttattcccccaaggactgtatttctcctcacaaggtggccatcattatcccatttcgcaaccggcaggagcacctcaaatattggctgtattatttgcatccggtcctacagcgccagcaactggactatggtatctacgtcatcaaccaggctggagacaccatgttcaatcgagctaagcttctcaacataggcttccaagaggccttgaaggaccatgactacaactgctttgtgttcagtgatgtggaccttattccaatggacgaccataatgcctacaggtgtttttcacagccccggcacatttctgttgcaatggacaagtttgggtttagcctgccttatgttcagtactttggaggcgtttctgccctcagtaaacaacagtttcttgccatcaatggatttcctaataattattggggctggggaggagaagatgatgacatttttaacagaatagttcataagggaatgtctatatcacgcccaaatgctgtagttggaagatgtcgcatgatacgacactcaagagacaagaaaaatgagcccaatcctcagaggtttgaccggattgctcacacaaaggaaactatgcgctttgatggtttgaactcacttacctaccaggtgttgaacgtagagagatacccattatataccaaaatcacagtggacatcgggacaccaagatagcattgtggaacaaataacagacctgaaaatggccaggggctcaga

SEQ ID NO: 780 - DNA, 750 bp, Cricetulus griseus
gcggcgggcaccatccaaacctctgtcaatgacgtcggctccaagacacaccttacctgctctttgaacagcagtggtgtcgacatcattggccaccgctggatgagaggtggcaagatactgcaggaggacacactgcctgacctgcagacgcagtacacggtggacatagatgaccgctctggggactatgcctgcatcttccttcctgagcccgtgggcaggagcaacatcgttgtggaggggccacccaggatcaaggtcgggaagaagtcagaacattccagtgagggagaaaatgtgaggctgatctgcaagtctgagtcatctcacccccctgtcactgagtggtcctggtttaagacctctgactctggggaccagctgatcaccaacagctctgagagcaagtacgtcgtgatatccacagctgacagatcagagctgaccatcagcaaccttgacataaatagtgaccctggtacctacatgtgtaacgccaccaacacccagggcagtgtccaggagataatgacactgcgtgtgcgaagccgcctagcagccctctggcccttcctgggcatcgtggctgaggtcctggtgttggtcactatcatcttcatttatgagaagcgacggaagccggaccagaccctggacgaggatgaccctggtgccgccccactgaagggcagtggtcatcacatgaacgacaaggacaagaatgtacgccagaggaacgccacctga

SEQ ID NO: 781 - DNA, 733 bp, Phodopus sungorus
ccgggccaggtggacttctatgcgcgcttctcgccgtcgccgctttccatgaagcagttcctggacttcggatcagtaaatgcttgtgaaaagacctcatttatgtttctgcgacgagagttgcctgttagattggccaatataatgaaggaaataagccttctcccagacaatctcctcaggacgccatcagtacagttggtacaaagttggtatatccagagtcttcaggagctgcttgattttaaggacaaaagtgctgaagatgctaaaactatttatgaatttacagacacagtgataaggatcagaaaccggcacaatgatgtcattccaaccatggcccagggtgtgaccgaatacaaggagagcttcggggtggatcctgtcaccagtcaaaatgtccagtactttttggatcgattctacatgagtcgcatttcaattagaatgttactcaaccagcactctttattgtttggtggaaaaggaagcccatcttatcgaaaacacattggaagcataaatccaaactgcgatgtagtcgaagtcattaaagatggctatgaaaatgctaggcggctttgtgatttgtattatgttaactctcctgaactagaacttgaagaactaaatgcggtctcaccaggacagacaatacaagtggtttatgttccatcccatctctatcacatggtgtttgaactgttcaagaacgcaatgagggccacca

SEQ ID NO: 782 - DNA, 547 bp, Phodopus sungorus
  misc_feature (320)..(345): n is a, c, g, or t
tccgggcgctgttgaagaatgcgtccctagcaggggcgcccaagtacatcgagcacttcagcaagttctccccgtccccgctgtccatgaagcagtttctagactttggatccagcaatgcctgcgagaaaacttccttcaccttcctccggcaggagctgcccgtgcgcctggccaacatcatgaaagagattaatctgctccccgacagagtgctgggcaccccctcagtgcagctggtgcagagctggtatgtccagagcctgctggacatcatggaatttctggacaaggacccagaggaccaccgtacactaagnnnnnnnnnnnnnnnnnnnnnnnnnntccggaaccggcacaatgacgtagtgcccaccatggcacagggagtgctggagtacaaggacacctacggcgatgacccggtctccaaccagaacatccagtacttcttggaccgtttctacctcagccgtatctccatccgcaagctcatcaaccagcacaccctcatctttgatgggagtaccaacccagcccaccccaa

SEQ ID NO: 783 - DNA, 482 bp, Phodopus sungorus
gcccgtccccgctgtccatgaagcagctactggactttggttcagaaaatgcctgtgaaagaacgtctttctcttttctgcgacaagaattgcccgtgagactagccaacatcctgaaggagattgacatcctccctgagagactggtgaataccccctctgtgcagctggtgaagagctggtacatccagagcttgatggacttggtggagttccatgagaagaacccagaagatcagaaagctctatcagactttgtagacacgctcatcaaagttcgaaacagacatcacaatgtggttcctacgatggctcaaggaatccttgagtataaagacacctgcacagttgacccagctaccaatcaaaatcttcagtatttcttggaccggttttatatgaaccgcatctctactcggatgctgatgacccagcatatccttatattcagtgactcaaagacaggaaacccaagccacatt

SEQ ID NO: 784 - DNA, 1822 bp, Mesocricetus auratus
agagacaggcgctcagtaagaagtgacagctgtggggacagtatgctggccaaaggactttccttgcgctcagtgctggccaaaggctgccaacctttcttgagccctacctggcagagttcagtgctggctactggagggggagctaatatctctaccaatagccctcgtcccttcaatgagattccttcccccggtgacaatggttggctaaacctgtaccacttctggagggagaatggcacacacagaatccattaccatcacatgcagaatttccagaagtatggccccatttacagggagaagcttggcaataaggattctgtttatattctggaccctgaagatgcagcacagctctttttaagcgaaggtccctacccagaacgatatcttgtgcccccctgggtcgcctatcaccagtattacaagagacccataggggtcctgtttaagagttcagaagcttggaagaaagatagacttgtcctaaaccaggaagtgatggcacctgaagccatcaagaacttcgtgcccctgctggaaggtgtagttcaggacttcatcaacgtcttgcacagacgcatcaagcagcagaagtctggaaatttctcaggggacatcagcgatgacctgttccgctttgcctttgagtccatcaccagtgttgtatttggggagcgcctggggatgttggaggagattgtggaccctgagtcccagcggttcatcgatgccatctaccagatgttccacaccagtgtccccatgctcaacctgcctccagaactttttcgattcttcagaactaagacctggaaggagcatgcagctgcctgggatatgattttcaaaaaagctgatgattatacacagaccttctactgggacttaagacagaagcaagagttcagcaagtaccctggtgtcctttacagcctcctgggtggcaacaagctgcccttcaagaacatccaggccaacattacggagatgctggcaggaggcgtagacacgacctccatgaccctgcagtggagcctttatgagatggcacacaacttgaaggtacaggagatgctgcgggcagaggttctggctgcccggcgtcaggcccagggagacatggtcaagatggtgcagttggtcccactcctaaaagccagcatcaaggagacactgagactccaccccatctctgtgaccgtacagaggtatcttgtggatgacctggtacttcgaaattacaggattcctgccaagatgttggtgcaggtggctaactatgccatgggccgagaacccagcttcttccccaacccaaacaagtttgacccaactcgttggctggaaaaaagcaaaaataccacccacttccgttacttgagctttggctggggtgttcgtcagtgtctgggccggcggattgcagagctggagatgaccatcttcctcatcaatgtgctggagaactttagaattgaactccaaagtctccatgatgtggggaccaagttcaacctcatcctgatgcctgagaagcccatcctcttcaacctccagcctctcaagaaggaccttgggacaaccacgaacagatagggtggcactgtctgaacttcagactggagtcacatggggagatggcccagtgggggcatttgggtgggtgtctctgtatctccagaaaaacctgctcctttggggtggttcttagctctcagtggccaactgcttaggttagccaggccctcctctccttcatcctctctcctttacttaccctgaaggttaataaacacatgaactctgaaaaaaa

SEQ ID NO: 785 - DNA, 555 bp, Cricetulus griseus
  misc_feature (538)..(555): n is a, c, g, or t
gtggaaagtgttggagatattaaatcatgttgccatttattctcttttccacgctgcttcctctcatatttactgaatctgaacagcaactgtggttctgcaactcctccgatgcaactttttcctacagttactgtgatagcatgaagttccctttttcgattactgctgaaccctgtataacattgaagggaaccaatggatttttacatattaagttcatcccaaggagagacttaaaaaaattatatttcaacctctccatcaatgtcaactccatagaggtgccaactcgaaaagaaattatttgccacggatatgatgacaattattctttctgcaaagctctgaaaggagagactgtgaatacagtagtaccattttccttcaagggaatactatttcctaagggccaatacagatgtgttgcagaagccattgtaggggataatgaagaaaagttattttgtttgaattttaccatcattcaccaccctaatgtcaattagaataaattaagaatatatgtttttatttnnnnnnnnnnnnnnnnnn

SEQ ID NO: 786 - DNA, 311 bp, Mesocricetus auratus
cggggcagggagtccccttcccatcacccctgttaatgccacctgtgccacacgccacccatgccatggcaacctcatgagccagatcaagaaccaactggcacagctgaatggcagcgccggccccctcttcatttcctattacacagctcaaggggagccgttccccaacaacgtggacaagctgtgtgggcccaacatgacagatttcccacctttccatcccaacgggacagagaagaccaagttggtggagctgtatcggatagtcgcatacctgagtgcttccctgggcaacgtcacccggaatt

SEQ ID NO: 787 - DNA, 2521 bp, Cricetulus griseus
  misc_feature (642)..(676): n is a, c, g, or t
  misc_feature (1092)..(1113): n is a, c, g, or t
agaatgcccctggcgctgctcctgctcttgcccatcctgggttctgcaaaagctcaggttaatccagccatatgtcgctatcctctgggcatgtcaggaggccacattccagatgaggacataacagcttcaagtcagtggtcagaatccacggctgccagatatgggaggctggactctgaagaaggagatggagcctggtgtcccgagattccagtgcaacccgatgacctgaaagaatttctgcagattgacttacgtaccctccactttatcactcttgtggggacccagggacgtcatgcggggggtcatggcattgaatatgcacccatgtacaagatcaactatagtcgagatggcactcgctggatctcctggcgtaatcggcatggaaagcaggtgctagatgggaacagtaacccttatgatgtcttcctgaaggacctggagccacccattgtagccagatttgttcgccttatcccagtcactgaccactccatgaatgtgtgcatgagggttgagctttatggttgtgtctggctagatggcttggtgtcttacaatgctccagctgggcagcagtttgtactccctggaggctccatcatttatctgaatgattctgtctatgatggnnnnnnnnnnnnnnnnnnnnnnnnnnnnnnnnnnnagttgactgatggggtgtctggcctggatgattttacccagacccatgaataccacgtgtggcctggctatgactacgtgggttggcggaatgagagtgctaccaatggctacattgagatcatgtttgaatttgaccgaatcatgaactttactactatgaaggtccactgcaacaacatgtttgctaaaggtgtgaagatctttaaggaggtccagtgctacttccgctctgaagccagtgagtgggaacctactgccgtctcctttccccttgttctggatgacgtgaaccccagtgctcggtttgtcacagtgcctctccaggaccgaatggctagtgccatcaaatgccagtaccattttgccgacacatggatgatgttcagcgagatcactttccaatcagatgctgcnnnnnnnnnnnnnnnnnnnnnnttgcccacctctcctatggcacccacaacctatgatcccatgcttaaagttgatgatagcaacactcggatcctgattggctgcttggttgccatcatcttcatcctgctggctatcatcgtcatcatcctgtggaggcagttctggcagaagatgctggagaaggcttctcggaggatgctggatgatgaaatgacagtcagcctttccctgcccagcgagtccagcatgttcaataacaaccgctcctcatcaccaagtgaacaggagtccaactctacttatcatcgaatctttccccttcgccctgattaccaggagccatctagactgatcagaaaactcccagaatttgctccaggggaggaggaatcaggctgcagtagtgttgtgaagccagcccagcccaatggacctgagggtgtgccccactatgcagaagctgacatagtgaatctccagggagtgacaggtggcaacacctactcagtgcctgctgtcaccatggacctgctctcgggaaaagatgtggctgtggaagagttccccaggaaactgttaactttcaaggagaagatgggagaaggccagtttggggaggttcatctatgtgaagtggagggaatggaaaaattcatagacaaagattttgccctatatgtcagtgccaaccagcctgtcctcgtggctgtgaagatgctccgagcagatgccaacaagaatgccaggaatgattttcttaaggagataaagatcatgtctcggctcaaggacccaaacatcatccgtctcttagtcgtgtgtatcaccgatgacccactctgcatgatcacagaatacatggaaaatggagatctcaatcagtttctttcccgccacgagcctctgagttcttgttccagcaatgccacggtcagttatgtcaacctgaagtttatggctacccagattgcctctggtatgaagtatctctcatcccttaactttgtccaccgagatctggccactcgaaactgcttagcgggcaagaactacaccatcaagatagctgactttggaatgagcagaaacctgtacagtggtgactactaccggatccagggccgggcagtgctccctatccgctggatgtcctgggaaagcatcttgctaggcaaattcaccacagcaggtgatgtgtgggcctttggggtgactctgtgggaaactttcaccttttgccaggagcagccctattcccagctgtcagatgagcaggttattgagaatactggagagttcttccgagaccaagggaggcagacttatctccctcaaccagctatttgccccgactctgtgtataagctgatgctcagctgttggagaagagagaccaagcaccggccatcattccaagaaatacacc

SEQ ID NO: 788 - DNA, 2318 bp, Mesocricetus auratus
  misc_feature (2089)..(2121): n is a, c, g, or t
gcagatgccaacatggcaacggttggggttggcggatccaccgcggcgaccgggccaggggccgtgtccgctggcgcgctggagcctgggtccgccacagcggctcaccggcgcctcaagtacatatccttagctgtgctggtggtccagaacgcctccctcatccttagcatccgatatgctcgcacactgcctggtgaccgcttctttgccaccaccgctgtggtcatggctgaagtgctcaaaggtgtcacctgtctcctgctgctcttcgcccagaagaggggtaatgtgaagcacctggctctcttcctccacgaggctgtgctggtgcagtatgtggacacactgaagctcgccgtgccctctctcatctataccttgcagaataacctccagtatgttgccatctccaacctgccagccgccactttccaggtgacctatcagctcaagatcctgactacagcgttgttctccgtgctcatgttgaaccgcagcctctcacgcctgcagtgggcctccctgttgctgctcttcaccggtgtggcgattgtccaggcacagcaggctggtggcggtggcccacggccactagatcagaatcccggggcaggactagcagctgtggtggcctcctgtctctcttcaggattcgcaggggtatactttgagaagatcctcaaaggcagctcaggttccgtgtggctgcggaacctacagctaggcctctttggcacagcgctgggcctggtggggctctggtgggctgagggcactgctgtggcccgtcgaggcttcttctttgggtacacacctgctgtgtggggtgtggtactaaaccaagcctttggcgggctattggtggccgttgttgtcaagtatgctgacaacatcctcaagggctttgccacctccctgtcgattgtgctgtccactgttgcctccattcgcctctttggcttccacctggacccattatttgccctgggcgctgggctcgtcattggtgccgtctacctctacagccttccccgaggtgcagtccaagccataacttctgcttctgcctctgcctccgggccctgcattcaccagcagcctcctgggcagccaccaccaccgcagctgtcttctcgaggagacctcatcacggagcccttcctgccaaagtcagtgctggtgaagtgagagctggtggtggttgggagagctggggcggggggtgggggttgggtttgaggggggttagcttctgctggtccagaagttgttgccaggcctgacttgtggggttggagggcttttttttttctcccacacttctagagggatatggaagtagggctgaatgtcacatgaacccttcctggtagatggactcccctctcctgaaggagctgcttcctttgccccaggctatcctctttgggaacagggttggggtaccgctattcccggctttccctcgtgaccctctgctggaaatgtcctgtctctcatgcctgggacagttcatcccagccatcctacagactggacaaaagcccagcagttcttcagtaacgactaatgactactcgtggggttccatttcctattgtatgaggccttctctcgtgcaccattaccctggatcatgtcaacagcttgggctctgctgtggctttggggcagtttccctggtacagagacccttgaagatcggccttttgtaagtgcctggagtgaggacagaggcacaagctgagaattgggcagcagttcatcttggggaaggtgcaataagcaccgttcactttttaatagttggggcatttgtgataatcagattaatgatccagagtgttgggaaaatgggaaggggagatctttgaagtgactgaatcttgtgtaattgaagagacagaaatgaaggattatcttctgggacatccagagaggaaaaataaagctgccaatgcactttcacagccccattggctgtttaaacacccttacttcatggcgggtatcagaattgatgaattgtggaacctgcacccctgcgctccccaaagcttactaactccttaactgtatccaagannnnnnnnnnnnnnnnnnnnnnnnnnnnnnnnngcgtgtgtatgtgtgtgtgcgcgcacacataaatacacgcatggaaggtgcctgggctgtctttgctatatgtaaataggaccattggatctttatttttgattaatttgttctgatttgggggggtgttgttttctaaggaactgtaatgaacatgtcaggatacccaatgccaaataaagatgttgtatttattt

SEQ ID NO: 789 - DNA, 2470 bp, Cricetulus longicaudatus
ggccgcgccgcgtcgaacgtcacgccttcgcgccgaggccccgccccgggtgaggtaaaatggccgcagccttggcggcgagtggaatgcttcccacagcgggcattataattgattaggtttctgatatccagatctgttcctaagacgtaaattgacaagaccacatttctgtgcaaacattgaggagctagttggcaacatgaaggtcttctgcggtcgtgccaatccaaccacaggatccctggaatggctggaggaggatgaacactatgattaccatcaggaaattgccaggccagaagagggcatcagattccattggagatggctgtgagccaccatgtggttgctggtaattgaactttatctggaagagctgccagtgctcctaacctctgaatcatctctccagctcctatctcagaattgattaaggaaattcttcaggtcatcctatgcggatatgctacatgacaaagacagaaatataaaatattaccagggtatccgggcagctgtgagtagggtgaaagacagaggacagaaggccttggttcttgacatcggcacgggcacaggtctcttgtcgatgatggcagttactgcaggtgctgacttctgctatgctattgaggtttttaagccaatggctgatgctgctgtgaagattgtggagaaaaatggcttcagtgataagattaaagttattaacaaacattccactgaggtgacggttggaccagatggtgacttgccatgtcgtgctaacatcctggtcacagagctgtttgacacggaactgattggggagggggcactgccctcttatgagcatgcgcatagacatcttgtgcaggaaaattgtgaagcagtgcctcacaaagcaactgtctatgcccagctggtggagtccagaaggatgtggtcatggaacaagctgtttcctgtccatgttcagaccagtcttggagagcaggttatcgtccctccctcagaactggagaggtgtcctggtgcaccttcagtctatgacattcagctgaatcaggtgccatctactgacttcactgccctcagtgatgtactaccaatgttcagtgtggacttcagcaagcaagtcagtagctcagcagcctgccatagcaagcagtttgtacctctggcatctggccaagcacaggtggttctgtcctggtgggacattgaaatggaccctgaggggaagatcacatgtaccatggcacccttttgggcacagacaaacccacaggagcttcagtggcgggaccactggatgcagtgtgtatacttcttgccacaggaggagcccgttgttcagggctcaccccgatgcctggtagcccaccatgacgactactgtgtgtggtacagccttcagaggaccagcgctgatgagaatgaggaagtttaccaagtgcgccctgtgtgtgattgtcaggctcacttgctctggaatcggcctcggtttggagagattaatgatcaggacagaactgatcagtatgcccaagccctgaggactgtgctgatgccaggcaccatctgtctttgtgtcagtgatggcagtctgctctctctgctggcccatcaccttggggcggagcaggtgtttacagttgagagttcggcagcttcctatagactgatgaaaaggatcttcaaggctaaccacttggaagataaagttagtatcatcaagaaacggcctgagttgttaacatctgcagacctggagggtaagaaggtctccctcctcctgggtgaacccttcttcgccaccagcctgctgccatggcacaacctatacttctggtatgcccgtacttctgtggaccagcacctggaacctggagctgtggtgatgccccaggctgcttcactgtatgctatgatcgtggagttcagggatttgtggcggatccggagcccttgtggtgactgcgaaggttttgacgtgcacatcatggatgatatgattaagcactccctggattttcgagagagcagagaggcagaaccccacccattgtgggagtacccctgccgcagcctttctgagcctcagcagattctgacctttgatttccagcagcctgtgccccagaagcctgtgcatgctgagggctccatggaactgagaagacctgggaagagccatggtgctgtcctgtggatggaatatcatctgactccagacagcacagtcagcaccggcctcatgaatcctttggaagacaagggggactgctgctggaacccccactgcaagcaagctgtgtacttcctcagcaccacagtggatcccagagtgcctctggatggccctcagtctgtcagctatgctgtggagtttcatcccctcactggagacatcaccatggagtttaggcttgcagacaccttgaactaattccctcattgagaaattaaatggccaataggctgc

SEQ ID NO: 790 - DNA, 471 bp, Mesocricetus auratus
cgcctactatcctgctcttacctcttggccatccctgctaggagatatgctggctgatgccattaactgcttaggattcacatgggcttccagtccagcgtgcacagagctggagatgagcgtcatggactggctggtgaagatgctggggctccctgagtacttcttgcatcaccatcccggcagccaggggggaggcgtcttgcagagcactgtcagcgaatccactttgattgccctgttggctgcaaggaagaacaaaatcctagaaatgcaacagattgagcccgatgctgacgagtcctctctgaatgctcgtctcattgcctatgcctctgaccaggctcactcctcagtggagaaggctggtttgatttcccttgtgaagatgagatttctgcctgtggacgacaacttctcactccgaggagaagctcttcagagagccatcgaggaagacaagcaacaggg

SEQ ID NO: 791 - DNA, 387 bp, Mesocricetus auratus
ccttcctctcctactacaccagagtccttcctcctgtggctgatgactgcccaactcccttgggtgtgaaaggaaataaggagcttcctgattcgaaagaagttctggaaaaagttcttctcaggagaaagttcatccctgatccccaaggcacgaatatgatgtttgcattctttgcccagcactttactcatcagtttttcaagacagatcagaaacgaggacctggcttcacccgaggactgggccatggggtggacttgaaccacatttacggtgaaaccctagagagacaacataaactgcgccttttcaaggatggaaaattgaagtatcaggtcattggtggagaggtgtatcctcccacagtcaatgacactcaggtag

SEQ ID NO: 792 - DNA, 1185 bp, Cricetulus griseus
atggcgctgctggacctggcccaggagggaatggccttgttcggcttcgtgctcttcgtggtgctgtggctgatgcatttcatgtccatcatctacacccggttacacctcaacaagaaggcaacagacaagcagccgtatagcaagctccctggtgtctctcttctgaaaccattgaagggggtggatcctaacctaatcaacaacttggagacattctttgaactggattatcccaaatatgaagtactcctttgtgtacaagatcatgatgatccagccattgatgtatgtaagaaactgcttggaaaatacccgaatgttgatgctagactatttataggtggcaaaaaggttggcattaatcctaaaattaataatttgatgccaggatatgaagttgcaaaatatgatctcatatggatttgtgatagtggaataagagtcattccagatacattaactgacatggtcaatcaaatgacggagaaggtgggcttggttcatgggctgccttatgtagcggacagacagggctttgctgccacattggaacaggtatattttggaacttcacacccaagatcctatatctctgccaatgtcactggcttcaaatgtgtgacgggaatgtcttgtttaatgaggaaggatgtgctagatcaggccggagggctgatagcctttgctcagtacattgctgaagattactttatggccaaagcaatagctgaccgaggttggcggtttgcaatgtctactcaagttgccatgcaaaactctggttcatactcaatttctcagtttcaatccagaatgatcaggtggaccaaattgagaattaacatgcttcctgctacaataatttgtgagccaatttcagaatgctttgttgccagtttaattattgggtgggcagcccaccatgtgttcagatgggatatcatggtcttcttcatgtgccattgcctagcatggtttatatttgactacattcaactaaggggtgtccagggtggcacactgtgtttttcaaaacttgattatgctgtggcttggttcatccgagaatccatgacaatatacattttcttgtcggcattatgggaccctactataagctggagaactggtcgctacaggttgcgttgtggaggaacagcagaggaaatcctagatgtataa

SEQ ID NO: 793 - DNA, 2454 bp, Mesocricetus auratus
  misc_feature (412)..(428): n is a, c, g, or t
  misc_feature (1738)..(1799): n is a, c, g, or t
  misc_feature (1840)..(1840): n is a, c, g, or t
gacgacatagactggttacatagccgcaggggcgtgtgcaaggtagatctttacagcccaaaaggacaacaagatcaggaccgaaaagtgatatgctttgtggatgtgtccaccctgaatgtggaagataaagattccaagggtgctgctggttccaggtctgaaggcgaattagatctggagaatctggaagaaaaagagattattgtgatcaaggacactgaaaaacaagaccagtctaagacggagggttccgtgtgccttttcaaacaagctccctccgatcccataagtgtcctcaattggctcctcaatgatctccagaagtatgccttggggttccaacatgcattaagcccctcagcctctagctgtaaacataaagtgggagacctagagggtgactatcacnnnnnnnnnnnnnnnnnctgctacagtgtgtacgctgatcaactaaatatggattttttgaacaaaggacctcaaagcctacgcctagaaatggcggcatcaaaaaacaccaacaataaccaaagtccctcaaatcctgcagccaaatctcctagcaatcaaaggtcagttgccacctcagatgcagaatgctctatggacgatctttccttctatgtcaaccgattgtcttctctggtaattcaaatggcacgaaaagaaatcaaggacaaattggaaggtggaagcaaatgcctccatcattcaatatatgcatccccaggagaaaaggggaaaaccagtccccgaagcgctgtcagcaagattgcttctgagatggcccatgaagctgtagaactgacctcagcagaaatgcgcggcaatggggaggaatgcagggatggccggaaaacctttctatatagcgaattatctaacaagaacaagtgtggagagaagcagatgtgcccaaaagatagcaaggaatttgcagattccatcagcaaggggctcatggtttatgcaaatcaggtggcatctgacatgatggtctctgttatgaaaactttgaaagtgcacagctgtgggaagccaattccagcttgtgtggtcctgaagagggtactattaaagcacaccaaggaaattgtgtctgatttgattgactcatgcatgaagaacttgcataacataacaggggtcctgatgacagactcagactttgtttctgctgtcaagagaaatcttttcaatcatggaaaacaaaatgcagcggacatcatggaggccatgctaaagcgtttggtcagtgctcttcttggtgagaagaaggagactaaatctcagagtctggcatatgcaaccctaaaagctggaactcatgatccaaaatgcaagaatcagagtcttgagttctcagctatgaaagctgagatgaaaggaaaagataaatgcaaagtgaaaacagatccatgctgcaagtcactgacaagtgctgaaaaagtcggcgaacatatcctcaaagagagcctcactatgtggaaccagaagcaaggaaaccagggcagggtgactaccaacaaagtgtgtactactaaagatgagaagagagaaaagctcagtccttctacagattcactggccaaagatctgattgtctctgcccttatgctgattcaataccatctgacccagcaagcgaagggcaaagatatatgcgaagatgaatgccctggttcctccatgggatatatgtcccaaagtacacaatatgagaagtgtggaggtnnnnnnnnnnnnnnnnnnnnnnnnnnnnnnnnnnnnnnnnnnnnnnnnnnnnnnnnnnnnnncgcatgtgcgaaggaaactcaactggattcccacaagctgnatatgtcaaatatggttctgtcactgattcagaaacttcttagcgagagccctttcagctgtgatgatctacctgaaggtgaaaataagcgttctgatcctagatcaagcaaaactggtcccatggccaagagacctgaagatcaatgcccagacagttcagaacaggacttcatcagtgggatgaagcaaatgaaccgccaatttatagaccaactggtagaatccgtgatgaaactgtgcctgatcatggctaagtatagcaacaatggagcagccctggcagagctggaagaacaagcagccatggcaggtggtagctccagatgcggccgtgaaggtgcaatgtcacagtatcaagatgctcctggccctgaagttattgtcaacaatcagtgctctacaagtaacttgcagaagcagctgcaggctgtcctgcaatggattgcagcctctcagtttaacgtgcccatgctctacttcatgggagatgacgatggacaactagagaagctccctgaagtttcagccaaggcagcagagaaagggtacagtgtcggcgatcttcttcaggaggtcatgaagttcgccaaagaacgacaaatggatgaagcc

SEQ ID NO: 794 - DNA, 2794 bp, Cricetulus griseus
  misc_feature (1765)..(1782): n is a, c, g, or t
  misc_feature (2276)..(2310): n is a, c, g, or t
gaaaggctgcctttgggcacgtgtgttgcttcctctggctccggcgcctttccccgtccggtgggtcttatatgtggtataaggcgtaaggatgaaggcgagaagaaataaaaagcaggtcccaagctttcgaaagttgataaaaactagtaaagtgaaacttgaatacaaactaaaaaataagcaatttaaacaacaaagtactatcaagaagtaccgaaaagagcagaggaaactaaggcaagctgtaaaagatgctgtgtctaaaaaacccttcccattggaggacccaaagagcaaacgaccagttaaagggatggagagggaagaggaggacgaggaagaccaagcccttccgttagatatgatggatgacgatgacttacagctgatgaaagatttgggacaaaaagcatcttttctcacaagagatctttcttctagtgagccagttcatatcaagaaacgaaagcatgagagtgtgatagataaatatgaaaaaatgccaagaaccctgcaaactgcaccagagaaggagttgattcatttgctgcccatcaaggataaaagtgggataatcccacagacgagggagaagccagtcacggacatccagcaagaagaagaggatgaagaagagctggaagttgaggaagaggtcgttgagaaccccattcaagagctcaccatagaagaacatttaattgtgagaaagaagaaactacaggaaaagaaaatacagattgcaaccttggcatcttccatactatcagatccggaaagcaatattaaaaaactgaaagagttgcgttccatgctaatggagcaggaccctgatgtggctgtcactgttcggaagttggtgataatttcactgatggagctatttaaggacatcactccctcatataaaatccggcctctaactgaagcagaaaaatctaccaagattcgtaaagaaacccagaagttaagagaatttgaagaaggcctggttagccaatacaaattttatttggaaaatctggagcaaatagttaaagactggaagcaaaggaagttgaagaagagcaatgtggtatccttaaaggcctacaaagggttggctgaagtggctgtgaaaagcctgtgtgagctgctggtggccctgccccattttaactttcacaacaacatcattgtcctgattgtccccttgatgaacgatgggtcaaaattggtatctgaaatgtgttgtgaagcagtaaagaaactctttaaacaagataaattaggccaagcttctcttggtgtaattaaagtgatttctggttttgtaaagggcagaaattatgaagttaggccagagatgctaaaaacatttttatgcctgcgaatcaaggaagtagaagtgaaaaaagacacagaggacattaacaaaccaaaaaagttcatgactttcaaggaaaagagaaaaactctatcaagaatgcaaagaaagtggaagaaagcagaggagaaactggagcgggaacttcgggaagctgaagcttcggagagcaccgagagaaagctgaagctgcacacagagactctgaacatagtgtttgtgacctacttcagaatattgaagaaggcccagaggtcacctcttctgccagcggttctagaaggtcttgccaagtttgcacatcttataaatgtggaattttttgatgatttattagtggttcttcataccctcattgagtctggtgacctgagttatcaagaaagtcttcactgnnnnnnnnnnnnnnnnnntattctttctgggcaaggtgatgttctaaatatcgacccgatgaaattctatacacatctctacaaaacgttgtttaaattacatgcaggtgctaccaacgatggtattgagattgtactccactgccttgatgtcatgctaagcaagcgcagaaagcaggtttctcatcagcgagctcttgccttcatcaagcgcctttgtacgcttgctctgcaggttcttccaaattcaagcattggccttttagcaactaccagaatactgatgcatacttttcccagaacggatctgttgcttgataacgagtctcagggcagtggggtgttcctgcctgagctggaggagccagagtactgtaacgcccagaacaccgcgttgtgggagctgcatgcacttcggagacattaccatcctgttgtgcaaagatttgcagttcacctacttgctggggcaccgtctgaaggctccgaggccctcaagcctgagctgagcnnnnnnnnnnnnnnnnnnnnnnnnnnnnnnnnnnncatggcagcaatgacattcaaccctcctgttgaaccttcaaactccaaaaagaaggataaacttttacaaggggactcatttttgaatgaagatttaaatcaactaatcaaaagatattgcaatgaagttactactgagataccactggatttcaccaaatgtttgaaaacatctgtacagtagtacaaaggtgaagagtcagtggactgtcttatatatctgtatgtgtctgtgcagctacacgagggcctttttctttgtgttgaaggaaaacttcctaaggatgactataggatgactgaagcagagcccacagaagacactgctgttggtttgctgtttatggcttgcttttatgtacagccccggccaacttgctcaggagtggcactgtccactatgggctgggccctaccacattagtcactaattctataaatgccctacagacatgcccacaggcaagtctgatggaggcagcaa

SEQ ID NO: 795 - DNA, 4184 bp, Cricetulus griseus
  misc_feature (1319)..(1366): n is a, c, g, or t
  misc_feature (1681)..(1702): n is a, c, g, or t
  misc_feature (4164)..(4184): n is a, c, g, or t
tgctgagtggcgctgccatcgtgatgaaccggacgagccccgactcggagcggcctccgggttccgagcccgtgtgggagcggccctggtcggtggaggagatccgccgcagcagccagaactggtcgctggcggccgatgcaggcctactacagtttctacaggaattctcccagcagactatctccaggacccatgaaatcaagaaacaggtggatggattaattcaggagaccaaagctacacattgtcgtctgcacaatgtcttcaatgacttcctcatgctttctaatacccagttcattgagaaccgggtgtacgacgaagaagtggaggaacaggccctcaaggctgaggcagaaaaatcagaacaggagaagactcgggaacagaaagaagtagacctgatccctaaggtccgggaggctgtgaactatgggttacaggtgctggatagtgccttcgagcaacttgacataaaagcggggaactcagactctgaggaagaagatgccaatgagcgggtggaactgatccttgaaccaaaggatctctacattgaccgccctttgccctatctcattgggtcaaagctcttcatggaacaggaagatgtggggcttggagaactgtccagtgaagaaggctctgtaggcagcgaccggggaagtattgtggacagtgaagaagagaaggaagaggaggaatcagatgaagattttgccagccgtagtgacaatgatcaaaaccagcacaccacccggatgagtgatgaggaagaggatgatgatggtgacctgtttgctgactctgagaaggagggggatgatattgaggacattgaggaaaataccaagtctaaaagacctacatcttttgctgatgaactggcagctcggatcaaaggagatatgtcaaatcagctcaaagaggaacagatagcagatggaaagcctcagaagacaatgaaggagaagaaggaaaagagaacacctccagacgatgaagaggacatcttgtttccaccccccaagttgactgatgaagacttctcaccgtttggctctagaggtggtctcttcagtggacagggacttttcgacgatgaagatgagagtgacctcttcagggaaacctcccgggatcggccagcacaagctcctgttagtgaagaatcttcatctcccaaacctggaaagaaaatcccagcaggggctgtttctgtatttttagacacttctgccccatccctgaaggagttccagaaacatgagcagcccactccagggaagaacccacatctgccaactcctgctggnnnnnnnnnnnnnnnnnnnnnnnnnnnnnnnnnnnnnnnnnnnnnnnnttgtaacaaacctcccaagactgacaaagtcaagtccacctccattatctttgatgatgaggaaggagatctgttcagagaaaaaccagcacctttgccagtggcttctgtgagtcaggcagatgaaaatacaacacgggcagataaaacgatcaccttaccttccagcaaaaacccgaagctagtgtcagaaacaaagactcaaaaaggcttgttctcagatgaagaggactctgaggatttgttttcttctcaaaattcaagtaagtcaaaaagtgcatcccttctgtccagccagctccccacatcaggctnnnnnnnnnnnnnnnnnnnnnnagaggataatctttttgggagtgcaccagctaagaagcaggtttcatctcagcaaccccagagtcaagagaaaccaaaaccttcagaacagcccaaaaagaaagcatctgccttgttgttcagcagcgatgaggaggaccagtggaatattactgattcacataccaagttagcaactgacaggaagtccaaaggagaactgtgggactcagggaccatccaaggccaagaagtgaaggctgtgaaaaagaccaacctatttgaggaggacgatgatgaagctgatctgtttgcaattgcgaaggacagccaaaagaagactcagagaacgtccctcctctttgaagatgatgatgatagcggaagctctctgtttggctttcctcctgcatctgttcctcctgcaacaatgaaaaaagagagcatctctaaggtgccgtcattgtttagtgatgaggaggagaatgaggtaccatcccgtgtgaaatctgtggatgtgaaggttggtaatggcaaagaggctgatgtggctaaagtgacggagaaggaaggacttttgactgcatctgatcaggaagcagctggaccttctgatttattttcttcatctccattggacaaaggaaccaagggtagaaccaaaaccgtccttagtttgtttgatgaggaagaggataaagtggaagatcaaagcaacacccatgtgtcgaagaatgatgcagaaaagggtctcaaaactgatggacgccccaagagcacaggcgtcttccaggatgaagagctgcttttcagccacaagctacaaaaggacaatgacccggatgttgatctttttgctggcaccaaaaaaaccagggtgtcagtgccacttgatgggagcctgtttggagatgatgaagattatgaccttttcagctctgccaagactcagcctgtggtaccagaaaaaaagggagcactgaaaaaagatcggcctgtttctctaaagaacgaggaagctcccgagtctactgaaggtagcaaagagaaaagcttatggaaagcagaaacaccacaggattcttcaggtctcactccatttaaaagcagagagccatccagtcggatcgggaaaatacaagcaaatttagcaattaatccagcagccttgctgcccacggcagctctgcagatcccaggaacaaagcctgctttatgtgaattagcttttccttcatctgaacctggaaggagccatggcccggaaagcgtgccgactcttgctgggagtgaggaggctggtgtgagcttcgatcttccagcccaggcagataccttacacagtgcaaacaagagtcgtgttaaagtgagaggaaagcgtaggccacagacccgcgctgctaggcggctggctgcccaggagtccagtgagagtgaggatatgagtgtctccagaggacctgttgcacagttggccagtagtcccatcttaccaaatggccatcaacctcatctgcagcccaggatggccagtggagagatcagctctgagaaagccatggccccagctgctccaccttgggaaagtggtcctgcattgtctgcagtggacagaagcttttttgtggcgtctctgcctcagactggaaatgaggctgacctttttgattctggggacatctttccaaagagcataggatcacagtccatggagggaacaaaagtcaaggcagcagagaccccagcccacttgtcaggaggaagtaaagagaagagcctcgtgttccctgctctcagtgaggccagcagtactgacgatctcttccagactgtcaaaccaagaccagcaaagaaaaggaacccttttcccctccttgaagatgaggatgatctctttgcagatcggaaaggaaaaaagaatgagttgaaatctgacagccatcaggacattatatcaaaaacacaagacatttttgaggatgatatatttgctacggaagctgtgaaaccttttcaaaaaaagagagagaaggagagaactttggaacccaacttatttgatgataatatcgatatctttgctgacttaaatgtaaaacccaaagaaaagtccaaaaagaaagtggaggccaagtctgtgtttgatgatgacacagatgatattttctcctctggtctccaggctaagaagtccaaacccaaaagccaatctgcagaggccacatctgaactaagatctgatcacaaagtgtccaacatttttgatgaccccctgaatgcctttggaagccagtagagcatatggggtcttcatagttcatcttaccattctatttccagttagtgatgctgtcttctacactctgtcttcactggattccaaaagcaaatactgaaacaactagttcaactgttactcaatgtaactaatatttttctgcactgactttatgcttaaggttacaaataaaatacatgcttcnnnnnnnnnnnnnnnnnnnnn

SEQ ID NO: 796 - DNA, 156 bp, Cricetulus griseus
ccagaaaaggtgttggttgatatagacagcaggacggtggccatggaagtcggaatccgctaaggagtgtgtaacaactcacctgccgaatcaactagccctgaaaatggatggcgctgaagcgtcgggcccatacccggccgtcgccggcagtca

SEQ ID NO: 797 - DNA, 266 bp, Cricetulus griseus
gacttccatggccaccgtcctgctgtctatatcgaccaacaccttttctggggtctgatgagcgtcggcatcgggcgccttaacccggcgttcggttcatcccgcagcgccagttctgcttaccaaaagtggcccactaggcactcgcattccacgcccggctccacgccagcgagccgggcttcttacccatttaaagtttgagaataggttgagatcgtttcggccccaagacctctaatcattcactttaccggataaaactg

SEQ ID NO: 798 - DNA, 507 bp, Mesocricetus auratus
gagcaatgcccgccagtgccatgccactcctgttgatcatgggcctccttgtcttgatttggaattgtgagagcacatcttcaataccaggtcctggctactgtctgggaattgggcccctcatttcccatggcaggttcttgtggatggggattggaaatgcctgcaactactataataagatgtacggggagttcatgagagtctggatcagcggagaggagacactcattatcagcaagtcctcaagtatgttccatgtaatgaaacacagtaactacatctccagatttggcagcaaacgtggactgcagtgcatcggaatgcatgagaatggcatcatatttaacaataatccagacctttggaaaacaattcgccctttctttatgaaagctctgacaggccctggtctggttcggatggtaacagtttgtaaggagtccatcaagcagcatttggacaggctggatgaagtcaccgacaactcaggctccgtggacgtgc

SEQ ID NO: 799 - DNA, 771 bp, Mesocricetus auratus
  misc_feature (277)..(295): n is a, c, g, or t
  misc_feature (672)..(686): n is a, c, g, or t
atggaagggaagtggttgctgtgtatgttactggtgcttggaactgctattgttgaggctcatggtggacatgatgatgacatgattgatattgaagatgatcttgatgatgttattgaagaggtagaagattcgaaatcgaaatcagattccagtactcctccatctccaaaggtcacctacaaagctccagttccaacagggggagtttattttgctgactcctttgatagagggtctctatcagggtggattttatctaaagccaaaaaagatnnnnnnnnnnnnnnnnnnnccaaatatgatggaaagtgggaggtagatgaaatgaaggacacaaagcttccaggtgataaaggacttgtactgatgtctcgagccaagcatcatgccatctctgctaaactgaacaagcccttcctgtttgacaccaagcctctcatcgttcagtatgaggttaattttcagaatggaatagaatgtggtggtgcctatgtgaagctgctttccaagacctcagaactcaacttggatcaattccacgacaagactccccagccagatgtgaaggaagaagatgggaaggaagaagagaagaacaagggggatgaagaggaagaaggagaagagaagcttgaagagaaacagaaaagtgatgctgaagatgatggnnnnnnnnnnnnnnnagatgaggaagatagaaaacctactgcagaggaggatgaaatcttgaacagatcaccaagaaacagaaagccacgaagagagtga

SEQ ID NO: 800 - DNA, 2457 bp, Cricetulus griseus
  misc_feature (1154)..(1170): n is a, c, g, or t
  misc_feature (2152)..(2208): n is a, c, g, or t
cttttcctgaccactctggtgcccctcgtcctggcgccccgacctcctgaggaaccgggctctggctcccacccgcgacttgagaagcttgattctttgctctcagactacgatatcctctctttgtctaatatccagcagcactctgtaaggaaaagggacctacagtctgcgacgcacttagaaacactgctaactttttcagctttgaaaaggcattttaaattatacctgacatcaagtactgaacgcttttcacaaaacttcagagttgtggtggtggatgggaaagaagaaagtgagtacagtgtaaaatggcaggacttcttcagtggacacgtggttggtgagcctgactctagggttctagcccacataggagatgatgatgttacagtaagaatcaacacagatggggcagagtataacatagagccactttggaggtttgtcaatgacactaaagataaaagaatgttagtttataagtctgaagatatcaaggatgtttcacgtttgcaatctccaaaagtgtgtggctatttaaaagcggatagtgaagagttgcttccagaagggctcatagacagacagccatctgaagagtttgttcgtcgagtgaagagacgagctgaacctaatcccctgaagaatacttgtaaattactggtggtagcagatcatcgattttataaatacatgggccgaggagaagagagcaccacgaccaattacttaatagagctaattgaccgagtagatgacatataccggaacacttcatgggataatgcaggatttaaaggttatggaatacagatagaacagattcgaattctcaagtctccacaagaggtaaaacctggtgaaagacacttcaatatggcaaaaagttacccaaacgaagaaaaagatgcttgggatgtgaagatgttgctagagcaatttagctttgatatagctgaagaagcatctaaagtctgcctggctcatcttttcacataccaggattttgatatgggaactcttggcttagcttacgtgggttctcccagagcaaacagccatggaggggtttgcccaaaggcttactacagcccaggtgggaagaaaaacatctatttgaatagtggtctgactagtacaaaaaattnnnnnnnnnnnnnnnnnacaaaggaagctgacctggttacaactcatgaattgggacacaattttggagcagaacatgatcctgatgggctagcagaatgtgccccaaatgaggaccagggaggaaagtacgttatgtatcccatagctgtgagtggtgatcacgagaacaataagatgttttcaaactgtagtaaacagtccatctacaagaccatagaaagtaaggctcaagagtgcttccaggagcgaagcaacaaggtctgcggcaactccagggtggatgaaggagaagagtgtgacccaggcatcatgtacctgaacaacgacacctgctgcaatagcgactgcactctgaagccaggtgtgcagtgcagtgataggaacagtccttgctgtaaaaattgtcagtttgagacggctcagaagaagtgccaggaggctattaatgctacttgcaaaggcgagtcttactgcacagggaatagcagtgagtgccccccaccgggagatgctgaagatgacactgtgtgcttggacctcggcaagtgcaaagctgggaaatgcatcccgttctgcaagagagagcaggagctggagtcttgtgcgtgtgctgacaccgacaactcatgcaaggtgtgctgcaggaacctttccggcccgtgtgtgccctatgtcgatgcagagcaaaagaacttatttttgaggaaagggaagccctgtacagtagggttttgtgacatgaacggcaaatgtgaaaaacgagttcaggatgtaattgagcgattttgggatttcattgaccaattgagcatcaacacttttgggaagtttttggcagacaacatcgtagggtccgtcctggttttctccttgatattctggattccattcagcattcttgtccactgtgtggataagaaactggacaagcagtatgaatccctgtctctgtttcatcacagtaacattgagatgctgagcagcatggattcggctnnnnnnnnnnnnnnnnnnnnnnnnnnnnnnnnnnnnnnnnnnnnnnnnnnnnnnnnnctgcagccagtctccatgatgccgccagtgtctgcggctccaaaactggaccaccagaggatggacaccatccaggaagaccctagcacagactcgcatgtggacgacgatggctttgagaaggacccctttcccaacagcagtgcagctgctaagtcttttgaggatctcacagaccaccccgtcaccaggagtgaaaaggcggcctccttcaagctgcagcgtcagagccgagtcgacagcaaagag

SEQ ID NO: 801 - DNA, 306 bp, Mesocricetus auratus
ttggtatgaagcgagatcactagaacacaccttgcctgggagcagagagacgctgaaaaggaagctgagtgggggcagctgtgccagccctgtcactagtccgagttcaaagagggatgctcacttctgcgcagtttgcagcgattatgcatctgggtatcactatggcgtctggtcgtgcgaaggatgtaaggccttttttaaaagaagcattcaaggacataatgattatatctgtccagccacgaatcagtgtaccatagacaagaaccggcgtaagagctgccaggcctgccgacttcgcaa

SEQ ID NO: 802 - DNA, 328 bp, Mesocricetus auratus
tttggcatgaagccctacacctctttccaggagctcacaggggagaaagagatggccgctgagctggaggagctatacagtgacatcgacgctttagagttctacccagggctgctgctggaaaagtgccagcccaactccatctttggggagagtatgttagagattggagctcccttttccctcaagggtctccttgggaatcccatttgttctccagaatattggaagcccagcacattcggtggtgatgtgggcttcaaccttgtcaacacagcctcactgaagaaactgatctgcctcaacacaaagacctgcccgtatgttt

SEQ ID NO: 803 - DNA, 3727 bp, Cricetulus griseus
  misc_feature (1657)..(1678): n is a, c, g, or t
  misc_feature (1892)..(1925): n is a, c, g, or t
  misc_feature (1927)..(1966): n is a, c, g, or t
  misc_feature (2688)..(2711): n is a, c, g, or t
  misc_feature (3426)..(3458): n is a, c, g, or t
ttcctaagaagtacttacctgctaccagtccagctcctcatgagggcagggcctgaaaatgggcggatgcaatagtggcaatgggaaaaatcaaacacaggggtacttcttagttttgttttagtaaaaatcgacagtgaggaagcacatcccaggcaaaaatgcaggtcccagcaggggatgtaaggagtaggcgaggatgtaggagcaggccatgccttgatggtcaggaaaatcttgcagcctgactgactagcagccaaagtgctgctttattcatacacaatttagtaagtagggatacattcatattgttccaaaacataaatcatatcagttttgtttttggacatgtgtttcacttactattgcttatcttttagtcatcattaataagctatgacagaacagagttaccatttctaataattttccctcaagttttgacagcattgttaaacagagttaccattgctaatctttaaccccataacccaatttttaagaatctagagatttgtgacagcctgttctcagactggtagcttttgtggctacaaggacactagaccaaaacaaaatcttaaagctagcctgggcatattaccatgcctcaagaagtgtattgttaactcttaatgatcagagtacccaagaaaaatcctcaggccaaaactcctgcacttattattcaaattctgcataatacaatgttcaaattttaaatctttatagaatttgtctagatgtctaatccccacattctgttgttccttggtcatacaacaccacagtggttctgcatgtactaacttttctaagaaaggaaggtcctgacatcaggtttttctatcatctttccactctgtactttgctcatcaatataagtctctgtgtagggctaatctaacttaattaactcagatcacataattgcctgagtgtatagtgggaagaagcttgcattctgatctgtggccaactcctctaacccaccgaatcttgttgaccttttgagtttactttgttttggttatcttgttcctgagtatgtacagggacggatgtttcaaggatgtctcatagcctcataaagagacctctggtttctttatgtgtgtcacaatctctagtgtgtaaggaaagaccttcaagtagataaggagatctccctaaagtgagttggggggtagggtggaaaatagtatattcaggactgtcctggggaagcttagacacagcattcctgggaaaaggcataaatgattcataagaaattttccatcaatccaatatccccaaattgcacaaatattaaaaatctcccaagtatgggacaggtggcacagcagccatcatgcagctcagcattgctgaatctttgttaagcagctgtactggctttatgacttttgccattcccattagatatggctgtgccgcttacctcagactgcagtctttactagagacacagaactgctttacactgccatcacacgtctttgaggtaaataagatgataatttggaccatggtcagtgggccaaatagtaaactcattttttagagcatcattgcaacatatttaccaatttatttatgtttttcctatctatatctggttttagaaactaatgaccaacttgagtaggnnnnnnnnnnnnnnnnnnnnnnaaagataaaagtgtttttacctttgaaaaagacttctgctgactccttatttggaatatataaaagtgcacatttaaaataatggccgagtcattgcactttttgaaaattaggtttttgtagtagagatgcatgatgataattaaattttaaaaatatacaaatatatttttcctgtagtgttactttacttgattattactatgttttcctnnnnnnnnnnnnnnnnnnnnnnnnnnnnnnnnnngnnnnnnnnnnnnnnnnnnnnnnnnnnnnnnnnnnnnnnnntgagagctcttggaactctctttggccaggctggcctttaactcacagagatccacctgcttctgcctccctaagtgctgggagtaaaggcatgcaccacgaccagttggcttttaattacttttgtgtgtgtgagatactggagattgaactcacagtcttgcacacttggttggcacaccctccacaaccaaactgttttcctaaccttatgtttgtttttaaagcacaaataagtttgcatgatttgggggtacattttatatagattgttagtcagctattggactggaatttaatgaagtcagtaggtatctgggatatgaagagtaattgggctaaatttgaatgaaaaatgtaggtactctttgctctacaattcatggtatttattggagtctattgctgccctcagccctatgacctcatggtccctatgtataactataattatataattgcttgataggaacttgggtaggagaaaacaaatgtatcatctaataggaataaatagctaggaataattagcaataaaaccaacacaaaattgtacaatgaaatttcagtgttttctgaaatgaatagagataatttattttcagatttatagtattagcatggccaatttgtttctgtattttcactattttattctgagcattttggctttgtttatggttaatcctcattgttacaaataagtgaagtaacttaagcannnnnnnnnnnnnnnnnnnnnnnnaaaaatggggtatgttgatctgttgtgtccctcttaaatataacctctacaacttcattctctagaactgtgtcatctatcatcctctaaaattgaacaggtatggcatttagggcagaaattaatgtgcagatgaaatgaaggttctgcaagtaaattcaaagggaaatgactatgaagtgtacaaagaacagtagctgctgcacagtgatcactaacctctgtgtcccctgtcatatttgtcatactttacatcttaaccagacttgggaaatgtggcatttcaaggcagcatgctattatttcaagactggtattttaagactttttttttaaggtcttttgtgttaacactttccttttcacagtatatgaacaagaaaaccccatacttgagaaagtctgtcaaatgtcatgttccagctgcaatagcaactatctttgcagaatagtggcatataagatgttattctttcataaaacaaaacccttagtgagtgagtttaaggtataaattacacaataaagttttaatgaactgtattttgtaaattaatcattaaaaggactattatccatttttagtgtaaaaataagtaatattctattttggtccaattaaagtgaggattgtagtatcttcactgtttttttcttctttttcatttgtatgtgtatgtgtgttcccatgtccatgcacttacatgtagaggannnnnnnnnnnnnnnnnnnnnnnnnnnnnnnnnccatgcatttttttatgtaggccagaagtcagtgaccttgatccccattccaccttaacgttttgagacaagctgggagggttgcccagcaagcccctaggattgtctcagctcccacctctgtagtcactgtcataagccactcactgtgcttggctttacatgagtgatggagatctacattcagatatctatgatcgagtagctgaaatttaccagctatgtgtctcccaagttcctcctccctgctttcctaagaaaaagaattc

SEQ ID NO: 804 - DNA, 714 bp, Cricetulus griseus
cacaaagcctctggatcgagaactgatagcccggtttcatttgagggcacatgcagtggacatcaatggcaatcgagtggagaaccccattgacattgttatcaatgtcattgacatgaatgataacagacctgaatttctgcaccaggtttggaatgggtctgttccagagggatcaaagcctggaacatatgtgatgacggtcactgctattgatgcagatgacccaaatgccctaaatgggatgctgagatacaggatcctgtcccaggctccgagcacgccttcacctaacatgtttacaatcaacaatgagactggggatatcatcacggtggcagctggtctggatcgagagaaagtgcaacagtacacattaataattcaggccacagacatggaaggcaatcccacttacggcctttcaaacacagccacggcggtcatcacggtgacagacgtcaatgacaatcctccagagtttactgccatgacgttctacggcgaagtccctgagaacagagtggaagtcatcgtagccaacctaactgtcactgacaaagatcagccccacaccccggcttggaatgcagtgtacagaatcagcggtggagaccctacaggaagatttgccatccatacagaccccaacagcaacgatgggctcgtcactgtggtaaaaccaattgactttgaaacaaataggatgtttgt

SEQ ID NO: 805 - DNA, 764 bp, Mesocricetus auratus
  misc_feature (481)..(481): n is a, c, g, or t
ctgagccattacgtttctcggaacaatgacgacatcattttctgggtcatcggagcagttgcgaagagatgcccagagggagacgtctagaccatccgagggaattcgtcaaaggcagtaacgtgcttaagacctgacttttaaagtgaatgccagtgcgtgacgatcccagctccctgtacagttcctagagctcctgggagtgcatggccagtgacacaatgctttactggtgtgtgagaattggatgtagtgaacatccagaaaaggcagacaaaagaagaaaatgcagtgctggctaggtgttggagatgggtctttacatagctctggctgtcctcaaacacatccatcttggctctcgagtgctggggattgtgtgtcaaccaggccggctattatgaatagagcatgagatacagaaagttgtttgaattgaatccaataaatggaagcactcagtctcttaatcctattgggnttaaaatatagattggattaaggctgggtttggagtgaacctttaggactatggcaatgtttaagggatgtatgctaatggttgtcctgtcgcacatgctcgacaaaacgtaatttgatcccaagcagtgccatctctgttcattttcttccctggtctaaatggtaattcccatcctgaaaatggtgggtgacattttgtggcagtggagttccattataatccacatttccttgtccagcagtgctctctgtaaatgctgaaataaaggttcagttgcaac

SEQ ID NO: 806 - DNA, 253 bp, Cricetinae gen. sp.
  misc_feature (146)..(164): n is a, c, g, or t
gatcgtggactgcatggcctggtgatataggcagtccttccttggcgtcactcttgtgggctgcacttctcccctggaaatctgaggaccccactccactggacagccccatgcttacactgactacagcgcaggaaggaatgctnnnnnnnnnnnnnnnnnnnaccagagacatggtttaatagccaaccatctactgaccaggctagctatgtcgcagtgtctcatcagcaggaaggggtcaccgccagta

SEQ ID NO: 807 - DNA, 210 bp, Cricetinae gen. sp.
gttgcctttgagcggaaaatgtctgcttgtagccacattctctggcagtgctgctgagggtgagttcattcaagagcacctgcgcctgtactgggtccggtagttgaagagacacatttggatattcacccaggctttgattcagctgaaagaccgaggggcaaccacagcagccttttgtaaccaaagtgcccagatgccatcgtgatc

SEQ ID NO: 808 - DNA, 261 bp, Cricetinae gen. sp.
  misc_feature (194)..(217): n is a, c, g, or t
gatctggcagttgcttctgttgaaatgtctttctgcccatgacatccatcaaaggctttcaagcatacctgaccttggtattccataggagaccaggatgtgaatggacctggcaatggatatgaaggcctttgtaaaaaagtagacgctctgtgttttcaggaagaaacaagagatggatgagttcatccagnnnnnnnnnnnnnnnnnnnnnnnnccagttctgagcttagattcgcagttacacaataacagaattga

SEQ ID NO: 809 - DNA, 153 bp, Cricetinae gen. sp.
ctaatcgatgagtaattaactgttgggccgtatctctaatgtcttccgattactccgcgggacgttccttcctacgccatgaccgatatggacgtaaaactatccgatagataaatcctcgagtttccgaaagaggatgcacccgcggagatg

SEQ ID NO: 810 - DNA, 652 bp, Mesocricetus auratus
  misc_feature (566)..(594): n is a, c, g, or t
gccttgggcctaatttgttatgagagacaattatctgactcatgaaaaaccattgttccttcttcatcgctaactacgtttaacaggtgagacagccccattaatgttccacaaatcagtataaagcagaagtcagaaatcagttttatatcatcccttgctaacctaatgacaacctacaccaaacacataaaatattaaaattaagcttagaggctattaaagttaaacgccttatttaattgtaacaacaaatacaaaagaaaatcatggaaaccagaccacaagatggctctgttacgcagtcatcgtggtgattcagaatacgtttatgttaaagctggccatgacagtgcattattataaccccagcactcagaagcaggcaaaagcagagcaggatggttacttagagtttgagaccaatttggtttacatagttagctccagattagccaagactactatgaaatctcctttttgtaactgaggaccaaacccaggaccttgttcttgataggcaagtgctctaccaatgagctaaatctccaacccaggatctaacnnnnnnnnnnnnnnnnnnnnnnnnnnnnnatgaatacaacatcctgcctctacatatgtctgcacgccaggagagggcaccagatct

SEQ ID NO: 811 - DNA, 652 bp, Mesocricetus auratus; identical to SEQ ID NO: 810
  misc_feature (566)..(594): n is a, c, g, or t

SEQ ID NO: 812 - DNA, 803 bp, Mesocricetus auratus
ttgctgcagatactactgaccagacaagctgttgaccaggcacccccccaatactcccccaatgtgctcattagagatagcagttgagaggacactcccatttttggtgccctgtccatagcttccctgactcttccaccaccccaactcccaatctgagggaccgggaggtgcgaggcaggaaaaatattggattctttagagaagactagaggtgaccagtgactgtggcccagtaattagaactgtggtggcacaagtctggccccacatccacccaatccaaaactgataaggatattttgaaaaacaggaaagcagtacctgtctgatccagctctggtataggtaggagtgagtcctgaactgctggattacagactggcttgagccacagaagatgatggaccagagtaaagtatcatcacctgctcacaaggcatgcttcactagagaataattctaaagaggtgccatggaggcagcaggacaaggcacaagcagtctgggtgggggtcaagccagacctagtgccacagaacaagagagcaatctgtgactagtagttagggactttgtggatgggacaaggggcatgggggaagaaatgaaaatattcttccaattactttccagttctcctttagggacagcttagaattatttgcactattgagtcttcatgttcccacttaaaaacaaacagatgctctgaaagcaaactggcttgaaatggtgacactttgtcccacaagccaccaaatgtggcagtgtttagaactacctggatctgtatatacctg

SEQ ID NO: 813 - DNA, 3418 bp, Cricetulus griseus
  misc_feature (227)..(308): n is a, c, g, or t
  misc_feature (1680)..(1694): n is a, c, g, or t
cagaaggaggtagaagaaagaccagacaaagacttcactgagaaggggtcccgtaacatgcccagcttgtctgctgccacgctggcttctctgggtgggacttcctcccggagaggaagtggagatacctccatctccatggacaccgaggcatccatcagggaaattaaggactcgctggccgaagttgaggagaagtacaagaaggccatggtctccaatgcccnnnnnnnnnnnnnnnnnnnnnnnnnnnnnnnnnnnnnnnnnnnnnnnnnnnnnnnnnnnnnnnnnnnnnnnnnnnnnnnnnncgagtcccagagacagtatgaggagaagaacaaggagttcgagagggagaagcatgcccacagcatcctgcagttccagtttgccgaagtaaaagaagccctgaggcaaagggaagagatgcttgagaaacatggaataatcctaaattcagaaatagccaccaacggagaaacttcagacacactgaatggagttggttatcaaggccctacaaagatgacaaaagaagagctgaatgccctcaagtcagcaggggaggggacactaggaaaagccaaagaagtggagttgaaaaaggaaattgtgcagagtatggggaaaggaggaggaaccttacagaatactgagcaacaacagcccagacccaacccaataaaggattgtgtggaccaaggggtgtcacatcccggtgagaatgcccaggaccagaaacccactgaagacagtgctctgtccccaggaccactagcaggggccaaatgtgagcaacaggttcggagccaagctcaagagaacacttctttcctccaagacccagagcagattgagtcacgtgaggtcacagaccagccagatggtaggaccagaaactccttggaacagtccaactgcctgggaggtctagacagtgaagagtcaggacccgctgccttgggtatcaaaaatcaaagtgaaaactctataggtttggggcaaacatctgaaggtgacgaggtgagctgtacagactcaagggatgcaggtggaaaccacacagagaatgtagtacagactgccactggggaacaagtgggtacagtagcctcaggtcctttggagcaccacaaagacacagtgagtcatgatagaagaagtgtgaatgaaggggcagagcagagcttggagagagaactcagccaagaagtagctgagccggaggaggccctcattcagagcccaccaacaagtaaggaaaacactgttagaaagaccggagacaagaagcccatccaggcagaagtccaggccaccactggggctcccatagtgcagagtggccatcaggacacaagcgtcacaggtgccacacatgcaccacttgatgagaaagaacccggcaaagaaaagagcgagcagcaggcagaggccttggactcaccacagaagaagtctaagaacaggaagaaaaagaacaagaagaagaaacctccagcctcagtggaaacctgcaaagatgccagcaaagagttaaactgtcagaacacggacgcgcatgacctggaggaagaagagtccatccagttccctgacaaaaaacagacagcagaaacccagagcaaagagaccaaaaacccagaacaaaaaatcacagcaggaagcagtgaacatgtnnnnnnnnnnnnnnntgctgaaaatgagtttaatggaaaacagaaccaaggggaggaagatggtgtaaacacccgggcaggggatggagacacgttaatgtgtgaggcggatgcagcgcagtcggtcagcaccagtgctgagggtgaggaaactgaagagcgtgatgcagatgaccctgccggtggtcccagggatgtcttggatcagaatagtccccaatgcaaagaagaggaaatctccccgatgaaaaagaaaggtcccccaaagagaggaagtgaggagggacatgtgctgtcccaacatccaggccagatggaggagaaggccatagatggttgcagcatagacaacagtgacctgtcaggggagctggggggctgcaattcagaaagtggagtgcaggccagaggggaggttgagaatagcaagagtaaggaggattgcaccatgtcatgaggaggcagaggcagcaggcagacggggcgaccgagtttcagagagggccaaggactcaacacactaagcccaaccttaagaattctacccttcaactctactgcccaggttcacgaaatgttccagtttctgtgaacgtaccacgtgtcaatcaagtatcaacgactttaagttatagactgttacttgtagatttgtattcaaccattggtcatgtagacaccattgttttcagtttcagttctagctgagagcattccattagcatcaggtgacaccatgtcctgtcatgtctgcattccagtcttaagggcaaaacgtaaccatttgcttcaggccgggatgaatgttgactgtacttgaccaaatgtatcagcatctagttgaagtgaccaaacagcatgcttagatttctgtgtcttgagcagtgaatagtcaaactaccatgtctcattaaagtagatgtatcttcatgtttgatcttaatgtgtacgtcataacctgtgtggtattgtatttaaaggagttagatggataagtagcaggtaggtcactgggtgagaggaccagcacctcagggtagagattaattactgtagggattcaaacagttatcaaataacacagggagactacgtgcctttctttacctcgcctaagtgctgaattttgcaccaatgctcttggatcttattgccaatggtacccaaattaattttatccaagatctttatttcacttcacatgggtaatatgataaattcattttatacaaatattttatttttatccttttctgttaatgacaagttgaaattatatttcctactttagtgtttaggagaaagtcattaatttttttaactttaaagttatcttcctgtctgaatgtctacttattattaaaaaaaaaaacagtacaacacattgtttgttcttatgcaaaggactcattagacttgaatccaacattttgtgtttggtataaatatttttatttgttgtttctcagtattttctttttggaaagttattttacctgcctgaaggaaataatgtattttctatataaagaagcagttagaaaaaattatcataaagttgcattgaaaagtaattgcaaggccatgtactgtatgactactgttgacatgttacgggatcatgtgaattcatactactgctacaaggtagagtggaacgcaaaaagaccaaaccctcagtaaaatttgaggcaaactgaaatgtcatataattgaaataaaaacattttataatttta

SEQ ID NO: 814 - DNA, 454 bp, Cricetulus griseus
cacctagtgtgtacccagcaccatgctaagtgctgtggggaacacagaagaaatggaagacacagtctctgcccgctgtgctcctatctagaagtggctgcgtcacaaggaggggggatgaccgcagtgtctaccccataccccgtgagtggcttgggatccctttgctacatgtcagtggcaccccagacattcaccccctcccagccccacccagccttggggatcgacaaagccatggttgggggaaggaaggaggagggggcgaggaggcagatgaagggacttcattgtctcaagttctgtatgaccgaccccatgaaaagccccggggaggggagtcatggggccctgctgaccttccactgcctgtgggaacctcctccgaacaaggggcagtgttggactgacgtcaatgtggggcttggcctttcctcttgttccccattttcag

SEQ ID NO: 815 - DNA, 7887 bp, Mesocricetus auratus
  misc_feature (444)..(466): n is a, c, g, or t
  misc_feature (4577)..(4594): n is a, c, g, or t
  misc_feature (7245)..(7273): n is a, c, g, or t
gggtggaaggatttcatggcaggctctatgggcctcagagatccaggtctagggacctgaatacacagaatgtctcagtactgcatatttcattccatactccagagtatttctttttcatttttcaaaaaagtggattgtcaggaatgtttccagtaacatgctttatttgaaaattgattgttgacaatttcccacatatgtaatatactctgaaaaaccttctctctcatgtctaaactctttaacataatcttgtaaaggcctgctgtgcacaacaagtccttttcaagtagaagggagttggctgcctaatgtttttccaaccgcaaactatcagtggcccttggtaagaaacaaatgtactattacaggagtccagttctcttccataacttctgccagacagctaatggctagattatgccaggtataaacaaatannnnnnnnnnnnnnnnnnnnnnncaatacatgactagtttaacacagagtatcagtaaagagacagtccagtaaaaatggggctgggacaggtaaataataattttaagagataacacaaaacacacatacacacagagaaggagagacacacatacacacacagagagagggtggcagagacagagagatgagcccaaagacaacatttgtttggattgtaaaaaatgtatatcaaatctggaaaacagtgtggagcattctgagtcttctaaaaataaatatgtactgtgtgactcagctgtacttcaccttgtaatatgcctaaatgacttgaaattctatttcacagatactttctcatccatgttgattgctactgtattcactacagctaggaaaaggaaacaaattaaatgttctatagctatctaatggacaatgaaatagtggtaatacacacgttgtaataacattccatgataatgaaaaaaggaaatcatgacatttgtagataaactgcaggcatgaaaaagtatcctactgagtgaggtaccccagacctaagaatacaaaagtggcatgttatgtttcttctgttattcctagctctaaatcttccagagaaaactaagacttcatttgagaccttgaaactctcatacatgtaacagcatttactgaaataagtgttcactaaattaaagacattacagggtgaacatattgtaagtattagagggaggaggaaagggaagtgattaatgatgaaaatattttataatctcaaaaataaaatataaagataataatgtgatgtaatttaaagaaagagtcacaaagaccaactaatgccttataatggtgtagtgggaaaacaggttgtcaatccaaaataccagtgggtgaatggtcggttattccatgtgttatagaggaaatcgatggaggataaacagtactgtagaatcctggatttcttcttggttgtcactaaaaaaggatcacaagacactatggctcagcataacacaggtattggttttaatgtgtaaacactgcaactgggcagggagagcctttgtttagcaaacataaaggaatattttcagcctgaatgtagagccccttatcacaattagttttgttagtgtcattatttttatagactgtttcatttgatttggttcttttaattaatgatatttttatttatttcgaggaatgggagcaattttcctactgtatgtactgttaaacttcagcaactcatgcagcactgtacagttgttgaatggttgttgaattcaatgtacaagaagaataaagtagtcaatgtatggaaagtattttaagaagcacagtgacctttacccaacagtatagttctggaagggaaattattatttgtatgctcaaacaagatagttctttgtttctaacaggaatgctcaattttcagacaaacataacctgaccttactgctaatcacattagttttgagatatgaggtcatacatcatttggcagggccaaagaggaaacactagacagatgtagcttagtgtagatcaaactgattggttccgtgaaactccctctaactatctgtataaaaagctttgtcagttgagttcttttcaaccactcacctcttcgagcttctgtggaaaagcaaagtcaggcaccaccatggtaaagattctggtgctggctttggtctttagtctggctcatgctcaggattttgcagaggtaaattcatttgctctattcatatatcttagcttcatcaacagcatatttctgtggatgtgacacatcactcagttagtccatgcaagactatatttaagaaataagttttctgactgtcacagaggtacagtttacctattagattcctctcactgaaacaattggaataaggaaacaatgggtgatatttgcagagcataagagggcaaaacatgagcacttctgcaaagtctcagctcaaaatgttctatgttgattaaatcatcatattaccctgagttattctacatccctagaactaatcttgaactaatgaacaaaatattattcattgacatttatagtgagtttacataattccaagaactgggaccagagatgtgaatttataccactggtatatagtttttctttgcttcatttgcctttgttgcttttttcagcttcaaggaaaatggtataccattgtcattgctgctgacaatcttgaaaagatagaagaaggaggaccactgagattctattttcgtcatattgattgttataaaaactgcagtgaaatggaaatcacattttatgtcatgtaagcaaattgtcaagcttgtaaattgagcagactatttatgcattctgcaacctttatgttaagcttacagggcatgttctgtttctggttgtgaaaatgaagctcatctttagcattgtgttaacattattcccagttgatcattgtctccaatttcgtgagtgtttcccttaaaaagcctagttgttggaagaatgttgttgaatgttatagtcaaatattggatgcaggggaatctaagcttccaatttctagtaagtcatcaggaatatgtgagccttttggtaaaagctgtgcatgttatgttattcaatctatgatgtcatgaaatagtcctccacaaatagtcgagaaaaatctaatttgcgattccctttctctgaagctctagaaccaaacattatctctctgacatttggataactgtattcattgaaagactgcatgacaccataagaactaaaaatgcttagaactatttctattttttaggttagcaataaaagtacttaacacatgcataataaattgtgtacatattatatcattggacaagcacaagagaatatttgaaatcacattcatttaataataaagtttggaagagagacaaattagagccttcatagcattaacaaaatgagaacaaatgaaggaatttatctgtatgattaataacaagatgatactatctagacaagttttaggaaaagtgaggtaagcatacatattttggtcctagctctgtacactcttaacagatgctagtgcactctgaagttcgttataacacttgaaggtctttaagatgaattcaaattttacacagaaaaaattatggtttctctgtttggtttttagtacaaacaaccagtgctccaagaccacagtcattgggtacttgaaaggaaatggaacctaccaaacccagtgtaagtacaggatctgtgtgtttcctttatgaacaaagcaatgctgatgtacatattcatgttgatacttcagacacccataggtgcatggatttaggaaaattttggctacttttaaagttatcaatccttccaatgaactgagatatgcttcatagtcagataacattgtacgtcatctgaagtttacgtggagaagaacactgttacagaaaggtgtgagtaatcataggaaaatatctccaaatagtttgaatgcatgaaaatttatttccagttagtattcagaagcttttctttcatatggtgtctcagattgttactggatgtgtctgccagtcactaataggactcagtgacctgaatatctttgcaaacttcatgcctcatgtcctcaagtacttacattgtgggtgttatctgtcattcttgatttctagaacatttaaatgaacagtgcgatttcaaagattatttctctcatagtttgtagagatcataacatttagataatcagatgataaatttcaattttaaaaggcagttagttgaagatctggttaagattttcatgctgagtacttcaaactttaatatttacttaaacaatggcaacactattcaactgaatcaatcacaatttgatgtttagtttgatttaaatgaacagagggcacattcttgtggcaggtctcatgctctactaaatttacatgtatattaaaaagcagtcctgcaatataaaatgaacacaccctataaatccttttattttcatgtggaactacttctcatatttaataaatgttagagagtggaaataatccatgcatgcttgcattccaatgagcacgcatnnnnnnnnnnnnnnnnnnaggcatacagaaacagatagatagacagataggcaattgcacacaatagcaatgtctgtcaaacacaaaaagtccatcctactttcaagatgacaacttttgtacacatgacaaattactatgttctatttttccacatggaaacatttgcccactgagtatttccatggtatggcaccagatatttacacattgaggaaatcaacaagtggcctttgggatctggttaaaagcagacagaatatccaacagattgttcccaaagttttaacacaagaaaatcagagggagattggagtatccgtacttaggattcatatcagatttgaagagcagaaatgtttgctcaaaatactttgatgaaatatcccaaatgaaggactacaggaatagctttgtacagatgtgtcatatgataatagataagagatgattgctagagtctgggcctccattaatcttcagcagtgatactcagttttgaaatatttcctttattacagttgaaggtaacaatatatttcaacctttgtatataacatcagacaagattttctttaccaacaagaacatggatagagctggccaggaaacgaacatgattgttgttgctggtaagaatggtagtggtttctctgaaataatagcagggtcactgaagactaggggcaacagcagaggctcttgggagagtttatgttcatgtttcctcagtggaaagagtaaggcaaataatattttcccaaagtttagaccattttgagtattatatgatcaagtgtgtactaaatttaaacatgatccttatacttttggttttgaactcagcctaaccaacagtggagaggctacctcaaatgcccttccccgatattgtgattgatgaattccttgtatgccatcctagaaccttcatgcagtggctgaaggaagcagagtcagacacacacagctaaacactgaagtcaactcctggaacccagttgcagaatgggaggagtaatgagcaaaggggttaagacttggcagtcatggaaacagcagaccagatcaagggggagctcatggacaccagactgattgttgagaggccaacatgggactgatccagataccctgaatgtagctgccagtgaggaggcatctacagtctttggggcctcaggcaacagatagcatttatccctggcatccagatggactttggacaaccattctacaggaagggatgttgtcacagcctggacacatgggggaaggcctaggccctgccatggatgatatgacagtcttgggagatccctcaagaatggcctcaccctccttggagagtggagtctggattgagtggaaagttgtagcagacttgaaggggacaggggaggaggggagggagagtgagctgggattgatatgtgatgcaagattgattctaatttaaatttaaaaaacaaacacacaaaaaccatgatccttagtgaatagactcggtgagttgtgaaggttccactggcatgcatttttgtctctttgctgacatatttttgaacatttagaggactaagatgagtgaattctctagaaaggtagttattcttttttggtgcatcatgtaacaatggaacatgatgtcataccacaagttagaggtctttcaacgtgtccatggaacactgggaaaattacaactgtaattgactgtattgacccatccaggacaggtgaatttggtgaagttaggatttttccattgccaataacagtgggacactaaggaaacaatgtaaattttgctgaattcaactgaccatgtcattgacattgtccttcatgcaatgtaggaaaaggtaatgctttgacacctgaagaaaatgaaatacttgtgcaatttgctcatgaaaagaaaattccagtggaaaacattctcaatattcttgctacaggtaacatcaatgaatatcttttagctataatatatatatttataaatttacatatagatatatatattgagttgtctatctgtctgcctgcctgtctgtctgtctgtctagtcagatgcctgattcatattgtatctagtcgtattgtctttcaggtgtcctttccagcaataatcattggggaaactgttcctatattcttataacacttctgtcactccttaccccactcacgttctttttcagatacttgtcctgaataaaggccttctgtaggtgagtaaaagttgaaggcatgatagccatactgatatttgaatcgatttttcctcctaacaagaaaattagaaataagtcttgacaaaggatgaaaggaactcaaaagtaagcaatataaagagagaatatcattcttcttttaaagctgaaaatgttacaatgttaaaagtgaaaggtagaataatttatgtataagacaatattaagttcttttattcagaattgataatatttttatatttagtaaatttacatcaaaaatgttacttgttatttgaaaaatcgtactttacttatgattgtgaaatataatttgtcacagatacaccacaagcatgtttatattttcaatatattctgtgaaacctcaatctacattttcatgtgggggacacagaatgacattattcactataaactgtgctcatnnnnnnnnnnnnnnnnnnnnnnnnnnnnnttccaggaaatgagctgtttgtgtacaatcacttctgtatactctataatgagatatctaatgttacattcatgcactcttaaaacgactatgttcaaccatgttttaatttttgctttcatgctgccaaggtgagaacaggatggcaattatgcatcatattctcttgatcatggaatcagcatcacaaataaatcaccatttcattctacatgaattgtcccatctcctgtagagccaggataccacatatcaaattcctggcttagctttcctttcccatcacatgatgtattacctgttcttattttttgactgattaaataaattgtttcaagaaacaataaatgcctcgcaaaatgtatctcattcaaaaagcccataaatagtcactaagataattacaataatcactccggtgtaacaaatgatatccgcatcattacaaactattgtagtaattgaaatttcatcattcctggatagccatgggcaagaacagtgcagaagtgaagtttatgttgtgttccatatttactttcagttttaacttgagatttgcagttgaatggttctaacacactgaaataatttgtataacaaactctgtggtt

SEQ ID NO: 816 - DNA, 1691 bp, Cricetulus griseus
gaaacagacagctgagaccctgttgtctctgtcacctgctgaaactgccaacctcaaggaaggaatcaatttttttcgaaataagactactggcaaagagtacattttatacaaggagaaaaaccacctaaaggcatgcaagaacctctgcaagcaccaaggaggcctgttcataaaagacattgaggatttagacggaaggtccgttaaatgtacaaagcacaactggaagttagatgtgagcaccatgaagtacatcaaccctccagggagcttctgtcaggacgagctggttgtcgaaatggatggaaacgatgggcttttccttatagaattgaatcctcctaacccttgggactctgatcccaggactcctgaagagttggcttttggggaagtacagataacatatctcactcatgcctgcatggacctcaagttgggagacaagcggatggtgtttgacccttggttaattggccctgcttttgcccgaggatggtggttgctacatgagcctccatctgattggctggagaggctgtgcaaagcagacctcatttacatcagtcacatgcactcagaccacctgagttaccccactctgaagcagctttcccagagacgaccagacattcccatatatgttggtgacacggaaaggcctgtgttttggaatctggaccagagcggtgttcagctaactaacatcaatgtggtaccatttggagtgtggcaacaggtagacaaaaatctccgattcatgatcttgatggatggcgttcatcctgaaatggacacatgcattatcgtagagtacaaaggtcataaaatactcaacacagtggattgcaccagacccaatgggggaaggctgcctgagaaagctgctctaatgatgagtgattttgctggaggagcatcaggctttccaatgactttcagcggtggaaaatttactgaggaatggaaggcccagttcattaaggcggaaagaagaaagcttctgaattacaaagctcagctcgtgaaggacctccagcctcgaatctactgtccctttgctgggtattttgtggaatctcatccatctgacaagtatattaaggaaacaaacatcaaaaatgacccgattcaactcaacaatctcatcaagaaaaactgtgatgtggtgacatggaccccacgacctggagctactcttgacctgggcaggatgctgaaggacccaacagacagccagggcatcatagagcctccagaagggacaaaaatttacaaggattcatgggacttcggcccatacctgagcaccttgcactctgctgtaggagatgaaatcttccttcactcgtcctggataaaagagtacttcacttgggctggatttaagagttacaacttggtggtcaggatgattgaaacagatgaagacttcaacccttttcctggagggtatgactatctggtggactttctagatttgtcttttccaaaagaaagaccaagcagggagcatccctatgaagaaatccgtagccgtgtggatgtcgtcaggtacgtggtgaagcacggtctgctgtgggatgacctgtacattggcttccagacccggttgcagcgggaccctgacatataccatcatctgttttggaatcattttcagataaaactccctctaacaccaccca

SEQ ID NO: 817 - DNA, 1077 bp, Mesocricetus auratus
cgcaatctgctgctagccctctgcctcttcctggtcctgggatttttgtattattctgcttggaagctgcacttgctccaatgggaagactccaattcattgcttctttcccttgactccgctggacaaacactaggcacagagtatgatcggctgggttttctcctgaagctggactctaaactacctgccgagctagccaccaagtacgcaaacttttcagagggagcttgcaaacccggctatgcttcagccctgatgactgccatcttccccaggttctccaaaccagcacccatgttcctagatgactcctttcgcaagtgggctagaatccgggagttcgtgccaccttttggaatcaaaggtcaagacaatctgatcaaagccatcttgtcagtcaccaaagagtaccgcttgacccctgccttggacagcctccactgccgccgctgcatcatcgtaggcaatggaggggtccttgccaacaagtctctcgggtcacgaattgacgactatgacattgtggtcagactgaattcagcgcctgtgaagggctttgagagggacgtgggcagcaagaccaccctgcgcatcacctatcctgagggtgccatgcagcgacccgagcagtacgaacgagactctctctttgtccttgcgggcttcaagtggcaggacttcaagtggctgaagtacatcgtctacaaggaaagagtgagtgcatccgatggcttctggaagtctgtggccactcgagtgcccaaggagcccccggaaatccgcatcctcaatccgtacttcatccaggaggccgccttcacgctcattggactgcccttcaacaacggcctcatgggcagggggaacatcccaacccttggcagtgtggcggtgaccatggcactacatggctgtgatgaagtggcagtcgcaggctttggctacgacatgaacacacccaatgcacccctacactactatgaggctgtgcgcatggcagccatcaaagagtcctggacgcacaacatccagcgagaaaaggagtttctacggaagctggtgaaagctcgcgtc

SEQ ID NO: 818 - DNA, 967 bp, Mesocricetus auratus
  misc_feature (699)..(713): n is a, c, g, or t
gtaggttcctggccatgctggctctggtctttgtcgtcgtcatggtgtggtactccatctccggagaagatacgtactttgatctcttttatcttcccaactcagagaagaaagagccatgcttccagggtgaggcagagaggcaggcctctaagattttcggcaaccattctagggaacagcccatcttcctgcagcttaaggattatttctgggaaaagataccatctacctatgagttgccctttgggaccaaaggcagtgaagaccttcttctccgggtgttagccatcactagctattctatacctgagagcatacagagcctccggtgtcgtcgttgtgttgtggtggggaatgggcaccggttgcggaacagttcactgggaagtatcatcaacaagtacgatgtggtcatcagattgaacaatgctcctgtggctggttacgaggcagatgtgggctctaaaaccaccatacgtctcttctaccctgagtcggcccacttcgaccccaaaatagaaaacaacccagacacgctcttggtcctggtagctttcaaggcaatggacttccactggattgaaaccatcttgagtgataagaagcgggtacggaaaggtttctggaaacagcctcccctcatctgggatgtcaaccctaaacagattcggattctcaaccccttctttatggagnnnnnnnnnnnnnnnctcctgagcctgcccatacagcagtcacgaaagatcaagcagaaaccaatgacaggtctgctagccatcaccttggccctccacctctgcgacctggtgcacatcgctggcttcggctacccagacgcctacaacaagaagcagaccatccactactatgaacagatcacgcttaagtctatggcggggtcagggcacaatgtctcccaagaggccctagccatcaagcggatgctagagatgggcgctgtgaa

SEQ ID NO: 819 - DNA, 690 bp, Mesocricetus auratus
agagagctgacagcatgaaggtcctcctgctgctagcagccttgatcatggtctttggcccaatccagatccaagggagtctagctgagttaaatcgaatgatctggcaattgacaggaatgagagctgggttaagttatgccttctatggttgccactgtggcctgggtggcagaggatcccccaaggatgcgacagattggtgctgtgcggctcatgactgttgctacgaccgactggaggaccttggctgtggcacaaaatcactggactacaatttcaagtattcaaggggcgaaatcacctgctctgtaaaccaggacttctgtgggcaacagttgtgccactgtgatagacttctggctgaatgtttagcccagcaccagaagagctacagttggaagtacctcatgggtatcaagaaatcttgcgaaggagagtcacccagctgctcagagagccgcttttttttcacatagcccaacccagtccccccagggataaagaaagcattcctctccttccctagacaccttctgtagagacaccaaagcctgaatgcatcagctgatcttccccaccacgccactaccttgggctaacagattgcccacatccatccttcccttcacatccaacttcctgccttgcagtatcaaggggctgttacaaataaagtaattcatcaat

SEQ ID NO: 820 - DNA, 93 bp, Phodopus roborowski
tacatgcacacactggtacagaatctggttaacaacgggtatgtgcgggatgagactgtgcgggccgcgccctatgactggcgtctggaaccc

SEQ ID NO: 821 - DNA, 93 bp, Mesocricetus auratus
tacatgcacacactggtacagaatctggttaacaatgggtatgtgcgggatgagactgtgcgggccgcaccctatgactggcgtctggagccc

SEQ ID NO: 822 - DNA, 390 bp, Mesocricetus auratus
aaccagactaatgctgccagagcagcctgctctccagacatactaaggacaaatggggaggcaccagaagaaggaggagcagatatggactgtgatggctctccgttgcctaaagacagttctgagtcggtgaatggctataaagaatataaagaaaaagtaaacagtggaagcttaactcaagcatcacaaagggggaagtctgtggaagatggagtaacacagagaagcagtgacttgccagtagagacaacagaccatgaggacgccagcaaaggtcaccccttcttgacaaacgaggagctggctgccctgccagtggtcagagtccctccttcgggcaagtacactggcactcagttgcaggccaccatccgcacgcttcaaggc

SEQ ID NO: 823 - DNA, 489 bp, Cricetulus sp.
tgtagcaagcaggtcatggaggagctaagccaaggagactacttcatgaaagaaatagacactcataagtattactccagagcgtggcaaaaagcccacttaacctggctgaaccaagaggggaccctcccagagaacatgaccaccgcacacgccgtggccatcttggtctacacctccaatcgcaatgtgagctctgactttgctacagctatggccagggccggggcatctcccgggcagtacagacagtcattccacttcaagtatctgcactactacctcacctcagccatccagctgctgaggaaagagagctccacaaagaacagggacctgtgctatgaggtccactatgggatgaagaacgtgaggtttgaagtcaatgtcggtgccactgtccgattcggccagttcctttctgcctccctgctaagggaggagacacgggtgtctggaaaccaaaccctgtttactatggttacatgc

SEQ ID NO: 824 - DNA, 821 bp, Cricetus cricetus
  misc_feature (445)..(460): n is a, c, g, or t
gccgagtgttgcggccagaagcggagtctcagccgggaggcgctgcagaaggatctggatgacaagctctttggacagcatcttgcaaagaaagtcatcttaaacgccgtgtctggtttcctaagcaacccgaagcccaagaagcccctgaccctctccctgcacgggtggacaggcacgggcaagaacttcgccagcaagatcatcgcagagaatatttacgagggtggactcaacagtgactatgtgcacctgtttgtggccacgctgcacttcccccacgcctccaacgtcaccctgtataaggaccagctacagatgtggattcgaggcaacgtgagtgcctgtgctcggtccatcttcatctttgacgagatggacaagatgcacgcaggccttattgacgccatcaagcctttcctagactattatgacgtggtagacnnnnnnnnnnnnnnnnaggccatcttcatcttcctcagcaacgccggggcagagaggatcacagatgtggctttggatttctggaaaagtgggaagcagagggaagaaatcaagcttagagacatggagcatgccctggccgtgtcggtcttcaataacaagaacagtggcttctggcacagcagcctcattgaccggaacctcattgattattttgtccccttcctgcccctggagtataagcacttgaaaatgtgtatcagagttgagatgcagtcccgtggctatgaagtagatgaggacattataagcaaggtggctgaagagatgacattcttccccaaggaggagagagtcttctctgacaagggctgcaa

SEQ ID NO: 825 - DNA, 1515 bp, Cricetulus griseus
  misc_feature (566)..(583): n is a, c, g, or t
  misc_feature (1273)..(1292): n is a, c, g, or t
tgggaagttacttagcacggttccgggtttcctagtgccccacccgcccttcctagcacagctacaggatcttggtcccttggttccttggttgctctgtgctgcaggtgaaggaaacccttgtctgttggtcccttctgggtcagtcctgggcgcatctgccctcctctgctgactccgccccgcatctttaaagacccgcctcgcgtcagagctgacccaccgcgcggctgccagtcagaccctccggacctgcgagagcctcaggctgcagaaatcgccacgcctcactcggtccgtacccagtgggcatcttggggatctgggcggtctccggttccccacgcgtgtgtctgtgtgtctgtctctctgtgtgataagctctttgcagcctgcctggcagttccagcgcaccaagtgtcttgtgtgccctttggctgacgctgagcttggagcggccttagtgagctcctagcccgcctgaccctgcctggcgaggaatacacatacttggcccctgcaaggggttgctggcattttaaatctacaggagcttgaggcctatnnnnnnnnnnnnnnnnnnttcagaaagccagtcccgaggcctctttttgcaaaggtagatgtggggagccagccagatccttgatgatttctttaattttaacggggaaggggatattgagttcttaatgaaggcttttgaaacccgttgtaaatctgaaggggtgataaactgtaagccgtcttggggagaacagattgctttttgggttgcctttttgtctgatacatttgttttgagcctgctgaccagctgtttctgaacttcattttctcagcctcaacagtgatttgagcccgcttttagctcccctccgcctgccttggcttgtttctgtgcaagaacagctgcttggcccctagattagagaaaggggtctcctcccctttcccaagaaagcctcttctatgtgctcagcgatggggagcggggaacctaatattgctggcaagaaaaagaagtacctcaaggctgccctgtatgtgggtgacttgggccctgaagtgacagaggacatgctttataagaagttcagacctgctggccctctccgcttcactagaatttgccgtgacccagtgacccacagccccctgggttatggttatgttaacttccgctttcctgcagatgctgagtgggccttgaacacaatgaactttgatttaattaatggtaaaccgtttcgcctcatgtggtcacagccannnnnnnnnnnnnnnnnnnntggagttggaaatatattcatcaagcacttggataaatccatagataataggaccctgttttatttattttctgcttttgggaacattctttcctgtaaagtagtatgtgatgacaatggctctaagggttatgcctatgtccactttgatagccttgctgctgccaatagggctatctggcatatgaatggagtctggctcaacaaccgccaggtgtatgtc

SEQ ID NO: 826 - DNA, 952 bp, Mesocricetus auratus
  misc_feature (523)..(549): n is a, c, g, or t
  misc_feature (935)..(952): n is a, c, g, or t
gtcgccagcgtccacggtccggttcccaggcgctcggctcgagcccgcgcgctccccggatagacgcggacgctgcagggtgccgggggagcggaggagccgctcacggaccaggctgcggcaatcttaacggccagcggaggacctccctgccactccgcgtcggggctgtgagaggaggacaagggcatgctgggcggcggcagcgacgcgggcctggccaccgccgcggcgcgggggcaggtggagaccgtgcggcagctcctggaagccggcgtagatcccaacgccgtcaaccgcttcgggaggcgcccgatccaggtcatgatgatgggcagcacccaggtggcagagctgctgctgctccacggagcggaacccaactgcgctgaccccaacactctaaccagacccgtgcacgatgcagctcgggagggcttcctggacaccctggtggtgctgcacagggcaggggcgcggctggatgtgcgggacacctggggccgcctgccggtggacctgnnnnnnnnnnnnnnnnnnnnnnnnnnngcagtctatctgcatgctgccactggggactgaacgacccgcaagtcttccaaaactccaagcctatgcaggaaggtaaagccaatgagaaataacttccgaagtgttttcctgcatctgggtctggatctggccctctattctcaccctgaagccaaagggatccccaatttgatttagtattgtgtgacgttctgggagccccttccttttcaggtgtaaaataacaagggaagttcttgaatctccacaacatgatggtgcagtgggaattggagaatgtgcttggtgactgacaatagggagggagcagtcagtacctccctccccctgtgacctccaaatgcagataatccacagtctagaaggaaaccctggagactagnnnnnnnnnnnnnnnnnn

SEQ ID NO: 827 - DNA, 1335 bp, Cricetulus griseus
  misc_feature (1312)..(1335): n is a, c, g, or t
tgccagagcgcgtgggtccttgggtcaggtcaaagggtcgaaggtgcagcgcgtgacccaggatcctagcaggctcggagcaggagcatggcgtcgtcggggtcggtgcagcagccgcggctggtgctgctgatgctggtgctggctggcgcggcgcgggccagcctctacttccgtccgggccggacctgctaccacccccttcgcggggaccagattgcccagctggggcgcaggacttaccctcggccgcatgagtacctgtccccatcggatatccccaagaactgggattggagaaacgtgaagggtgtcaactacgccagcatcaccaggaaccagcacatcccacagtactgcggctcctgctgggctcacggcagcaccagtgccatggcagaccgcatcaacatcaagaggaaaggtgcgtggccctccaccctgctttccgtccagaacgtcatcgactgtggcaatgctggctcctgcgagggaggcaatgaccttccggtgtgggcatacgcccataagcatggtatccctgacgagacctgcaacaactaccaggccaaggaccaagactgtgacaagtttaaccagtgtgggacctgcaccgaattcaaagtgtgccacaccatccagaactacacccgctggagagtgggtgactacggctccctgtcgggtcgggagaagatgatggcagagatatacgccaatggtcccatcagctgcgggataatggtgaccgagaagatggataactacacaggaggcatctatgccgagctccaggagcagacctctatcaaccacatcgtctctgtggctggctggggtgtcagcagtgatggcattgagtactggattgtccgtaactcatggggtgaaccctggggtgagaggggctggatgaggatcgtgaccagcacctacaaaggaggcacgggtgccagctacaacctcgccattgaggaggcctgcacatatggggaccccattgtttaagtacacgtctctggaaacaatgttgtaaaccatgccagggatggatggggtgattaacactggacagctagaaacagtgcttgtggacatgacgaccagtgtggactgcagaagccatcccaagaagagatggtaaaggaggagcccacctccccgttgccctcaggatcagaggcctgccttcagccacctggggaagacagctatggtctacaacagttctgatctcaccctaggatcgatccatgggagagggtaacaattccaggatgcctaagtgatgaataaagtatccggattcccnnnnnnnnnnnnnnnnnnnnnnnn

SEQ ID NO: 828 - DNA, 226 bp, Mesocricetus auratus
agccagcgaaggtacctgatgatccaccttccatggtcttcaagcagatggagctaggtggccaattcttgaaggcagcggaggactatggagtcacgaagactgacatgttccagactgttgacctcttcgaaggcaaagacatggcagcagtgcagaggactctaatggctttgggcatcttggccgtgaccaagaattatggacacgctggtggacacgctgg

SEQ ID NO: 829 - DNA, 437 bp, Mesocricetus auratus
  misc_feature (267)..(319): n is a, c, g, or t
gtccagagagctggcaagtgaggacccagcacactggcgcacgtactgtcccatccaggcgtctattcctctcttcctcgcccatgtctgtcctatagctctcttgggctgtacctgctgcccttggcctctggtgatccaagttcaccacctgtccatcacagacattactaactcctggatcattccttctttccaaccctgctatgcttccttctaaggtgcttgatatcccccctgtcatctctctggacccagttcatattnnnnnnnnnnnnnnnnnnnnnnnnnnnnnnnnnnnnnnnnnnnnnnnnnnnnnggtcatccctagctgctttctgcttcatagtctctgaccagtccctgcacaaacaaatctgtggtaaactatctccctgattgccctgcccagccctggaggatgctggaaggtggac

SEQ ID NO: 830 - DNA, 419 bp, Mesocricetus auratus
acatgcagtgatcacagctccttgcaaaatcacccgccccgttcgtctgcttcagttccgcttcttgataagactgcgtgatgcctgaaagcttcataagctttaggatgatgatcgaaccgagtgacttgtaggtctgtaacaatgagaagctcagatcatgggagtctcaacagaagacatctaaagctgttctgtctctatatgtaagactctggacaccaagcgttttcagctaggttcagcacggaagttagttaacctgttgccctgtcacctgggaaggggttcactccatcccatctgtccagccatctatccatcaatccatctatccttccatccatccactcttctatccattcatccattcatccatatcttcttcctatccacccatccatccatccacccaccca

SEQ ID NO: 831 - DNA, 1197 bp, Mesocricetus auratus
acctttttgctcctgcatctggtcccggtggcgctcagcctgtctacctgcagcaccctcgacatggaccagtttatgcgcaagaggatcgaggccatccgcgggcagattctgagtaagctgaagctcaccagccccccggaagactatcctgagccagacgaggtccccccggaggtgatttccatatacaacagtaccagggacttactgcaggaaaaggcaagccggagggcagccgcctgcgagcgagagcggagcgatgaagagtactacgctaaggaggtttataaaatcgacatgccgtcccacttcccctctgaaaatgccatcccgcccactttctacagaccctacttcagaattgtccgcttcgatgtctcgatgatggagaagaacgcttctaatttggtgaaggcagagttcagagtctttcgtttgcagaatcccaaagcgagggtggccgagcagcggatcgaactgtatcagattctcaaatccaaagacttaacgtctccaacgcagcgctacatcgatagcaaggttgtgaaaacgagagccgagggcgaatggctctccttcgatgtgacggacgccgtgcacgagtggcttcaccacaaagacaggaacctgggatttaagataagtttgcactgcccctgttgcaccttcgtgccatttaataataacatcatcccgaataaaagcgaagagctcgaagccagattcgcgggtattgatggcacctcccaacatagcagtggtcatcaggagactataaagtccactaggaagaaaaacagtgggaagacccctcatctcctgctaatgctgctgccctcctacagactggagtcacaacagtccaatcggcggaagaagcgtgctttggatgctgcctattgctttagaaatgtgcaggataattgctgcctccgccctctttacattgatttcaagagggatcttgggtggaaatggatccatgaacccaaagggtataatgccaacttctgtgctggggcatgcccgtatctgtggagttcagacactcagcacaccaaggtcctcagtttgtacaataccataaatccggaagcttctgcttctccttgctgtgtgtcccacgatctggagcctctcaccatcctctactacattggcaacacacccaagatcgaacaactttccaacatg

SEQ ID NO: 832 - DNA, 898 bp, Mesocricetus auratus
actggccattcatccacagttgacatccgtcccgagccagccaacgagaagactccactgtcagcaccatgaatgccagtgctatcctccttttctgcctcatcctgctgagtctgagtgggactcaaggaatccctctttcaaggacagtccgctgctcctgcatcaaaatcgatgaccgaccggtaaaaccgagggccttgggaaaactggaaattattcctgcaagtcaatcctgcccacgtgttgagatcattgtcacaatgaaaaagactgaagagaagagatgtctgaatccagagtctgaggccatcaagagtttattgaaagcagttagccaaagaaggtctaaaagagcctcttaaccagagagaagccgatcaccgcagtgctgtagccgacggacaggcagcggaaagcccgtctctccatcacttctttatacgtcggcctatggctactcctaattgtccctggttcccctgaaaggtgaccagccatggtcacatcagctgctatccctagtgacatcaggtcactattctccaggacgatgggcagctcctcgtcctgagacaacagtaactccagtgacaagagtccccaactctactaagagctggtcctgagttctcatacagacagctgcaatgtttctcctggcgctgtactatataagctacgctgaggtgctacacttttagccttgtgccaagctctacctgctcctcaccctccccaccttaaagtgtgttagcagatctgtccagttctgagttacctgggttctttaatttcaaatacagtcgcaataagactaccacctgcctgctcctacggacaaactttacttcatggcttacagctaccttcccaaggaaacttcataactcagagt

SEQ ID NO: 833 - DNA, 871 bp, Mesocricetus auratus
  misc_feature (623)..(637): n is a, c, g, or t
tcacccacggctgggactcagagttgaaggttgaactccaccttcaggcagaatgaggctcagcatagcagccctgcttctcctgctggccagctgcctctctccaggccacggtatcctggaggccaattacacaaccttaaagtgtagatgttccggaatggtctcaggcgttatccatccaagcttcatagaacaaattcaggtcagatatcgtgggaatggctgcccaaaagatgaagtcctgatctccactaagaataagaaaatcgtatgtgtgaatcctcaagccaaatggctccaaatagtgttaaaacttttacggagcaaaactatgtcttcaacggtcacagcgccagtgagtaagagaaggactacctctacctaaaggccctatccaccaaaggacacctgcaccctcctttattccctgctctgaattctagctgtgctcttagttgaagaatttccaagaaaataacttccttttgcaaacaaacatgactgtctgtaaggaaagccctgcaggagctgaaagggttaacccgagctcctttgcatactcaacctccattcttgtccaaggatgggagtttagttacaacccacttggcctgtgtttnnnnnnnnnnnnnnnctttaatgttaaaccgtcctaagttgtagaggaatggaaactcacatgtaaaacgtgaacctgtaccttgtattaacaagaaatatatggggtgtacatccatcgtttcacatgcttaggaaaagcagctttccagaagtttcctgggcagctgatgcagttccaacctaacacgatgcagagtgaaaagccccatgaagaaaatagagtcctacttttaaaggtttcttgtgt

SEQ ID NO: 834 - DNA, 321 bp, Cricetulus griseus
  misc_feature (201)..(201): n is a, c, g, or t
tgccattttcgttcggtcgtgcctctggattacatggtcttcttcagtttcatcacctggatcctcatccccctcattgtcatgtgcatcatctacctggacatcttctacatcctccgcaacaaactcagtcagaacttgtctggcttcagagagactcgggcattttatggacgggagttcaagacagcaaagtccctntttctggttctcttcttgttcgctttgtgctggttgcctttgtccatcaacaacttggtgtcctactttaacgtcgatataccagagcctgcaatgtgcctggggatcctgctgtcccat

SEQ ID NO: 835 - DNA, 561 bp, Cricetulus griseus
tacttcggttgcatgaaggctgcgcccatgaaagaagcaagcatccatggacaaggcagcttggcctacccaggtgtgcggacccatgggactctggagagcgtgaatgggcccagggcaggttcgagaggtctgtcgacatccctggctgacacttttgaacatgtgatcgaagagctactggatgaggaccagaaggttcggcccaacgaagaaaaccataaggacgcggacttgtattcttcccgggtgatgctcagcagtcaagtgcctttggagcctcctctcctctttctgctagaggaatacaaaaattacctggatgctgcaaacatgtctatgagagtccggcgccactctgacccagcccgccgtggggagctgagcgtgtgtgacagtattagcgagtgggtcacagcggcagataaaaagactgcagtggacatgtcgggtgggactgtcacagtcctggagaaagtcccggtatcaaaaggccaactgaagcaatatttctacgagaccaagtgtaatcccatgggttacacaaaggaaggctgcagg

SEQ ID NO: 836 - DNA, 305 bp, Cricetulus griseus
tacattacattctctttgattgttcttgttattatgctgttttgtgaacctgtagaaaacaagtgctttttatcttgaaattcaacaaatggaaagaataagcatagaataatgcattctatgtagccatgtcactgtgaataacaatttcttgcatatttagccattttaattcctgtttgatttttacttctctgttgctacgcaaaatgatcaaaggaaacttcagttttacaatctgtatgcctaaaagcgggtactaccctttattttactgacttgtttaaatgattcgcttttgtaag

SEQ ID NO: 837 - DNA, 993 bp, Cricetulus griseus
ttcaggggtagtcccttccaggaaaagatgactgcaggagacaactcccagttggtgccagtggtagacacaacaaatatcacagaattctacaacaagtccctctcttcatacaaggagaatgaggagaacattcagtgtggggagaactttatggacatggagtgcttcatgattctgaaccccagtcagcagttggccatagccgtgctgtccctcacactgggcaccttcacagttctggagaacctgctggtgctgtgtgtcatcctgcattcccgcagtctccgatgcaggccttcctaccactttattggcagtctggcagtggctgacctcctggggagcgtcatttttgtctacagctttgttgacttccatgtgttccaccgtaaagacagccccaatgtgtttctgttcaaactgggtggggtcacggcctccttcacagcttctgtgggcagcctgttcctcacagccatcgacaggtacatatccattcacaggcctctggcctataagaggatcgtcaccaggcccaaggctgtagtggccttttgcctgatgtggactattgcaatagtaattgctgtgctgcctctccttggctggaactgcaagaagctacaatctgtttgctcggacattttcccactcatcgatgaaacctacctgatgttctggattggagtcaccagcgtgctgttgctgttcattgtgtatgcatacatgtacattctctggaaggctcacagccatgcagtccgcatgattcaacgtggaacccagaagagcatcataatccacacatcagaagatggcaaggtgcaggtgactcggccggaccaagctcgaatggacattaggctggccaaaaccctcgtcctgatcctggtggtgttgatcatctgctggggccctctgcttgcaatcatggtatatgatgtctttggaaagatgaataagctcatcaagacagtgtttgccttctgt

SEQ ID NO: 838 - DNA, 298 bp, Cricetulus griseus
  misc_feature (122)..(140): n is a, c, g, or t
gtagtatgaagcttcagagtgcaaactgaagctgaaaccgtggaccatcgggagatcatgtccagcttctaaacacagactccacggacaaaagctcttctcttttgtgtttcttttacgtnnnnnnnnnnnnnnnnnnnaaaccacacggactggggactggggatgaccaaatgttcttctgtaacaactgagtattgaatttccttggacaaccgaaaatagctctgtatccacaacaacaaagaatctcctattcctgacaggcagagttgaaccatgatacacaacttaaaca

SEQ ID NO: 839 - DNA, 774 bp, Cricetulus griseus
gactacctgaatggtcctttcacggtagtggtgaaggagtcttgcgatgggatgggggatgtgagtgagaagcatgggagtgggcctgcagtcccagaaaaggcggttcgtttttcattcacagtcatgagaattacgatagatcatgactccaagaatgtgaaggtgtttgaggaacccaaacccaattctgaactgtgttgcaagccattgtgtcttatgctggcagatgagtccgatcacgagaccctgactgctatcctaagccccctcattgctgaaagggaagccatgaagagcagtgaattaatgcttgagatgggaggcatcctcaggactttcaagttcatcttcaggggcactggatatgatgaaaaacttgtccgggaagtagaaggcttggaagcctctggctcagtctacatctgtacactttgtgatgccactcgtctggaagcctctcaaaatcttgtcttccactccataaccagaagccatgctgagaacctggagcgctatgaggtttggcggtccaatccctatcacgagtcagtggaagaactccgggatcgggtgaaaggggtctctgccaaacctttcatcgaaacagtcccttccatagatgcactccactgtgatattggcaatgcggctgaattctataagattttccagctggagataggggaagtgtataaaaatcccaatgcctctaaagaggaaaggaagagatggcaggccacactggataaacatctccggaaaaggatgaac

SEQ ID NO: 840 - DNA, 444 bp, Cricetulus griseus
aagatttatatcatgtctgttgcttgcaagaacaacaaaaaagttactttccgttgcacagagaaagatttagtaggagatgtccccgaagccagatatggtcattccattgatgtggtatatagtagagggaaaagtatgggtgttctcttcggaggacgatcatacatgccttctacccagagaaccacagaaaaatggaatagtgtagctgattgcctgcctcatattttcttggtagattttgaatttgggtgtgctacatcatatgttcttccagaacttcaggatgggctgtcttttcatgtttctattgccagaaatgatactatttacattttaggaggacactcacttgccaataacatccgccctgccaacctgtatagaataagggtagatcttcccttgggtagcccagcagtgaattgtacagtcttgcca

SEQ ID NO: 841 - DNA, 426 bp, Cricetulus griseus
tcttgccaggacatccttctgtccagtgcaccctctggacctcaatttcccttcaaaggggtggatgatcgtgagtcctggccctctgtgttttataatagaacctgtcagtgctctggcaacttcatgggattcaactgcggaaactgtaagtttggatttgggggatcaaattgcacagagaagcgactcttaattagaagaaacatctttgatttgactgtcccagaaaagaataagttctttgcttacctaaatttagcaaaacatactatcagcccagtctatgtcatccccacaggcacatatggccaaatgaacaatggatcaatacccatgtttagtaatataagcgtctatgacctctttgtatggatgcattactatgtgtcaagagacaccctgcttggaggttctgaaatctgg

SEQ ID NO: 842 - DNA, 204 bp, Cricetulus griseus
ctgactgtctacccttgcatgatttgtgggaagaagtttaaatcgagaggtttcttgaaaagacacatgaaaaaccatcctgaacaccttgccaagaagaagtaccgctgtactgactgtgactacactaccaacaagaagataagtttacacaatcacctggagagccacaagctgaccagcaaggcagagaaggccatagaa

SEQ ID NO: 843 - DNA, 97 bp, Phodopus sungorus
ttcagggcctgcatcctggagatggtgtgcaggaagcccatgacagacgaatccaacatatctggctctcagaagacacaagtttctactgtctctt

SEQ ID NO: 844 - DNA, 110 bp, Mesocricetus auratus
ccgggcctgcatcctggagatggtatgcaggaagcccatgacagatgaatctgacatatctggctctcagaagacacaagtttctactgtctcttcagcaaaggttgaat

SEQ ID NO: 845 - DNA, 121 bp, Cricetulus griseus
  misc_feature (95)..(96): n is a, c, g, or t
gcccacacccgcggtggagggcgcagtggcctcgggagcgctggccgacccggccactgccgctgcagacagacgcgcatccagcatagctgctnnaggctcaaggccaaggagcatgccg

SEQ ID NO: 846 - DNA, 459 bp, Mesocricetus auratus
  misc_feature (87)..(113): n is a, c, g, or t
ttgaggccagattcggaagccagccagagcccacagtatggctttgactccttacctcagaagatctgtttaatctgtggagatgannnnnnnnnnnnnnnnnnnnnnnnnnncacctgtgggagctgcaaggtcttctttaagagggcgatggaagggcaacataactatttatgtgctggaagaaatgactgcattgttgacaaaatccgcagaaaaaactgcccagcatgtcgcctgagaaagtgctgtcaggctggcatggtccttggaggtcggaagtttaagaagttcagtaaggtccgagttatgagagctctcgacggtgttgctgtccctcagtcagtgggacttcccaatgagagccagcccataggccagagaatcaccttctcaccaagtcaggaaatgcagcttatccctccgctcatcaacctgctcatgaccattgagcccgat

SEQ ID NO: 847 - DNA, 1472 bp, Cricetulus longicaudatus
  misc_feature (312)..(362): n is a, c, g, or t
ccatgccaagggagaggaaggagagagatgcccaggaccacggcggcatcagggaagaaggtggccctgactcctcggtgcgctccaggaaaaggaaggcgaatgtggccgtttttttgcaagatccagatgaagaaatcgccagagttgacaagactgtgaaaagccaggatagcagtcagccttgggatgataattcagcctgtgtggacccatgcgctttcacccccacccctaataaagaagaggacgatgagcttgagtaccccaagactgcgtttcagcctcggaaaatcaggccacccagggccnnnnnnnnnnnnnnnnnnnnnnnnnnnnnnnnnnnnnnnnnnnnnnnnnnnatgttaaacaaggagaagatttacctaagagatgagcactttctgcaacgccatcctctcctgcaggcaaggatgcgagcagttcttctggattggctaatggaggtgtgcgaagtctataagcttcacagggagacattccatctggcgcaagacttctttgatcgttacatggcatcacaacaaaatatactgaaaacacttttacagctcattgggatttcagctttatttattgcttctaaacttgaggaaatctaccctccaaagttgcaccagtttgcttacgttacagatggcgcttgttccggagatgaaattctccagatggaattaatgatgatgaaggcccttaagtggcgtttaagcccaatgaccattgtgtcctggctgaacgtgtatgtccaagtggcttatgtcaatgacacaagcgaggtgctactgcctcagtacccacagcaggtctttgtgcagattgctgagcttttagatctgtgtgtcctggatgtcggctgcttagaatttccttatggtgtccttgctgcttctgccttgtatcatttctcctccatggaactgatgcagaaggtttcagggtatcagtggtgcgacatagagaaatgtgtcaagtggatggttccgttcgccatggccttccgggaggtgggaagctccaagctcaagcacttccggggagttcccatggaaaacgcccacaacatccagacccacgccaacagcttggatttgctggacaaagcccaggcaaagaaagccatattgtcagaacagaacaggatccctcctcctcccagtggggtcctgacacccccacccagcagtaagaagcagaacagtgaggaggagacagaatgagcaaacctgccaaagacagtgttgtggaagcagctgcctggagctcctttgctgcctaggaggttgggagcccctgctgatgctctgcggaaaggcgtatctcttccagagcagcgggcgtcttcaaaatggcctcggacagaagtgcttgtatggaatgctagttgttttaacaatagggttgaggacaccagccacctccagaacgccgctgagtgctccagaagctgctaa

SEQ ID NO: 848 - DNA, 190 bp, Mesocricetus auratus
gctggggaaagacacaaattgttctacagcagtgcttattagcttggtcacaaccggaaagttgcttaagttcacaaagacacatcccttttctaatgaagcagaaaacaacttctctggctgctttctgatgagggttaagtacagacattgccaagataaaattttaccatgtaactcctaaagctct

SEQ ID NO: 849 - DNA, 241 bp, Mesocricetus auratus
gatcacgtgcgtcagcccatcctcctcagactttgatgagtccttaaattctctcaaatatgccaacagagcacggaacattagaaacaagcctactctaaactttagccctgagtcagaccggatggatgagatggaatttgagattaagttgcttcgagaagctttgcagagccatcaggccagtatcagtcaaactagccagaccccctcagagggtgcttctgaccacaatcggatc

SEQ ID NO: 850 - DNA, 221 bp, Mesocricetus auratus
gcttcaaggaaatagtgctgcaaacaagaaccttctttgaagatgagcaagatgacgtgagactgactgccatcttcttatttgaggatttagcgtccctaacaggaagaaggtggaagctattttttgctgaagaagtaaaaaagagcatgacttccttccttctccacctctgggacccgaaccctaagattggagctgcttgccgtgatgtcttgatc

SEQ ID NO: 851 - DNA, 205 bp, Mesocricetus auratus
gatcctggctgtgaagccagccaaagagatgagttcattattgaaaagttaaagtcggctgtgagcgaaatagcactgagcaggagcaagttacaggacgagaaccagaagcttctgcaagagctgaagacgtgtcagaggcagtgccaggccatggaagcaggactgtcagaggtgaagaatgagttacagtcacgcgatgatc

SEQ ID NO: 852 - DNA, 142 bp, Mesocricetus auratus
gatcgagccatcagagggaaaagagcagtggaagaagaacttgagaagatttaccgtgaaggcaagcaggatgaaggtgattacagaaaactggaagaaatgcaccaaagatgtcttgctgcagaacgttcaaaagatgatc

SEQ ID NO: 853 - DNA, 178 bp, Mesocricetus auratus
  misc_feature (25)..(39): n is a, c, g, or t
gatctgaagaggacgtttaaggagnnnnnnnnnnnnnnncggacactgaggacaaaggcaaaatgtctagaagatgagcgcttaaggactgaagatgagttgtcaaaatacagggaaattatcaatcgtcagaaagctgagattcagaatttactggacagagtgaaagtggcagatc

SEQ ID NO: 854 - DNA, 212 bp, Mesocricetus auratus
gtgactgcgcaccacaactttccttcggagacctcataggaccgggagtgtttccagccttgcgggccaccccagccttctgcaaagcctcgcccatgccgcctgcgttttcagggtcctgctcagctctgaccctgaagtcatctccagtgctttcctcttcttctaagggccatggcatggcttcatgtaatacagatttggggcagatc

SEQ ID NO: 855 - DNA, 1858 bp, Mesocricetus auratus
  misc_feature (1072)..(1095): n is a, c, g, or t
gcggccgccttacaaataccatctctaagacagcggtccgcgtctgcgcctctgggtcctcctcatccggcggagccttcgctcccgtgcaggagtttctttctccagagccgagtctgcctgtgaagcgaagatagctgtccccctgcctcggtgaagactccgaagtcatgtctaccggaccctttccatcttcgagaagagaggagagttctgtttcagcacccagttttaggttcagtcagaggaagatgttaaacctacttttggaaagaaacacttcttttacccaagatttccccagatctccaggagacaagcttctcgactcgacaaacctaagcattttatctggagggaccccaaaacgttgccttgatctttcaaatcttagcaatggagagatgtctgcttctccgcttatcacttcggctgacttcgatgacaccggttccttggattcctcaggaccccaggatgtgcagttaactgagaagaaccatcaccaggaccctatgaaaggcatcccagttcagcttctctgtagtactccaaacgctttggaccatagccacagaaagaaagatgcagtgcgtggcttatctgcaaataaagaaaacataaacaccaatctaaagacattgcagtgggagtcacctaggatcccaaggtttcaaaacacgcctggagatcctctggcttctccccttcctttgctgggaaatggagtctcgatggacactgaagtgaggtctctggggagtcccatcactgcagttcccaagctgagtaaaaatctaaatctagaagaccaagaagagatttcagaggagccaatggagttttccctggaagaccacgataccaaggagtgtgtgcttccaacggtgtcagggaaacaccaagatctgaagtacatcaccccagacacggtggctgctttactgtctggaaagttccagggtctgatcgagaagttttacatcatcgattgccgctacccgtatgagtaccttggaggacacatcctgggagccataaacctgtgcagccagaaggaactgcacgagtnnnnnnnnnnnnnnnnnnnnnnnnctctggacatccagaaaagagtcatcattgtgttcctctgtgaattctcctcagagagaggcccccgaatgtgccgttctctgagaaggaaagacagagctctgaaccagtatccagcattgtactacccagagctgtatatcctcaaagggggctacagagacttctttccagaatatacggagctgtgcgaaccccagggctactgtcctatgcaccaccaggaccaccaggctgagctgctgatgtggcgaaaccagagcaaagcccaggaaggggagcggcagctttcggagcagattgccctcctgatgaagaagggtgtgagcctcccatagtgggtggtggtggcgcacacctttaaccccagcacccgggaggcagaggtaggaggatctctgcgtttgaaatcagcctgtctacgacacagcaagttccaggacagccagagctacaaggaaaacatctcagaaaaacaaaaaacaatttctgtcaagtatggagcagatgcctgttgcctgtgtgcttgaaaggtggacctagaggacctgaagctcagttcaaggccagcctcagctcctggattccctagctcactaaatggaaacaaaaccgaaaggcatagtaaccattgctctggaaccaagggaaagtttcatttgtattcttgaactggtgttggtggtaaatgtttgtattcctaagaggtcatggcaggaagatgatgagttaaagaacaagataaagtctgtggtgcggccgc

SEQ ID NO: 856 - DNA, 8703 bp, Mesocricetus auratus
  misc_feature (279)..(291): n is a, c, g, or t
  misc_feature (293)..(321): n is a, c, g, or t
  misc_feature (331)..(349): n is a, c, g, or t
  misc_feature (402)..(414): n is a, c, g, or t
  misc_feature (417)..(446): n is a, c, g, or t
  misc_feature (1384)..(1455): n is a, c, g, or t
  misc_feature (1728)..(1776): n is a, c, g, or t
  misc_feature (2778)..(2795): n is a, c, g, or t
  misc_feature (3235)..(3257): n is a, c, g, or t
  misc_feature (3287)..(3340): n is a, c, g, or t
  misc_feature (3342)..(3362): n is a, c, g, or t
  misc_feature (4001)..(4025): n is a, c, g, or t
  misc_feature (4437)..(4454): n is a, c, g, or t
  misc_feature (4895)..(4922): n is a, c, g, or t
  misc_feature (7677)..(7701): n is a, c, g, or t
  misc_feature (7861)..(7903): n is a, c, g, or t
  misc_feature (7932)..(7949): n is a, c, g, or t
  misc_feature (8381)..(8418): n is a, c, g, or t
cagctggtcaacggatcaagaagcaaaggggaatccattcctgagggagtagcaatagggacctggatgagattatggccatggggctagacagatgtcaaaatggacagacgtattcttggcctgtgtaatcttgctcaggtcgccccagcccacactacagattctcattctcattctcattctcctcgtggggtacttcttgcacagcggcaaatgtcaagagagatcctcctctgattcccacaacctctgcacataaaaagcacatctgggccnnnnnnnnnnnnngnnnnnnnnnnnnnnnnnnnnnnnnnnnnngaggcaggcnnnnnnnnnnnnnnnnnnntccagcctggactaccaagcgagttccaggacagcctccaaaacaatacagannnnnnnnnnnnngannnnnnnnnnnnnnnnnnnnnnnnnnnnnntcacatctggaaccactgtgcctaggaggtgtaccctctatcaggtgcatcctccaggtagatgcctgggagacttgattcttcattccaccattttaaccctgctcagtgtcacctcaggcagcattcccctggccaccccatttgcagttgttatcacttttgtttctgttgccccctttttttgcaccatgccagtctctgtgttttgttgcttatcacctgtctcccccaccagagggtaaactccgtcaaaggcattgctagattcgttcctagtgcccagagcatagtaggaccttgcaaattggtgagcaatgcagtagaatgggaggtgagggagtggatgaggtttttttgttttgtttcactttgtttcccccccccccctggttttggtcacagagcagatggcagcattatttcttggtttgggatctcacaatggagggaaactgaagatgttagctagggacagattgagctgagttaacaagtttagcttttctccttagacatcttactttgggagccctattcagggcccagagtgcctgcaaaccagccagctaggctgccggtggtgctgggtgtcctgccactaaaaatgtggacacacgctgtcaggccttgtcaggctttgctctcaggcagaagccaggctctgcacgcaaacctggccctttgcaccgcccgactctgtttagtcgcacccttgcaaagcttagaatacttctatctctcaagccccaccccaacgccccaagacagactggccctttaagagcctcaccccccccccccccccgccttcccctcccgctgctagcgtgactgcactgggacccgcgcccggttgtgagctgagtagctgggtggctgcgcgcgggcctccaggacttctcacgctactcacgggcacctcgcccccagccagnnnnnnnnnnnnnnnnnnnnnnnnnnnnnnnnnnnnnnnnnnnnnnnnnnnnnnnnnnnnnnnnnnnnnnnncgtgcgtgcgcaccgagctcccctccactatgtgcccctgatcctcctgccgactcgcgtggatcccttcctccactctttcctccactgttcgcagctagttccacagctacccgccacttgatttctctttgtggtctgcttctatatgcaaaacattagcaagaccctgagctgcaagaggggtctctccttgtagattgcctaaggtgaccctagaggtgcgatctgcaaccctctatcatccccacccctagatcaagcagcatgaannnnnnnnnnnnnnnnnnnnnnnnnnnnnnnnnnnnnnnnnnnnnnnnnactggtcttcctgtccgtgacctcggggctggggtcgttgtgcttctcacgcgagcttggactcaggaaccagagaaggaaagtcaccaagtcaccacccagcagctcttcctccaccagcctttcctggcatccattagcttgaagtgggagagagaattttacacattcagtgttttcgggcacaaaaatagtggaatggaatctcctccgttgcccggaatggaggccccaataattgctttgtaggctgtcataggatttccccctcgaacccctccttcaacagaattctatgctgttcatggagaaccttgaaagtggtggtgaccccagccttcactttttagtgtgcccgcacctatattagctgtccttataatggcttcttgcctatctcccccacccccacccacacctagagcactccctaaggctgcccctcccgctgtcccaccactgggctccaaggaagagggcgtggcacagacacagagtcctataaaggtggtggtgccttcaccctgaccctgcaggttccttggatctttccctgatccactttggggtatcctgagagcacacttttagttcagcacctcctcacaaccaacggtgagtactgagggctcctggcttgcccctccttccccagaaaggggaagtttggatgaagggctgctgggtagccctccatgataagagactaggatccttttttgtggtcatgcaaattccttagaggagaaagtgagggcagagaactaaaaggacttccgaagttccagtagctagcgtcagatctttagatgcaaatgaatatcctctactctcaggttaacttcattgcctcactaatcagtgggggtgggggcttccccattcttgcacatgtagccccatcctcaggactgccagtgggggaagagggctgctgtctggctgggtagggtggatacagaggagacacactgagtttttcctagctgtactctgtcttannnnnnnnnnnnnnnnnngagcctccaccctcccaaaggtagcatgtcagagctgagagtttctggatggcttcagaagaacctggggcaccaaccctcggctcaggggttcccagccccatcctttctgggatacaacctgcttgatagactgttagctggtggaaacacaagttgcatttcccctggctcttctatcttacaaagactagaagcccttaggataccaattatgttgaaggagaaaccattgtgaccagaatggcagtatcccacttcactgaaggaattgagtctcttgtatgtttgagagttagtcctccaggaagccccctctcacttcaaggtgactgtactatttggggtaggaattgtacatcttgccttctgtggttcagatcttcttttcccaggatctgtaacctctgaatcgggcaatcttttgtttgtttatttgnnnnnnnnnnnnnnnnnnnnnnnattgttttggaggctgtcctgaaactcgcnnnnnnnnnnnnnnnnnnnnnnnnnnnnnnnnnnnnnnnnnnnnnnnnnnnnnncnnnnnnnnnnnnnnnnnnnnngcaccaccaacacccggcataccttttctagaacaagcctaaagagaaagtgtcctcttagtttttgttgtgttgagatccactcttggcttttctgatttcagtcagtagtttccttacagccctagtctgatgggaatcttccatttatttttttgctttctaacacctgcaaaagtgggagaagctcaggctattcattcatgagaactgagcacaacaaaaagcctggcttggattgctcctactaggagcatttgtggctgcttttaaagtgtggctcagttgaactcaaagaactaaagctgagagaaatgtggcttgggtgttaattttctgtaccctctcccattcctgtctactactgggttcatgtgggattctgtataccttgagatgaacagaaaaacctgataactaatttttccccaaagggaggcacctgtgatagtaactcggcattccctggaactttccctaagagctttgagtcctggccctgtcactgttactgaatgacttgggcaagtcagtgacccaactgcaggtttatttccctgttagagtatgaaatgaggctgacggagcaaatgatctctatttccctatcggatggcttccctaaaagtggcgggtaannnnnnnnnnnnnnnnnnnnnnnnnatgtgctaattgtgcatttattggaatgggttgggagttggaagctgtatttagacacagaggttgtttaagatcatgctgcctggatggggagatggctcagctgttaaaggctaggctcacaaccaaaatacaagatgatgctgcttggtggatgtaaaactgattttaggaaatacgaagtaaatgacagcattggggttaatggaaaccaaagacactggaagtcactgtttgaaatctcaccacagaagttaagagaggttttctggaagtagctgtgtaactttgagaatgttacttaccctttctgagtcttactacagccttcctcataggcttagggctaaggttgaataaaaaatcactgtgtgtgtgtgaggagtatgatcaaaccaaaccacacttagcnnnnnnnnnnnnnnnnnntctctataagagagttcagttcaggctggagagatggctcagaggttaagagcactggttcctcttccagagaacctgggttcacttcccagcacccacatggcagctcacaactgtctgtaattccagctctagaggacctgacatcttcatagagacattcatgcaggtaaaacaccaatgcgcataaaaataaataaacttaaaaagagagagttcagttcacctgaccccagctttctgtgtgtggagaaaagagaactgtggaatttttggcatatggtggcagctcaacaatctctgtctccctccatgcctagtgagcagctctaggctccttttttccttggccagcatgcgaccctttaagatattcgtctctcccctcaatctgatggcctgtcttttctttcttcttgtctcacctctcagcagccgtcnnnnnnnnnnnnnnnnnnnnnnnnnnnntaaacttcatgtcagccacagagctactcctggccatcactgtcttctgcctgggattctgggtggtcagagctttaagaacccaggtccccaaaggcttgaagactccaccagggccctggggcttgcccattcttgggcatgtgctgaccctggggaagaacccacacctgtcgctgacaaagctgagtaagcagtatggggatgtactgcagatccgcattggctccacacctgtggtggtgctgagtggcctggacaccatccggcaggccctggtgcggcagggagatgacttcaagggccggccagacttctacagtttcacacttatcactaatggcaagagcatgaccttcaacccagactgtggaccagtgtgggctgcccggcggcgcctggcccaggatgccctgaaaagtttctctatagccttagacccagcttctgcatcttcttgctacttggaggagtacgtgatcaaggaggctgattacctaattagcaagttccagaaactgatggcagaggttggccactttgaccctgataggtatttggtagtgtcagtgaccaatgttatctgtgccatgtgctttggccaacgttatgaccatgatgaccaagagctgcttagcatagtcaatctgagcaatgagtttgggaaagttaccggctctgggtacccacctgacttcatccctatcctccgctacctacctaactcttccctggatgccttcaaggacttgaataagaagttctacagcttcatgcagaagtcagtcaaagagcactacagaacatttgagaaggtagagtctggggagaggcaggtgcttgtcggaggctcccatgggccccttatatcatcacattcaactttgaagccagtagcagagtgtaccccatcttcagcaaccaatggaacttctcttggccatttcttccatgcatccatcagacgagagccaccgaagaaggggagccctgggcagttcttactggatcaggaagaatttaaaaacctgtctcctggtctcatggtagaaaaaaattaaaggtcattctacttatcaagagtgtcaggctctgtgcctctagggtcccttgagttaaaaggggcaacaaccagtactctgaggtaggaaagagacttggagaggcaacgagaagctaggacagcagcctcagagtgtcacctcctgaacaaaggtgctattgactttgaggggccaggcctagatacaggtctgtctggacttgggatatgtctcaccttgtgctcctttgcccccagggtcacatccgggacatcacagacagcctcattgagcactgtcaggacaaaagtttggacgagaatgccaatgtccagttgtccgacgacagggtcattaatatcattgttgacctctttggagctggtatgtgctcttcagtgtatcatttctgagctcaggtgccccaagccgccacataactaacttctccctctgttctatcctgttcagggtttgacacagtcacaactgctatctcttggagtctcatgtacttggtgacaaaccctggggtgcagagaaagatccaggaggagctaggtaggtggtgactccattcaagggactctaagtaggacactgtgataaagtctgggcaacccctttaatactcttgaatccccatgttctacagacacagtgattggcaggagtcgaaggccccggctttgtgacagatctcagctgccctatctggaggccttcatcctggagactttccggcattcttcctttctccccttcaccatcccccacaggtcaggccatagagtcactgatattcgatattaggccttagttagtatacacagccagctggggctcctgagaggggcatggcatgggaaacagggggtagatttcccctacggccctgagcctgactgagcttcctctttctccagcaccacaagagataccagtctgtgtggcttctatatccccaagggacattgtgtctttgtgaaccagtggcagattaaccataaccagtaagttgatggggcagtggaaactccctgggtgcactaggtccatcctctcctgagctgcagaacccattgccatttggggactgacctaattgatgcttataagctcctgaacatctacttcaactgtctctctttgcttacagggaactgtggggtgacccaaacaagttccggcctgaaaggtttctcacctccagtggcactctggacaaggtcctgagtgggaaggtcactctctttggtttgggcaagcggaagtgcattggggagaccattggccgattggaggtctttctcttcctggccatcttgctgcagcaaatagaattcactgtgtcaccaggggagaaggtggacatgactcctatctatgggctgactttaaagcacgcccgctgcgaatacttccaagcgcagacacggtcctctgggcctcagcatccacaagcttagactgccctgtgtggtcaccagagcagggggctgttccagggatttaacttcactcagaaacacagactctgggcttgtgcttgcctcctgatttggtcttgcttctccgcatgctgatcacagacactgggcacagcagagacccactggaacatcagagtcttcccaagttcaccagcaactaggggggcctgaaagggaaaggaggtccctgggcctcagaaaactcctgcagagtccccnnnnnnnnnnnnnnnnnnnnnnnnngaaaaatgcttagagcatggtcatgccaggatctgtcaggcttagaggagctgtccagaatagagggagaagacatcttaaaatactgccacaggcctgtccacgtttgccaggcattggtggtgcacacctttaattccagcactggggaagcagacgnnnnnnnnnnnnnnnnnnnnnnnnnnnnnnnnnnnnnnnnnnncgagttccagaacagcctccaaaacaatnnnnnnnnnnnnnnnnnncaaaaaccaaaataaacatgctgccacagaagtgcttctgccatttactagggctggacagctttcccacatgggtctaggacgatgtctgtggtgatcacctttatttgtccagggtactcctgtccttgcaaaagcccccgttcctgctctggaagtgctgtgtcttgtgtctaggaagatccaagaacagagggacagactttctgggcagtaggaccaggtcaagagtaaagggatgactcttgagacaagagtcttgtgcagctcagattgcctctgagcctgctgtgtattgatcgtgaattacttacttttttaatgcttttactgacataccaagtgctaggatacagtcattggtctctcttctttactgtataaaatgttcatttaaaaaatgtttgtaccagctgggcggtggagatgcgnnnnnnnnnnnnnnnnnnnnnnnnnnnnnnnnnnnnnncgatttctctgagttcgagaccagcctggcctacaagaactagttctaggacaggcctccaaagccacagaaaaaccctgacttgaaaactccccccccccaccgcaaaaaataaatgtttgtacctaagaccttttattttggcccatattttgcttatgcatttgtattagtcatatcttaagagtttagatcaatgcatttactattacagagaaaaccctaactcaagtatccagaaatatataggaactacctacctgagctaaataaaatattacctgg

SEQ ID NO: 857 - DNA, 9724 bp, Mesocricetus auratus
  misc_feature (9)..(61): n is a, c, g, or t
  misc_feature (188)..(211): n is a, c, g, or t
  misc_feature (234)..(314): n is a, c, g, or t
  misc_feature (465)..(498): n is a, c, g, or t
  misc_feature (751)..(769): n is a, c, g, or t
  misc_feature (1004)..(1038): n is a, c, g, or t
  misc_feature (1053)..(1144): n is a, c, g, or t
  misc_feature (1934)..(1966): n is a, c, g, or t
  misc_feature (2154)..(2197): n is a, c, g, or t
  misc_feature (2260)..(2298): n is a, c, g, or t
  misc_feature (2644)..(2690): n is a, c, g, or t
  misc_feature (2964)..(3028): n is a, c, g, or t
  misc_feature (3319)..(3336): n is a, c, g, or t
  misc_feature (4537)..(4584): n is a, c, g, or t
  misc_feature (4709)..(4781): n is a, c, g, or t
  misc_feature (5958)..(6055): n is a, c, g, or t
  misc_feature (6257)..(6289): n is a, c, g, or t
  misc_feature (6698)..(6712): n is a, c, g, or t
  misc_feature (8335)..(8349): n is a, c, g, or t
  misc_feature (8404)..(8487): n is a, c, g, or t
  misc_feature (8650)..(8666): n is a, c, g, or t
  misc_feature (8668)..(8694): n is a, c, g, or t
  misc_feature (8706)..(8738): n is a, c, g, or t
aagcttaannnnnnnnnnnnnnnnnnnnnnnnnnnnnnnnnnnnnnnnnnnnnnnnnnnnngtatctgtgtgccttggtgctcacacggaagtcagaggacatctttcaggatctagacttggcagcaaacatcttaacccacttagccatgttgacatcccagaatttgtgtatatgtatatgtaannnnnnnnnnnnnnnnnnnnnnnngtatttttttattttttctccgnnnnnnnnnnnnnnnnnnnnnnnnnnnnnnnnnnnnnnnnnnnnnnnnnnnnnnnnnnnnnnnnnnnnnnnnnnnnnnnnntacctctgcctcctgagtgctggaactataggtgttcaccaccattgccaagtttataatttttttttggttttacgagacagggtttctctgtattgttttggaggctgtcggtccagcctggccttgaatttacagagatccgcctgtnnnnnnnnnnnnnnnnnnnnnnnnnnnnnnnnnncgccaccaccaagtttgataatttttaaagttgtaaattttttatctgttgtgtgtgtataagaaagagagagtacacatttgccaatatgtgaactgccaaggcacacatgtgaaggtcagaggataattcctcccaccatgtgagtcctggggattctactcaggtcaccaggcttgctggcaaacacctttacccgctgagccatctcaacaaacaccaacatgtaggggtttttgttttttcttgactnnnnnnnnnnnnnnnnnnncttttgttgcaggtatcatgatacctcacccctaaagcatgcagcaacctcctaagaacaagaacattgtcccacatgtgacagtttgagaacagcccccatagctcatacattagaataattagttccctgttagtggaacagcttaggaagtattaggaaatgtggccttgctggggaaattgtgtcactgggggtggattttgaggtttcaaaactccacaccaagcccaannnnnnnnnnnnnnnnnnnnnnnnnnnnnnnnnnnggaggctgtcctggnnnnnnnnnnnnnnnnnnnnnnnnnnnnnnnnnnnnnnnnnnnnnnnnnnnnnnnnnnnnnnnnnnnnnnnnnnnnnnnnnnnnnnnnnnnnacgcccggccaccaactcaatcttgatctctctctgcctgctgcctgtggataagcatgcaaagctctcagctactgcttttgtgacatgcctgtctgcttcctgccatggtgatcatggactaatcctctaaaactgcaaccaaatccccaattaaatgctttatttcataagagttgcctgggtcatggtgtgtcttcacagaactagaacagtaactaagataccatgtaagtatgatcgtatgtcacatctgagaaaattagtattcactcaagaatctagcttattctccaggccatgtccatgagtcctcaattatctttccaaaaatggcttctgtaaaacatagactccaagttcatatatggcatttaatttttttggagagttactatatagctctggctgtcctagaacttactacctagaccaggctgaccttgaactcatagagatatagctacttacactgccccagtgctgggattaaagaggtatgctaccatacccagccctgcatttgcttacattcttttgcttcttggttctggaatttgtctagtcaacaataatgttgagtagaagagtccaagatggctgccacaaggagcaattcattccatacatttgtttcattgactattaatttcttactgtcatacacaaggaaggtatagagagaatctctttaaaattctaaagaaaataaaagttggagggagaagtcaagacacagttcagtggcagagtcctcgttaagtatgtttgtggatgtaggttcaatttnnnnnnnnnnnnnnnnnnnnnnnnnnnnnnnnntaatgggacatgttgaggtagctaggacatacttgtgatggttaatctccaatatcatctagagtgatctagaagattccccttaggacatagctttccaaaaagattaactgaggacaggagacccatcctgactgtggaccatgccatggaccacaccatccctaggcttccggccctggttgaannnnnnnnnnnnnnnnnnnnnnnnnnnnnnnnnnnnnnnnnnnntctgtacatatgcatatgtgtatagagactttagcatcaccattcatctctctctgcattctnnnnnnnnnnnnnnnnnnnnnnnnnnnnnnnnnnnnnnnctgctgtgacttccctgccaccatggactacacgccaaaattgtgatccaaaataaacttagttttgttagtagtttgtcacatggagaaaagtcactatctgccttcacagggaacatgagctacccctagttggcctgggctggggtctagacatgtccctttcttgtgagtacagtggcttaattttcacacccaggactctgccctgtctatgaaagagttgtattcctccatcctgaaccctaaaataccatggatatttatctccaaggacccataacctcttctgacccaaaagaattattccccaacctccagtaggaggtggagttgaggaataatnnnnnnnnnnnnnnnnnnnnnnnnnnnnnnnnnnnnnnnnnnnnnnntttgatatcaagtgacccagacagttgggccagtccggagaggacagtgttataaaaggcccctcatctgaacccaggagtactggactgactctcacaactctgagacctgcagcccctgcccttcaggtatgtctgtgtgtcttttctgatcatggcatctgcttctatatcctaaatgatatcagagatggagaaatgggaaccctgtgggaactgagggaggtctgaggttttgttccttgtttctcaggcctgaaccttagtttctcannnnnnnnnnnnnnnnnnnnnnnnnnnnnnnnnnnnnnnnnnnnnnnnnnnnnnnnnnnnnnnnncctgcctgcctgcctgcctgcctgcccaaatgcctgcccaaatgccacagctcagagaaaaactttcaggcgtcagttgctagttctccttccaccatgtggatcaaactcgggttgtcatgcttggtaccaagtgctgtgaaccactgagtcatctcactgggccctgttttttgttattgttgttgtttgtttgagtcagggtttctctgtgttagctttggagtctgtcctggaattctctctgtagaccaggctggcctcaaactcaaagagattctgctgtctctnnnnnnnnnnnnnnnnnngttaaagtcatgtgccaccaccacctggcactagcccctgtctttaattaagcagtttcaacgaggctaactctaatgacagttgcctggagtgaaaaggtaggggagagaatacttgcctgaggaggtgaatgaagactcatatttggaggggatgcccctgcttggtattgatagagcaccattgagggaagggaataccagaggacattggtaccatcccagggacactgaccttctgcggcttgggcaagggggtatcttttgttccctgggtgtgtagaaggtaccaacaggaatcccacactgtgttggaccttttggcagaaagcctagcaaacactgtgattgggctgttgagaagctgtctttacttcattgttttggagtgatcatttgcatccattctagtctcagaattggaaatgaagaagaggcagacaggggagcctggggtgaaattcagacattaagttgataaatgcaaggttcttttgatgcccttgaattttgtgatgggggaaggaaaaattcctgagggaccaggacatatgacagggtataccttcactttcctggccgaaagctaagcataggatgtatgcctactgaatgagtgagcaaaagaatcaatggaggctcagaatccacccataaccaccccatccttccatttctcctacagctggtacacatggcactgtcccagtacacctccttgtccacagagctagtactggccactgccatcttctgtatagtattttgggtggccagagctttaagaacccaggtccccaaaggcttgaagactccaccagggccctggggcttgcccattcttgggcatgtgctgaccctggggaagaacccacacctgtcgctgacaaagctgagcaagcagtatggggatgtactgcagatccgcattggctccacacctgtggtggtgctgagtggcctggacaccatccggcaggccctggtgcggcagggagatgacttcaagggccggccagacctctacagtttcacacttatcactaatggcaagagcatgaccttcaacccagactgtggaccagtgtgggctgcccggcggcgcctggcccaggatgccctgaaaagtttctccatagcctcagacccaacctcagcatcctcttgctacttagaggaccatgtgatcaaggaggctaannnnnnnnnnnnnnnnnnnnnnnnnnnnnnnnnnnnnnnnnnnnnnnncgaacccgtcaaccaggtggtagaatcagtggctaacgtcattggagccatgtgctttgggaagaacttcccccggaagagtgaggagatgctgagaattgtaaagggtagtagcgactttgtgnnnnnnnnnnnnnnnnnnnnnnnnnnnnnnnnnnnnnnnnnnnnnnnnnnnnnnnnnnnnnnnnnnnnnnnnnaggtttaagaacttcaatgataactttgtgctgtttctccagaaaacagtccaggagcactatcaagacttcaacaaggtgagactgggaggcaggttgtaaatcccatcgccaacacaagcccagaatacacccctcaaatcctactccaaagtactcagacttgccatggcctaggaaggctccaagccactcagagcaactgtgtgccctgcagccgcccctccctgttccttacagttccctctgggggcttctccaagccccagaaaacaaaggcacgtgctttgctatatgggggtgtcattaattcaaaggctgttgttgtgcaggaacttgaacctcaatggggctaagctccggcttccttccctgtgttcacatttacttcttcctcctctgaaacccgacccctggggttatgggaaagaagggtcagcggcacatgaaacgactatgctctgttcagagctgatgccagttcaaaaatctgagcccccagcccagtgcctggaggccaaggcagttcccatgtcctggggatatatcaaatggaatggggcatgatctcagatctggccctcaaaatgccaaagttcccctaaacttgtgtccttgtagaacagtatccaggacatcacaggtgctctattcaagcacagtgagaactccaaagacagcggtggcctcatccctcaggagaagattgtcaacattgtcaatgacctctttggagctggtaggagccacactcctgcccctttatccatcagctactatttatccatacccaccctgtcaactaactcaccaaccacatgtcaggtgacacaggacagacacctgtcctaggatcaaggtgtgacctcatgctgtgccactaactcctgggagaaactcaataaagtccctctcctttgggcttccccacctggaaagtaaaagggttcaggctgctaattccagccactgactatgaaaacaatgtgctttaggttcttgtttgtttgattggttttacttttggatttggttggttctgacttgttttgtttaagacaaggtattacctctgtatcccaggctagcctcaaacttatggcaattctcctgcctcagacttctcagtgttgggattctaggtataagccaccatggttggctttcaagttactgnnnnnnnnnnnnnnnnnnnnnnnnnnnnnnnnnnnnnnnnnnnnnnnnnnnnnnnnnnnnnnnnnnnnnnnnnnnnnnnnnnnnnnnnnnnnnnnnnnttcccctgatgccttttctccttcaccataccccctgctgccccaggatttgacacggtcacaacagccatcaccctgagcattttgctccttgtgacatggcccaatgtgcagaggaagatccacaaggagctgggtatgtgttgctcccaatcctgcagtcagagaagccttcaggctccaggtcacttgttgatctgcnnnnnnnnnnnnnnnnnnnnnnnnnnnnnnnnngtgtttatgtgcctactatgttaagtcctgggaacatggcttgtccagataaggttgtgggggtggggattatgaggtctcagaaccatgagaaaacataggccaacacagagtgacactagtataacagggatacataggcatagagcagacagagcatcccacgagctctgcctgtgctttgcagacacagtgattggcagggatcggcaaccacggctttctgaccgacttcagctgccctatatggaggccttcatcctggagctctaccgatacacatcctttgtccccttcaccatcccccacaggtaaggccccttttctgtgccccctaagttttcatactgtccctccacccaggccctcagctccaggctcacctcaggctgcatctccttcctgaacnnnnnnnnnnnnnnngacccgtagcctcaggtctatcacctgctatggtctcagcagtcacttgcctccactcctgtttgctccctgtggatatcttctgccggccagtccctcctcactgtccctcacaagggtaatccagccgcctgccaatttagcttaagctggaccttctgcctggaaagacatctacccagctcctatactctacccttgcccaaagtcaagcctgactcatgtgtccccttccatccagaagactcttttggttgttcatccaccaagtaaagcttcatccacagatgatttgtagggttgtgagagtgaagatttccctctgctcacaccttagcctagctattcctggtacaaaagcagcaggctccccagggaaaaccccaaccactgaattcttggctgcagagattgccccggtgcacatctgagcacaaggagaatctagtaagtgttgaagctgaagggcacgatcccagaaaaaggaaggataattccccccatgttccctgcccttcatgtgacctcccggtatggggcttggagactgtggtagtcacacactgggatggagtggagtgaggaataagccacaccacagcgtctccaagccctgaactggacagagctctcttcccccctcagcacaacgagggacacctcactgaatggcttctacatccctaaggatcgctgtatcttcataaaccagtggcaggtcaaccatgacgagtgagtacatagccctgatgggaaagcggattgctcagcaatcagaaaggttgtctgtcccttcacgaactgctcatataaggaacaacatctcgttgctagatagcctattccaagtgacaaactgttcctcaagttcggtgtcagaagaacttactaggtatctggtgtagatggcaaatgcctgcaatacagcccactcaggaagctgaggcaagaggattacagtgagttcaaggttcaaggctagtctggacttcttgggaagttttaggctagcctaggctacacacctgtctcaaggaaggaaggaaggagagaggcagccagagaggcaggggggatggaattgcagttgaatagataataaggatagctcaaatgacttgtgggaatggtctaaagatgtccttggaaaactctactctcctttgtagatgggccatccatccaaaccaggacatattgaacacaagaacaccatccatatgtatattgtcaatttttagtccagagtaagaagcataagccgaggaagacagtgatctcccctgctactggcctattgggaataggagggaggaaacgttccccttctttcagttttcttttgatacagcattatttccttgagtttacaaatgagaacaggagctatagctcactggtaggatatgcgatgtggaagactctaggttcaattcccagaaccacatgttttaaaaaggaactaaaccaaatgaatataaaaccactatcacccattgggtgctggtttcacatgtcttcaatcccagcactcgggaggcagaggctggtgggtctctaagtttgcagccagtctggtctacagagtgagttccaagacaaccagagctacgcagagaaacnnnnnnnnnnnnnnncaatgcaacaaaacaaaatactgtcctggaccatgggaatggtccagcaggtaannnnnnnnnnnnnnnnnnnnnnnnnnnnnnnnnnnnnnnnnnnnnnnnnnnnnnnnnnnnnnnnnnnnnnnnnnnnnnnnnnnncctctgacctccacatgcacacaaagtaaataaataaaaatatcatttaaaaaattaaaaataatcaaaatccactatctttaaggttgatcattttattcacatacacacacacatacatacatggttttttaagataaggtttctctttgtatatttggannnnnnnnnnnnnnnnncnnnnnnnnnnnnnnnnnnnnnnnnnnnccagagtccaannnnnnnnnnnnnnnnnnnnnnnnnnnnnnnnncatgagccataactgccaggcaagagttttattttaaaaaagcactaacttggctggaagtgtggctctgttggtggagtgctggcttgcatgcacatggccctgggttcgatcacaagcacatgcctgtaatctagcacttgggaggtagaggcagaagggtcagaatttcaaacaaggggacctaggcttacacaggtcaactttagacccatgagacccagtctcaaagcaaacaaactccaaagaaccataacaaaaggagataaaccatgtttggtaccttcccctcgggctgttggtactgtcgctcttttcttacactgtgctctcacagaagctgggagaacatagctaccctttcctcccagagtccaccctgctcaggtcctacctgttcctcttgcagaaagcagtggaaagacccctttgtgttccgtccagagcggtttcttactgataatgacacagtcatcaacaagactctgagtgagaaggtgatgctctttggcttgggaaagcgcaggtgcattggggagatcccggccaagtgggaagtcttcctcttcttagccatcctgctgcagcagctggagttcagcgtgccaccgggcacaaaggtggacctgacacctacctacgggctgaccatgaaacctcagacctgcaaatacatccaggcgtggccacgtttttccaaatgaagatggctgaggcaggggaggaggcatccatggggctgtcacctctgtttctttccctttctttttaaataacagcttttttttggagtacaattctttcaccaaataattcacctccaatcaaatagaatattgtctgtcatatacccccaaacctatacccattaagatttatgactattcatcctaacctgtctcccttgctccaccagatgctaatgtagtttttgactcgataaatttgcctactctagtcccatcacataaactcaatgatctatg

SEQ ID NO: 858 - DNA, 1556 bp, Mesocricetus auratus
atggatccagtcctggtcctggtgctcactctctcctgtctactgctcttttcggtctggagacagagctctgggagagggaggctccctcctggccccactcctctccctcttattggaaacatcctgcagatagatataaaggacatcagcaaatccttagccaacttctcaaaagtctatggccctgtgttcaccctgtattttggcacgaagcccactgttgtggtacatggatatgaagcagtgaaggaagctctggaagaccttggagaggagttttctggaaggggtaacttcccaattgttgaaagaatgaatagtggccttggaatcattttcagcaatggaacaaaatggaaggagcttcggcgcttctcacttatgaccttgaggaattttggtatggggaagagaagcatcgaggattgcattcaagaggaagcacgatgccttgtggaagagttaagaaaaacaaatggctcaccctgtgatcccaccttcttcctgagctgtgctccttccaatgtgatctgttcagttgtttttcacaatcgttttgattataatgacaagaattttcttaacttgatggagaaattaaatgaaaactttgaaattttgaactccccatggttgcaggtctgcaatgttatccctgccttccttgattatctcccagggagccataacaaagcacttaaaaattttgctgaaataaaaagttatattttgaaacgagtgaaagaacaccaagaaacactggacatgaacaatcctcgggacttcatcgactgtttcctgatcaaaatggaaaaggaaaaggacaatccacactctgagtttactactgaaagcttgatggctactgtggctgatgtgtttgtagctggatcagaaaccacaagtactaccctcagatatggactcttgctcctcctgaagcacaaagaggtgacagcgaaggtccagaaagagatcgatcatgtgattggcagagacaggagtccctgcatgcaggacaggacccgaatgccctacacagatgcaatggtgcatgaggttcagagatacgttaacctcatccccaacaatgtgccccatgcagctacctgtaatgttaaattcagaaattatgtaattcccaagggcacggacttaataacatcattgacttctgtgctacatgatgacaaagaatttcccaaccccaaaatatttgaccctgcccattttctggatgagaatggaaactttaagaagagtgactactttatgcctttctcaataggaaagcggatgtgcatgggagaggccctggctcgcatggagctgtttctgcttctgaccaccattttacagaattttgatctgaaatctttggctgatacgaaggacattgacactaccccagtggccagtacttttggctgtgttccaccttcataccagctgtacttcattcctcgctaaagaacagactggcggttgctatgcaggtgtatgtgatatggtccatgcccttcccactattagggatacctctctcatatctc

SEQ ID NO: 859 - DNA, 567 bp, Mesocricetus auratus
  misc_feature (173)..(191): n is a, c, g, or t
ggaaacacaacctgggaagatggtggcggtgaagacctgctctctgctgctggtgttcctcttcctggcggtcgggctgggggaaaaagaagaggttcaattcagatcccatgctaaattcggtagcccccggcctcgaggcccgaggtatgcagaggggactttcattagtnnnnnnnnnnnnnnnnnnnacaagatccgccaacaagactttgtgaactggctgctggcccagaaggggaagaagaatgactggaaacacaacatcacccagagagaggcccgggccttgcagctggcaggacaatctcagagcaatgaggagacagaggggcagcagagctccttgcccaagaaccccagtgacgaaggtgtgctgagggacttcctgattcgggagctgctggcctggatggtggaccaaacagagctctccctgcccaggtttcagtgacggacctagctcagagcaggactggactctgccctttgcttgcccagctcctcgttccgccctggtccaaagtctccaagagaaccaaaccaataaagtcttgagctgaagta

SEQ ID NO: 860 - DNA, 404 bp, Mesocricetus auratus
gtcccgcgctcgtcatgtcggcctcggtggtgtcggtcatctcgcggttcctggaggagtacctgagctccactccgcagcgcctgaagctgctggacgcctatctcctgtatatactgctgaccggggcgctgcagttcggctactgtctcctcgtgggcaccttccccttcaactctttcctctccggcttcatctcgtgtgtgggcagcttcatcctagcggtttgcttgagaatacagatcaacccccagaacaaggcggatttccaaggcatctctccagagcgagcctttgcggatttcctctttgccagcactatcctgcaccttgtcgtcatgaacttcgttggctgagctgctcccatttccttaggcacggagttggaggttggcagaatgttc

SEQ ID NO: 861 - DNA, 2694 bp, Mesocricetus auratus
  misc_feature (2548)..(2565): n is a, c, g, or t
gctcgcggcacctgggcttcgctcctcccgcccgcagcgcctgctccgcgcgtcggccgccagggtcccgcgcagcccgggagcggcgggcgcagggggacgctctgccgccgacggatcccgaccggagccgcgatgccgggcagctcgagacagtcgggtcgcgaggcgggctctgccctgctctcgctgcagcaggaggaccaggagaatgtcaaccccgagaaggcggctccagaccagcgggcgcgggcggccctgaagaccgggaacgcgcggggaaacgcaccgcagcagagactcaaggctcggcgggttgcacctcttaaggacctttctataaacgacgaacatgtcgctagtggtccttcatggaaagcagccagtaaacagcccgccttcactatccatgtggacgaagaagaggacacccagaaaatcccacctgagcacaaagaaatgcggtgtgaagatgccctggcctttaatgctgctgtctctttacctggggcaagaaaaccactggtacctcttgattatccaatggatggcagctttgaatcaccacatgctatggatatgtccattgtcttagaagaggaaaagccagtgagtgttaatgaagtacccgactatcatgaagatattcacacataccttagggaaatggagattaaatgtaagcctaaagtgggttatatgaagaaacagccagacatcactaacagtatgcgggccatccttgtggactggctagttgaagtgggagaagaatataaattgcagaatgagaccctgcatttggctgtgaactacattgatcggttcctctcttccatgtctgtgttaagagggaagcttcaacttgtgggcactgctgctatgctgctagcttcaaaatttgaagaaatataccccccagaagtagcagagtttgtgtatattacagacgatacctattccaagaagcaggttctgagaatggagcacctagtattgaaagtccttgcttttgacttagctgcaccaacagtaaatcagtttcttaaccagtattttctgcaccagcagcctgcaaactgcaaagttgaaagcttagcgatgtttttgggagaattaagtttgatagatgctgacccatacctaaagtatttgccatcacttattgctggagctgcctttcacttagcactctatacagtcacaggacaaagctggcctgagtcattggtacaaaagactggatataccctggaaagtcttaaaccttgtctcatggaccttcaccagacctacctcagagcagcacagcatacccaacagtcaataagggaaaagtacaaacattcaaaataccatggtgtttctcttctcaacccaccagagacactaaatgtgtaagaatgaaagactacctttgtttaaaatgggagtcactcagaggtcacaatgtacagtttttgtcttgggttttaatttcacaaatcatttcacaaagtagatggtatagccacagacaaattatggtatccattgcttttttaaatggtttttaatttgtatatctttttgtacatgtgtctatcttagatatttggctaattttaattggtttgttaacatatcgagaaaccaaatatcaagacaaaaaaaacaaaggaaccacgaaatctagacaagtcaaagttaatttgagataatgactgataatgtcacttagaaaggctaacttgggtttattgttcagtgggggtagaaagagcttcctaaaggaaatatttcagggaaactgacattgattattctaagcaactgaaccaaattgctgacttggtcatgaaataagcaaaactagactctcagggttgcagagattcccagacacattgagctctactatttatcaactttttcaaataaaattttacatggaaggaagattttgtgcaacagaaaagttgtaaagaaagtttatccaaagcataattttaaagacaaaacaatttatgaaacagtcagcccttataatggattttcaaataaaaaatacccagggctgttaaagcactgaataaatatccttttagtagtttatatacaaaacatcactttagctttaattagcagttctcttctttctcctccttttcacttggcttctacttggtgccttttcttttgcactggtggtctgagctctgaaaataaagtaatgaatgccacaactcagtgtatgtgcactgaatcctggaccggattgctagaactctgaaggcatcctgttttatagacatagacagatttttatgtatatttgaaagtaaccagaaatctgttaccttattttctttggagtcttgtctggttccaaaatgatcatttcttcttcttcgctatctgacagcactataggggcacctttaagaaaatacccaaaacttatcaatatcattagtcctagtgctcaagccttcccttcttgcctggaggcagcatatacaacatactctttccaaaaattttgtaaaaaagtcatgttttctgtagnnnnnnnnnnnnnnnnnnaaaagagaactcatgtaggccaagacggtctagtttattactaccagggctaaccatgaaaaatgtagaaaacttttgtttgcccatattaattatatatatgtaaataaagcatgcaaattaatcatt

SEQ ID NO: 862 - DNA, 843 bp, Mesocricetus auratus
  misc_feature (1)..(46): n is a, c, g, or t
nnnnnnnnnnnnnnnnnnnnnnnnnnnnnnnnnnnnnnnnnnnnnnaaccggagaggagtgagcagagacagcgagcatcagatcgtgccccgacccacaccggcatgggctccttctccatcaccgtgggcttcttcctcctcctggccttttggcttccgggccatattggagcgaaccctgtgtacagtgcagtgtccaacacagatctgatggatttcaagaacctgctggaccatctggaggagaagatgccgttagaagatgaggtcgtgcccccacaggccctgagtgagcagaatgatgaagcgccaggggcagcgctcagctctctccctgaggtggctccctggactggagaggtcaacccacctcagagagatggcggtaccctggggcgcagcccctgggacccctccgatagatctgctctcttgaaaagcaaactgagggctctgctagctgcccctcggagcctacggaggtccagctgcttcgggggtaggatcgacaggattggagcccagagcggactaggatgtaatagcttccggtaccgaagataacagccagggaggaaaggcagccagattcgctgggggcagattgcagaagaccccaagccccgtggtgtgtcacgcagcttggtctcattgtcactgaggtgtggcgaacaccctgctggagctgctgcttcctgtcttcatctatcacgacccatgctacatgtagatgagtggttttggggggctctccctctccagccctgcatattaaagtagatcctcacccctttcagaaagcagttggaaaaatttttttgaataaacttcagcaccaag

SEQ ID NO: 863 - DNA, 2500 bp, Mesocricetus auratus
  misc_feature (147)..(186): n is a, c, g, or t
gtcagagcccagaagcaccatggctgtttttggtgtcaccattgccttgctggtatgggtggccaccctcctgattgtatccatctggaagcagatctacagcagttggaacctgcccccaggacccttcccacttcctatcttggnnnnnnnnnnnnnnnnnnnnnnnnnnnnnnnnnnnnnnnncctcaccaagctggcagagcgcttcgggccagtattcacactgcacctgggctcaaagcgtatcgtggtcctgcatggctacaaggctgtcaaggaggtactactgaaccacaagaatgagttctctggccgaggggacattcctgtgttccaagagtatatgaacaaggggattattttcaataatggacccacatggaaggacgttcgacggttttccctaagcatcctccgtgactatgggatggggaaacagggtaatgaggcccgcatccagagggaggcacacttcctgatggaggagctcaagaagaccaatggtcagccttttgaccccacctttctggttggctgtgcacccttcaatgtcatttcggacatcctctttcacaaacgttttgattacaatgacaagacgtgtctgaggctcatgagtttgttcaatgaaaacttctacctgctaagtactccctggatccaggcttacaataactttgagaattatctacgatacctacctggaagccatagaaaaataatgaaaaatgcatctgaaataagacagtacacacttgcaaaagccaaggaacacctccagtcactggactccagctgccctcgggatgtgactgactgtttgcttatagaaatggagaaggaaaaagacagccaagaacccatgtacacaatggaaaatatttctgtgactttggctgacctgttctttgcggggacagaaaccaccagcacaaccctgagatacgggctcctgattctcatgaaatacccagaggttgaagagaaacttcatgaagaaattgacagggttattgggccaagtcgtgtccctgttttcaaagacaggctggagatgccatacatggatgctgttgtgcatgagattcagagattcatcagtcttatcccctccaacctgccccatgaagcaacccgagataccatgttccgaggatatgtcatccccaagggtacagttgtgattccaaccctggattcccttttatatgacagtcaagagtttccagatccagagaaatttaaacctgaacattttctaaatgaaaatgggaagttcaagtacagtgaccatttcaaggcattttctgcaggaaagcgtgtgtgtgttggagaaggcctggcccgcatggaattgtttctgctcttgactgctattctgcaacattttaatctgaagtctctggttgacccaaaggatattgacctcaatcctgtcacaattggttttggctgtgtcccacctgaatttaaactttgtgtcattccccgctcctaagacctggaaactgcctgtctcaagtgaaaagtcaacacagacatcattattatccctaaaaatgtgactttgttttttaaaaatcctaagcatatagagttcctatcatgaaatgaaacagaaaataaataaaatctcaattatatgttagctgtggatttagtgaggaggaccttgtccccttggctatataaaagttccccagtgagtaaacaccattccatagccaacagtacagcatcttcagtcagtctgtcccttacttctcttgaggaatgtgggatgatcctgttaggaataaagcgtgaggaaccttggcggattccatggcaagtgagggtgaccgaggcaggggtacaaacacaccaggcagatagagcttaaatgagaagttttattagaaagggaagtgggagagagaaaagaggctcagatacaaagagaggacagaagagtagagggatacaggaaaagtcctgtctgccccaggggaacagtaggaaagagagaggggaaagggagacaggaaagagagcataagtggatggaagtctttcttttaaagggttcctttgcacctgggctgaccagggtactgactgcattctgccaggtgacaagggcaggccagcataatgcctgaatccttacagatcctggttatctgcctatctcaagaccctgaatttaaatatatattcaaagttctctgatgggggatgtctttctgtatatatgtttctcttattggttgaataataaaacactgattggccagtagccaggcagaaagtataggaggcactaccagatcaggataattctgggaggaggaaggcaaagagaagccaccagagaagatgccatgtagtggttgggaatataggacactgaagcattctccacgtggaaatacatagattaatacttatgggtaaataattaagacagagctagccagtaagaagcctgagctattggccaaacagtttaataatt

SEQ ID NO: 864 - DNA, 484 bp, Mesocricetus auratus
  misc_feature (16)..(51): n is a, c, g, or t
ggaaggcaatgagatnnnnnnnnnnnnnnnnnnnnnnnnnnnnnnnnnnnngtttgtgagggagacctacgacttcgacatcgccgtgctcaggctgaagacccccatcatattccgcatgaacgtggcccctgcctgcctgcctgagaaggactgggccgaggccacactgatgacgcaaaagtcaggcatcgtgagcgggtttggacgcacgcatgagaagggccgccagtcacacatcttgaagaagctggaggtgccctatgtcgaccgcaacacctgcaaactctccaccagcttcaccatcacgcaaaatatgttctgcgctggctatgacgccaagccggaggacgcctgccagggggacagtggcggcccccacgtcacccggttcaaggacacctactttgtgactggcattgtcagctggggagaggggtgtgcgaggaagggcaagtatgggatctatacgaaagtcacggcc

SEQ ID NO: 865 - DNA, 469 bp, Mesocricetus auratus
attggaggtcccacccaggggcgaaggatgccactctgggtgttctttgtaatcctcaccctcaccaatggctcccactgttcaccgtccccatcactgcccttcaggattcgtcgatatgcagatgccatctttaccagcagctacagaaaagttctgggccagctgtctgcccgcaaactgctccaggacatcatgagcaggcagcagggggagaggaaccaggaacaaggacccagggtacggcttggccgtcaggtggacagcatgtgggcagaccacaggcagatgtctctggagagcctcttggcagccctgctgcagaagcacagcagggactcccaaggatgaagtcttcagcagaggctccagccacccgtacctcaaacacaactggacccagttacttctgcttcatttctgaccctctccttcctgtaaatacaataaaacccccatcctgatctgc

SEQ ID NO: 866 - DNA, 5660 bp, Mesocricetus auratus
  misc_feature (1844)..(1865): n is a, c, g, or t
  misc_feature (3170)..(3186): n is a, c, g, or t
  misc_feature (5580)..(5607): n is a, c, g, or t
gttgctgtcgggccaggctgggctatgctgttgcccgcaacgggtgccagcaggtctgccgccatcatgtcagacacggacagcgatgaagattcctctggaggaggcccattttctctaaccgggttcctgttcggcaacatcaatggagcagggcagctggagggcgaaagcgtcttggatgatgagtgtaagaagcatcttgcaggcttgggggctttgggactgggcagcctgatcactgagctcacggcaaatgaagaattggctgggactgatggtgccttggtaaatgatgaaggatggattaggagtagagaagatgctgtggactattcagacatcaatgaggtggcagaagatgaaagcagaagatatcagcagacaatggggagcttgcaacctctttgtcactcagcagattatgatgaagatgactatgatgctgattgtgaagatattgattgcaagttgatgcctcccccacctccaccgcctggaccagtgaagaaagagaaagatcaagatggtcttactggtgagaaagtggacttcagtagttcctctgactcagaatctgagatgggaccacaggaagcagcacaggcagaatctaaggatggaaagctgactctaccattggctgggattatgcagcatgatgccaccaagctgttgccaagtgtcacagaactttttccagaatttaggcctggaaaggtgttacgctttttacgtctttttggaccagggaagaatgtcccatctgtttggaggagtgctcggagaaagaggaaaaagaagcaccgtgagcctattcaggaagagcagatccaggaggaagagtgctcagtagaattggaagtcaaccagaaatctctgtggaactatgactatgctccacctccacctccagagcaatgtctctctgatgatgaaatcacaatgatggctcctgtggagtctaagttttcccagtcaactggagatacagataaagtaatggatactaaaccaagagtggcagaatggcgttatggacctgctcggctgtggtatgatatgctaggtgtccctgaagatggcagtgggtttgactacggcttcaaaatgaggaagactgaacatgaacctgcaataaaatgcaaaatgatgacgaaattaaggaaacttgaagaaagtaatggcattgatcttctggcagatgaaaacttcctaatggtgacacaactgcattgggaagatgatatcatctgggatggggaggatgtcaagcacaaaggaacaaaacctcagcgtgcaagtttggcgggctggcttccttccagtatgactaggaatgccatggcctacaatgttcagcaaggttttgcagccacactagatgatgataaaccctggtattccatttttcccattgataatgaagatctggtatatggacgatgggaggacaatatcatttgggatgctcaggccatgccccggattttggagcctccggttttgacgcttgatcccaatgatgagaacttgattttggaaatccctgatgaaaaggaagaagctacttctaattccccttccaaggagaataagaaagaatcatctctgaagaagagtcgaattctcttaggaaaaacaggagtcatcaaggaagaaccacaacagaacatgtctcagccagaagtgaaagatccatggaatctctccaatgatgaatattactatcccaagcaacagggtcttcgaggtactttcggagggaatattatccagcattcaattccagcagtagaattacgacaacccttctttcccacccacatgggacctatcaaacnnnnnnnnnnnnnnnnnnnnnntctaaaaaagtactcctttggggcactatctcagccaggtccacactcagtccagcctctgctgaaacacatcaaaaaaaaggcaaagatgagagaacaggagaggcaagcctcaggtggtggagagatgttttttatgcgcacacctcaggacctcacaggcaaagatggagaccttattcttgcagaatacagtgaggaaaatggaccattaatgatgcaagttggcatggcaaccaagataaaaaactactataagcggaaacctggaaaagatcctggagccccagattgcaaatatggagaaactgtttattgccatacatctcctttcctgggctctctccatcctggccagttactacaggcatttgagaacaatctttttcgcgctccaatttatcttcataagatgccagagactgacttcttgatcattcgaacaaggcagggttactatattcgagaattagtggacatttttgtggtgggccagcagtgtcccttgtttgaagttcctggtcctaactccaaaagggccaatacacacatccgagactttctacaggttttcatttatcgcctcttttggaagagtaaagataggcctcggcggatccggatggaagatataaaaaaagcctttccttcacattcagaaagcagcatccggaagaggctaaagctatgtgctgacttcaaacgtacagggatggattcaaactggtgggtgctgaagtctgattttcgtttaccaacggaagaggagatcagagctatggtctcaccagaacagtgctgtgcttactatagcatgatagctgcagagcagagactaaaggatgctggctatggagagaagtccttttttgctcccgaggaagaaaatgaggaagatttccagatgaagattgatgatgaagttcgtactgctccttggaacactacaagagctttcattgctgccatgaagggcaaatgtctcctggaggtgacaggagtagcagatcctacaggctgtggtgaaggattctcctatgtgaagattcccaacaaaccaacacagcagaaggatgataaggaacctcagccagtgaagaagacagtcacaggaacagatgcagaccttcgtcgcctgtctctaaaaaatgccaagcaacttcttcgtaaatttggtgtgcctgaggaagagattaaaaagttgtcccgctgggaagttattgatgtggtacgtacaatgtcaacagaacaggctcgctctggagaggggcccatgagtaaatttgcccgtggatcaaggttttnnnnnnnnnnnnnnnnngagcgttacaaagaggaatgtcagcgcatctttgacctacagaacaaggttttgtcatcaactgaagtcttatcaactgacactgacagcagctcagctgaagacagtgactttgaagaaatgggaaagaacattgagaacatgctgcagaacaagaaaacgagctctcaactctctagggaacgggaggaacaggagcggaaggaactccagcggatgctactggcagcaggctcagcatcagcaggaaataatcacagagatgatgacacagcttcggtgactagccttaactcttctgccactggacgctgtctcaagatttatagaacatttcgagatgaagaggggaaggagtatgttcgttgtgagacagtccgaaaaccagctgttattgatgcctatgtgcgcatacgcaccacaaaagatgaggaattcattcgaaaatttgcgctttttgatgagcagcatcgagaagagatgcgaaaagaacggaggaggattcaagaacaattgaggagacttaaacgaaaccaggaaaaggagaagctgaagggtcctcctgagaaaaagccaaaaaaaatgaaggaacgccctgacttaaaactgaaatgtggagcatgtggtgccatcgggcacatgagaacaaacaaattctgccccctttattatcaaacaaatgctccaccttccaatcctgttgccatgacagaggaacaggaggaggagttggaaaagacagtcattcataatgataatgaagaacttatcaaggttgaagggaccaaaatcgttttaggaaaacagctaattgagagtgcagatgaagttcgcagaaaatctctggtcctgaagtttcctaaacaacaacttcctcccaagaaaaaacggcgggttggaaccactgttcactgtgactatttaaatagacctcacaaatccatccatcgtcgccggacagaccctatggtgacactgtcatctatcttggagtctatcatcaatgacatgagagatcttccaaatacataccctttccatactccagttaatgcaaaggttgtaaaggactattacaaaatcatcactcgaccaatggatctacagacactccgtgaaaatgtgcgcaaacgcctctatccatctcgggaagaattcagagagcatttggaactaattgtgaaaaatagtgcaacctataatgggccgaaacactcactgactcagatttctcaatctatgctggatctctgtgatgaaaaactcaaagagaaagaagataagttggcacgtttagagaaagctatcaaccccttgcttgacgatgatgaccaagtagcgttttcttttattctggataacattgtcactcagaaaatgatggcagttccagattcttggccatttcatcacccagttaataagaagttcgttccagattattacaaagtaattgtcagtccaatggatttggagactatacgtaagaatatctccaagcataaataccagagtcgagagagctttctagatgatgtaaaccttattctggccaacagtgttaagtacaatgggtctgagagtcagtatactaaaactgctcaggagattgtgaatgtttgttaccagacattaactgagtatgatgaacatttgactcaacttgagaaagatatttgtacagctaaagaagcagctcttgaggaagcagaattagaaagccttgacccaatgactccaggaccttacacaccacagcctcctgatttgtatgataacagcacatccctcagtgtttctcgagatgcctctgtatatcaagatgagagcaatatgtctgtcttggatattcccagtgctacttcagaaaagcagctaacacaggaaggtgaagatggagatggtgatcttgcagatgaagaggaaggaactgtacaacagcctcaagccagtgtcctgtatgaggatttgcttatgtctgaaggagaagatgatgaggaagatgctgggagtgatgaagaaggagataaccctttttctgctattcagctaagtgaaagtggaagtgactctgatgtgggatctggcagtataagacccaaacagccccgtgtgcttcaagagaatacgaggatgggcatggaaaatgaagaaagcatgatgtcctatgagggagatggtggggaggtttcccgtggtttggaggatagcaacatcagttatgggagctatgaggaacctgatcccaagtcgaacacccaggatacaagcttcagcagcatcggtgggtatgaggtatcagaggaggaagaagatgaggaagagcagcgttctgggcccagcgtactaagccaggtccacctgtctgaggacgaggaggacagtgaggatttnnnnnnnnnnnnnnnnnnnnnnnnnnnngactctgatgaatgaggcttcctttaagcctcttcagtaagccgacagcaacg

SEQ ID NO: 867 - DNA, 1911 bp, Mesocricetus auratus
  misc_feature (504)..(518): n is a, c, g, or t
cagagacttagttctgagattcaaccatgccactcaatagatttccttgctggcgatatgctgtggcctgtggactcctgcttctccttgtccatgtgcatggacaggactcagtcagccccatcaggaacacacacactgggcaggtgagaggaaaacttgtctatgtgaaagagggggtaaccggtgtctacgccttcctgggaattccctttgccaagccacctgtaggaccactgcgctttgccccacctgagccccctgagccgtggagtggtgtgagggatgggacttctgagccagccatgtgtctgcaaactgattttatgaggccacaaatttcgaaggagaggaagattatcctgcctaccatctctatgtctgaggactgcctgtatctcaacatctacacaccagctcatgcccatgaaggttctaacctacctgtgatggtgtggatccatggtggtgcacttgttatgggaatggcttccatgaatgatnnnnnnnnnnnnnnngctactgaggatatagttattgtctctatccagtatcgcttgggtatccttggcttcttcagcactggagacgagcatgccagaggaaattggggttacctggaccaagtggctgccctacactgggttcagcagaatattgcctcctttggaggcaatcctggccaggtcactatttttggagtgtcagcaggtggcacaagtgtgtcctcacttgtcgtgtcccccatgtccaaaggactcttccatggagccattatgcagagtggagtggctctgctgcctgaccttatctctgacacacctgaggcggtctatacaccagtggtggccaaccaatctggatgtgaggccaaggattcagaggccctggtacactgccttcgagagaagactgaagcagaaattctggctatcaaccaggtcttcattatgacccctggtgtggtagatgggattttcctacctcggcaccctcaggagctgttggcctctgtggatttccaccctgtccccagcatcattggtgtagacagtgacgagtgtggctggggagtccccttgttcatgggccttgatcatgtcataaagaacataaccagagagaccctgccagcttttctgaagagcagagcagaacacatgatgctgcctcctgaatgtagtgacctgctaatgcaagaatacatgggggatgttgaggacccccagaccctccaagcacaattcagagagttgatgaaggacttcatgtttgtgatccctgcactaaaagtagcatattttcagcgttctcatgctcctgtctacttctatgagttccagcaccagtccagcttcatcaagaataaggatgccaggccatcccatgttagggctgaccatggtgatcatgttgcctttgtgtttggctctgacttctggggcttaaaaattgacctcactgaggaggagaagctgctgaacaagaggatgatgaagtactgggccaactttgcaagacatgggaaccccaacagtgagggtctaccctactggcctgagttggtccacgatgaccagtacttgaagctggatattcagcctgctgtgggccgggccctgaagtctagaaagctgcatttttggacgaagattcttccacagaagatccaggagctaaagggggctcagggcaagcattcagagctttagtgacctctgacagtacagatgcacagggtgagggcagatggagtaatcctgagattacaaaatccagttaattatttttatgtactccaacactcacattagcctttctaaccctcagtacttgcccttttagaaatgtatgacaatccttctatgtggtactaatccttctggatccattttattagatttaataaac

SEQ ID NO: 868 - DNA, 1066 bp, Mesocricetus auratus
  misc_feature (105)..(125): n is a, c, g, or t
  misc_feature (212)..(256): n is a, c, g, or t
cactaggaaaagtcttgagtgctgacgacagtgagaaccatggaccagaacaacagccttccaccttatgctcagggcttggcctccccacagggtgccatgacnnnnnnnnnnnnnnnnnnnnntccaatgatgccttatggcacaggacttactccacagcctattcagaacaccaatagtctatctattttggaagagcagcaaagagnnnnnnnnnnnnnnnnnnnnnnnnnnnnnnnnnnnnnnnnnnnnngcagtagcaactgcagcagcctcagtacagcaatcgacatctcagcaatccacacagggtgcctcaggccagactccacagctcttccattctcagactctgaccactgcaccattgccaggcaccacccccttgtacccttcacctatgacccctatgacccctatcactcctgccacaccagcctccgagagctctgggatcgtaccccagctgcaaaatattgtatccacggtgaatcttggatgtaaacttgacctaaagaccattgcacttcgtgcccgaaatgctgaatataatcccaagcggtttgctgctgtcatcatgagaataagagagcctcggacaactgcgctgattttcagttctgggaaaatggtgtgcacaggagccaagagtgaagaacaatccaggttagcagcaagaaaatacgctagagttgtgcaaaagttgggctttccagcaaagttcttagacttcaagatccagaacatggtggggagctgtgatgtgaagttccccataaggctggaaggccttgtgctgacccaccagcagttcagcagctatgagccagagttatttcctggcttaatctacagaatgatcaaacccaggattgttctccttatttttgtttctggaaaagttgtattaacaggtgctaaagttagagcagagatttatgaagcatttgaaaacatctaccccatcttaaagggattcaggaagaccacatagtggctgccatgtcctgcctcccctacacacttgttttttaaagccagtcagttttggtaccactgatgg

SEQ ID NO: 869 - DNA, 1234 bp, Mesocricetus auratus
  misc_feature (876)..(891): n is a, c, g, or t
aagtctgcagctgcttctggcagggaacttgtcccttgctcccacaccaagctgtgagaaattaagggacaagactccggagccatgctgggtctcgggaccctgttcctgctgctggctgcctgtcccgcttccagggctgaccctgtgcctgcacttccagacatccaggttcaggagaatttcaatgagtcccggatctacggaaaatggttcaacctggctgtgggttccacctgcccttggctgtcgaggattaagaacaagatgagcatgagcacactggtgctgcgagagggggcgaccggagctgagatcagcacgaccagcacccggtggcggagaggtgtctgcgaagaggtctctgggacatatgagaagacagacatggatggaaagttcctctaccacaaatccaaatggaacgtgaccttggagtcctatgtggtccacaccaactatgacgagtatgccattttcctcaccaaaaagttcagccgccaccacgggcccaccatcaccgccaagctctacggtcgggagccacagctgagagacagccttctgcaggagttcagggaggtggccctgagcgtgggcatccctgagaactccatcgtttttatggaggacagaggggaatgtgtccctggggatctggagcaaaagtccacttcacttctgagagcccggagggcagtgctgccccaagaaaatgagggatcagggactgggccactggtaactgatgtcctcaagaaagaagattcctgccagctcagctactccgaaggcccctgcctggggatgatagagaagtattactacaatggcgcttccatggcctgtgagaccttccattatgggggctgcctnnnnnnnnnnnnnnnnttcaactctgagaaggagtgtctgcagacgtgccggaccgtagcggcctgcagtctccccatagtccaaggtccctgccgtgcctacgtcgagctctgggcattcgatgcagcacaagggaaatgcgtccagttcagttatggcggctgcaaaggcaacggcaacaagttctactccgagaaggagtgcaaggagtactgtggcgttcctggtgacgggtatgaggagctcacacgaagctgaagatgccagtctgcaagccagaggctagccactgtccatcccagtgtgggctggcccaggtggtctgggtccaaataaaacaagcaagctgtcaactcct

SEQ ID NO: 870 - DNA, 2786 bp, Cricetulus sp.
  misc_feature (132)..(151): n is a, c, g, or t
  misc_feature (1560)..(1607): n is a, c, g, or t
  misc_feature (2217)..(2276): n is a, c, g, or t
  misc_feature (2561)..(2580): n is a, c, g, or t
tgtcgggcgagcctgggcagctgtggctggagaacagactgggagattgggagctgggactgggctcaggtgagcactgactgaggctggtgttgattctgccccgggaccctccaacccagctgcccccgnnnnnnnnnnnnnnnnnnnncctcaaggatgcccctgcggcctcggcttctgctcctgtgtctgtgggggctgctgctccagcaggcggagacagactcagaggggcagacgacgggggagctgtaccagcgttgggagcgctatgcccgggagtgcgaggagaccctgacggctgcagatcctccctcaggcatggtctgtaacgggtcctttgatatgtacgtctgctgggactacacggccgccaacaccactgcccaggcgtcctgcccctggtatctgccctggtaccgccacgtggctgcaggctacgttttccgccagtgtggcagtgacggccagtgggggccctggagagatcacactcagtgtgagaatccagagaagaacggggcctttcaggaccaaaggctgatcctggagcgcctgcaggttgtgtataccgtgggctactccctgtccctgggcactctgctgctagccctgctcatcctaagtttgttcaggcggctgcactgcactcgaaattacatccacatgaacgtgttcttgtctttcatgcttcgggcggtggccatcctcacccgggaccggctgctgcctaccctgggtccctaccctggggaccggacccttaccctgcggaaccaggccctagccgcctgccgcacggcccagatcgtgacccagtactgcgtgggtgccaactacacttggctgctggtagagggtgtatacctgcaccatctgctggtgatcgtgggaggctcggaaaagggccacttccgctgctacctgcttcttggctggggggcccccgcgcttttcgtcattccttgggtgatcgtcaggtacctgctggagaacacgcagtgctgggagcgcaacgaggtcaaagccatttggtggatcattcgcacccccatcctaataaccatcttgatcaatttcttcatcttcatccgcatccttggcatccttgtgtcaaaactcaggacgcggcagatgcgctgcccggactaccgactgcggctggctcgttccacgctgacgctggtgcccctgctgggtgtccacgaggtggtgtttgcccccgtgacggaggaacaggctgaaggcaccctgcgcttcgccaaactggccttcgaaatcttcctaagttccttccagggatttctggtgagcgtgctctactgcttcatcaacaaagaggtgcagtcggagatccgccggagctggcgccaccgcgtcctgcatctcagcctccgggatgagcgtccctgtccgcacgcggagctcggcccccaggccctgccctcgcgttctgcaccccgggaggtccccatcaccggcagcaccttgccctcggggccgctgcacgggcctggagaggaggtcttggaaagttactgctagaggcggagccannnnnnnnnnnnnnnnnnnnnnnnnnnnnnnnnnnnnnnnnnnnnnnnaggatgccctgcgaacgggaaagatggagaagggcctccgagcctcgcctggggacagcaggggcctgcagatggagagatgggcagggtgtggaaactgggcttccagcccaggtgcactgaaaatttcttctcattttgtgtacgactgttctgcccgcatggacgtatgtgcgcctcgtgcccgaaggaaggccttccctatgcctgaagggcagaagatcccctggggctggaactccgtgtctgcagcccggagtgcagcagaggtgtctgtgtcctcctgctccacaaggacggattatgagggggcaggttgtgaacgggaagcccggtgtgaggaatgcaggcggctggaccaggagggagaccacagagcggtgatggatttgctgagggatgccgggagagggatcaaaggagactgctgtgacaaacacggagatcagagggctcttggtttggggtgggagtgcaccgaacgaagttaggctgtgggagcagggtactgagggttaaataagagcaggcttctgccgaaccctgctgaatccaggcagccagccgcactgctggcagttaggacacacccttccaccccccagagagnnnnnnnnnnnnnnnnnnnnnnnnnnnnnnnnnnnnnnnnnnnnnnnnnnnnnnnnnnnncctcctcagctggtagggggtgctggactttccccagagagccctgccccggagccgacactgcactccgcacctcgggctttggcttccggtgcagctggaggccctggtaaatcaagcctgaggatcagtagcttctttatggggtgggagacgcagctggaaagggaggtgactagggagagtgtgatgagtaggggtcagctgaagccacaaggaagcatgaacatcacactgccactgtgccctaaggggatcttgattggaaactatttaagacacacnnnnnnnnnnnnnnnnnnnnttaacgttgtgtgtatgagcctgctgcccctctagaaaggtcacaccgaaagtgtaaagctgggacacctatgatcagtctgggcacttggtggcgcgcgcgggggggggggggtgacgttgagttgaaggtcatcttgacagaaagcaagttgaatatttaaactttgtgacaccttatctcaaataaacagtaaaagtagcagg

SEQ ID NO: 871 - DNA, 1006 bp, Mesocricetus auratus
ctcttgcaaagggtcctgcagcagggctgtagcccgtgagatagatctaagagactatgaaagtcagcaaaagcagcttgaacaggtcattgctaaagacttgcttccttcaaaagacaggcagtacttgccagcaataaaaatgtctccagttcccgacttgattcctggaagtttcaagagccaacttcaggaggcccctccagagtggaaggcattaacagaaatgcggcagatgagaatggagctggagaggcccgtcaagggtggggattcgcacggtccttctcgaggtgactctccaactcacagaccaagggcagaggccgaaaaccccacaaactctggtggatctgggttttggcgtcctgggagctccgggactggaagtgaaggaaatctgaaaaccgaggacacagagtttgagggaggctctagaccttcaagttataggccaagtagctcaggctctgggaaccccatgcctagcaaccctgactggggcgagttttcagagttcacaggaagtagcagcccggcaataaagaaagagtaccacactggaaaactgaccacctctaaaggagataaagagctcgtgatcggaaacgagaaagccacctccactagcaccagcacaagcacgacacgtcgttcatgctctaaaaccattaccaagactgtgataggtcccgatggtcaccgagaagtggtcaaggaagtggtcacctccgatgatggctccgattgtggtggcaccggagacttaggcatgacccacggttttggtggcaggtttgatgaatttgcccacaggttccccgaccaagctgccttttttgatagtcacttcgattctctctcgtctaactacaaagaagttggcagtaagacccacactgcaggctctgattcggacatcttcacagacttaacagacccgggctcccatgtgcctgagtacccttccagtagcaaaacctcaactgtcagaaaacaagtcacc

SEQ ID NO: 872 - DNA, 8305 bp, Mesocricetus auratus
  misc_feature (380)..(393): n is a, c, g, or t
  misc_feature (2765)..(2793): n is a, c, g, or t
  misc_feature (3654)..(3668): n is a, c, g, or t
  misc_feature (5428)..(5445): n is a, c, g, or t
  misc_feature (6451)..(6469): n is a, c, g, or t
aggagagagaggcgtctcaagatggcggctcccagagcctcctgcccgagcttttaagcgggagcatccgggcaaatagttagagcggcagcgctcagtggcctccagattctcgggagtaggtgctctgcagttttgagaagctttaaaggacacgagccgattgagaagggggggaaagagccaaagggaaggaggatagttaagatggcggcctccatggagtcgtccaccgctgtctaaggagccgcttctccgtgaaagctgccttagacgaaagggggtgtgtgaagaattaagggtctccttcccgctcagtgacttattcccactgcatccttaagcggaactatggcttcggctgtgtcccccgccaactnnnnnnnnnnnnnnctgcagccccgctggaaacgagtggtgggttggtcgggtccggtgccccgaccccgccacggccaccgtgccgtggctatcaaggagctcatagtggtgtttggcggcggtaacgaaggaatagtggacgaactacacgtgtacaacactgcaaccaaccagtggttcatcccagctgtgagaggggatattcctccagggtgtgcagcctatggctttgtgtgtgatggtactcgcctgctggtatttggtgggatggtggagtatggaaaatacagcaacgacctctatgaactccaggccagtcgctgggaatggaagagactgaaagcaaagacacccaaaaatgggcctcctccatgtcctcggcttggacacagcttctcccttgtgggcaacaaatgctacctatttgggggtctagccaatgatagtgaggaccccaagaacaacattccgaggtacttgaatgacttatatatcctcgaactgcggccaggctctggagtggtagcttgggacatccccatcacttacggagtcctgcctccacctcgggagtcgcatactgctgtggtgtacactgagaaggataataagaaatcaaagctggtgatctatggagggatgagtggctgcaggctaggggatctttggaccctggacatcgagacactgacatggaataagcccagccttagtggggtggcaccccttcctcgaagcctccattctgcaactaccataggaaacaaaatgtatgtatttggtggctgggtgcctcttgtcatggacgatgtcaaagtggccacacacgagaaggagtggaagtgtaccaacacactggcttgtctcaaccttgataccatggcttgggaaaccatcctgatggatacactggaagacaacattcctcgagctcgagctggtcactgtgctgttgccatcaatactcgtttgtatatttggagtggccgtgatggctaccgcaaggcctggaacaaccaggtctgctgcaaggacctgtggtatctggagacagaaaagccaccacccccggcccgagtacaactcgtacgagctaacactaattcactggaggttagctggggtgcagtggcaacagccgacagttaccttctgcagctccagaaatatgacattcctgccacagctgctacggccacttcccctactcccaatccagtcccatctgtgcctgccaaccctcccaagagccctgcgcctgcagcagctgcacctgctgtacagccactgacccaagtaggcatcacacttgtgccccaggctgccgctgcacccccaagcactaccaccatccaggtcttgccaacagtaccaggcagctccatttctgtgcccactgcagccagggctcaaggtgttcctgctgttctcaaagtgactggtcctcaggctacaacaggaaccccactggttactatgagacctgctggtcaggctggaaaagcccctgtcactgtgacctccctgcctgctagtgtgcgaatggttgtacccacacagagtgcccaggggacggtgattggcagcaacccacagatgagtgggatggctgcattggctgctgccgctgctgccacacagaagattcctccttcctcagcacccaccgtgctgagtgtcccagccggcaccaccattgtcaagacagtggctgtgacacctggcacaaccactcttccagccactgtgaaggtggcctcctcccctgttatggtgagcaacccagccactcgcatgctaaagactgcagctgcccaagtggggacatctgtgtcctctgctgccaacacatctacccgccctatcatcacggtacacaaatcaggcaccgtgacagtggcccagcaagcccaggtagtgaccacagtggtcggcggagtcaccaagaccatcaccttagtgaagagccccatctctgtcccaggaggcagtgccctgatttccaatctcggaaaagtgatgtcagtggtccagaccaaaccagttcagacttcagcagtcacaggccaagcctctacaggccctgtgactcagatcatccagaccaaagggcctctgccagcagggactatcctgaagctggtgacatcagcagatggcaaacccacaaccatcatcaccaccacacaggctagtggggctgggtccaagcctaccatcctgggcatcagtagtgtctctcccagcaccaccaaacctggtacgactaccatcatcaagaccattcccatgtcagccattatcacccaggcaggcgccacaggtgttaccagcactcctggcattaagtcccccatcacaattatcaccaccaaggtgatgannnnnnnnnnnnnnnnnnnnnnnnnnnnnatcactgctgtccccaagattgctactggccatgggcagcaaggagtgacccaggtggtgctgaagggagcccctgggcagccaggcgccatcctccgcactgtgcccatgagtggcgtccgcctggtcacccctgtcactgtctctgctgtcaagccagctgtcaccacattggttgtgaagggcaccacaggtgtcacaaccctaggcacagtgacaggcactgtctctactagccttgcaggagctggggcccatagcaccagtgcctctctggccacacctatcactaccttgggcaccattgccactctctcaagccaggtgatcaatcctactgccatcacagtatcagctgcacagaccacactgacagctgctggtgggcttacgacacccacaatcacaatgcagcctgtctcccagcctacccaagtgactctgatcacagcacccagtggggttgaggcccagcctgtacatgaccttcctgtatccattttggcctcacctactacagagcagcccacagcaacagtcaccatcgctgactcaggccagggtgacgtacagcctggcactgtgacactggtgtgctccaacccaccctgtgaaacccatgaaacaggcaccaccaatacagctactaccactgttgtggctaaccttggaggacatcctcagcctacccaggtgcagtttgtttgtgacagacaagaggcagctgcttctcttgtgacctcagctgtgggacaacagaatggtaatgtggtccgtgtctgttcaaaccccccttgtgagacccatgagacaggcactaccaacactgccacaacagccacttcgaacatggctgggcannnnnnnnnnnnnnnccccccttgcgagactcatgagacaggcaccaccagcactgccactacagcaatgtccagcatgggcactgggcaacagcgagacactcgtcatacctctagcaatcccactgtagtgcggatcactgtggctcctggggcactggagagaacccagggtactgtgaagcctcagtgccaaacacagcaggccaatatgaccaacaccaccatgactgtgcaggctaccagatctccgtgcccagctggcccactgctcaggccaagtgtggcactggaggctgggaaccatagccctgcctttgtacagctagctcttccaagtgttagagttgggctgagtggccccagcaacaaggacatgcccacagggcaccagctggagacctatcatacttatacaaccaataccccaaccacagccctctctattatgggtgctggggagcttggtacagctcgattgatccccacatctacttatgaaagcctccaggcaagctctcccagcagcaccatgactatgacagctctagaggcactgctgtgcccttcggctaccgtgacccaagtctgctccaatccaccgtgtgagacccatgagacgggcaccaccaacactgccactacctccaatgcgggcagtgcccagcgggtatgttccaacccgccttgtgagactcatgagacgggaaccacacacacagctaccactgccacatcaaatggaggtgcaggccagcctgagggtggacaacagcctgccggtggccgtccctgtgagacacaccagaccacttccactggcaccactatgtcagtcagtgtgggtgccctgcttcctgatgccactccctctcatggaaccttggagtctggcttagaggtggtagcagtgtccaccgtcacctcccaggctggtgccacattgctggcttctttcccaacacagagggtatgctccaaccctccttgcgagacccacgagacaggcaccacgcacacagccaccactgtcacctctaacatgagctcaaaccaagaccctccaccagctgccagtgaccagggagaggtggtgagcacccaaggtgacagcgcaaacatcaccagctccagtggtatcacaacaactgtgtcatccacattgccacgagcagtgaccactgtgacacagtctacaccagtgccaggtccctctgttccgaacatctcatcactgactgagaccccaggggctctgacttccgaagtccccatcccagccacgataacagtgaccatagccaacacagaaacttctgacatgcccttctctgctgttgacatcctgcagcccccagaggaactccaggtctcaccagggcctcgtcagcagctgccaccacggcaactcctgcagtctgcctctacccccctgatgggggagtcctccgaggtcctgtcagcctcccagacccctgagctccaggccgccgtggatctgagcagcactggggacccatcttcaggccaggagcctaccagctctgctgtcgtggccactgtagtggtccagccacccccacccacacagtctgaagtagatcaattatcacttccccaagagctgatggctgaggcccaggcgggtaccaccacccttatggtaacagggctcaccccagaggagctggctgtgactgctgctgctgaagcagctgcccaagctgcagccactgaagaagctcaagccttagccatccaggctgtgctccagnnnnnnnnnnnnnnnnnnatggcaggcactggggagcccatggatacatctgaagcagcagcagcagtgacacaagcagaactgggtcacctttcagctgagggccaagagggtcaggccaccaccatacccattgtgctgacacagcaggagcttgcagcccttgtgcagcagcagcagcagctccaagaagtccaagctcaagcccagcagcagcaccacctccctactgaggctctggccccagccgacagtctcaatgacccatccatcgagagcaactgcctcaacgagctagctagtgctgtacctagcactgtggccttgttaccctcaacagccactgagagcctggctccatctaacacatttgtggctccccagcctgttgttgtagccagcccagcaaagatgcaggctgcagctaccctaactgaagtggacaatggcatcgagtccctgggtgtgaaaccggacttgccacccccacccagcaaagcccctgtgaaaaaggagaaccagtggtttgatgtgggggtcattaagggtaccagtgtaatggtaacacactattttctgccaccagatgatgctgttcagtcagatgatgactcaggcacaatcccagactataaccagctgaagaagcaggagctacagccaggcactgcgtataaatttcgtgttgctggaatcaatgcttgtggccgggggccctttagtgagatctcagccttcaagacgtgtctacctggtttcccaggggctccttgtgccattaaaatcagcaagagcccagatggtgctcacctcacctgggagccaccgtctgtgacctccggcaagatcatcgagtactctgtgtacctggccatccagagctcacaggctggtggtgagcccaagagctctaccccagcccagctagccttcatgcgagtatactgtgggcctagcccttcctgcctcgtgcagtcctccagcctctccaatgcccacattgactacaccaccaagcctgccnnnnnnnnnnnnnnnnnnncccgcaatgaaaagggctacggccctgctacacaagtgaggtggttgcaagaaaccagtaaagacagctcgggcaccaagccagccagcaagcggcccatgtcgtctccagaaatgaaatctgctccaaagaagtctaaggctgatggtcagtgaagaagctggccagcatctggatcctccagacccctctgcttcaggaacgccctatagggcctggcccaccctcccaccctgcccacccagcctttgcacttcaccctcaccagccactggctaccattcaatctccccccctttccctctctttttacaataaagaaagcacattttatcattgctgttgggaggaagcagaaggcagattggaaagagcgatgagtaagcaaatgagtgcaagttgtgctccttccttttccccacctgctgccctccctgagctgagtatgactagacagttcggagactttgggaagagaaattaaagctgaaaacaaagaagatagtacccacacttaagcctgcacttgtttgcagctcatcgcccttggcctgagaggcagccaaaggctggaggggggaggagtatcccccaagttccctcaggctttccccagcaaagtctgtctggttctattgtgttgtgttctatcactgtgatttccaggcaccttccatcccttctacaggcttagacagatctgtcttgcccagtaaccccatcggaagtataacacatctcagagacctttctgctaccacttaacacctctctcccttcctctttacaaaaagatgaggggaaagaaagaaggagccttgattagtctgagcagtggctgtgaaatcctcccaatgggcacagagtgccccccagtgatcctggctttggcccaccttgcttgagcctgggggccacatcaacaactgctgcatttgttgtatttttaagttgaaattaatgaagttaacattttttattgtaattttagctttagtgtgtgggggcttatccctttttgttagctgtgtacagaatgtgtatcgtattttctttcttccattttccccccttggctaatcattggcagggatcttttgcggaaaagctgagagagcagctagggcaggagagaaacagagtgtcctgggtaggacctggaagaccctgcctagttccattttcctgttactagacccctgcctacttttggaacagtgtgagacattgacctttattcccctgtgggttagcacttgacatgtagaggcttgcccttgaatgtggagtccaccttcatcagcatcactctcagagactgaccttgaacaatacagcaggggaaggaaacaagtggaacctggccaccttgaaagcagcccaggaagggggtgggtatgccatgtatcccacagaggctgggggtaggtacatgacacaaactcagtaattaatttcatagcattgcccccaagcactggattttttttctctccaggacccaagttttaggcggtgagtaatgcttgcaagcaagttactgaagaacttagaaatggacagccaatgtgttcagccactcaggcccataccccctgaggcctctagtgtattgtatcatatttctctgtggaaaatgtcatgtttagtcaagttggagccctctcgcctggcccctttgttttccctatcctttctcccaagcacccattgatttctcttctgagaacagtactaccccattcatctattgtagagtaatccctgtgactcaatattaccatagtgcgatgttgttttgtgctattttgaacaattaaaagacttttttgaaat

SEQ ID NO: 873 - DNA, 1378 bp, Mesocricetus auratus
atcagctctgggacaggcaagctaaaaatgaagccctccatctcatgggggatcctgctgctggcaggcctgtgctgcctggtccccagcttcctggctgaggatgcccaggagacagatgcctccaagcaggatcaggagcaccaagcctgctgtaagatcgctccaaatttggcagacttttccttcaacctataccgggagctggtccatcagtccaatacgaccaacatcttcttctctcctgtgagcattgccacagcctttgctatgctctctctgggcaccaagggtgtcactcacacccagattctagagggcctggggttcaacctcacagaaatagccgaggctgaggtccacaaaggcttccataacctcctccagaccttcaacaggccagacaatgagcttcagctgaccacaggcaatggcctgttcatccacaacaatctaaagctggtggataagttcctggaagaggtcaagaacgattaccactcggaagccttctctgtcaacttcacagactcagaagaggccaagaaagtgatcaacggttttgtggagaagggaacccaaggaaagatagttgatttagtgaaggaccttgacaaagacacagttcttgccctggtgaattacattttctttaaaggcaagtggaagaagcccttcgatgcagacaacactgaggaagctgacttccacgtggacaagaccaccacggtgaaggtgcccatgatgagccgcctgggcatgtttgacgtgcactatgttagcactctgtccagctgggtgctgctgatggattacctgggcaacgccactgccatcttcatcctacctgatgatggcaagatgcagcatctggagcaaactctcaacaaggaaatcattggcaagttcctgaaggacagacacacaaggtcagccaatgtacacttccccaaactgtccatctctggaacctataacttgaagacagccctggatccgctgggcatcacccaggtcttcagcaatggggccgacctttctgggatcacagaggatgttcccctgaagcttggcaaggctgtgcataaggctgtgctgaccatcgatgagagagggacggaagctgcaggggccacatttatggaaatcatccccatgtctgtgccccctgaggtgaactttaacagccctttcattgccataatatatgatagacagacagcaaagagccccctctttgtgggaaaagtggtggatcccacacgttaatcacaattctcagtcagatgtcatcttttctggattgggtcccctccccagtgacattaaacacaggctgtcctggcccacccatgcctgagtgcttctgcaaatgctc

SEQ ID NO: 874 - DNA, 1848 bp, Mesocricetus auratus
  misc_feature (667)..(697): n is a, c, g, or t
cacagctaccctgtagcaacacagacttggactaggagccgaccatgacactggaaagctttccctgctggctgaatgctgtaacctgtgggctcctgcttctctttcttcatgtgcaaggccaggactcacccagtcccatcaggaacacacacacaggccaggttagaggaagacttgtccatgtgaaagacactgaagttgatgtccacacattcctgggaattccctttgccaagccacctgtaggaccactgcgctttgcaccccctgagccccctgagccatggagtggtgtgagagatgggaactcctttccagccatgtgtctacaaaacgatgatatgatgaattctgagggtctgaagatgataaaactcatcatgcctcccatctctatgtctgaggactgcctgtatctcaacatctacacaccaacccatgcccatgaaggctctaacctgccggtgatggtgtggatccatggtggtgctctggttgtaggaatggcttctatgtatgatggttccatgctggcagccattgaggatgtggtggttgtcactatccagtaccgtctgggtgtcctcggctttttcagcactggagatgagcacgccagaggcaactggggctacctggaccaagtggctgccctacgctgggnnnnnnnnnnnnnnnnnnnnnnnnnnnnnnnccccggccaggtcactatttttggagagtcagcaggtggcacaagtgtgtcttcacatgttgtgtcccccatgtccaaaggactcttccatggtgccatcatggagagtggagtatcagtgatgcctggtatcatctccagctcctctgagatggtttacacaatagtggccaatctatctgattgtgcagctgtgaacacagagactctggtgagctgcctacgaggcaagagtgaagcagagattctggctattaacaaggtcttcaagatcattcctgctgtggtggacggggagtttctaccaaagcatcctcaggagctgttggcctctgctgattttgaccctgttcccagcatcattggtgtcaacaatgatgagtatggatggcttgtgcctgtgatcatgggctctgctcaggaaataaaagaaataaccagagtgaccctgcctgcaattctgaagagcacagcaaatcagatgaagttgcctcctgagtgtggtgacttgctaatggaagagtatatgggggacaatgaggacccacagaccctccaagcacagttcagagagatgatgggggacttcacgtttgtgatcccttcactccaagtagcacattttcagcgtgcccatgctcctgtctacttctatgagttccaacatcggcccagcttctttaaagataccaaaccaccacatgtgaaggctgaccatggtgatgaatttttcttcgtctttggcaacctattatgtggcataaaatttgcttccactgaggaagaggaactcctgagcagaaagatgatgaagtactgggccaactttgcacggcatgggaaccccaacagtgagaatctaccctactggcccatgttggaccacgatgaacaatacctgcagctggacattaagcctgctgtgggacgagccctaaaggccagaaggctgcagttctggaccaaaattctgccccagaagatccaggagctaaagggcactcaagagaggcaccaagagttgtagtaccctgtttgaagaaaggcatgtggccttcatgaagggtgggttctgtctgaagtttggaaagacttttgatcctaacatgcatataagaattaataaaggatatggccatgcatttttaaaa

SEQ ID NO: 875 - DNA, 1868 bp, Mesocricetus auratus
cacaatgtggctctaccctctggtctggatttctcttgctgcttgcacagcttgggggcacccatcttcaccaccggtggtgaacactgttcatggcaaagtcctggggaagtacgtcacgttagcaggatttgcacagcctgtggctgtcttcctgggagttccatttgccaagcctcctcttggatccctgaggtttgctcctccacagcctccagagccatggagcttcgtgaagaatgtcacttcctaccctcctatgtgctcccaagatgcagttggaggacaggtgctctcagaactcttcaccaacagaaaggagaacatccctctacagttttctgaagactgtctctacctgaatatatacacccctgccgacttgacaaagaacagtcggctgccggtgatggtgtggatccatggaggaggactggtagtgggtggcgcatctacctatgatggactggccctctctgcccacgaaaatgtggtagtggtgaccattcagtaccgccttggcatttggggattcttcagcacaggggatgaacacagtcgggggaattggggtcatttggaccaggtggctgcattacactgggtccaggataatattgccaactttgggggcaacccaggctccgtgaccatctttggagagtcagcaggaggtttcagtgtctctgttcttgtgttgtctcctctggccaagaacctcttccacagggccatttctgagagtggtgtggccctcacttctgctctgtttacaaaagacgccaagcccattgctgagctggttgctactctttctgggtgtaaaactaccacatcagctgttatggttcattgcttgcgccagaagacagaggaagaactcatggagacctcacaaaaaatgaatctttttaaattggacctacttggaaacccaaaagagacctaccccttcctccctaccatgattgatggagtgttcctgtcaaagagtccagaagagatcctggctgagaagagtttcaacactgtcccctacatggtgggcatcaacaagcaagagtttggctggatcattccaatgattatgggctatccactctctgaaggcaaactggaccagaagacggctaactccctcttgtggcagtcctacccaacagttaaaatccccaagaatctgattccaatggccactgagaagtatttaggagggacggatgaccctgccaaaaagaaagacctgctcctggacttgattgcagatgtgatatttggtgtcccatcagtaatggtgtctcgtggccacagagatgccggggctcccacctacatgtatgagtttgagtatcgtccaagctttgtatcgaacatgagacccaaggaagtcacaggagaccatggcgatgaaatcttctcagtatttggatctccctttttaaaagatggtgcctcagaagaggagatcaacctcagcaagacggtgatgaaattctgggccaactttgctcgcaatgggaaccctaatgggggagggctaccacattggccagagtatgaccagaaggaagggtacatgaagattggtgcctcagtgcaggcagcccacagactgaaagacaaagaagtgattttttggactgaactcagggccaaggaggcagcagagaggacaacacacagagaacatgctgagctctgatcccaagttccagctatgtttgagagcctggagccaagtaagaggtatgccacagatggtcctgcagagacataaggcttattatctttagggccacacaattgtttggtgttttgtacaaatgcattaaagaggatccttgttgcttcaacttgtaaaaataaaa

SEQ ID NO: 876 - DNA, 8751 bp, Cricetulus sp.
  misc_feature (64)..(64): n is a, c, g, or t
  misc_feature (70)..(70): n is a, c, g, or t
  misc_feature (531)..(555): n is a, c, g, or t
  misc_feature (600)..(620): n is a, c, g, or t
  misc_feature (717)..(717): n is a, c, g, or t
  misc_feature (837)..(837): n is a, c, g, or t
  misc_feature (1071)..(1071): n is a, c, g, or t
  misc_feature (1218)..(1218): n is a, c, g, or t
  misc_feature (1974)..(2001): n is a, c, g, or t
  misc_feature (2011)..(2040): n is a, c, g, or t
  misc_feature (2082)..(2116): n is a, c, g, or t
  misc_feature (2811)..(2825): n is a, c, g, or t
  misc_feature (2922)..(2946): n is a, c, g, or t
  misc_feature (3248)..(3272): n is a, c, g, or t
  misc_feature (3330)..(3358): n is a, c, g, or t
  misc_feature (5140)..(5140): n is a, c, g, or t
  misc_feature (5378)..(5395): n is a, c, g, or t
  misc_feature (5528)..(5549): n is a, c, g, or t
  misc_feature (5666)..(5686): n is a, c, g, or t
  misc_feature (5705)..(5742): n is a, c, g, or t
  misc_feature (5779)..(5801): n is a, c, g, or t
  misc_feature (6060)..(6083): n is a, c, g, or t
  misc_feature (6088)..(6148): n is a, c, g, or t
  misc_feature (6151)..(6163): n is a, c, g, or t
  misc_feature (6193)..(6233): n is a, c, g, or t
  misc_feature (6261)..(6322): n is a, c, g, or t
  misc_feature (6329)..(6377): n is a, c, g, or t
  misc_feature (6380)..(6407): n is a, c, g, or t
  misc_feature (6423)..(6462): n is a, c, g, or t
  misc_feature (6490)..(6607): n is a, c, g, or t
  misc_feature (6610)..(6636): n is a, c, g, or t
  misc_feature (6652)..(6692): n is a, c, g, or t
  misc_feature (6720)..(6803): n is a, c, g, or t
  misc_feature (6813)..(6838): n is a, c, g, or t
  misc_feature (6841)..(6867): n is a, c, g, or t
  misc_feature (6894)..(6923): n is a, c, g, or t
  misc_feature (6930)..(6943): n is a, c, g, or t
  misc_feature (6945)..(6974): n is a, c, g, or t
  misc_feature (6983)..(7068): n is a, c, g, or t
  misc_feature (7071)..(7097): n is a, c, g, or t
  misc_feature (7113)..(7153): n is a, c, g, or t
  misc_feature (7160)..(7173): n is a, c, g, or t
  misc_feature (7175)..(7213): n is a, c, g, or t
  misc_feature (7230)..(7297): n is a, c, g, or t
  misc_feature (7301)..(7327): n is a, c, g, or t
  misc_feature (7343)..(7378): n is a, c, g, or t
  misc_feature (7390)..(7403): n is a, c, g, or t
  misc_feature (7405)..(7428): n is a, c, g, or t
  misc_feature (7463)..(7527): n is a, c, g, or t
  misc_feature (7572)..(7611): n is a, c, g, or t
  misc_feature (7619)..(7631): n is a, c, g, or t
  misc_feature (7633)..(7685): n is a, c, g, or t
  misc_feature (7687)..(7700): n is a, c, g, or t
  misc_feature (7712)..(7756): n is a, c, g, or t
  misc_feature (7759)..(7771): n is a, c, g, or t
  misc_feature (7801)..(7841): n is a, c, g, or t
  misc_feature (7869)..(7934): n is a, c, g, or t
  misc_feature (8495)..(8526): n is a, c, g, or t
agatctcagctctgggctctatgtttttaatttggagaattacttggtttgggctttttttgtngttgtnctgtttttgtcgttgttttggtttctgaagactgagtttctccgtgtaaaccctagttgtcctggaacttgcatcaaactcacgagatccccctgcctttgcctcctgaacactgtaattaaaggtgtgtgcaccacagtgggcttggttttgtttctggaaacagggtctcactgtgtacccctggctggcctggaacttgctatatagatcagtctgcctctgaagtgctaggatcaaaggtgaatgtcaccatgctatgtctcagctggtgaaaggcctcaaccttccctcccaagttctcaccattccctgtctttctatcctgcctcagaacaacgattgtacagcagttagggtggagtctgtttaacattactgacctccactcttaacaatgacatatttaagactaggcagtggtggcctacatctttaatcccagtaccactccaggagannnnnnnnnnnnnnnnnnnnnnnnngtgagacccacctgatctacagagttaattccaggacggccaggnnnnnnnnnnnnnnnnnnnnnccagaaaacagaaaacaaaacaaaaaccccaaaccaaaaaccaagtaattctccaaattttccaagtttggaccgcatacagagttgacggtggagnatgcctgggtcttgtgtcagctgaggccaagtccagcctctatgcttgttcataaccagaaagcagaacacagcagcaccctgtttttttgttgccctataagctgaggcttgcccttgnccttggtaaccttgtgtggttatacaacccatgacaaaacagacttctggcttcattcctacttccttttgggggagaaaaacagcacctgacccttgtgcttagtcccggttccctattacaaaaacagtcacacgccaggtgtgaccttcagaccaggccgacccagctgcagcaaccagccccacccccatcgggaagcttggggcccagccctgccctgctcagcccatnccacgcaggtgtcctcagtcaatccctccctgttgccgggcccctatctcagtccccattggtgccagctttgaagcagtcgtccctggtagcctgcaaaggacggatccgtgtgtggaacgaactgcaaacggaatccagtgagtnacaggccttctagcacgttcgagcacttcccattctaggtcaggaggtttgggattttagggctgtgacttaatacccaagtcctgaggccaagtaggacatggagacatcagagtccctttcagaaaatagaccagcagctgtgataatctgcccccaaggtctctgtaggggacatttggggacacaggattccatgtggatggcagtgcctgtcactgtgacatatctatgaatgtctctggcctctgtgactagtattatccccttctttcccatcagagttgtgacagctttgctgaagggctcactcctggctgggaagctgtgttggggtgcagccgccagctctgaggtgagggcatttctcctatcctgtttgccctgtgtccatgaggagcaggtcacctctgctagtggtgagacacagtgctgatggattattaaaaataaagcaaaataaaaaaaaaattggattggaagtgaagaggggactgggtagaggtgtccaggaaggagttgcagggaggaaatgggagaggtatgataaaaatacaatatatgtatgtatggaattctcaaagattattataaaatatatattttaaaatgagaagctggagctgggcgtggtggctcacaccaacttttaatcccaacacttgggggcagaggtaggtggatttctggggagttcaaggagagccagggctacacagagaagccctgtcttgagccaggtggtggtggtgtatnnnnnnnnnnnnnnnnnnnnnnnnnnnngaggcaggcnnnnnnnnnnnnnnnnnnnnnnnnnnnnnngtacagagtgagttccaagacagcttccaaaataatacagannnnnnnnnnnnnnnnnnnnnnnnnnnnnnnnnnngccctgtcttgaaaaatcaaaataaataataaaaatacatcatggggtttcaatatagtttcatacctgtaatataatgcattttggtcatgtttgttggaaataagaatcttacttatcccccattgttctcttcccccagaccctctgaacattccttcctttccatgctaacccttggccaggtccagccctccagccttcctcctcttctactccctcccctctgaaatcaagactgtttggccttgaaccttctagaaagaattggcctgcacagaaatctgtctgagaaaccactggggtatcccagagaatgacattttctcagtggcatatgacttcattcatggaaaaccacagaaattagtctgtttttaacaatatttctgatgttgaattattatgaattcctaaaccggaggaaccagacaatcttgaaatctcaacacctgggtggtagaggtaggagcctccctgcaagttagaccccagcctggtctacaggatgagttccagggcaacctggtgaccctgtctcaaaaaaccctcaaaaagtgttgggattagtggcatgcaccaccattcccaccaaaggtttatttttaataatatgtgtgtgagtgtgtatcactatgagtatatgtcaacatgtgtcaatgtccccagggacatttaaagagcccctgaagctnnnnnnnnnnnnnnntatgaactgcctgacatggctaatgggaattgaactcagattttctggaagttatacctgctcttactgctgagccatgtctctgaagaccccaggnnnnnnnnnnnnnnnnnnnnnnnnntattttctgtatagccctggctgtcctgaaagcactctctatatgtagaccaggcttgcctggagcttggatatccacctgcttctgcctcaggaatggtgggattgaaggtgtgcaccaccacatccgctaacatgcacaattcttaatgggtttatatcttatttaatgaatgaaaggtttgggggatggatgtagcttaatggaaaatgactgaagatttcaattaaaaatctggggcttagctgcgcggtgggtggtgcctgcctttagtcccagtactggggaggcagaggaaggannnnnnnnnnnnnnnnnnnnnnnnntggtctataacgtgagttccaggacagccagagatacacagacaaaccctgtctcacnnnnnnnnnnnnnnnnnnnnnnnnnnnnntctgggacgtaggcttggtgtggtggcacacattttgattccagcacttggaaggaagaggcctgcatggtctacatagcttgtttcaggcaaccagagctacatagtgagatcctgtctcaacaaaaataaaataatctaaggcttcaaagggttcaatctcttaggtagctaaatatgaacaaaatttgggaaatgtgaccttttccttagtgacagtcagatagaaccttctcgagtgcaaggacaccaagtgcaaacaggctcaagaacagcctggaaaggtctagtgctatggggcttcaggtcgaatgccaactgttttcaagaactgtgtggatttttctgcctgtaacgaattcagattcatttttcaaaactcggggagagttttccccctttataatttttttttttaaatttattaaactttgtttcgttccccttgttttgagaattgcagagtgatccaccctgtcacagtgccagggagctcagggatgggcccaggggcctggcggggctgaaggggctggggaagcgagggctccaaagggaccccagtgtttcaggagccaaagccctaggttcctagaacgcagaggccaccgggaccccccagacggggtaagcgggtgggttctggggcgcgaagcgtactgcgcatgcctcgaggtccgctccggccgcgctgatccaagccgggttctcgcgccgacctggtcgtgattgacaagtcacacacgctgatccctccgcggggccgcacagggtgacagcctttcccctccccacaaagccccctactctctgggcaccacacacgaacattccttgagcgtgaccttgttggctctagtcaggcgcctccggtgcagagactggaacggccttgggaagtagtccctaaccgcatttccgcggagggatcgtcgggagggcgtggcttgtgaggattatataaggcgactccgggcgggtcttagctagttccgtcggagacccgagttcagtcgccgcttctctgtgaggactctgccgccgccgctggtgaggagaagccgccgcgcttggcgtagctgagagacggggagggggcgcggacacgaggggcagcccgcagcctggacgttctgtttccgtggcccgcgaggaaggcgactgtcctgaggcggaggacccagcggcaagatggcggccaagtggaaacctgaggggataggcgagcggccctgaggcgctcgacggggttgggggggaagcaggcccgcgaggcagctgcagccgggaacgtgcggccaaccccttattttttttgacgggttgcgggccgtagtgcctccgaagtgagagccgtgggcgtttgactgtcgggagaggtcggtcggattttcatccgttgctaaagacggaagtgcgactgagacgggaaggggggggagtcggttggtggcggttgaacctggactaaggcgcacatgacgtcgcggtttctatgggctcataatgggtggtgaggacatttccctgactatagctttccctcagttgtaggacagggtttgggcctcggcctcgggttaggctctccagagtgggcaggaaccggaaatccagaggggggaaaagtgagcctaaattgagttttgtttcttgtcctatatggtttagagagagactcgctgcaaaaccgtggctggcctggaactctagaccagaaccctggcctttgccgacccacatgattagattcaaggcctgtgccaccagcccaggctttantattatggtctgggatttctgcgatttcatccctggtgttttgggatgatgacttgtgggtcttccctcctcccccttactgtttctgtccatggcgtgtgttctaacccaagtttgttcttttgggggggtgggagggttgcgataaaatgggatctatctctgccctcccaacttgagatctgcctgtcagaagtctcagtgctgagaataaaggtgtgcattggctcagacctcnnnnnnnnnnnnnnnnnntattttgtaggaagtctgtagtccttacttgatacataagaccagacaggatctgatttcctgcctatgaatggtagatcctctcagtgactgcagtgtgaatggggaccacgcttttctccaaactatgcannnnnnnnnnnnnnnnnnnnnntgactttcagccactggtactgcaatatccactcaccatttattatatggaccaggttcaccatgcctaggtggctttgcttttgagacacggtttctctgtgtagccttggttatnnnnnnnnnnnnnnnnnnnnnaattatttttggtttttcnnnnnnnnnnnnnnnnnnnnnnnnnnnnnnnnnnnnnnggcacttgctccggagaccaggctggcctccaactcnnnnnnnnnnnnnnnnnnnnnnngactgctgggattaaagtaaagccattctgcaaccctgaataccactcaataggtttcttatttgaaatgtggttttatgatttttatttctggatttagaaaagaaatcttcagacagaagtcttcagacagaaactagctgtagtttggctgtgtgaactaaattggcatccatttcacagcaatccaactgttagtaccataccacgaatatttgtcattcctgacctgttttttgtttgtgtgtgtgacagacannnnnnnnnnnnnnnnnnnnnnnngacannnnnnnnnnnnnnnnnnnnnnnnnnnnnnnnnnnnnnnnnnnnnnnnnnnnnnnnnnnnnaannnnnnnnnnnnngagggcatcccccctgaccagcagaggctnnnnnnnnnnnnnnnnnnnnnnnnnnnnnnnnnnnnnnnnntccgactacaacatccagaaggagtctnnnnnnnnnnnnnnnnnnnnnnnnnnnnnnnnnnnnnnnnnnnnnnnnnnnnnnnnnnnnnngaaaacnnnnnnnnnnnnnnnnnnnnnnnnnnnnnnnnnnnnnnnnnnnnnnnnnaannnnnnnnnnnnnnnnnnnnnnnnnnnntgaccagcagaggttnnnnnnnnnnnnnnnnnnnnnnnnnnnnnnnnnnnnnnnntccgactacaacatccagaaggagtctnnnnnnnnnnnnnnnnnnnnnnnnnnnnnnnnnnnnnnnnnnnnnnnnnnnnnnnnnnnnnnnnnnnnnnnnnnnnnnnnnnnnnnnnnnnnnnnnnnnnnnnnnnnnnnnnnnnnnnaannnnnnnnnnnnnnnnnnnnnnnnnnntgaccagcagaggttnnnnnnnnnnnnnnnnnnnnnnnnnnnnnnnnnnnnnnnnntccgactacaacatccagaaggagtctnnnnnnnnnnnnnnnnnnnnnnnnnnnnnnnnnnnnnnnnnnnnnnnnnnnnnnnnnnnnnnnnnnnnnnnnnnnnnnnnnnnntgagcccagnnnnnnnnnnnnnnnnnnnnnnnnnnaannnnnnnnnnnnnnnnnnnnnnnnnnntgaccagcagaggttgatctttgccgnnnnnnnnnnnnnnnnnnnnnnnnnnnnnntccgacnnnnnnnnnnnnnngnnnnnnnnnnnnnnnnnnnnnnnnnnnnnnaggggtggnnnnnnnnnnnnnnnnnnnnnnnnnnnnnnnnnnnnnnnnnnnnnnnnnnnnnnnnnnnnnnnnnnnnnnnnnnnnnnnnnnnnnnaannnnnnnnnnnnnnnnnnnnnnnnnnntgaccagcagaggttnnnnnnnnnnnnnnnnnnnnnnnnnnnnnnnnnnnnnnnnntccgacnnnnnnnnnnnnnngnnnnnnnnnnnnnnnnnnnnnnnnnnnnnnnnnnnnnnngatgcagatctttgtannnnnnnnnnnnnnnnnnnnnnnnnnnnnnnnnnnnnnnnnnnnnnnnnnnnnnnnnnnnnnnnnnnnaaannnnnnnnnnnnnnnnnnnnnnnnnnntgaccagcagaggttnnnnnnnnnnnnnnnnnnnnnnnnnnnnnnnnnnnnccctgtccgacnnnnnnnnnnnnnngnnnnnnnnnnnnnnnnnnnnnnnnaggctcaggggtgggatgcagatctttgtgaaaannnnnnnnnnnnnnnnnnnnnnnnnnnnnnnnnnnnnnnnnnnnnnnnnnnnnnnnnnnnnnnnnaagatccaggacaaggagggcatcccccctgaccagcagaggttnnnnnnnnnnnnnnnnnnnnnnnnnnnnnnnnnnnnnnnntccgactnnnnnnnnnnnnngnnnnnnnnnnnnnnnnnnnnnnnnnnnnnnnnnnnnnnnnnnnnnnnnnnnnnannnnnnnnnnnnnngcaagaccatannnnnnnnnnnnnnnnnnnnnnnnnnnnnnnnnnnnnnnnnnnnnaannnnnnnnnnnnncagggcatcccccctgaccagcagaggttnnnnnnnnnnnnnnnnnnnnnnnnnnnnnnnnnnnnnnnnntccgactacaacatccagaaggagtctnnnnnnnnnnnnnnnnnnnnnnnnnnnnnnnnnnnnnnnnnnnnnnnnnnnnnnnnnnnnnnnnnngaccatcaccctggaggttgagcccagtaacaccatcaagaaaagcaaacaggaagatggacgcacctttctcactacactgtctagaaagagcacaccttgtgcttgttcttgggcttgaggggaggtgttttaatttaccccatcttttaagttgttaacaagtttcattgcactttgaataaagttcttgcattcccaaaggtgttggatctcgttttagctttagtttgttggttcctgattgtagaggctatcaagtttgtgtcatcagtctatgttaattaccattaggtaataatgatgaagctgtaagggtagttattttcagtgtaaatgggcttaacatttgaaagattagttatatgtgcctgggtatttgattttatgtagttatgtgcactctgtcccttgtgtccagtacagaaaaggatattcagtctggagttaagatgtagatgagctgccgtatccctgcaggcaactgtacttagtcttctacatgacaacaaataatttgtatttttccaaaacaggcttctctatgtaagagccctagcnnnnnnnnnnnnnnnnnnnnnnnnnnnnnnnnctagcctcaagttcacctgcctctgcctccaaagtgcttgtattaaaggcatgtgctgctactacctgccaagaggaacaaattcttaggaaccatctttccagtcctggtaggtgatattacaaatataggctttgttttttctttttttttaatcatgtgaaattgtacatttctgtttgcatatgtattatcctgggcagggatacatagctgtgttagatc

SEQ ID NO: 877 - DNA, 2421 bp, Cricetulus griseus
  misc_feature (552)..(569): n is a, c, g, or t
  misc_feature (824)..(902): n is a, c, g, or t
  misc_feature (1069)..(1085): n is a, c, g, or t
  misc_feature (1162)..(1198): n is a, c, g, or t
ggcgcaggctctgtcactgacaacgggggactctcacgcagactccagtgccaccatgactgaggctgtagcagaagaagtgtctcttttcagcacaacggacgtggttctgttttctctgattgtgggggtcctgacctactggttcatctttaggaagaagaaagaagaggtgccagagttcagcaagatccaaacagcgaccccatcagtcaaagagagcagcttcgtggagaagatgaagaaaacgggaaggaacattatcgtattctatggctcccagacggggactgctgaggagtttgccaaccgcctgtccaaggatgcccaccgctatgggatgcggggcatgtctgcagaccccgaagagtatgacttggccgacctgagcagcttgcctgagatcgacaagtccctggtagtcttctgcatggccacgtatggcgagggtgaccccaccgacaacgcccaggacttctatgactggctgcaggagactgatgtggacctcactggggtcaagtttgctgtgttcggccttgggaacaagannnnnnnnnnnnnnnnnnccatgggcaagtatgtggaccagcgactggagcagctcggcgcccagcgcatctttgagttgggccttggtgatgacgatgggaacttggaagaggatttcatcacatggagggagcagttctggccagccgtgtgcgagttcttcggggtggaagccactggggaggagtccagcattcgtcagtatgagctcttggtccacgaagacattgatgctgccaaggtttacaccggcgagatgggccgcctgaagnnnnnnnnnnnnnnnnnnnnnnnnnnnnnnnnnnnnnnnnnnnnnnnnnnnnnnnnnnnnnnnnnnnnnnnnnnnnnnnagggcactgagcggcacctgatgcacttggaattggacatctcagactcgaagatcaggtatgaatctggggatcatgtggctgtgtacccggccaatgactccaccctggtcaaccagatcggggagatcctaggggctgacttggatgtcgtcatgtctctaaannnnnnnnnnnnnnnnnccaacaagaagcacccgttcccctgccccaccacctaccgcacggccctcacctactacctggacatcaccaacccnnnnnnnnnnnnnnnnnnnnnnnnnnnnnnnnnnnnngcctcagagccctctgagcaggagcagctgcacaagatggcgtcatcctcaggcgagggcaaggagctgtacctgagctgggtggtggaggcccggaggcacatcttagccattctccaagactacccctcactgcggccacccatcgaccacctgtgtgagctgctacctcggctgcaggcccgctactactccatcgcctcctcctctaaggtccaccccaactcggtgcacatctgcgctgtggctgtggagtatgaggccaagtctggacgagtgaacaagggcgtggccaccagctggcttcgggccaaggagccagcaggagagaacggccgccgggccctggtgcccatgttcgtgcgcaaatctcagttccgcctccctttcaagtccgtcacacctgtcatcatggtgggtcctggcacagggatcgcccccttcatgggcttcatccaggagcgagcctggcttcgggagcaaggcaaggaggttggagagacactgctatactatggctgccggcgctcggatgaggactacctataccgcgaagagctggcccgctttcacaaggacggggccctcacccagcttaatgtggccttttccagggagcaggcccacaaggtctatgtccagcacctgctgaagagagacagagagcacctgtggaagctcatccacgagggcggggcccacatctacgtctgcggggatgctcgaaacatggccaaagacgtgcagaacaccttctacgacatcgtggccgagtttgggcccatggagcacgcccaggctgtggactatgttaagaagctgatgaccaagggtcgctactccctggacgtgtggagctaggagctgccacccgcccaccttgctccccgtaatcacttccctaactcccttctgccgacctccacctctggtggtcccttgcgtggcctcgacacagggaggccaagggaccgactcctggcctgactgacacccttctgggccgctcggctgagcccaacccactgtaccaggcaggcggcccagtcccagggcacatggcgagaggagccagccacctctggtgatgggtgccttaggccctcggcagctgtacagaggggcttttctctccagagctgaggtgcagccccaccagtgatttttgaatgagtgtaaataattttaaataaccgggcccttggaataaagttgttttctgt

SEQ ID NO: 878 - DNA, 3888 bp, Mesocricetus auratus
  misc_feature (1124)..(1139): n is a, c, g, or t
  misc_feature (2115)..(2136): n is a, c, g, or t
gaattctccataaatgtgtactgcaacacccaccaaagcaactattagtatgactaaataagaacacccacttacagcagaggttctcaacctgtaggtcacaacccttttggggttacacagaaggtttctggtatagcagatatttatattatgatttataacagtagcaaaactgcagttacaaagtagcaaagaaaattattttatggttgggggttgccacaacatgaggaaatgttttaaagggtcgcagctttaggaaggtttgagaaccactggcgtaaggtctctgccctgcctgatatactgagtattcaagacactctccccattctttcttctctctcagccgcactctatcatctgctacttaattgggtaaatctgagacgcccgcccacttgtccacacacatgatgaccatcaggctcaatcagcccaccaccagtttttgtaaagaaaatgtatgccctcatgcccatgtgtttcacacactacagatgcctgtgtttgtgttacaacgacagaggcgagtcttggcgtctatactgcagggacctcaaacgtggcaataacacctggcgatatacaaggacaggtccatgatcccaggcctaggtccccatcctttgtgtcgctgtcctgcctctaaggagcagcttcggagggtagagtgggcacctcatcgtgggatccaggactctcaggatctggtcacagatttggcaccagcagagagcagtcatgagaatttctgagaaggaagataaagattgaccaggccagctctgtggtttccagccctcctctggaactataaaagcaggggccaggcaggtgcacaccagaggctgacctcaagctgcacccacgggaaaatgctggccctactcttcctgttggcccttctcttgcctcctgaagccggagctggtgagtttggcctctgtctccccatcctctgactttttcagcaactgccccaaatccattcacttgggtaatagagaccctaaaatgaggcaaggtcctttacatgttagttagtccaggagaaatctcttaggtcaagtaagaatgaaaaatgaactcgcccttagaccatttcatcaaaatgctcnnnnnnnnnnnnnnnntcttctctggctttccattagcattggggaggacagcaaagcagagtctaaatgaacaggcagttcagaaacctgaatgagcgctgtgctctgacatgtagggtgatgatggacagggaggacgggagaggcaagatcaacgggtggaaagatcaaagaatgctcggaggggcctgagccccatgacggggggaggggggagggggaagcctggggggagacactcggggagcggccactcagcttcggcccctcttcctctgccagcacggtgtcctgcaagtctgtgactagggacgcggggttctttgttccagaggagattattggtggtgtggagtcaaagccacactcccgcccttacatggcccatttggagatcgtcactgagagaggctttactgccagctgcggggggttcctcataacgccagaatttgtgatgacggctgcacactgcaaaggaaagtaagaggcctctttctcttcgtgtgaagaagcgcacgaaccagagttacaaagcctgaggagcggccccagctctgcacatctccagaggggctcctacgtacacccagaggacaaagggacacaaagtcactcattgaaccattttatttgtacctccattttcagagggcagagctttaggcagggctccggtagggataaactactgctttcctcttgtcctgatgtccccagagctctcagtcaccagctggggtgtaactcaatgacagagtgcctgtccaccacgtgcaaagctcaatgccaatactggggtggctagttctcagtcctgtctttccctgagttcgttccttctgggaaggctgggagccctgtctcaagtccaatcagagtctctctagcggctctgctgtgggatagggaagaccctggtgtcctctgctctgaaatgagtccccatgagcccagaactttctactgcctctcttctctctcaacagannnnnnnnnnnnnnnnnnnnnnctcatgatgtgagcaaggcagaatccacacagcagaagataaaagtcaaaaaacaaatcgctcacccaaactacagcttctactccaacctgcatgacatcatgcttctaaaggtgccattgttatttttcttgaccttttttacttccccctccttaactctcctcctgcctcaggccttggaattttctcttgtccaacccacttcctcagaacccaccccagagttccatgtccttgccaccccagtggaaaggacccatgtccaagacagcatccttctctccttcccgccccccccccgcagcttcaaaggaaagctaagaagacccctgctgtggacacaatccccctgcctagtccgtctgactttcttaaacctgggaaaatgtgccgggcagctggctggggaaggactggagtgacagagccaacgtcagaaaagctgagggaggtcaaactgagaatcatggacaaaggggcctgtaaatactatcaccactacagttatgacttccaggtctgcgtgggcagccccacgaaggtcagatcagcatacaaggtgagtgctcacctgctgttcctccagcctcaggagacagtgtttgtggagggagcagaccaaacagctctccactgttgtgactgacgccagggttcttaggctcccagcactctgggaactgaaattctccctctaggtctcatttccatgtccaaaccctgactgcacccttcccatgggctccaaagagaagaagggagtgaagggagaccatctaagcactgggtcaagacctaaggggaaaaaaatccctaacttagactcacaaagagagggaactccttttactctgggactagctatggagaggggtctataggtggggacgatgattttgttcatggtctgctttttctaatccacagggagactccgggggacctcttctgtgtgctggggtggcccatggtattgtatcttatggacgtggagatgcaaagccccctgcagtcttcacccgaatctccccatacgtgccctggattaatatagtcataaaggcaagcagttgaagagccagcctgagttagggcctccaagccagagctcttctggtacccctgggggttaaaagagggtccccagcctgccccagcctgtcccagcctgcccctgagaggatctcaaagacacaccattctctggtgctctattgttccctgtaatgcacctcaataaagatgtgaccaccagctgccagagactcgctccttgctctaaactgactcagtccctcacccacagccaggtcctctctgagctgagtggagaattgtttagggctactctctggtcaagctaacaatcttgactactgatttcctggcacagggtgcaccactgcggattgctgagcgtgatctaacatacatgggtgtgtactgtaagttttcacatccagagtaattcgcactgccgttttcctgcactgtcctttcttctcctctgtccttgtcctcatctcttctctccacaaaccccatgccctagccagaacatcttttccacatcacagcaaattcccatgtgtagtcagagatggccatggatagcttgtgtccccaacacttgtcccatcgtcaccaccctctcaaaatcgcacctgcgactagaggagagcctgccctcggaagtccctggaaggtgtctgtggctgcagcagccacaacctttcatccctttctaga

SEQ ID NO: 879 - DNA, 517 bp, Mesocricetus auratus
gagctcaggaaggacactgacttaattctgctcgccttcccaccagatcctcctgccggcttttgtgttccttgggctggagggagaggactgctgtggctgctggagttgtgagaactatggcaagagatgcacagtaagtctcctctgcgcagcctcctgggcaaaggctccattcctgacgtgggcctggcttacttcctgcctcttctctccccagatgctttcttccataatggctgctctcattggcattgcgggatccggctactgcgtcatcgtggcggcactgggtttggcagaagggccaaagtgcggtgattcccacggcatgtggaactacacctttgccaacactgacggacagtatgtaattgttctttacctagcaatactttcttaaccgccacacataaaaccaagtcatctctctgtccatccacccaatattaccttacaacagctcatttagtgtgtaaggatggataggcaaccatcaacccggacaaattctaga

SEQ ID NO: 880 - DNA, 293 bp, Mesocricetus auratus
tcatgagatacctctaagctacagtcatgtgcctgaagtttctcttctgaccacaggtaccttctggatcccactacgtggtccaagtgccatgagcctaagaatattgtggagtggaatgtgacgctattttctaccctcttggcgtttggtggacttgaattcatcttgtgtcttattcaagtcataaatggagtgcttgaaggcatgtgtagctattgctgctcccaccaacaggtgagaatttgtgtgacaacgttgaggtctagccccgtagtgttcagttgccacaa

SEQ ID NO: 881 - DNA, 387 bp, Mesocricetus auratus
acctcaccaatgagccctttcacaatctctccctccctaatgacatctacacccaccgtgtagcctgtgtggagatctggccttccaaattgaaccaactcctcttttccacatcattgtttatgctccagtattttgttcctctgggttttattcttatctgctacctgaggattgttatctgcctccgaaaaagaactaagaaggtggacaggaggaaggaaaatgagagccgcctcaatgagaacaagaggataaatgtgatgttgatttccattgtagtgacctttggtgcatgttggctgcccttgaatatcttcaatgtcatctttgactggtatcatgagatgctgatgagctgccaccatgacctggtatttgtaattt

SEQ ID NO: 882 - DNA, 1972 bp, Mesocricetus auratus
  misc_feature (588)..(607): n is a, c, g, or t
tggcactcacagctggagagagaacacagaggggtacattgctgacagagaagcaacgatggacctgacttcagttctctcactggaaacctgggtcctcctggccatcagtctggtgctcctataccgacttgggacgcataaatatgacatttttaagaaacagggaattcctgggcccaaacctctgccgtttttaggaaatgtattgaattactacaagggtatatggacatttgatatcgagtgccataaaaagtatggaaaaatatgggggttgtttgaaggtcaaagacccctgtttactgtcacggacacagagatgatcaagaacgtactcgtgaaggaatgctattctatcttcacaaaccgacgggattttggcccagtggggataatgagtaaagccgtctctatatctaaggatgaggagtggaagaggattcgagccttgctgtctcccaccttcaccagtggaaaactcaaagagatgttccccatcattgaacagtacggagatattttggtgaaattcttgagaagagaggcagagaaaggcaaccctgtcaccacgaaagaagtgtttgnnnnnnnnnnnnnnnnnnnnatcacaagcacggcatttggtgtgagcgtcgattctctcaacaacccaaaggaccttttgtggaaaggcaggaagctgttaagatttgatttttttgatccattgttcttgtccgtagtactctttccgttcctcatcccaatatatgagaagttaaatgtctccatgttcccaaaggattccataagttttttcagaaaatttgtggacaaaacgaaggaaaatcgcctggattataaccaaaagcaccgagtggatttccttcagctgatgatgaactctcatgacaattccaaagactcccacaaagctctctctgacatggagatcatagcccagtcaattatctttatttttgctggctacgacaccaccagcagcacactttccttcgccctgtatttactggccactcaccctgatgtacagaagaaactgcaggaggagatcgatattgctctgcccaataaggcacgtcccagctatgataaggtgatggagatggagtacctggacatggtgctgaatgaaaccctcagattgtacccaattggtagtagacttgagagagtctgtaaacaagatgtggaaatggatggtgtgtttgttcccaaaggctccatagtgatggtaccagtttttgctcttcactatgacccacagtactggccagagcctgagaaattccgccctgaaaggttcagcaaggagaacaagggcagcattgatccttatatattcctgccctttgggaatggacccaggaactgcattggcatgagatttgctcttatgaacatgaaacttgctctcactaaagtcctacagaatttctccttacagccttgtaaagaaacacagatcccaatgaaattaagccgaaaagcaatgcttcaaccagaaaaacccattattttaaaggttgtgccacgggatgcaatcataactggagcgtgactttccctcaaggacttctcttgtgttccttgagaatgtggtgtctaagaaaattggaaccttgaacttacttcatgaataaaatgcaaatgaagatgaggcttaatcaactgactctgatgcatggttatggattcagtatacccattgagctttctcagtgttaacacagagtaccatctaatgtaaaatgaataagtcagtgacagaatgagaaattcatcttctatggtgctcatgggaccatgtccatgcacatctgattggctccatcaacttcttttgagctcttttgagagtagccatgcctctgcaatttgatcaataataattttaaaagcaaatacgaaccatcatgacaactcttattgtaaaaaatattccacaataaatgtacactaagcatgt

SEQ ID NO: 883 - DNA, 2896 bp, Mesocricetus auratus
  misc_feature (936)..(952): n is a, c, g, or t
  misc_feature (1754)..(1777): n is a, c, g, or t
tacacgtttgggaagtgagagcctggagaccatggacggcgccgcggtggggcttcgggtgctgctgggcctgggcctggtgtccctcctcactctcgaggccatgcctgctgcgtggggcttggccacaacgggcagacccagggccagagagaaacggcaggccgtggatacaacgcctgatggtgtgctggtcaagagcttgaaagtcaactgcaaagtcacctctcgcttcgcccactacatcatcaccagccaagtggtcaacaggcagcccaatgaagccagggaggtggccttcgatgtggaaatccccaagacggccttcatcagtgacttcgccatcacagcagatgggaacacattcatcggagacataaaggacaaagccagtgcatggaaacagtaccgcaaagccatttcaggggagaacgccggccttgtcaggacctcgggcagaaatatggaacagttcaccatccacatcaccgttggagcccagagcaaggccacattccaactcacctacgaggaggtgctgaagcggagacttacgcagtacgacattgtcatcaaagtcaagcccaagcagctggtgcaacatttcgagatcgatgtggacatctttgagccccaggggatcagtaagctggatgctcaggcctccttcctcagcaaggaactcgctgctcaaaccatcaaggagtctttctcagggaaaaagggccacgtgctcttccgccccacggtgagccagcagcagcagccctgccccacatgctccacatcctggctgaatggggacttcaaggtgacttacgacgtcaaccgggacaagctctgtgacctcttggtagccaacaactactttgcacacttctttgcccccaaaaacctgaccaacatgagcaagaacctggttttcgtgattgacannnnnnnnnnnnnnnnnggccagaaagtgaagcagaccaaggaggctctactcaagatcctgggggacgtgaagccaggggacagctttgatctggtcctctttgggtctcgagtgcaatcctggaagggctccctggtccccgcgactcaggccaacctgcaagcagctcaggacttcgtgcgacgcttttccctggctggagccacaaacctgaatggaggcttgctccgaggaatcgagatcttaaacaaagctcaaggaagccacccggagctcagcagccccgcctcaattctcatcatgttgacagatggagagcccacggagggggagacggaccgttcccagatcctcaagaacgtccgcaacgctatccggggcagattcccgctctacaacctcggctttggccacgacctagactttaacttcctggaggtcatgtccatggagaacagtggatgggcccagaggatttatgaggaccatgatgccacccagcagctacagggcttctacaatcaagtagccaaccccctgctgaccgacgtggagctgcagtatccccaggattcggtcttaagtctaacgcagcaccgacacaaacagtactatgatggctccgagatcgtggtggccggacgtattgctgaccacaagctgagcacttttaaggctgacgttcgggctcgtggggagaggcaagagttcaaggcaacctgcctggtggatgaggaagagatgaagaagctgctccgagagcgtgggcacatgctagagaaccacgtggagcggctgtgggcctacctcaccatcnnnnnnnnnnnnnnnnnnnnnnnnaagatggagggggaagagagggccaacctgtcatcccaggccctgaagatgtcgctggactatcagttcgtgacgccgctgacctctatgacgatcagaggcctgacggacgaggatgggctggagcccaccatcgacaagaccccagaggattctcagcccttagtgaaggtgggacccagaaggacgttcgtgctgtcggccacgcagccttctcctacagcccgcagctccgtggtctcaaagctgccgaaccaagtgacaggcgtggacaccgacccccacttcatcatctatgtgccccagaaagaggacagcctgtgcttcaacatcaatgaggaacccggggtgatcctgagcctggtgcaggaccctgacacaggcttctcggtgaatggacagctcattgggagcaagcccagcaggcctgggcagcatgaggccacatacttcgggagactcgggatctcaaatcccccatcagattttcagctggaagtgacgcctcggaacattacactgaaccccagctctggtgggcctgtgttctcctggagggaccaggccacgccgcagaaagacggggtcctggtgaccatcaacaagaaaaggaacctggtggtgtctgtggaagacggagccacctttgagattgtcctgcacaggacgtggaaggggagtgccgcccaccaggactttctgggcttctatgtgctggatagctcccggatgtcggcccggacgcgggggctgctggggcaattcttctgccccctggattttgaagtatctgacatccgcccaggctctgaccctatgaagttagatgccacgatgcgtgtgaagaatcggcagctggcagtcaccaggggcttacaaagagactacagcaaggaccccagacatggaacagaggtgtcttgctggttcatccacaacaatggagctggactgattgatggagttcacactgactacattgtcccggacatcttctgagccctccagctagtccgcacctgagactgcatctgaggagggagaggagggcatcgaattaaccccaccctcctgagcgtcctggccctttgtgatttcattaaagagaggctgtgtcca

SEQ ID NO: 884 - DNA, 3102 bp, Mesocricetus auratus
  misc_feature (1504)..(1539): n is a, c, g, or t
  misc_feature (1698)..(1733): n is a, c, g, or t
  misc_feature (1975)..(2002): n is a, c, g, or t
tacacgtttgctctcctcgacagaataaagttgctgtgaacttgtttcagtaggagagggattctccccagaccacctcctctagagcgcttggcacagctatccagcaaaatgcagcgacttgcatgcgttctcatctggctatttcttttggaagaacaagccttcgaaatccccgcaaatgagtactctgaattcgcaggatacagcaatcttgtggaactggccccagacaaattcccatttgtgcaagagaacagaagatatcagagaagccttcctgaagaatcaggggagatgacggacaatgttgatcaagtaactctttatagctacaaagtccagtccactattacttctcggatggccaccactatcatccagagcaaactggtgaacaattccccacagtcccaaaatgttgtgttcgatgttcaaatccccaaaggagcctttatctccaacttcaccatgaccgttaatggtataacatttacaagcacgattagggagaaaaccgtgggccgagctctttattcacaggcaagagcaaaaggcaagacggccggatgggtgaggagcagaactcttgatatggagaacttcaacaccgaagtaaacatcccgcctggggcaaaggtgcagtttgaacttcattaccaggaaatgaagtggaggaagttgggatcctatgagcacaagattcatctgcagccaggaaggctggccaaacacttggaggtgaacgtgtggattgttgaactgcaagggatgagatttcttcatgttcctgatacatttgaaggccatttccaaggtgttccagtcatatcaaaaggacagaagaagtcccatgtctccttcaagcccacagtagcacaacagagaaaatgccccaactgcacctatactgcagtggatggagagctggtggtgatgtatgacgtcaacagagaagagaaggttggggagcttgaggtatttaatggatattttgtgcacttctttgctcctgagaacctggacccaattcccaaaaacatcctttttgttattgatgttagtggctctatgtggggaataaagatgaaacagactgtagaggcaatgaaaaccatactggatgacctaagaaccgaagaccaattctctgtggttgatttcaaccataatgttcgaacctggagaaatgacttagtgtcagctactaaaacacaaattacagatgccaagagatacattgagaaaatccagcctagtggaggcacaaatatcaacgaggcacttctgcgagcaattttcattttgaatgaagccagtaacttgggaatgttaaaccctgactcagtctctctgatcgttttggtttctgatggagatccaacagtgggtgaactgaaactgtccaaaattcagaaaaatgtgaagcagaacatccaagataacatctccctgtttagtttggggataggatttgatgtcgactatgattttttgaagagannnnnnnnnnnnnnnnnnnnnnnnnnnnnnnnnnnntatgggaaccgtgacacatcctctcagctcaagaaattttacaaccaggtctctactccactgctcaggaatgttcaattcaactacccccaggcatcagtgacagatgtcactcaaaatagcttccacaactactttggaggttctgagatagtggtnnnnnnnnnnnnnnnnnnnnnnnnnnnnnnnnnnnntcagagcatcatcactgcgacttcgactaacacggaattggtcttggaaaccttgagccagatggatgacctggaggattttctatcaaaagacaagcatgcagaccctaatttcaccaaaaaactatgggcctatctcacgatcaaccagctgctagcagagagaagtctggctcctacagctgccatcaaaaggaaaatcacaaaaacaatcttgcagatgtctctagaccatcatattnnnnnnnnnnnnnnnnnnnnnnnnnnnnagaatgaagctggggatgagcgcatgctggctgactccccaccacaggaccattcttgctgctcaggtgcgttatattatggcaccaaggttgcctcagcttccatcccatcatgggccagtccatcccccacaccagtgatggccatgcttgcagtaggagcgaaccgacttgagtccactccacctccacatgtgattcgagtggaaaatgacccccacttcatcatttacctaccaaaaagccaaaagaatatctgtttcaatattgactcagaacctggaaaaatccttagcctggtgtctgatccagaatcaggaatcctagtcaatggccagcttattggtgccaaaaaggcagagaatggaaaactaagaacctactttggaaaattgggattttatttccaaaaagaagacatgaaaatagaaatcagcacagagaacatcaccctgatcaacggttcttctacaactagcttgttctggtctgatacagctcaccttgggaatcagagggtgcttatctccgtgaagaaaggaaaatctgtgactctcaccctaaataaggagatgttcttttctgttctgctacatcatgtgtggaagaagcatccagtcaatgtggactttctggggatctaccttcctccaacaaacaagttttcacccagtgcacatggactcttagggcagttcatgaataagccaaatatccacatcttcaatgagagaccaggaaaagatccagaaaaaccagaggcaagcatggaagtgaaaggacataagctgactgttaccagaggcttacagaaggactacaggacagacatagcgtttggaacagacgttccctgctggtttgtgcacaacagtgggaaaggattcatcgacgggcattacaaggattacctcgtacctcagctctatagctttctcaaacggccttagcggtttatggttttggaaattatatgtgtacattttcttcccttgataggttttgcagttattcctgagctctaacaattcaaaacaaatccagatattgcagtggtctaaaaggcctgctaatccacctgaagaaaataaatatttgca

SEQ ID NO: 885 - DNA, 2777 bp, Mesocricetus auratus
tacacgttatgtggtggccctaccttgtcttggccctactctctggcttggaggcctctggctttccgagaagccccctccggctgctagggaaacggagcctcccggaaggggtggtcgatggcgtcgaggtctacagcaccaagatcagctgcaaggtgacctcccgctttgcgcacaacgttgtcaccacgagggccgtcaaccgtgcagaccaggccaaagaggtttcctttgacgtggagctgcccaagacggcctttatcaccaacttcaccttgaccattgacggtgtcacctaccctgggaacatcaaggagaaggaagttgcccagaagcaatatgacaaggctgtgtctcagggcaagacggctggactggtcaaggcctctgggaggaaactggagaagttcacagtgtccgtcaatgtggccgcgggcagcaaggtcacttttgagctaacctatgaagagctgctcaagaggcataaaggaaagtacgagatgtacctcaaagtccagcccaaacaactggtcagacactttgagattgatgcgcacatcttcgaaccacagggcatcagcatgctggacgccgaggcctcgttcattactaacgacctcctgggaagcgccctcaccaagtccttctccgggaaaaaggggcatgtgtctttcaagcccagcttagaccaacagcgctcatgccccacgtgtacagactccctcctcaacggggacttcaccatcgtctatgacgtgaacagagagtctccaggcaacgtgcaggtagtcaacggctactttgtgcacttctttgcgccccaaggccttccagtggtgcccaagaacatagtctttgtgattgatatcagcggctccatggctgggcggaaaatccagcagaccagggtagcccttctcaaaatcctggacgacatgaagcaagacgactatctgaacttcattctgttcagcacgggtgtgaccacctggaaagacagcctagtgcaagccacccctgcaaaccttgaggaggccaggacatttgtgaggagcatcagcgatcaaggcatgaccaacattaatgatggactgctgaggggcatccgaatgctgacagatgcccgggagcagcacactgttccggagaggagcacctccatcatcatcatgttgacagacggggacgccaataccggtgagagcagacctgagaagatccaggagaatgtccggaaagccatcgagggcaggttccctttgtataacctgggctttggcaacaatctgaattataatttcctggagactatggccctggagaaccatggggttgcccggcgcatttatgaagattctgatgccaacttgcagctgcagggcttctacgaggaggtagctaaccctctgctgacgaacgtggaggtggagtatcccgagaacgccatcctggacctcaccaagaacagttacccccacttctacgacggctctgagactgctgtagcagggcgcttggcggacagtgacatgaacaactttaaggcagacgtgaagggccacggggccttgaatgacctgaccttcacggaggaggtagacatgaaggaaatggacgcagcgctgaaggagcagggctacatttttgggaactacattgaacggctctgggcctacctcactatcgagcagttactggagaaacgcaagaacgcccatggggaggagaaagagaacctcacagcccaggccctggagctgtccctcaagtaccattttgtgactcccctgacccccatggtggtgaccaagcctgaggacaatgaggaccagacgtccattgctgacaagcctggggaagacgccccctacgcagccacgtccacggcctacttgaccagccaccagtctcctccaaccccctactattatgtggacggggaccctcacttcatcatccaagtgccaggaaaaaacgacaccatctgcttcaacatcgacgagaaacccggcaccgtgcttcggcttatccaggacccagtcacaggcatcactgtgactggacagatcattggagataagggaagtagcccttactccaggacagggaaaacctattttggcaaactgggcatcacccacgcttggatggacttccggattgaggtgaccacagagaagatcatcctggggactgaagacgaactgagcacgttcagttggctagacacggtcacaatcacacagactgggctgtttgtagcgatcaacagaaagaagaacatggtcgtgtcctttggagatggggttaacttcgtgatcgttctacaccaggtttggaagaaacatccgcttcaccaggacttcctagggttctacgtggtggacagtcaccggatgtcagcacggacacacgggctgctggggcaattcttccgcccctttgactttgaagtgtctgacgtccgcccaggctctgaccccgcaaagccagatgccacaatggtggtgaagaaccatcagctgactgtcacaaggggctcccagagagattacaggaaggatgccagtgtcggcacaaaggtcacctgctggtttgtccacaacaatggggaagggctgattgacggtgtgcacaccgactacatcgtccccagcttgttctgagtgacgggtcaccccgctgcggaagtggaaggcctggatggtccggagcaaggccgcgggaacgggcttgtgggaagggccaggacaataaagccagcttgtaaacca

SEQ ID NO: 886 - DNA, 390 bp, Cricetinae gen. sp.
aaagttttcgaacgttgtgaattggccagaactttgaagagattgggtatggacggttaccgtggtatctctttggctaactggatgtgtttggccaagtgggaatctggttacaacactagagctactaactacaacgccggtgaccgttctactgactacggtatcttccaaattaactctagatactggtgtaacgacggtaagactccaggcgccgttaacgcctgtcacttgtcttgttctgctttgttgcaagacaacatcgctgacgccgttgcctgtgctaagagagtcgttagagacccacaaggtatcagagcttgggtcgcttggcgtaacagatgtcaaaacagagacgtcagacaatacgttcaaggttgtggtgtc

SEQ ID NO: 887 - DNA, 1371 bp, Cricetinae gen. sp.
  misc_feature (1)..(39): n is a, c, g, or t
  misc_feature (515)..(618): n is a, c, g, or t
  misc_feature (706)..(770): n is a, c, g, or t
nnnnnnnnnnnnnnnnnnnnnnnnnnnnnnnnnnnnnnnctcaaactcacagagacctgtctgcctctgcctgccgctgagtgctggtactaaggcgagcaccaccaccacccagcaacacattgttgtttttaaaggggagaaaatgaacaaagcactcagctgctactcaagtgagttttgagcagagacatctccttgcatcacttctcttataggtatcccaacacccaagtttcctgtgataactacagtcacatacgctgtgtgaagactcttgtctcagacctgtgtgtcctctgcctgttttctcctatctctgtgggtgccctgcctcagaagtgctattatttctgtttaccagatgggaaaatgaggagcaaatacttgagtgaatgtcttgacgtcttgcttcccacagcagccggctcaggatctaaatgcaagtctatccaacttgacaactcgaccagtccatccagtttgtaagctgttgttcttgggcgctagatgcnnnnnnnnnnnnnnnnnnnnnnnnnnnnnnnnnnnnnnnnnnnnnnnnnnnnnnnnnnnnnnnnnnnnnnnnnnnnnnnnnnnnnnnnnnnnnnnnnnnnnnnnatttcttttataatttaggactctggggtcagattttggtagagagaaaagaaacgaggatgatggtcctttttaaagtgttggaaannnnnnnnnnnnnnnnnnnnnnnnnnnnnnnnnnnnnnnnnnnnnnnnnnnnnnnnnnnnnnnnntacaaagaagttttaataagggacacccagttctgagcttagaggcagaaaggtagcatttgttcatacccacacatacacatgatacacatgtgcacacatgcattcacacatttccatgtcctatctttagccccaattcatgcctgtttctggtccaggacaatgccagctttagaaggagttgcctctaaactcccactcactagggaaaaaaaatagtggccgcacccacacttcccggcagccccagatatgctgcctactcacctttagaaggcttctcagcgcccaaacaattctccaaaccaaagcttcctgtctcattcttcagctttccattagcaaaatgagttaccaccagtctctgcggaggccttagcttttcatcctcactattcatggggctgaaatccaagaagtgccatcccaaggaactctgacaagttgaagccaagttctaagagaaatactttgcaggtgagtgtctctcctccctgcctggctgctggccaggacagagcagtgagatgatgggaggggccgctggagcgcccactcccacagaacatttattatcttccagacagagttcatctta

SEQ ID NO: 888 - DNA, 1118 bp, Mesocricetus auratus
  misc_feature (328)..(342): n is a, c, g, or t
  misc_feature (486)..(521): n is a, c, g, or t
cagagcttgggcacagaacacatccaaagttcccaagtgggctccttcgtctgcacctgctcacctgctctccgctcagtcacagcagcaggcagaaaaaaaaatgaagaacatttacattgtggctggattttttgtggtgctggtgcaaggcagctggcagcattcccttcaggacacggaggagaaatccagatcattcccagcttcccagacagacccactcgaggaccctgatcaaataaatgaagacaagcgccattcacagggaacattcaccagtgactacagcaaatacctggactcccgccgagcccaagattttgtnnnnnnnnnnnnnnncaccaagaggaacaggaacaacattgccaaacgccacgatgagtttgagaggcacgctgaagggacctttaccagcgatgtgagctcttacttggagggccaggctgcaaaggaattcattgcttggctggtgaaaggcagagnnnnnnnnnnnnnnnnnnnnnnnnnnnnnnnnnnnnaagaactcggccgcagacatgcggacggctccttctccgatgagatgaacacgattctcgatagtcttgccaccagggacttcatcaactggctgattcaaaccaaaatcactgacaagaaataagtgtgtcagcattcacaaccatcttcacaacttctcccgccagtcacctgggatgtagatttaagttctatacatttaagagctatatttttgaagctgcattgctttgcatgtggatgaatacatttccctttagcattgtgtagccaaaagattgtaaatgaaataaagtatttccaggatgttgataagataacaacttcacgatatgaaagtgctggattcacattttccctctcattttaaaggtcccaccctgtttatgtgtagcagcgagattattcttctgtgatataaattgtaaatcattattacagtcacgacacctgcattgtaataacagaagacatgacagcctggtagccgcagtggtgaacctggagagagagcttcttccttgagtcctttatcataaatgcactcagctttcaatgtatcggggatagatttaaataaagattccatccttctt

SEQ ID NO: 889 - DNA, 304 bp, Cricetulus sp.
cagatctggaaatggaccccaactgctcctgctccaccggcagcacctgcacctgctccagttcctgtggctgcaaagactgcaagtgcacctcctgcaagaagagctgctgctcctgctgcccagtgggctgctccaagtgtgcccagggctgcgtctgcaaaggggcatcggacaagtgcacgtgctgtgcctaatgggaggacgatgccgcctcccacgtgtaaatagtgcccggagctctaccctgtttactaagtccccttttctacgaaatatgtgaataaaaaaccaatgtgattct

SEQ ID NO: 890 - DNA, 4862 bp, Mesocricetus auratus
  misc_feature (50)..(71): n is a, c, g, or t
  misc_feature (85)..(252): n is a, c, g, or t
  misc_feature (466)..(494): n is a, c, g, or t
  misc_feature (834)..(861): n is a, c, g, or t
  misc_feature (883)..(1048): n is a, c, g, or t
  misc_feature (1348)..(1369): n is a, c, g, or t
  misc_feature (2171)..(2247): n is a, c, g, or t
  misc_feature (2406)..(2441): n is a, c, g, or t
  misc_feature (2724)..(2754): n is a, c, g, or t
  misc_feature (2857)..(2883): n is a, c, g, or t
  misc_feature (2997)..(3031): n is a, c, g, or t
  misc_feature (3475)..(3495): n is a, c, g, or t
  misc_feature (3849)..(3879): n is a, c, g, or t
  misc_feature (4059)..(4110): n is a, c, g, or t
  misc_feature (4362)..(4396): n is a, c, g, or t
  misc_feature (4557)..(4862): n is a, c, g, or t
cacgaagaacttgttatggagtttgctttcaacatgacaagattagccannnnnnnnnnnnnnnnnnnnnncctggactgcttgnnnnnnnnnnnnnnnnnnnnnnnnnnnnnnnnnnnnnnnnnnnnnnnnnnnnnnnnnnnnnnnnnnnnnnnnnnnnnnnnnnnnnnnnnnnnnnnnnnnnnnnnnnnnnnnnnnnnnnnnnnnnnnnnnnnnnnnnnnnnnnnnnnnnnnnnnnnnnnnnnnnnnnnnaaaagtcttctggacacattgtggcctgtgggctgaagatggatgtcccgacattacagcagaattaacatataatggcatgtaaacgggtgcacatggattacctggtctacaattacatggctctctactaccatctcctctttatctaacaccaaagaacagactattccatcttctatttctatgataaactgcatactgggaaatcttnnnnnnnnnnnnnnnnnnnnnnnnnnnnnacatccctactgggtgagctaactccctacacaattaaacaaatcaatcaactaagtgttatgcatgtaacatcatgccaataacacaatgaacataattttgcacctttagtctcagtgacaggaagaatatggacaaaattatacaggtatgtagaagcaaatcctcccacaatcatacctaataggtcagagtcagagttatgtcaataacagtgtcttaaacaatgataggccttaaaggacaatagacttattgatagaactatatatctaatgtctagactttgcctgtatcacttaaactattgttgtcaaaatttcacattgtaccatagannnnnnnnnnnnnnnnnnnnnnnnnnnnggctagagtcccaaagaaaagnnnnnnnnnnnnnnnnnnnnnnnnnnnnnnnnnnnnnnnnnnnnnnnnnnnnnnnnnnnnnnnnnnnnnnnnnnnnnnnnnnnnnnnnnnnnnnnnnnnnnnnnnnnnnnnnnnnnnnnnnnnnnnnnnnnnnnnnnnnnnnnnnnnnnnnnnnnnnnnnnnnnnngccttgttggcagagcacggttcagagctcaaatgcaggtatgaagtaggggaaaggatggtacagtggcatgagacttgaacaacaaactgaagttcaggactgggaggaaaggagaaagatgaacaagaaactgatgcaaaaaataggagaacaaatattagaaaacttatattatcattttgtctgttgatctttacaattggtatcatttaagaatataatcttgcaacaaaataacacaagtgcatttgtcaaaataacattttgttggtggatgatggaagacagtgttagagnnnnnnnnnnnnnnnnnnnnnncacaattcttaatatgctatgagaagcagggtttaattatgttaactttggtgtttggaggatagagaaaaatgaaagaagtaaacatataccagaaatatttttgagaaaagaaaaagataatgaatttgaaaatttgtacaaaaggagcaagaaacatcaggggataatttttgaagactattttagtgtatgtgtgtacatatatagatattgatatagctgtagatagacactaagagagagggggagagtttgcatgcttattacattccagtcagaggtcaactacatacaactacacacatagacatagagagatatatttaaaaattctttcagtgcacaattgtctgtgttggtgtatatgtgtgtgagagagagagacacagagagaaacacatacagagagagacagagtgagagagagagaaagagcatacttatttacattccagtcagagaacaactattgggaggaagttttctctttctaccatatgattaaaaaaattggtttcaaatcatcagcaagtactttttatccaatgagattccttactgcacctatttcactattttagtgttgcataggcaatatgcattgttctatacatggtgtttaaaagaaagtttattcacattttcgcgaataaaatgtcagtgaatataccacataggaagtggaggtcataaataaaagcataaataatgtaaaccagttgtagtgacagaagagtgacgaacaaaggattcatgaccatggtggggaaacccacagaaacagctgacctagggaagnnnnnnnnnnnnnnnnnnnnnnnnnnnnnnnnnnnnnnnnnnnnnnnnnnnnnnnnnnnnnnnnnnnnnnnnnnnnnggtagaaggccagggcagaattatggggcctcttatagtggaatcagtattttctgtttagtgcaaaaaatggagtaagggagcagattccctattgaggtctacactatcagcctaaatacagcagggagggcctatgtcccaccccaaatgatgtgnnnnnnnnnnnnnnnnnnnnnnnnnnnnnnnnnnnntcattggggagtggataggaagtattatggggatgggggagagatatgggaggataggagagagaggttactgggattgatatgtaaaataagatttttttcaaatttaatttaaaatatgaaacagaagaaataaaacagtactgaaattaaaaaaatactagaatgtacatgaacaaaaagagaaagataataaggaatcgaatagtggctgcacctgaacataaaaacaattatgtgaagcattagagacacgcactaccagataaaatcactagtgatnnnnnnnnnnnnnnnnnnnnnnnnnnnnnnnaagcctgagaatgtcataattaaccttaaacttgctttatgcttatttcctagcgaccatttatgaagactctatatcacaactttcaggtaaagccagattnnnnnnnnnnnnnnnnnnnnnnnnnnntttattgttttaaatattcggacatgtaaagtctctgaatcattttgttttttaatgaaattaatgtgttacagcttcctctgatataggcagtaaaaattcccaacattgtcnnnnnnnnnnnnnnnnnnnnnnnnnnnnnnnnnnnggagaaagccaggttttatgaaaggaactttgtgtctctcccacagattgaagtaatgtcttgcatatgatgagaatattgggtttcctcatttaaattccataatggcactctttcaccagtgagtccacacagaattacatgctcaaaccaaatagctgactaatgtgtaaaaagacactgcaaaaaaattgaatgaaatgtcttgtcgttcctttcctacatttgtttcttgttctccattacaacaggggcctgaacagcatgatatatttgaggaaagaacatttctgtcacaattttgccagtgtgccactttttaacagtaacatttacaaattgtactattttcttcacttctgtctgaaattgtaaggaacacaatatcacatttcatgcacaaaattttagaaaaacattggtcaaagaattgagacataagannnnnnnnnnnnnnnnnnnnnaattaagctcagaagtagccatggacatagacctggaagggtacctaggagaaagagaaggtgtgaactagtactctatttatcggtacccctgcagaggaagagcagcaaggccaagaccctggtcaacttcaccagagacctgggcaattccccccacaaccttctgcatctgatgaagaaggtgatgatgatggtgaagaagatggaaatgcaccagagggaccaccacagcaaggaggtgaccaccagaaacctcgccctcctaaacctggaaaccagcaaggcccaccccagcaggaaggccagcagcagaatcgccctcctaaacctggaaaccaggaaggcccaccnnnnnnnnnnnnnnnnnnnnnnnnnnnnnnncctaaacctggaaaccaggaaggcccaccccagcaggaaggccagcagcagaatcgccctcctaaacctggaaaccaggaaggcccaccccagcaggaaggccagcagcagaatcgccctcctaaacctggaaaccaggaaggcccaccccagcagggaagtgaggagcagtcaacttcnnnnnnnnnnnnnnnnnnnnnnnnnnnnnnnnnnnnnnnnnnnnnnnnnnnntcagatacattatcattcaaaccaacccccaaactccatagatcagcaacatcttcctaaaggcatatatacttatgaatattaaatggctcctataacttaggattctatgatttctgtgatataaactctatgtcaaatgccttaactcttattacataattagaaatctatagaaaacaaagagaatcttcaggaaatgctgcaattttacattgtgttttcattctccatgactttttaacaattcannnnnnnnnnnnnnnnnnnnnnnnnnnnnnnnnnnaatgtcatttcaatggaacaatgatgttgtaagtgtaccttcaacattctaataaaacatttagcacgggattactctttgctgtttcttctgagcatgagtgagtgaaatctgggcatgtggccacatgcaaggtgattatagacaaagtcttaaagttnnnnnnnnnnnnnnnnnnnnnnnnnnnnnnnnnnnnnnnnnnnnnnnnnnnnnnnnnnnnnnnnnnnnnnnnnnnnnnnnnnnnnnnnnnnnnnnnnnnnnnnnnnnnnnnnnnnnnnnnnnnnnnnnnnnnnnnnnnnnnnnnnnnnnnnnnnnnnnnnnnnnnnnnnnnnnnnnnnnnnnnnnnnnnnnnnnnnnnnnnnnnnnnnnnnnnnnnnnnnnnnnnnnnnnnnnnnnnnnnnnnnnnnnnnnnnnnnnnnnnnnnnnnnnnnnnnnnnnnnnnnnnnnnnnnnnnnnnnnnnnnnnn

SEQ ID NO: 891 - DNA, 282 bp, Mesocricetus auratus
gagggccaaagcctcaaggaggagatggctcgccacctgcaggagtatcaagatctactcaatgtcaagctagccctggacatcgagattgccacctataggaaattgctagaaggcgaggaaaaccgcatcaccatccctgtacaaactttctccaacctgcaaatccgagaaaccagcctggacaccaagtccgtgtcagaaggacacctcaagaggaacatcgtggtaaagacagtggagatgagggatggtgaggtcattaaggagtccaagcaggag

SEQ ID NO: 892 - DNA, 2089 bp, Mesocricetus auratus
  misc_feature (2015)..(2074): n is a, c, g, or t
gggcggactctaaaatgaatcccgatctggacaccggccacaacacatcagcacctgcccaatggggagagttgaaagatgccaacttcactggccccaaccagacctcgagcaactccacactgccccagctggacgttaccagggccatctctgtgggcctggtgctgggcgccttcatcctctttgccattgtgggcaacatcctggtcatcctgtcagtggcctgcaatcggcacctgcggacgcccaccaactacttcattgtcaacctggccattgctgacctgctgttgagtttcacagtcctgcccttctccgctaccctagaagtgcttggctactgggttctggggcgcatcttctgtgacatctgggcagcggtggacgtcctgtgctgtacggcctccatcctgagcctatgtgccatctccattgatcgctacattggggtgcgctactctctgcagtaccccactctggtcacccgcaggaaggccatcttggcactcctcagtgtgtgggttttgtccacggtcatctccatcgggcctctccttggatggaaagaaccagcgcccaacgacgacaaggaatgcggagtcaccgaagaacccttctatgccctcttttcctccctgggctccttctacatcccactcgcggtcattctggtcatgtactgccgggtctacatcgtggccaagaggaccaccaagaacctggaggctggagtcatgaaggagatgtccaactccaaggagctgaccctgaggatccactccaagaactttcatgaggacaccctcagcagtaccaaggccaagggccacaaccccaggagttccatagctgtcaaactttttaagttctccagggaaaagaaagcagccaaaaccttgggcattgtggtcggaatgttcatcttgtgttggctccccttcttcatcgctctcccacttggctccctgttctccactctcaagcccccggacgccgtgttcaaggtggtattctggctgggctacttcaacagctgcctcaaccccatcatctacccgtgctccagcaaggagttcaagcgcgccttcatgcgtatccttgggtgccagtgccgtagtggccgtcgccgccgccgccgccgtcgtctgggcgcgtgcgcttacacctatcggccgtggacgcgcggcggctcgctggagcgatcgcagtcgcggaaggactccctggacgacagcggcagctgcatgagtggcagccagaggaccctgccctcggcgtcgcccagcccgggctacctgggtcgcggagcgcagccaccactggagctgtgcgcctaccccgaatggaaatccggggctctgctcagtctgccagagcctccgggtcgccgcggtcgcctcgactctgggcccctcttcactttcaagctcttgggagagccggagagcccgggcaccgagggcgatgccagcaatgggggctgcgacgcaacgaccgacctggccaatgggcagcccggtttcaagagcaacatgcctctggcacccgggcacttttagggtcccttttctttcccccacacacaccccaggggggaggacaccattgtggggggcgggggcatgggggggagtgtcagccccgggtagacacagggtcgcaagggtacaaggggggaggggggcggggagaggggcagctgcttttctggcaggggcatgggtgccaggtacagcggagagctggctgcgcatgctgagagcctggggacccacccccaacgctggccgggacttaagtctctctcttctctctctctgtatatatataaagagtccctctatacgtatttatctgtgggtacacgtgcgtgtgtctgtgcggtgaacgtgtgggctgcatggatgtgtgttgggggcctgcccacttgcgcgtgctggggcagagcgagtgtgtgccctggcaatgtcaggtttgttgtttgtctcttgacttgtacctctcaagccccnnnnnnnnnnnnnnnnnnnnnnnnnnnnnnnnnnnnnnnnnnnnnnnnnnnnnnnnnnnnaaatcatttctcgtg

SEQ ID NO: 893 - DNA, 2854 bp, Mesocricetus auratus
  misc_feature (194)..(213): n is a, c, g, or t
  misc_feature (1602)..(1619): n is a, c, g, or t
  misc_feature (2817)..(2835): n is a, c, g, or t
gaattcccccggatcctgctgcagtgttcgcggcggtaaccttgaactttcccagcgcggtgacacattctcctcgctttccccaccgcccggcctcctgcgccccccaccccgcctttttttaaaaaaagcatttcatcacccagcaccaccccaatccaacctataccgaaccctcgagcaccccaagcccnnnnnnnnnnnnnnnnnnnntgcaaaacagaaaacaaatcccccaaaccgggcgaccagcagcctacaccggcggcggccttggagagctcggccggcgcgcgcggaccgcaagagggttaaaactgtagattggatttcaccccgggaaatctagcacgccgagtgaacttgaatctttggctatttaaggaggactgggtttgttgcgaagttgcggtgatccggcgcagagccccgtcctgattgatcgcatcgccgctgggctcagatgactgtaaaatgaatagatgaaatcctcgcttctcgaagattttcttgggcatctccgggaaagtgcgttttaaggcgaagtcatgatgtattctcccatctgtctcactcaggatgaattccacccatttattgaggcgcttcttccacacgtccgtgcaatcgcctacacttggttcaacctgcaggctcgaaaacgcaagtactttaaaaagcacgagaaacgaatgtccaaggatgaggaaagagcggtcaaagatgagctgctcagcgaaaagcccgaaatcaagcagaagtgggcatccaggctcctggccaaactgcgcaaagacatccgccaggagtaccgggaggactttgtgctcaccgtgactggcaagaagcacccgtgctgtgtcttatccaacccagaccagaagggtaagattaggaggatcgactgcctgcggcaggcagacaaagtctggcgtctggatctagtcatggtgatcctgttcaaaggcatccctttggagagtaccgatggcgagcggctcatgaagtccccacactgcacaaacccagcactttgtgttcagccacaccatatcacagtatcagttaaggagcttgacttgtttttggcatactacgtgcaggagcaagattctggacaatcaggaagtccaagccacaatgatcctgccaagaatcctccaggataccttgaggacagttttgtaaaatccggagtcttcaatgtatcagaacttgtgagggtatccagaacacccataacccagggaactggagtcaacttcccaattggagaaatacccagccagccatactatcatgacatgaattctggtgtgaacctgcagaggtcgctgtcttctccaccaagcagcaaaagacccaaaactatatccatagatgaaaatatggagccaagtcctacaggagacttttacccctctccaaattcaccagctgctggaagtcgaacatggcatgaaagagatcaagatatgtcttctccaactaccatgaagaagcccgagaagccactatttagctctacatctccacaggattcttccccaagattgagcactttcccccagcaccaccatcccggaatacctggagtcgcannnnnnnnnnnnnnnnnncgaactccacctccaccctcaccgttgccatttccaacgcaagctatccttcctccagccccatcaagctacttttctcatccaacaatcagatatcctccccatctgaatcctcaggatactctgaagaactatgtcccttcttatgacccatccagtcctcaaaccagccagcctaacagcagtggtcaagtggtagggaaagtgcctggccatttcactcctgtcttggcaccctctccccatcccagtgcagtgcgacctgtgaccctgaccatgacagacactaaacccatcactacatccactgaagcctacacagcctcaggtacatctcaagccagtcgatatgtgggactaaacccaagagacccatccttcctgcatcagcaacagctgaggatttgtgactggaccatgaatcaaaacggcaggcatttataccccagtaccagtgaggatacattgggaattacttggcaaagtcctggtacctgggctagcttggttcctttccaagtgtcaaacaggacacccatcttaccggcaaatgtccaaaattatgggttgaacataattggagagcctttccttcaagcagagacaagcaactgaggggaaagaaaacacaacaatagtataagaaaattagggggaaaacactcaaagcaaaggaaaagaagactggacgaaagggagaaaggagagagactgaagaaagaagaccataagaccagcattgcagcactcacaatcactaattccctcaaggctgaaactataatgacacgaaagggttgatgatgtctcactgatgctagtctgcagcccctgcaacgtagcctttgttacatgaagtccgctgggaaatagatgttctttctctatgacaatatattttaactgactttctagatgccttaatatttgcatgataagctagttttcttggttagtattcttgttgtttacgcatggagtcactattcctggttatctcaccaacgaaggctaggaggcggcgtcacaggtgctggggacagagccatgagccagccattttgtgagcactctgatttcttaaagttaaaaaaatatatatataatatctcagtagcctttagttatccatacagatttattaaattttggcccttaacccagccttttccagtgtgtaacccagtttgaaattttnnnnnnnnnnnnnnnnnnntgaaaaataggaaaaaaaa

SEQ ID NO: 894 - DNA, 1816 bp, Mesocricetus auratus
  misc_feature (22)..(42): n is a, c, g, or t
  misc_feature (94)..(112): n is a, c, g, or t
cctttcacagcgcggcgcggcnnnnnnnnnnnnnnnnnnnnntggtggcgggcgagggcgaccggccgagcggcggcggcatggagtagacgcnnnnnnnnnnnnnnnnnnnacgccgagaggcagcggcgagcgcggcggcggcccggagcccgcggggccgagcctgtgagcgcggagcggcggtgggccgagcggggccgcgggccgggcgggcgccgcgcggcggaggccggagcagcggagccggagcccgagtgccagccagcgcgacgcccgcctgccgggcctgtcctcgccgcggccggcctccgcgctcgcgcccgggcgcccagcgatgtactccccgtactgcctcacccaggatgagttccacccgttcatcgaggcgctgctgcctcacgtccgagccttctcctacacctggttcaacctgcaggcgcggaagcgcaagtacttcaagaagcacgagaagcggatgtcaaaggatgaggagcgcgcggtgaaggacgagctgctgggcgagaagcctgagatcaagcagaagtgggcatcccggctgctggccaagctgcgcaaagacatccggcctgagttccgagaggacttcgtgctgaccatcaccggcaagaagcccccctgctgcgtgctctccaaccccgaccagaagggcaagatccggcggattgactgcctgcgccaggctgacaaggtgtggcggctggacctggtcatggtgattttgtttaaggggatccccttggaaagtactgacggggagcggctctacaagtcgccccagtgctcgaaccccggcctgtgcgtccagccacatcacattggagtcacaatcaaagaactggacctttatctggcttactttgtccacactccggaatccggacaatcagatagttcaaaccagcaaggagatgcggacatcaaaccactgcccaatggacacttaagtttccaggactgctttgtgacttccggggtctggaatgtgacagagctggtgagagtatcacagactcctgttgcaactgcatcagggcccaacttctcgctggcagacctggaaagccccagttactacaacataaaccaagtgaccctgggacggcggtccatcacctcccctccttccaccagcaccaccaagcgccccaagtccatcgatgacagcgagatggagagcccagttgatgacgtgttctatcctgggacaggccgctccccagcagctggcagcagccagtcgagtggatggcccaatgacgtggatgcaggccctgcttctctaaagaagtcaggaaaactggacttctgcagcgccctctcctctcagggcagctccccacgcatggctttcacccaccacccgctgcctgtgcttgctggagtcagaccagggagcccccgggccacagcatccgccctgcacttcccctccacgtccatcattcagcagtccagcccgtactttacacacccgaccatccgctaccaccaccaccacgggcaggactccctgaaggagtttgtgcagtttgtgtgctctgacggctcgggtcaggccactggacagcattcacaacgacaggcacctcctctgccagccggtttgtcggcatcggaccccgggacggcaactttctgaacatcccacagcagtctcagtcctggttcctctgattaagatcaacaaagaaacaacaaaatataaaaaaaaaaaaggactgttagtaaaaatatatcaaactgtttctttgtaaaattttatgtattgaggatataaataaatatctccttc

SEQ ID NO: 895 - DNA, 5000 bp, Cricetulus sp.
  misc_feature (1792)..(1809): n is a, c, g, or t
  misc_feature (4465)..(4492): n is a, c, g, or t
gaattcggcacgagcccgaccatcacatcattgagggcggtgagggggcacaggtacacagcaccagtccggttagtgtagccatcagccacagagaggtcccggggagcaccagccagaagcaggtagcgctgctgtcgctcggtttgccgatggagggcgaccgatgtagccgaaaaggctacccgggttcaccgcctccttcacctagctgggatccaaagagctaacaccgccaagggggcgcggctagcaccatctagggaaccgggtgccgggagtcgggcacggtgacctgtccacccgactagcgggagaatagatccacggaccgaatagatccacggacctggaaagaggattggagaagcgccaccccagagcagacgtgaagctgacccggactagggaaagaaattgcctaggactccgggctcagcggcgctgcgggcttgggtgtcctctggcggcgcctggagcaggtgaaccgttcgccacccccagtgccgagccctctcgtgttttcgcctggcccgggtgctcgcagccatgggcccaggcccccgctgcgcgcccggcgatcctggctggatgctcggagccctggccttgatggtggcggctagcggccggttcgccttcgccttcaacctggacacccgattcctggtggtgaaggaggcggtgaacccgggtagccttttcggctactcggtcgccctccatcggcaaaccgagcgacagcagcgctacctgcttctggctggtgctccccgggacctctctgtggctgatggctacactaaccggactggtgctgtgtacctgtgccccctcaccgccctcaaggacgattgtgaacggatggacatctccgagaaaagtgaccccgaccatcacatcattgaggacatgtggcttggggtgactgtggccagccagggccctgcaggcagagtcctggtctgtgcccatcgctacacccaggtgctatggtctgggatggaggaccagcgtcgtatggtgggcaagtgctatgtgcgaggcaatgacttgcagctggacccgggtgacgactggcagacctaccacaatgagatgtgcaacagcaacactgactacttgcagacgggcatgtgccagctgggcaccagcggtggcttcacacagaacactgtgtacttcggggcccctggcgcctacaactggaaaggaaacagctacatgattcagcggaaggactgggatttatccgaatatagctacaagggttcagaggaccaaggaaacctctatattgggtacacggtgcaggtaggcagtgccgtcctccatcccacatacatcactgttgtggcgggtgccccacggcaccaacatatgggcgctgtcttcttgctgagccaagagtcaggtggagacctgaagaggaagcaggtgctggagggcacgcaggtgggcgcttattttggcagcgccattgctctggcagacctgaacaatgatggatggcaggacctcctggtgggtgcaccctactactttgaacggaaagaggaggtagggggtgccgtctatgtcttcatgaaccaggcgggcacgtccttcccagatcaaccttccctcctgcttcatggccccagtcgctcagcctttggcatctctatagccagcatcggtgacatcaaccaggatggattccaggacatcgctgtgggagctccatttgagggcttgggcaaggtgtacatctaccacagcagctccgggggactcctcaggcagccccagnnnnnnnnnnnnnnnnnnaaactaggactgcctggcttgtccacctttggctactctctgagtggaaagatggatgtagatgacaactcctatccagacctgctagtaggaagcctgtcagaccacattgtgctgctgcgggcccgacccgtcatcaatattctccaaaggaccttggtggccaggccagctgtgttggacccctcgctttgtacacctacctcctgtgttcaggtggagctgtgctttgcttacaaccagagtgctgggaaccccagctacaggcggaacatcaccctggcttacaccctggaggccgaccgtgaccgccgcccacccaggctccgatttgcccgcagccagtcagctgtcttccatggtttcttatccatgccagagacgcattgccagactctagaattactgctgatggacaatgtccgtgataaactccgtcccatcgttattgccatgaactactccttacctttgcgcatgcccgatcgcctcaagctggggatgcggtctctggatgcctacccagttctcaaccaggcacaggctctagagaaccacactgaggtccacttccagaaagagtgcgggccagacaacaagtgcgacagcaacctgcagatgcgagcagccttcgtgtctgagcagctgcagcctctaagcaggctccagtacagcagagacactaagaagctgttcttgagcatcaatgtgaccaacacgccgagccgcgagcgcgctggggaagatgcccatgaggcactgctcaccttggaggtgccacctgctctgctcctgtcctcagtgcgcccatctgggacctgccaagctaatgagaccatcctgtgcgagctaggaaaccccttcaaacggaaccagaggatggagctgctcattgcctttgaggtcattggagtgactctgcacacaagggaccttaaggcacagctacagctatccacgtcaagtcaccaggacaacttgcagcccatgaccctgattttgcaggtggactacacgctccaggcctcactcagcttgatgacacatcggctgcagagcttctttggcgggacagtgatgggtgaggctggcatgaaaactgtggaggatgtgggaagtcccctgaaatatgaattccaggtgagcccagtgggagatgggctggcggccttgggcacactggtcctaggtctggagtggccctatgaagttaccaatggcaagtggctgctgtaccccacggaaatcatcatccatagcaatgagtcctggccctgccagccacctggaaaccttgtcaaccctctcaaccttatcctctctgaccctggagacaagccacattctccacagcgcaggcggagacaactggatcccgggggagaccagggctccccacctgtcacgctagctgctgccaaaaaagccaaatctgagactgtgttgacctgtgccagtggccgcgcccgctgtgtgtggctggagtgccccattcccgacacctcaaatgtcaccaatgtgaccgtgaaggcacgggtgtggaacagcaccttcattgaggactacagagactttgacagagtcagggtagatggctgggccactttgttcctgcgaaccagcatccctaccatcaacatggagaacaagaccacgtggttctcagtggacattgactcagagctggtggaggagctgcccgctgagattgagctgtggttggtgcttgtggccgtgagtgccgggctgctgctgctggggctcatcatcatcctgctgtggaagtgcggcttcttcaagcgagcccgcactcgtgccctgtatgaagctaagaggcagaaggctgagatgaagagccagccgtcagagacagaaaggctgaccgacgactactgaggggggccaccccccctgccccggcccacccggtgtgacttctttaagccgacccgctactaccggatcatgcccaagtaccatgcagtgcgtatccgggaggaggagcgctacccgcctccgggaagcaccctacccaccaagaagcactgggtcaccagctggcagattcgggaccgatactactgactccctccctgacatccctcccagcgctccctcctttcctatttatcataaattatgactctgacagtccaagggggccacatacttggctggcaccagcaggctcaggcatgtgcccctcttcagtgcaggcatgttttctggggccctagactcttcttcaagaccttgcagtgtggagcacagcacggccctgcacactggacacacacacagggcctgtgaagataccatggaggatgccatgtccaagcctctatctgtgccaaaaccaagccaaagcgcctctactgggagccacgaggaaaaggtccctgatgcggtgacctctctcttccacaccgatcccccatgagccattgtgcctggacggactttattgtccagaataaaactactgacgacaaggagacaatcagctgcaagtcctggcacccactggagagtagggccacaccagaggggatgttgttgtgacctgtatgctcagacccaaaagcaaagaactaaaaagcaagtccccagaatgagctttatgaatggatctccaaaaccttggctataggtggannnnnnnnnnnnnnnnnnnnnnnnnnnnaaagagaaaccatggacagcctggacagactgtgctggggctgacctggagcatggtggcatccttcagagagcagggtatcaatcctggcccagcagacactgggaggatgcagaggacatccttctgacccgtcctggcctcctcatcctgggcaaggcctggaagaccccacaagaccacgtgggggtgtaatacttgaatgtaaggcaggggagagcccaacccctgccccagctggccagacttactctgctcttttgaccacagagatggtattctgagctacctgtggctttctgagaaacctctccatgcctcacctgctccgctaggaactgcatccccattccagcagtggaggctgattcccgggtcctctccccgtccctacccacaggcaggcccactccccagctctgccccttcacggtactatagcagcttcctaccctgtgccttctttgtgtatgggcttctcactaaaataaataaacggttcccagtt

SEQ ID NO: 896 - DNA, 808 bp, Cricetulus longicaudatus
  misc_feature (67)..(67): n is a, c, g, or t
  misc_feature (210)..(211): n is a, c, g, or t
  misc_feature (510)..(532): n is a, c, g, or t
acaggaattctggcgtgcagtgggcgactcagaaacgcccaaaggtgctcccccgagacaagcggtnggactaccatggaaatgccaggacctcagcctctgggaagcgttaggaggttaaaagagatgagatcccttctaaagggctggagaagatgtcagtccaggtaggactaatggaaactttatcgcggttccaggggcctcggnncgactgagctgggaggggccgggaagctgggagtctggatggaggacgaagttggaggtgatgggaggtgggtgggcagaccgcagctcctgggcagacaagttcaggaaggacagccgttggggccgttggatactgggagctggcgctccgccctcttccctctcatccccccacccgcgcctcccaccaccgtcggcggcccctgcgcgtgcgcgcgcgcagacaccggttgccaaacattgcatcatccccgccccccgtcatccctccctcgccgcactctccttcgcccgccnnnnnnnnnnnnnnnnnnnnnnngcgcatgactcactcacctcctccgcggagcctcgtgacccaaagccacttccgggtccaagacaacgtagctctccagccagagggcggggcggaggcgggggccgagggggctcctgagtggcggatgtaggggtggggcggagtcagtgccagcgtgccgctttctgattggcaggctcctgggtcccgccccccaaaagaggggacgggcccgcataaaatatcttctctcggcgctgcagaggtcagtagcctgagtctcacacttcggtc

SEQ ID NO: 897 - DNA, 351 bp, Mesocricetus auratus
  misc_feature (330)..(349): n is a, c, g, or t
tcgaggcttggctgcgatgtggttgggtgtggccgcccccgcccctggctttcccagtttccacttggcttgaacgtactactgcttcagattgcaggaggagatgctccagagagaggaagcggagagcaccctgcagtccttcagacaggtttgtagccagcagcagccccacccacccaaaccactagcagttctaaaagttacttcgcccaggatttaaaaggtgcaaaacttcaagtcttcctgtaaagccccctggtggcagaaagtccacagatggaaaaactccactatttggatcaatccttgcaacatgaagtttttcgnnnnnnnnnnnnnnnnnnnngg

SEQ ID NO: 898 - DNA, 701 bp, Mesocricetus auratus
  misc_feature (34)..(79): n is a, c, g, or t
gatctgactgccttcttctggctttcatggtcannnnnnnnnnnnnnnnnnnnnnnnnnnnnnnnnnnnnnnnnnnnnnagtgcacttaaatacgtgcaggcaaaatagccacataaaatagaatgaaaaataattagtataaatagataagataaagaatagactttagtaccgccacatcatcttttctctctttaaaacaggatgttgacaatgcctctctggcacgcctcgaccttgaacgtaaagtggaatccttgcaagaagagattgcctttttgaagaaactgcatgatgaagtaagtgatgtcattactttagtaagcgaacaaggctaagctgcacccatattgtccacatctgacccctctctgtctgctttttcctcaggagatccaggagctacaggcccagattcaggagcaacatgtccagattgacgtggatgtttctaagcccgacctcactgctgccctgcgcgatgtccgccagcagtatgaaagtgtggctgccaagaacctccaggaggcggaggaatggtacaagtccaaggtatgaatgagcccaagggaatgataggatagcctcactctcaaacacctacctcaattcatcaataccccccagctctcctcagtagcagacttttgttgttacagtgtccttgtcactctcgatgcttcctgtagtatggcagaca

SEQ ID NO: 899 - DNA, 250 bp, Mesocricetus auratus
gatcactaagagagtgaaaagtcttggacatgagcaatctccctttctgatttcttcctgacagtttgccgacctctctgaagctgccaaccggaacaatgatgccctgcgccaggcaaagcaggagtcaaatgagtaccggagacaggtgcagtcactcacctgcgaagtggatgcacttaaaggaactgtgagtaccacccagcagcaaaggcagtgaatggtgagctcaggcgctctggtgaccagg

SEQ ID NO: 900 - DNA, 846 bp, Mesocricetus auratus
catctcaacaaaacagacatgggactcagcgcctaatgttctctgtttgaagctagtaggcacctgctattaagagaactagtgcacatggtttgtaaatgattctggggacaactggggttggcaaatcacatcagaagcccttctcccttcccacagaatgagtctctggaacgccagatgcgtgagatggaagagaattttgcccttgaagctgctaactaccaggacactattggccgcctgcaggatgagattcagaacatgaaggaagagatggctcgtcaccttcgtgaataccaagacctgctcaatgtcaagatggctcttgacattgagattgccacctacaggaagctactggaaggcgaggagagcaggtaggaaaggcagacttgtgcatgggaattaagtcatcaacagtctcttcaggtgcatctcatttaaccttgagactgtttccacaaggtatctgccctttccatagatgggaaacttaaggttgaaaaagaataactgtctgtggtcagagctaattaacagcagagctggtgttgaacccactaccatgccaaagtcaatactttcctctttgtaattcctctgattcatgcccctgtgaagaaaaatgcttgcagtattcaaaatgtactaatgagaccaactgtgggtagatgtttctgaatcagatctctaataatcacagatttcctagtggatgaaaattcaagtgtgtggacttgtttcttcttgtagaagtgcttcattaaaaaaatgtttctttgcttttttataggatttctctgcctcttcccaacttttcttccctgaacctgagaggtaagc

SEQ ID NO: 901 - DNA, 402 bp, Mesocricetus auratus
aagttaagtgtggattcagattgcttcttgctaatgatgtatacagtgaactactatctcagcctgagtgaagggggccttaggtactgtgtcttcaaacagatggtgctttgaaagattatgtatgagtaacatttaaacatctgcaaatataaactcataatgctttggacaaaatgattgcatttaaaaatttttatttttacttgcttttttaactcagaaactaatctggagtcactccctctggttgacacccactcaaaaagaacactcctgattaagacagtggaaaccagggatggacaggttggtatcttttagacaaaatatgtaaagggtaaaagaaaggataatgaataaatatagagccatttcaaatatgcctcggtcccctttaaa

SEQ ID NO: 902 - DNA, 640 bp, Mesocricetus auratus
ctgcaggagaaggccaccttgcctatgcctctccctataacccttgctgtgaagagtcaacctgcttgataaattatatctatttacaggtgtgtctccttacctgatttgacttatttcctttttgagcaggtgatcaatgaaacctctcagcatcatgatgaccttgaataaaaattgcacatactctgtgcaacaacgcagtaccagcaagaagaaaaaaagaaattcgtatcttaaggaaacagctttcaagtgcctttactgcagtttttcaggagcgcaagatagatttgggatagaaataagctctagtttctaacaactgacaccctaaaagatttagaaaaggtttacaacacaatctagtttacgaagaaatcttgtgctagaatacttttcaaagtatttttgaataccattaaaactgctttttcccccagtaattacctgaccaacttgttactgcttcaataaatcttcagaaatattacttggatgtgttattttataatatctaaacaaatctctttaattctattggctaatttactgagatcatacttgggttttaagttataggttcaatttgtttatgcttgcaatacagtttttaagttagccttttaaaagagagatc

SEQ ID NO: 903 - DNA, 1574 bp, Mesocricetus auratus
  misc_feature (228)..(244): n is a, c, g, or t
cgtgcccgtgtcgacgtggagcgcgacaacttgatcgacgacctccagaggctcaaggccaagctacaggaggaaatccaactgagagaagaagcagagaacaacctggctgccttccgagcggacgtagatgcagccactctggctcgcatcgacctagagcgcagaatcgaatcgctcaacgaggaaatcgcattcctgaagaaagtgcacgaagaggagatccgnnnnnnnnnnnnnnnnnttcaggaacagcaggtccaggtggagatggacatgtccaagccagacctcacagcggccctcagggacatccgggctcagtacgagaccattgcggctaagaacatctctgaagctgaggagtggtacaagtccaaggtttcagacttgacccaggcagccaataagaacaatgatgccctgcgccaggccaagcaggagatgatggagtaccgacaccagatccagtcctacacctgcgagattgatgccctcaagggcaccaatgactccctgatgaggcagatgagagagctggaggatcgctttgccagcgaggccagtggctatcaggataacattgcacgcctggaggaggagatccggcacctgaaggatgagatggcccgccacctgcgggagtaccaagacctgctcaatgtgaagatggccttggatgtggagattgccacctaccgcaagctgctggagggcgaggagagccggatcaaccttcccatccagaccttctctgctctcaacttccgagaaaccagccctgaacaaaggggttctgaagtccacaccaaaaagacggtgatgatcaagaccatcgagacccgggatggagaggtcgtcagcgaggccacacagcaacaacacgaggtgctctaagccagacactgtcctggtccccgtggtcactgcctcctgaagccagcctcttccactctcggatgtcacacccagccactttccttcactcacagaatctgacccttcctcaccgatcacccctttgtggtcttcatgctgcccaggaaacaccccagcacctctgcagaccttaccatgagtcctggctgtcggcagtcgcaagcctggctcttcagatagaacctagttcaagtcatggccctttccctcccacctttgtaacctcaggctctacgctttggctttggagatggtaccagagaaggtgttgggatctgtagggtcaggacagagctttatagacaccctcacattcgacccccagcctgggtcagagacagagtgaagcctctcagctgaggtgggggaggggctgaaaaaatgtccttgcgtcccctctctttcccatcccagcccaggatgggttagaaaagctggggctgtaagagggaacctgaaggtgctggatgtgggagcaggagattcagaaggagagcgggtgggtgagaagctggagggaaagaagagagaggcagagagtgggcccaggctggtgggagggccccacctctcacgcctgcccctcccactgcaggggccctggacagaaacaataaagagccaagcacaaacct

SEQ ID NO: 904 - DNA, 280 bp, Mesocricetus auratus
ttatggcaccgatgataactcaaagtgtgatatgggaagaagggttattgtaaaaagagctttctaaaatagtattttccttgtattaaatggaacttgtcttgttttttttcccccagtgaagctttgccctttttcctgcttttgattgacctttctagagcgagtgcactagcaaagtttgccctaagttcaaactctcaggtgagtcttctttaaaagcctgtagtgtgacattattcctctatatctgtttgcattcttaaaatgagttaatgag

SEQ ID NO: 905 - DNA, 166 bp, Mesocricetus auratus
tgtttggtttgtgcttcaggatgaagtaagggaaaatatagctcgcggaatggcaattctgggccccacattcacccttgatgctcttgtggaatgtcttgtaattggagttggcaccatgtcaggtttgtaaacaatttctattacaactaaggaggtcattaaa

SEQ ID NO: 906 - DNA, 437 bp, Cricetulus sp.
gtatgtcattgctctctatccaggggtgcgtcagcttgaaatcatgtgctgctttggctgcatgtctgtgcttgccaactacttcgtgttcatgacatttttcccagcgtgtgtgtccctggtccttgaggtaagaatggttttcctggtggcattagttaagagtatttctccttctgtcacttcaactaaatcagctgtgtatctcctaatgcattgctgacttactttgtagctttctcgggaaagtcgagagggtcgtccaatttggcagcttagccattttgcccgagttttggaagaagaagagaataaaccaaaccctgtaacccaaagggtcaagatgattatggtaatgacatttttcttgtccagtatttgtaatttcaatgtttcttatgctttgggtatttggagactttctgtgtttttagttt

SEQ ID NO: 907 - DNA, 970 bp, Cricetulus sp.
  misc_feature (863)..(877): n is a, c, g, or t
gtttgaatggtgatgggaacactgcttttattagccacataacaaactgatcatgataaggtgaggccaaggaagatagtgtctggtgatgcacttgagaggtgagaaggcagagggtgcacaattaattgaaaatttgtttcttcagtctttaggtttggttcttgttcatgctcacagtcgatggatagctgatccttcccctcagaatagcacaacagaacattctaaagtctccttgggactggatgaagatgtgtccaagagaattgaaccaagtgtttctctctggcagttttatctctccaagtaagttgactgaaccccacagtacgctgcactcttacatggttgcgctgtgacatttctatttctgatctggcctgttaattgttaatctgtttactctcacctaggatgatcagcatggacattgaacaagtggttaccctgagcttagcttttctgttggctgtcaagtacattttctttgaacaagcagagacagagtccacactgtctttaaaaaatcctatcacgtctcctgtcgtgaccccaaagaaagctccagacaactgttgtagacgggagcctctgcttgtgagaaggagcgagaagctttcatcggttgaggaggagcctggggtgagccaagatagaaaaggtactttgctgttctcttggtttcagttatcctgtctgagggtgcaccctgaagctgagttcgtttcaaggtgatgttgtctttttgcctctcacacagttgaggttataaaaccattagtggtggaaactgagagtgcaagcagagctacatttgtgcttggcgcctctgggaccagccctccagtggcagcgaggannnnnnnnnnnnnnnttgaactccccagtgagcctcggcctaatgaagaatgtctgcagatactggagagtgccgaggtgagggcgagggtgtgcactcacacttggg

SEQ ID NO: 908 - DNA, 416 bp, Mesocricetus auratus
atcacctaggagctgtgttgtttttgacttgtgaattggagttgttgactctcctgtcatctccttccctctttctcatttcttcagaaaggtgcaaagttccttagcgatgcagagatcatccagttggtcaatgccaagcacatcccagcctacaaattggaaaccttaatggaaactcatgaacgtggtgtatctattcgccggcagctcctctccacaaagcttccagagccttcttctctgcagtacctgccttacagagattataattattccctggtatgttatttgattaattaaggaggacttgctttgtagcttgaccctccactgctactttttaaatgtttttcatgtttttaaagtcatcgctgtaagagtccagcaggttaaagtttttgtttgttttccag

SEQ ID NO: 909 - DNA, 394 bp, Cricetulus sp.
ggctgcagggcaataggtgtaagttggactttgtctactttcaagtataagacaatctggacagggtaaggagatgaagatagatttggagacaatcaaaagaggctgaagtgttttctggattaatatgttcccattcttctgcttagcttggtggaggtgccagcagccgggtccttgcagatgggatgacccggggcccagtggtgcgtcttcctcgtgcttgtgattctgcagaagtgaaggcctggcttgaaacacccgaagggtttgcggtgataaaggacgccttcgatagcactagcaggtgtggaaattatgcttgttttctgtcatagctaaagctattgttgatagagtgcctcttataataactaatgtagcactgtcctgt

SEQ ID NO: 910 - DNA, 574 bp, Mesocricetus auratus
  misc_feature (2)..(17): n is a, c, g, or t
  misc_feature (46)..(64): n is a, c, g, or t
  misc_feature (466)..(530): n is a, c, g, or t
annnnnnnnnnnnnnnngagctagttccaggacaacctccaaagcnnnnnnnnnnnnnnnnnnngaaaaaccaaaaaatgaaatttctcatcttggattaaaataagaaccgtgtgtttacagatttgcacgtctacagaagcttcatgtgaccatggcagggcgcaacctgtacatccgtttccagtccaagacaggggatgccatggggatgaacatgatttccaaggtaagtgtagatctactgtatctgaaaggatggacacacccagaactcattgcttggtgcaggttggccttgaactcatggtgatgcttgtgcctctgctttcttgagtgctgggattacaactgtgcactactgtacccagccatattttttgttgatacactgtctatatattacatgcttaatggattaattgcttttacatgtttattaagccaggtgttggtgcgcacgcgnnnnnnnnnnnnnnnnnnnnnnnnnnnnnnnnnnnnnnnnnnnnnnnnnnnnnnnnnnnnnnnnnccagagtcgagtgccaggataggctccaaagcttcacagagaaa

SEQ ID NO: 911 - DNA, 270 bp, Cricetulus sp.
atccatcacacattttgtttgttttacttcttactagggcactgagaaagcacttctgaagcttcaggagttctttcctgaaatgcagattctggcagttagtggtaactactgcactgacaagaaacctgccgccataaactggatcgagggaagaggaaagacagttgtgtgtgaagctgttattccagccaaggtggtgagagaagtaagtggtggatgaatgtctatcctactttaaaggcttagtatctctaattgggctgggac

SEQ ID NO: 912 - DNA, 430 bp, Cricetulus sp.
  misc_feature (310)..(324): n is a, c, g, or t
atgctttccattaaaatggttgctttctttttgatgcccatctacatgtggcatttttggggcagttaaatgggggtcacatctacacccttgcttcctagaggtaaatgtgagtgtgtcttgcttgattcccctgggggagtatgtaaaatgtgcacactgtgctctaggtattaaagacaactacggaagctatgattgacgtaaacattaacaagaatcttgtgggttctgccatggctgggagcataggaggctacaatgcccatgcagcaaacatcgtcactgctatctacattgcatgtggccnnnnnnnnnnnnnnnttcctgttgtgtggtatttggattgtgttctgacaaataaagcttgcttagagtcagaaggcagagctagctactagctaaccgtagaggtttggaggattgtttt

SEQ ID NO: 913 - DNA, 369 bp, Mesocricetus auratus
tatttgactcctgctgattttattgttaccactttgctttctgctctgttggaagtgaaagtgaaagaactgtactgtatttttccttttctacttccaggatgcagcacagaatgtggggagttcaaactgtattactttaatggaagcaagtggtcccacgaatgaagacttgtatatcagctgcaccatgccatctatagagataggaactgtgggtggtgggaccaacctcctaccacagcaggcctgtctgcaggtatgtgtcttacacacaacaaaatggcctcaggcttcattgttctggtttattttctctttcttactgactaaaacacacttgggaagggagggcttatttcaactttt

SEQ ID NO: 914 - DNA, 144 bp, Mesocricetus auratus
tacatttttcaggacggtatgctctggtagttgcaggagatattgctatatatgccacaggaaatgccagacctacaggtggagttggagcagtggctctgctgattgggccaaatgcgcctttaatttttgaccgaggtgagt

SEQ ID NO: 915 - DNA, 183 bp, Mesocricetus auratus
tggttgtaacaggacttcgtgggacacacatgcagcatgcctatgacttttacaagcctgacatgctctctgaataccctatagtagatgggaaactctccatccagtgctacctcagtgcattggaccgctgctattccgtctaccgcaagaagatccgtgcccagtggcagaaaggtgggc

SEQ ID NO: 916 - DNA, 184 bp, Mesocricetus auratus
tcttctcttcagagggaaatgataacgattttaccctgaatgattttggcttcatgatctcccactcaccatactgtaagctggtgcagaagtctctagctcggatgtttctgaatgactttctcaatgatcagaacagagataaaaacagcatctacagtggcctggaggcctttgggtaaga

SEQ ID NO: 917 - DNA, 189 bp, Mesocricetus auratus
atactttttcagggatgttaagttagaagatacttactttgacagagatgtggaaaaggcatttatgaaggctagttctgagctctttaaccagaaaacaaaggcatctttgcttgtatcaaatcagaatggaaatatgtacacgtcttctgtatacggttcccttgcttctgttctggcacagtaagt

SEQ ID NO: 918 - DNA, 125 bp, Mesocricetus auratus
tcccttacacaggtactcgcctcagcagttggcagggaaaaggatcggagtgttctcttatgggtctggcttggctgccactctgtactcccttaaagtcacacaagatgccacaccaggtaagt

SEQ ID NO: 919 - DNA, 144 bp, Mesocricetus auratus
ttgctgttttaggatctgctcttgacaaagtgacagcaagtttatgtgatcttaaatcaaggcttgactcaagaacatgtgtggcgccagatgtctttgctgaaaacatgaagctcagggaggacacacatcacttaggtaaaa

SEQ ID NO: 920 - DNA, 182 bp, Mesocricetus auratus
ctttcccttcagccaactacattccccagtgttcaatagattcactctttgaaggaacatggtacctagttagagtggatgaaaagcacagaagaacttatgctcggcgcccctccactaatgaccacaatttgggtgatggagtgggacttgtgcattcaaacacagcaacagaggtcagt

SEQ ID NO: 921 - DNA, 1733 bp, Mesocricetus auratus
  misc_feature (328)..(345): n is a, c, g, or t
  misc_feature (474)..(493): n is a, c, g, or t
ttttcgttttagcatattccaagccctgctaagaaagtgccaagactccctgctaccgcagcagaatcggaatcagcagttattagtaacggtgaacactaagagctttgtggggtgtaaagcttcacagtggcttgaggctggggtggggtatggaaacagttggaggattgtatgtctggggacaattttaaagagtacatgttgcttaaatgtaatgtaactgaatgtaactgacacggagcctagaaaactattatgttcttggaaaagtctttgctgaacttgctaacacgcttcctgttgtgatctggccaatggttaatgnnnnnnnnnnnnnnnnnngggctctgtaaaactttatacctctctggacgcctatatgcatgcagtttagtttccaaacatggcatgaaccgagtgcttctgccaacaataagcggaggtactagtgtccaattttaaaaattgggnnnnnnnnnnnnnnnnnnnngtgtaagaattttgtactttaacaaatgaaggagtgcttgtagcttttgaaaaacttttctatgttggggattgtggaatttaaatgtcacacacaaatcctgcttgaaaatggcaaggcaaatatctttttcgaagacttgtaaatcctgaagagagaggtacggttctaggatcaaccatcggtgtgagaaaggttagccgtgaccagagagatgatcagagagatgctggctctgagcaggcctctgccacagcaaatggttcacgtggcgctgtaagcgcagctgggaactggtttcagccagttcaagtggctagtctctgcagcactcagacgctggtgtgagggaacttgttgccatcctggcaccctccttgcaaggctaaaatgtaatgtaggaaggatggggcagtgcattattaggtcacagtgttacaaacccagttcataggctggcagcttaaatccaccagacacctttttctttgtggtatgtgtatttttgtgttttgtttgtttttgtatctgttcaatgaaaataaatatatataacccacattttcacagagtgaaaatttcacatagtctgacaagccaaaaggaatattcatttcaagatctagaagtagaattcataacattttcccccttgactttcacttttaaaacaacaagatctaccacatgagatgagtaagaaaattcactaggagttctctgggtggttttggtgctgaacaatgacatgaccctcacagactgtaaaatagagatagttggaactaatgtacagaactaaatttttttaactttatttgctgttccattctgtgaagtttcagttatctaaactaaacacataaatgtgtaaaagtttcagattgcaaggtaatatgtaatgtagcatttgtaagatattcttgtcaatattaaccagtagaattttgatttgtacagttttaattggttaaaatggtttcattttaacatccactgctatagatgaataatgtaagttcagatttaaagaatggtggggaaatggtgcatgtaattcttttgcaagtattgagagttctgtatgttttgaaaagagtaatgttctggtgccaagaagtggattttctcagagtccattgccagcagtgggcaagcctggcgatcctggcacggagcgttaaccatacaccttactaatagcaaggtggataacttttaaataaagttttagacaaat

SEQ ID NO: 922 - DNA, 124 bp, Cricetulus griseus
  misc_feature (94)..(108): n is a, c, g, or t
ctttcttcttcccaggaacaccatggacgccctgccagcctgcctgctccgggatgtggcccaggaggccctgggtgcggctgtcattggcatnnnnnnnnnnnnnnntgtaagttggcttgaa

SEQ ID NO: 923 - DNA, 120 bp, Cricetulus griseus
caccaactttcccagttccctgacatcgtggaattctgtgaagtgatggccaatgcaggcaagacagtgatcgtggcagcattagacggaactttccagagaaaggtaaggtgtctcacc

SEQ ID NO: 924 - DNA, 150 bp, Cricetulus griseus
cccctgtatatataggctttcggcagcatcttgaacctggtgcccctggctgagagtgtggtgaagctgactgccgtgtgtatggagtgcttccgagaagccgcctacaccaagaggctgggcctggagaaggaggtaccttcttgtgct

SEQ ID NO: 925 - DNA, 695 bp, Cricetulus griseus
tggccctgtccacaggtggaggtgattggtggagcagacaagtaccactcggtgtgccgcgtgtgttactttaagaagtcctcggtacagcctgctgggccagacaacaaagagaactgcccggtgctgggacagcctggagaggcctcagctgtcaggaagctcttcgcccctcagcaagtcctacagcacaactccaccaactgagaggacctggggcctgccagctcctaccccaggttggattctcagagagcagaggacgggctgggactgccgtgcctgatggacaatgtgccctggagaggctcacccgcttctcacagccttttttagttcccttcttggttgctgagatgctttagcccagactagagccagcgcctgcctggtggttagggtttgacatccagccagaggtaggacaaagccacagggtgttgtgacacagaggtgctggcttcttccttcttggtggcttccagtctcaagggccccgcccccgagcaaggcttcacaaccctcactttgtgctgaagcttgacccacaatggcccctagcggtgtctttacaaagtggtgctgttcttgccctactcagagccccaagactcaggactcttggtgagagcctgtgcttcttgtgctatagtgtaaaatgaataattaataatattaaagtttctacttgagag

SEQ ID NO: 926 - DNA, 429 bp, Cricetulus griseus
cagtctatatccttccatcattcaggaatttaacatttgttttacaacagtacaacgagttgctttagaggtgcagaattcaactacagaggatgaggaacaggaacagatccctgagttgccagatccaaacttagatatgggcattttgcccagagagatccggaaattggtagagcggagaaaacaagtcaaacagctcatgaaacaacaagatttaaatccggaccttgttcttcagtatgacatccgacagaaggctttgaagctcacagcaaacagtatgtacggttgcctgggattttcctacagcagattttatgccaaaccactggctgccttggtgacctacaaaggaagggagattctgatgcatacaaaagagatggtacagaagatgaatcttgaagttatttatggagatacaga

SEQ ID NO: 927 - DNA, 1380 bp, Cricetulus griseus
tgaactgtatttcaaatgtcctgggaggaacatgacatagatttgatagctaaaagttcaaaatattgcatattcttttaataccacttttacaccggaatgatccatttatctactggaaatagtcctctttatttctgttctattttattattttttaaataaaagagataggccgatatacctgagaaactatgaaatatactaaagaaagctcctgcacaggggttctcgtcaaggaagggaaatttattgacgaggcagggtctgcattgtctaattggctattagatgcaatgcatggaatgtgtcctttaagtttgccacgagcagaaggccaagtgcagatctcatacaccagctctatatattgacgcttgggtgactgtgtagagaagcgacccttacaagtaagtatctgatgatggcggggatgtgagttcatcaactcgacctttgtgagaggaaacaagactgcatgcacatttgtttaacatttgtctagaaatacaacctgtttcgcaattgctcctgcaataatccatgcatgagtcaagctgggccgggagctggttaacctcttggtcaagctgactgactgggtgggactatgcctggcgtaggttgagcacaccagtgtagtccactgtcctcagaaagcccaggtgcagtcaagcagcggttccaggagcctgctcccatctccccaggcccgctaaactcggaatcgcttcttcccaattctacgactgggcggactttgcgaaggaaagcggaggtagagacgtgggaagtgggcttttcccaggaggggtccgctactcgggatgcccgagcctgatcggggggccagggcctcggaaatctgtggggaccaagtggacagcctaggtccctcccggagcccccgaaccggtgttgtcggcggctccagcccccgcggtggatcccgagccccgagccgcgggcctctggagcagcacgctggggccaagtggaacccgcagcggcggcgcagggcggggcagagcagcaggatccagagcccagctcaggtccacgtgggtgacccaggagctccgggatccccggggtgagttctctccaggcctgaccctgtgagcaccagggcgggactcctcacgctgggctctgcggggcagtaaggtcagcctagactccggccctgcggccatgcatttggctgacgactgtggtttctccccaggtcgtgatggagtttgaagaggactttagcggaagaaaagacaagaacttcttgaagatgggcagaaagaggtagggggatcgtttcactttcacacttaacgggtcttgtagtttgtagcctccagcgctgcactaaatgacgagtgtttg

SEQ ID NO: 928 - DNA, 1377 bp, Cricetulus griseus
gaattccagaaaatgtaagaacttcatatgcttcagggaaaaaaacaaggatgctgattccagaggtaaaagttgaaaatactatgtaccttttaaaatatcatttctcctctgaaatgccccattgtataggacgatcatccaagccaaaaaaacccaaaatgtatatatgtatatgctttaggaaaatgccaaacacactgaagaaaggcttccgcagaaaatttctaccagccttaaaaacataaaaagaaagcaatgctgtcagaagggggctttatggctttatgtcagcaggtccctgattgcttgctttattaactctagtaggtcagctcgctcaggtaaagtatccttctaggtatggctcaccagtgatccagctgtgcactatctaggcatatacacttctatatggagactaacctgaacgtgtaaagacaggtcctataatagtaagtgtctcacggaggattccagccacttctccaaagctcggggaagccaggaagcgcctccggtttggtttcgcaacctcgcctgcgggctcgcccaatcccgcccaccaggctggttggccacggggcgcgggggcggcggctggcgacgactttagtttccgagccttgggctccttccgcagcggctctagaagctcggccgaggctgaggccgctgcccctatctccccaggctccgctaaactcggaatcgctcttcccaatcccacgactgggcggactttgcgaaggaaagcggaggtagggatgcggggagtgagcttttcccaggaggggtctgctgctcgggatgtctgagcctggtcggggggccggggcctcggaagtccgtggggaccaagtggtcactgccccccaggtgctcccggagcccccgagccggtgttgtcggcggcgccagccccgcgcggtggatccgctgccccagctccgagccgccggccggtggagcagcacgctggggccgagcgacccggaggggcggggcggggcggggcagcaggatccagagcccagctcaggtccacgtgggtgacccgggaaacctccgggatccccggggtgagttccctccaggcccggccctgagagcatcagggcgggagtcctcaccgctgggctccgcggggcagtgaggtcagcctagactccgtccctgcggccatgcatttggctgatgactgtggtttctccccaggtcgtgatggagtttgaagaggactttagcgcaagagcagacaagggacttcttgaagatgggcagaaagaggtagggggatcgtttcactttcacacctaacaggtcttgtagtttgtagcctccctccagcgctgcactaaatgagtggttgttatc

SEQ ID NO: 929 - DNA, 10614 bp, Cricetulus griseus
  misc_feature (3259)..(3275): n is a, c, g, or t
  misc_feature (5144)..(5158): n is a, c, g, or t
  misc_feature (7997)..(8012): n is a, c, g, or t
  misc_feature (9210)..(9246): n is a, c, g, or t
  misc_feature (9309)..(9327): n is a, c, g, or t
  misc_feature (9601)..(9620): n is a, c, g, or t
  misc_feature (9622)..(9645): n is a, c, g, or t
gaattctaaacacatattaatatcaatgacttatatgtatgtatatatatatctaatatagataatgtatctagggatatatatatatgtatattttatctttcttccttttattctttcttctcccctctctgttcaacaccgaggaatagaatgcactgtggtgtcatactctgcttactcagcctcttattgacctctgagtcaatacagtgctgatgtacatctccaaatgccctcttttctcctaaccacagacttttacattcagtaatcaatttgacattgtcccatgatttacaaatgttcacaatagtatattgacctattgctgccttccaaggtcctctcccactcccaaacatcccaatatgaaccagcttttgcctatcttcttgtctcttactttaactcaatgtcattccctattcactttgctgtaatagatgctaccttgattctggtttttagcaccttaatttcgctctctgctcaggaactctgcctttgctgttccctcttctgggaacgcttttcctttgctgttatatctcttcaaaacagcttctctattcaatatgctcaagctgccttcagccctcaacagctctccctacctcattctagtccctccactagaatagaatcttcatgagagtagcgaacttccctatcttgctagtacccaaaggcagaaaaatctttaaagagttcctgggacatagaaaaagtgctcaattaatatttgtattaaatagggacctcaggtgtaactccgtggtagagcgtttgccttagagaagtagggccatgggttcaaattccagcacagaacaaaaaattgtgctgaataaagtttgggaggatgtgtagcagtttatagtgcaagtggcataagcagtaaataatgaatttgtatccacttttctagcaagaagtattttattctttatttgaaggataacaattggtaaagactgcattctcaaaataaactatggcttatggctacgtggaagatgagatagggagaaggtttttttttgatgatggcaaaataacatgtcatagtccacacgaaacacctgtgaagttgtaaacacacctagcaatcaaacaagaaaattgtcccaccctattatcattcttttggattggttgtggcatatttctggaaaatgatttaaattaattccttctaaaggtaacaacacaaacaaccactatcatgacgaaaagcttctgcctgtttcagtttacatcatgctcaatgtctacaacagacgtgctcatcttcagagtgtttacctctgctttttacacacattgaagcacaatgtgagctgctgtccctgggtctgaatgttatgtcagcacacaagggacagagcttcggcttatcaagtattgaagctctctgcttgttttggagcctcttctgatactatggacttagttcaaggctgggcaatactatttttttcttttttctaataggaggacaaatagttagttgtttgctttggtcatccaagttcaagttattggatcatggtcctatgtgtataaagagtctagtttgagcctttcaggggcagccttgctggctaagcacagactctcctcttgggagttttcctgctttgcaaaatgatgaccatctctttgatttgggggattgctatggtagtgtgctgttgtatatgggttatctttgacagaaggagaaggtatgtcttttagcttatttctagtgttttcactattatacagttccaaaaaaatactagtacattagtatttttatttaaaatttaaagccatgcttctttgactaaacctgacaagatgtagagtttccctttgaatatccacatacactgatggtaatgctgatcttgttaaacataactaaaaaaattataagtattgatgcatgtttgtgtgcacttctgtggagtacacctaagctgggaagggtgcatttggcaagggtgacgtttggaaaggatctttctctcacaataactggttatgcatatgctcttctgggttctctgttacatcaacattaaaatacaggaatacccttggcatatctttggcaaggtagactgtgtctgctgtcttagttttaataacttctttgccttttgagttatttgaatttatgcctgatcgtttccagttttagttgtcttaatgctaagaaaggacaaatcaattatatttagttattctaacaagagataactagtttacgttgaaaaataaattatcttataatttctaataaaaacatttaagagagttagaaatcagcgaattatagctgatgatctgccaatgtttacctcactcaacttcattttagatactttttcaagtgggattcctattctcttcaaatatccgcacagaattatagtccccttctttcagagtggggggaatcaaatgaaaggtttcatgtgtgctaggcaagagcaccaccgttgagccacacctccagaccccacaatgccaacatttttaaactatgtagagtttaaaaaactttagttctgtagccttttctattagctggtgtttcatgtcttcaaagaaaaggaaaactgaaacattttagacatatggacaaatgattccttgaacaagtctaagcactgatgatagcttcttttctacagtgagatcaagaatcttgttagccctgttgatacttgtagccctgtcacttggaaaagcaatcaattttatgatctagaaaatagagcttgcctaaagatcagagtgcagagctagtcacactagtcagccatacaggttaggcagtggtggcacatacctttaatccctgcagccactcaagttacccatagaagctgggtggtggtggtgcacacccttaatataaggtggagcacactttaatgtaaggtgggtagagtcaggagtgcagtgtattcagtctgcagtcacactgagaacaatatcaccccagtcttgttagaggtaagaactctctagtgattggctgctttgctcttctgatcttcagtttgaacttctgtctctgggtttttattattcgtgctgcagacatagacatagcaaacaatttaatgagtgattgatgaatgtagatatgtatgtacatattgtgctggatagactgtagatgggttggtggatgggttgatgagtgggtagatttagtaatcaccttcaccaatatcttagtaggctaaaaagcccnnnnnnnnnnnnnnnnngtggggtatccaacaaagaagtatctataaactgtagttatgtggtagaaataaggggtagaaaccagtaaaaattcggcttatgtacaaatgctaaacatgtaatttcctaaacctctcaatctgtctcacaggaaagcaggtgaacctcctttggagaatgggttgattccatacctgggctgtgctctgaaatttggctctaatcctcttgagttcctgagagcaaatcaaagaaagcacggtcatgtttttacctgcaaattaatggggaaatatgttcacttcatcacaaactccttgtcataccataaggtgttatgtcatggaaaatactttgattggaaaaaatttcattacactacttctgcaaaggtaactagtttttacagattttgcttgtttactagcctgtttatttattagtttatttagttgttccaatgttattagattgtaggataaagggaacataaaatcaggaagtctcttggtactaagcattaaaaagtcaaggtaaatgtgaatttgtgattgatgatgacatacacaaattaagcactttgtaagtactttctgagccagaagacactacaggaaggcacagactcataacatccatgctgccatctacacaacactcagagcactcaattaccacatcatgcacacgaactcgttcgttaagaagtcgacagtatatttaagcatcattcagatgttatcaagaatctctattctagagaaaacaacacttagctgaatttttacaagaaaatattagacatggtctctgtcttaagtagattaaagtctggctaaagtgcatctgcagagaacaaaaggtaaagataaaatcaatggcccattagtccagagaagcttacctgaaaatctgggatttaaacttgaccttaaaggaagagtatgtcttaagtttgactttgaaaaatgttatgaaattgtattgggaaggctagacagagaagtatgatatactttaatccatcttccagccatttcctaacacccaggtttagctgctccccctctgacgaatttcattttctaccaggcatttggacacagaagcattgacccaaatgatggaaataccacagaaaacataaacaacacttttaccaagaccctccagggagatgctttgcattcactctctgaagccatgatgcaaaaccttcaatttgttctgaggcctcctgatcttcctaaatcaaagagtgatgcctgggtcaccgaagggatgtatgccttctgctaccgagtgatgtttgaagctggatatctaactctgtttggcagggatacttcaaagccagacacacaaagagtgcttatcctgaacaaccttaacagcttcaagcaatttgatcaagtctttccggcgttggtggcaggcctccctattcacttgttcaaggcggcacataaggcccgggaacagctggctgagggcttgaagcatgagaacctctctgtgagggaccaggtctcggaactgatacgtctacgcatgtttctcaatgacactctctctacctttgatgacatggagaaggccaagacacacctcgctatcctctgggcctctcaggcaaacactattcctgcaaccttctggagcttatttcaaatgatcaggtggatagcaatttgagtgtttattcttcatagtgacagaaattaacaatttttaataaaccccccaaaagactagcagagctttctttgctgttggtcaagaatgtgatactcagtgcctgtgtttgacatatatatataacaaaagtagcattttgtaagaatatagtctcaccagaaagggatgtcccagaagccgcagaactnnnnnnnnnnnnnnnttgtcattaaaggtccccttgcccagtcttgcttttaactccatagtgttcttcttagtgtcaagttaaatctatgactgcagtcttcatcacaactttaaataatgactgacttgtcaatgtggtaagtgcagaggccacaccttactagtttgaacattcctgttttctgcggcctcacagatttacagcagagttgcaacatcaatttcatattacctatgaactacaaccatattttaagttcaacaactacttgttagtaacatttctgaggctcagttcactttaaccagataaaggagatttcaaacagctgccaacaaatttccatgcactgaatggaagtattctttatcgcacagttcaaaaataataacataaatattctgaagctgtggtatgaatttaaagagtaaatttgaatttctacttgggaattcaccaataccctgtaattgtatgttagaggaagtattcggaatgaattactctactcatcacacgaatgtctagcccttattagaatcattggtttatagagatctgaccaaagctttgcttttacatagcaacgcccctttaatgcttcttcataaattcaaggacatgaatccagttcagaatacagtacaagtaaatgacaatgccctttgcatgttcctggaaccacttcccttttcatgctcccatgctaacgcgatcacctcattaaaagaaatggagttcttatttacttgcagctctctgaataaggcaatatcttccatatgtctcttttcataggagtcctgacgcattgagagcagcctctgaagaagtgaatggagcattacagagtgctggtcaaaagctcagctctgaagggaatgcaatttatttggatcaaatacaactgaacaacctgccagtactaggtgtgttccctatgctatccctcactaacatgtcactagtaacaatgctcaacatataatgaatgtactatattcttgatatttttgcaacgctgcaacagtctaataactagggtcatcttcattttttctaacaaacaaggaactgagacccagagcgtgggacagtggcaaccctggcatagaacatttgatactcagttgctctaggtccttggcctcctttcttagtcctccaaaaccacaaacccagggttaaggaagcatggaattaatgtgaacaaagcaacaccattggtttgggcgatgagactgaggcttttcttcctttgtttctgtattttctagaatgcagtagtaccatgtattacagtaaaacagccatatttttgtgtcctgttctgtaaaggacagaagcccccatatgctttgagggcagtttagtttattagaagcaacagagcctagattcagcactgcctggtttgggacctccctttagacacctcccttttctcacctgtaaataaaggctaagtaagcatttgtgactgcatactcagtcatggcctgaatcctgggaacaaggcagctagcagctagaggctggaaaacaggactggacctcagcagctctactgcattacttcccctagaagcagggtgtggctacacaaaaccagacagataatgtatggctgaatgtagattcatgaaatgcttggaaagacatttacttatcagtatgtttaattcccaaaatggtcagcaacaattcacacaaaattgattataagttttttcaatttgcttagctgtttagtgtccagtagaaataagattactattctataaagtgacagatgttcatctagttcccattgatggtgaagaacattatgtcatcccaaaagatcgttaacttagatcgtggttctctaccttcctgatgttgtgtgacccccaactgtgaaattattttcattgctacttcacaactataattttgcttctgtcatgaatcataaagcaaatatctgtgttttctgatggtcttaggtgacccctgtgaaagggtcatttgactctaccccctacatgggttgtgatccacaggttgagaagcactgacttagattctcagattgcaagtagagcagcagaatttcgaagaacagcagtggcgacagaagctgctttgggcagttgtcatttgttagctttcattggctcattttgtatacagattttcggaagtatttcagactttatgttatgtagcctttagaggcaacagttcaggactggagagatggctcaagggttaagagcactggctgttttttcagaggacccatgtttgactcacagcacacacatggtggctcacagccatcatgactcctgttccaaaggatctgatgtcttcttctgacctctgcagacaccaggcatgcatacatgcaggcaaaatacccatcaatataaaaataaataactgggaaatatgcaaattctttaatatgcaaattcttctctccccaactgccatttcccatgctccaccctcatcccttccctcctctcttacttcttttgtttggaattctttagatagcatcatcaaggaggctctgaggctttccagtgcatccttgaatatccggactgctaaggaggatttcactctgcaccttgaggatggctcctataacatccgaaaagacgacatcatcgctctttatccacagttaatgcatttggatcctgcaatctacccagaccctctggtaagtttttctgctcatcaaagttatgtatcgaggtgacagtcacccaggaatgtatttgtaattacagctttgatttgatcattaaagtgaagccatagggattgtccctctttattgcggcaaatattnnnnnnnnnnnnnnnntgggtagaggcaagagttttgaacttttacacctaatattcatttcatagtttctgctagactatgttttcagtcataacaaaactaccaccttttttccccctcacaaagtaccctctcccaaatttacactaatggagggtaatgcatttgacttgatccttagagtagttgtttagagccattttgcttcttttgtctaactgaagaattagtctacaggtagaacaggaggtccctagagcttcttggtccaccagctcttcataagctctttccagtatcacctggttcagtgcttggtgtttgctaacttgtagaggatggatttattagtagaaaattactctttggatcctccaggtcaagaaggcaacaactttctatcataatagctcattggcttcttgtctctttgttgcagacttttaaatatgatcgatacctggatgagaacaagaaggcaaagacctccttctatagcaatggaaacaaactaaagtatttctatatgccatttggatccggagctacaatatgccctgggagactatttgctgtccaagaaatcaagcaatttttgattctgatgctttcatactttgaactggagcttgtggagagtcatgtcaagtgtcctcctctagaccagtccagggcaggcttggggattttgccaccattaaatgatattgagtttaaatataaactgaaacatctgtgacatgtggttggaagaagaggacactggatgatgttgctggactgcagcgagtctcactaaacaagcccttgggacaaatgctctcctttgcttcccagcaactgactgtgcctaggaaaagaactggtacccccggcaccactctctgttctcactgcctgagttcctgggtgttcagatagctgaggtcagagtttcaccactcttagaagcaatgtcttttgtttttattttcaaaatgaagatactccaattggcagattttttttcctaaggaaattgcttcatacttttatgaaaactgattaattatgaaaaggcttcaaattcacgttttagtgaaactgttatttttttcactagtgaagttcttcatgtgtgaacatatactataaaaacattttaagggatcatatcatgctttgcataaagggaaaggaaaatattattcaacttttttttttggtttttctnnnnnnnnnnnnnnnnnnnnnnnnnnnnnnnnnnnnnggcactcactctgtagagcaggcttggtcttgaactcacagagatctgcctgcctttgccttnnnnnnnnnnnnnnnnnnntcgtgcgtcaccaatgcctggctatttaactttttcgatgtctagtggtgagagctttgaaaatgatgctactgtgttgggaatactatgggaaattttgatgcttcgctgttacatttaaatttattgctgctggaaattgtcaccccagttttcaattgcccctctctctcccttttaatattcacactgatgagcagagttttttagagattaaaaagacctccccagagccctgtctctgatgtttttaagcctttaatctcagtactcnnnnnnnnnnnnnnnnnnnngnnnnnnnnnnnnnnnnnnnnnnnnatctacagatcgagttccaggcaagccggggctacagaatgagaccttgtcactaaaagaaataaataaggtcaattttatgtcacaactgattatgaatcattgtaaaggataaattgaaaaaaaagaactccacgggaatgaccatttaaatggtctattttagctaaaattaactatgaattatgtggagttcattaagtgtatgttgacgttatatgttcctttaaaatgtcttatgttttatctctgaatgtcttgtagatggagagcaataatagtgtttaaatactgagtcaataaggttttatctatgtactttaagagcattattagctgtgtcatttttactgatatatctaatatatttatatgtaaattatatttatcttttatcttatactacaaatataagtaaatattttaaaaccagtaactttaaaattacctacctttcagaaatgaaaataagaacatttgtgctttaacctttgaaatagaatgtttattcatccactgataagttaaaataattttatctgatttgtttcaagaaactcaaaaatattcaaagtaatcatgcactcaaaggtcttcgtaaggttacagaaaattcaataaaatcttttttgtgtagggactgagtcagggtctagaagatgcttggcaggtactccagtagtgagctggatccagaagattccttaaactttaaaatcttaacactaagtattatcacagagttattacctaagtagaatatttttcctttccttttcaattgacagagtcccacagcaacacagctggctgtaactcttcacatagcttgcgcaggctttgaactcactgtactcctgcctttccttttctaggaaattattttccacatcaagaaaatttaattgttccgatgaggtatagagtaacaaatttctgttatatattcatctgtattaaactgaattc

SEQ ID NO: 930 - DNA, 993 bp, Mesocricetus auratus
ttcccggtgctgggcctggactcccggggggtgggcggcctcatgaactccttcccgccacctcagggtcacgcccagaaccccctgcaggtcggggctgagctccagtcccgcttctttgcctcccagggctgcgcccagagtccattccaggccgcaccggcgcccccacccacgccccaggccccggcggccgagcccctccaagtggacttgctcccggttctcgccgccgcgcaggaatcggccgcggcggctgcggccgcggcggctgcggccgctgcagtggttactgcgcccccagcccctgctgccgcctccacagtggacacagcggccctgaagcagcctccggcgcctcctccgccaccccctgccgtatccgcgccagccgccgaagccgcaccccccgccgcggccgccaccatcgccgcagcggcagccaccgctgtcgtcgccccaacctctacagtcgctgtggcccctgttgcatctgtcttggagaagaagacaaagagcaaggggccatacatttgcgccctgtgcgccaaggagttcaagaacggctacaatctccggaggcacgaagccatccacacaggagccaaggctggccgggtcccttcgggtgctatgaagatgcccaccatggtgcccctgagcctcttgagcgtgccccagctgagcggggccagcgggggagggggagaagccggggctggcggaggcacaaccgcggttgcagccggtggcgttgtgaccacgaccgcctctggaaaacgcatccggaagaatcacgcctgcgagatgtgcggcaaggccttccgcgacgtctatcacctgaaccgacataagctgtcgcactcggacgagaagccctaccagtgccctgtgtgccagcagcgcttcaagcgcaaggaccgcatgagttaccacgtgcgctcacatgacggcgctgtgcacaagccctacaactgctcccactgtggcaag

SEQ ID NO: 931 - DNA, 4425 bp, Mesocricetus auratus
  misc_feature (1352)..(1385): n is a, c, g, or t
  misc_feature (2150)..(2169): n is a, c, g, or t
  misc_feature (3519)..(3557): n is a, c, g, or t
  misc_feature (3807)..(3841): n is a, c, g, or t
tttgggaccatggtcctggtcgactcctttaaaagtgtcgatagaagccactttggaaccaaccgtaaggactgaatttaacagtcacaaggcagcacacattaacacccaggcgcaataagcagtttgggtgctgggagagtcacagtacttcacagtagaaaccctgcccaattagcatacataatgtgcagggacattcacagctcgccctctgaaaagaccctctcctaccacatttcctgtcacacagaagttactcagggaatagtgctagaggccgccagctttgcgaagtggttagaaaacctcagtcccaggcacaccgtgctcacacaccgtgtgtaggtgcgtagcattgtgctgttctgctttaatctctagacctattcctgtatatccaaagttatggcttttcttccttggtcattaacaaatataaatggaattctgccttctgctggaccagagcttctgaaattgaatatgctcatgagtcaactatgagtcacctgaggcgtcttgggaacttcagaatggaggaagacccttctataatcatgacatcagaactgacctttgagcagtgagggatcaacaagggaagatctaagggacacagagagtatcgagggttcagggattagcgtttggggcaattgtctaaaagcaatctgggaagacggggaaggctgcagtgtgggcagtctgggaggggagaatgacagggccagggggcgctcaggagctacgcaggcccactaagcacgcattctgtgagagctacacctccagcttccataagcacattttgagcaagcaagggatataaactttctcaagaacattgattcaggagcacaagcactgggtaccaggtggcctgggcatggcagcagtggtggagacggtaaataatcagaatggcgacacatttagcggtagacttctgatgagttggatgagaacagatgaaattccctctgtttcggattgaagcactgggatcatttactaaggcttgaaatactaggcaagaagagcttggagaggcaacggttctgccacataaagacaattagtgcatttccaagctgagctgccaagcaggcagcgggatgtaaaatctagctgtaaatgatctttccaccttatcgcggtctccatggacccgtaaatgcctcagagtggacagttccctctttctcttgttccccgtgccttttcttactgacccttgcatgagtgccactctcactgccctgagtccccaatcatgtttgcaccccagctcaagctaatcacccctgaaataagcagcctgacatgtgcctgtgaggactgctattaannnnnnnnnnnnnnnnnnnnnnnnnnnnnnnnnntgcttgtctagcatacatgaatctctgggttcaatccccagcaggtcatcaagccaggtttgctagaacacatctgtaaccttggcattcaggaggtaaaggcaggaggataagagttcaaggccagcctcaattatataaaaagtttgaggccagtctggattgtgagaccctcagcaaacacacatggaacaaaaggaaacctagatgccaggtggagtatggtagcagatgcttctaacagcagcattcaggaggctaaggggagagggctgagagttccacgccagtgtagggtacacagggagaccctgtctcaagaaacaagaataacacctagatgcatggtttctgacatctgtctcattttccctatgagaattacttgtgcatattaatcgcccatggtggttaaagccctaaaatgcagaaacccactttcttcttttattttgacaatatcgtccatgctactcagcaatggcttagcacattcaatatgctgagaaagtagccatgagtgagcaggcattgctctgagatggctgtcaagctaacacagtcagagctaccaaaggcgggagctctcccaacccctaaaagacctgaagatagctatgctcttggttcagtgtctggagctataccgtgcaaagttaagggttacacacatgtacatcttgacatgtgcataactgctgtaggcaaacagcatccttcttaagaaaaatatgaatctaatcaaggaattcactgacaaaagcnnnnnnnnnnnnnnnnnnnnaagctctttcctaatgaaaatattacatttgtagtggtttaaagctcttacagaagctccacagaagtagatgctggcccactctgctttctgcctccatggaccagcattctgcctcagtcctggaatccaacattgaaccctgatgaccttacgctcttgtgtccactctgcccgtgagatcttgtgaaaaccagatccattcccataaattctatcacacatgctgtactgggtcctgaattctgaaaatggaaagaaatagtgacaagccaggcatcagatagtggggtcttgatatacaagctgacagacttctacaaaatgaaaggccacttgaagaatggtggccatggagggagggcctgagctcgggaggacgctggagatagacgctgacttctacagagcaagcagtgtgaccaaaggaaggaaagaatgtaggcgtggaaggtgttggaagacgtcaggagcgcaaggccaacagtgacagccatcaccaacgaggtatgtcagtcacaaaccgatttcggagtagaagtgctccaccgattttcttattagcttattccagtgaccctggcgtaggtatggctgtttcactcatttcacagatgatggggtgtggctggtaacttactcaggctaaccgagctaggaactagagctgagattgagttccagcttcactctcccaccttctggtcctgattcaggaacattcctcctatggagcctgccacggctgaggaacagatgtcacctgacaccccagagagtaaggtgttgaatgatgggctaattcagaagtgcatacaaagcccttgtgtgactgacctgtcagagctcggctatcatcaggaacactctcaccattgtgtctggccccacctaagcgattattttattgtctgccctttgtcatgagtaatgtcactttccattttaagcagggagcttcaggagatgaccacagtttcaaaccatgatttaaagctaagcgctgcctgggtagttactcactcccttcaagatgtggctggcacacaccctcctcagaacactgtggggcctgcttgcctgcctgagcttgaaggcaatctgaataccttggagtcagactaggcctgatgccagggtgtgtgacatctggcggcttggctggctgttcacctgaaatgctggcttcctgagttccctgtgtatactgtggctgtgttacttgttcatttgtgtggcatttgttgaggccctactatgggccaggcactctagttctctgctagagatcctaccagaagctgtacagctaccagtctggggaggataagcaggcagttatcgtaaaannnnnnnnnnnnnnnnnnnnnnnnnnnnnnnnnnnnnnnagggaggtttggggaccagcagccagaggaccggatgccacggtagacagaaaggacaaagaagagtgggctggccttctgaattataaacaaaccaaactaaagctggagagagagaagtttgtaaagcctgagtttgttccaagagtcaccaggaaaagcatggtggccagagttgcaatgcaggaaattttcactcagacaagacctgtgtggggtctgtgcgagtatgtgtatgtgggtgtgcacnnnnnnnnnnnnnnnnnnnnnnnnnnnnnnnnnnnaggagagaatgatggagacaggtggggttgatgatgctgggcagtcaagagggatgacaaatgtccagagaagcaggtagaagtaggaaggtggggaggggaaggctggctcggatgacctaagacattctgagtcacacagccagaggcctcgcttaaagggagcactgacttacaaaaggaagcaagcaccagcacagccaggctcctaaggaattcctggccagagacatcttcctacctctgaaggctctgccgtctcttcagaaaggcagccaggtgccagcaggtaagcagaaactgtgttctaagcctcctttgtgtttcggtgctcctggggccattctggagggcacagttcttgctgtatggcttgggtttatagaagcagctaactcagaacattggtcccgtgtggtaggcggaaaagcaatgggcatgagaacagtcaaccttgcatggctgtgcacaagccgtgatgcactgctatctgccttaaggtcccgatgtttgcacctgaaggacttgcgagagctgtgtccggacacacctgtgagcagggacagtgcagactgcgtaccaga

SEQ ID NO: 932 - DNA, 4990 bp, Cricetulus griseus
  misc_feature (4888)..(4948): n is a, c, g, or t
accatctggacccaagggtgaccgtggggagccgggccccccgggtcccccaggaccaggtattggtggcactggacaaggcgagcctggacttccgggtcttcctggaagccctggaccccaaggcccagcaggccgtgctggagagaaaggagagaagggtgactgtgaggatggagccccaggccttccaggacaacctggggccccaggtgaaccgggcctacggggaactcctggaattactgggcccaaaggtgaccggggacagacagggaccccgggtgagcccggagaaaagggtgaacggggaccgcccggtccagtgggaccccaggggcttcccggggttgctggccatcctggagtggagggtcctgaggggccaccaggacccgctggccgtagaggagaaaagggagagcctggtcgccctggagatcctgcagtgggtcctggtggtgctggagccaaaggagaaaagggagatgctgggcttcctgggcctcgaggagctgctggaatcaaaggggaacaaggcccacctgggttggcgcttcctggagaccctggccccaaaggagaccctggagaccggggtcccattggcctcactggcagagcaggacccacaggtgactcggggcctcctggagagaagggagatccaggacgaccagggcccccaggacctgttggctcccggggaagagatggtgaagttggagaaaaaggcgtcgagggaaacccgggtgacccaggtttgcctggaaaagcaggcgagcgtggccttcggggcgcacctggggtccgggggcctgcgggtgagaaaggtgaccagggagaccctggagaagatggacggaatggcagccctggaccatctggacccaagggtgaccgtggggagccgggccccccgggtccccctggacggctggtgggtgcaggaattggatccagagacaagggagagcctggacaggaaggtcctcgaggacccaagggtgaccctggcccccctggagcctctggagaaaggggcattgaggggcttcggggaccccccggcccacagggagacccaggtgttcgaggccctgcaggagacaagggtgatcgggggcccccagggctggatggccggaatggggtggatgggaaaccaggtgcacctggccccccagggccacatggtgcgtcaggcaaagctggggaccctgggagagatgggcttccaggccttcgaggagaacatggccctgctggtccccctggccctcctggagtacctggaaagacaggcgaggatggcaaacctggcctaaatgggaaaaacggagaacctggagaccctggagaagatggaaggaagggggaaaagggagattctggtgcccctggaagagaaggccctgatggtcccaaaggtgaacgtggagctcctggtgatcctggacttcggggtcctcccggtctcccaggacaggtcggtccccctggccagggtttccctggtgtcccaggaaatacgggtcccaagggtgaccgtggagagactggatccaaaggggaacagggccttcctggagaacgtggcctacgaggagaacctgggagcttgccgaatgcagagagactactggaaacagctggcatcaaggtgtcggccctgcgggacattgtggagacctggggtgagagctctggcagcttcctccctgtgcctgaacggagacctggccccaagggggaccctggtgagcgaggccctcctggcaaggagggttccatcggctttcctggagagcgtgggctgaagggagaccgtggagaccctggccctcaggggcctcctggtctggcccttggtgagaggggcccacctggaccacctggccttgctggggaacctggaaagcctggcattcctggcctcccaggccgggctggtagtgctggggaggcaggacggccaggagagaggggagaacgtggagagaaaggagaccgtggagagcagggcagagatggccttcctggcctccctggaccacctggccctcctggccccaaggtggccatcgatgagcaaggtcctggactctctagagaacaagggccccctgggctcaagggtgctaagggggagccaggtagtgatggtgaccacggacccaaaggagataagggtgcaccaggcattaaaggagaccagggagagcctgggaagaggggtcatgatggcagcccgggtctgccgggagagcgtggtgtggctggaccggaagggaagccgggtcttcagggcccaagggggacccctggcccagcgggtggccatggagaccctggaccacctggtgccccgggtcttgctggccctgcaggaccccagggaccttcaggcctgaagggggaacctggagagacaggacccccaggacggggtctgcctggacctactggagctgtgggacttcctggccctcctggcccttcaggccttgtgggtccacaagggtcaccaggtttgcctggacaagtgggggagacggggaagccaggacccccaggtcgtgatggtaccagtggaaaggatggagagaggggaggtcctggtgtgccagggttaccaggtctgcctggccctgttggacctaaaggagaacctggacctgtgggggcccctggacaggtgatggttgggccccctggagcaaaaggcgagaagggtgccccaggagacctggctggagacctgctgggtgagccgggagccaaaggtgaccgaggactgccaggaccaaggggtgagaagggtgaagctggccgtgcaggagagcctggagaccctggggaagatggtcaaaaaggggctccaggacgcaaaggtctcaagggtgagccaggaattggggttcagggcccccctgggccaactggtcctccagggatgaagggcgacgtgggctccccaggagctcctggtgttgttggattccctggtcagacaggacctcgaggagagacaggccagccagggcctgttggggagaggggtctggcaggccctccagggagagagggtgccccaggtcccttgggaccacctggaccaccagggtcagtgggagcacctggcgcctctggactcaaaggagacaagggagacccaggaacagggctgcccgggccccgaggcgagcgtggtgagccaggtgaccggggtgaagatggccaccccggccaagaaggacctcgaggactcatggggcctcctggcagcaggggagaccgaggggagaagggtgacactggacctgcagggctaaagggtgacaagggtgactcagctgtgattgaggggcctccagggatacgaggtgccaaaggggacatgggtgaacgaggacctcgaggaatagatggtgacaaaggacctcggggagacaatgggaatcctggtgacaagggctccaaaggagagcctggtgacaaaggctcagctggatcaattggagttcgaggactcccaggacccaagggtgagacaggtgacacagggatccctggtgagccgggagccccaggaaaggatggagcccctggtttccgaggagacaaaggagatattggcttcatgggtccccggggtctaaagggtgagagaggaatgaagggagcctgtggccttgatggagaaaaaggagctaagggagaagctggttttcctggccgccctggattggcaggacgcaaaggagacgcaggggagcctggtgtgccgggtcagtctgggtctcctggcaaagagggcctgattggtcccaagggtgacagaggctttgatgggcagtcaggacccaagggtgaccagggtgagaaaggagagagggggcccccaggagttgggggcttcccaggtcccagaggaaatgatggctctagcggtcccccagggccaccaggtggtgttggtcccaaaggccctgaaggacttcagggtcagaagggtgagagaggtccccctggagagagtgtggtgggggctcctggtgctcctggtgcccccggtgagagaggggagcaggggcgaccaggacctgctggccctcgtggggagaaaggagaagctgcactgactgaggatgacattcggggctttgtacgtcaggagatgagtcagcattgtgcctgccagggccagtttattgcgtctggatcacgacccctccccagctacgctgcagatacagctggtccccagctccaccatgtgcctgtgctccgggtctctcatgtagaggaggaaggccaggtaccccctgaagatgatgacgacttctctgagtactctgtgtattctgtggaggactaccacgaccctgaagttccttgggatggtgatggggatatcaagggctgggaccagagaggttcagacccctgctccctaccactggatgagggctcctgtactgcctacaccctgcgctggtaccatcgggctgtgcctggtggcacagcctgccatccctttgtctatggcggctgtggagggaatgccaaccgttttggaacccgtgaggcatgtgagcgccgctgcccaccccaagtagtccacagccaaacaacaggtgctgcctagggccgaagcctgcatgatgcactagatggtcagcagttcctggaggtggcagggctcagcggggtcctgccattctccgtttggtgctagagttctgtgtgcccgtgagcgtgtgtgcgtgtccaccatttcagtgacttggtcctgtgggtctagccttcccccttgtggacaaatccccattgtggtgcctgctttcctggcagatgactcacttgttgggggtggttgtgggannnnnnnnnnnnnnnnnnnnnnnnnnnnnnnnnnnnnnnnnnnnnnnnnnnnnnnnnnnnnctgtttcggggggagagcattaaagctgctgttttaaaaggc

SEQ ID NO: 933 - DNA, 448 bp, Mesocricetus auratus
tttctcagctaccaacatccttctcacccttgacaacaacgtggtaaatggttccagccctgccatccgcaccaactatattggccacaaaacaaaggacctgcaagccatctgtggcctctcttgtgacgaactatctagcatggtcctagaactcaggggcctgcgcaccattgtgaccactatccaggacagcatccgcaaagtgcagtaggctagtgcctagtgcctctgcttcatttgccagcccttgaagactcaccacctaggtggtcccatgggagactggacacactatgagccttcccctctttcagacggaagagaacagagagctggccagcgagctgaggcggcctcccctctgcttccacaatggagtccagtacaggaacaatgaggaatggaccgttgatagctgcaccgagtgtcactgccagctaaggga

SEQ ID NO: 934 - DNA, 1543 bp, Mesocricetus auratus
attcgcctccttaaaatgccactagaaactttctgcccggaattaccctaaatcagaatacacatacgccccaagcggccatctgaaggaagcacagtcgaactggggaagtactctgaactctggacttggacgagttgggaaaggccgaaccttggtgcacggcctgctgctgccctgactactgcacactgcaccctagtgatcagcagaggcagcctggaggggcaggcctgactgctgccctgactactgcactgccaccctagtgaatcaagcagagtcagggcaggagtggacggaaaccctgatggcacgggatctcccaccccaccaggatagacccaagaggcagcttccttattaaagggtcggacacattaaccttttcacttttatttttaaaccagacattctcaatctccaaatttctccgtcactgaggcattcaaggatacgggctttagtgaaagcccttaaacggcttaggtagtccaaaagtagcattcgtgtctgaggaccctcaagcggagcgcttccagcctccgtggcgcaagagcctaagctctaagtggctgcgtgggtgagactatttttctagaagttccagggctcctgtacccgatcagcgtcccccccccctgcaatttcagccccgatgcacgccaagcggcggagccgatgacaggaacctgtgtcgtcgttccccccaccccagcgcttcctgccccgatcattggccaggatcgattcccaggaatgcgagcgcccctttaaatggtctagggctcctctaccccagccagccatgcccggagtcagccggcctcttcggactggtgcaagcaatcccgacacagctaccagtcccgccagggcctctccgggagcaccggccgtccccgtgtctccaccagattcggcgttccttcactgcacctttgccgccgccaactcccggcttcgacggcccgggtgcacacaggtaagccaccagcgttcgctgcccagcacctggccagccaccttcaagcccctatggtgcagatggtcgagccgactccctacctcctgcttctcccggtctgcttgttcctaactgtcccttcattatgcccccgtctagccgctggaaagaactttcagagctggttctccagcttagggatcacaaataattcctcctggacgcctcaagattttctcaccaagcagttctttgggtgcctctgaccttacaaacatccatgtcccatccccaaataccattctaatcagcaccaatcccctcctctgcgttagtttttactaggtctaagtccttttgctttgcttttcagcacatataggaacacacacactcctgccctcaccgccttgccttcttgttacaggctcgctgctgggcacaaaggctccagcatggagctggcatggggactaggtgttcttttcctgttgatgtgtgtggaaatcgaattccagtgagtctccgattccctctctctctctctttctccctctccctccacccctctctcta

SEQ ID NO: 935 - DNA, 5993 bp, Cricetulus griseus
  misc_feature (859)..(873): n is a, c, g, or t
  misc_feature (2104)..(2110): n is a, c, g, or t
  misc_feature (2574)..(2595): n is a, c, g, or t
  misc_feature (2693)..(2711): n is a, c, g, or t
  misc_feature (2806)..(2837): n is a, c, g, or t
  misc_feature (4333)..(4394): n is a, c, g, or t
  misc_feature (4444)..(4466): n is a, c, g, or t
  misc_feature (5126)..(5126): n is a, c, g, or t
gaattctgtcctcatgatccggattaagggtgtgttttcactcctctatatcctcatagaaggagtatttccctcctcttgaaccacagcaaatccatcaaaaatcatctctaacggtggttcctttaatgtctggcttgtagttcattagaggggtagtcaagtttacaacaaaaaattgccatcacaatggcaggagtccatcactggttctttccctctctctgtgtctggatttaatttgaagatgtgacagttaatcttccactaaggccttagtgacattggaaaactgcagtgtgtctcccagtacattattctacccaaggagctataggcggacatattcagtgcaattagtctttatattcacacacagaagggatgctatttagccctcaaaaaagtgtactcaaaagatttagagaaaaattgatggatatcaaatgtatataagtttgaggtcacccaattgttgattgtttcactttttgtggagggtgacccccaggtcctaaataaatatatggagtattattacttacttaattataaatgcttggcattaacttgtcttgtttcttgctagctttcctcaacttaaattatccccatctacgttttgtctctggtccttttcttacttctataatcttgctttcactcttactccatggctgagtagcagggtagctagcccctgatgtcctcctctgttgggccccagcaaccacagggtctctgtgagttgcttatcaaccaataaccgcaggtgcatcctgttttctagtcctggctcacagtcccggccttgccccactggcatcaacatctagttgtgaaaacaccaactcttgcnnnnnnnnnnnnnnnaatgtgctgtaagtctgcatataaaactgctccctccctgcaataaagactgacacacacattctcttagcacaaatgattgtcaagctttcacctgatacattagacttgttcgtgcactcttccttctctgtcttttttttcttaaatcccagatttctccttctatttattctttccatctctcagccccacctattcttgtttctgcctcttctattggccattcagctctttattagaccatcaggtgttttagacaggcacaggtaacacagcttcacagagttaaacaaatgaaacattaaacaaaagtaatacactttaaaataatattctacacctcccctttttggtcaaaaaaggttttaactctaacaaagtataactacatacagcaaaaacagttatcgggtaaagttacattataatattcagttcctttattgtttaggatatttagagaaaataattcattatctatcctatcttagtgaatccaaagttttatccaaaatttctttctatcataactaagaaaaacaacgactataactatctagtcttcacctccatcaaagacccagaaggatgttatattatctaacaacagagacattaggctacctggacagtcacccaaagttcctctgcaatgttggggcatccaccttcagcctacaggcctaaagtatctggcagatgttatgaagcaggaattttggactgtcctgtcttattttggcaaagttcgttagtcactttccctcgtgtctggcagactcttctgtgaagtagggaattttgaaggactctcctgctttgttttgacagagatcaaccgtttttcctgtgtgtccttcatgtctataagcggtttcttcaatgatcatcatctctgaagtaaattggtactaccagtagtagatgtgtgtcattgtcatgaaaaaccctgtgttaacaaaacattttaaataccatattctgtggatatttggaatgtttgaagaccatctagtgattcaaaaaatatctctatatgatctgaaaacagcctaacatatctacaaatcggattattagatgactaactactaacttatgtttcctgattatcctaaatagttttataataatagctttcaaaaattagaattttacctaatatatttaaatgatctacataggtacaatatcttaaaagtagaaactatatagtgtgttgtaaaannnnnnntatacaaaagtcctttaaacaagagtagaaacatacagcgtaacaaatataactttaaatttgtatcaatacactatattcccctaaatgataacaaacatccatgacacaccaaataaccaaagacaatccccaaaccacaacgaaatcatgggaatgtagaccttgttttctcttcaatacttcctcctgtctgtggatgaagtgtctttagggtcccagagagaaaatttgagataatggccaagtcctgggaagacccactatagtctttgttcacagatatcacttatcaagattcaggaggtcctgactaaacaaacctgatccatattgtccctgaaagaatccacatcctctcattgcctgtgggaacaactccaaagcattttttatttccatttgaaaaatacattttttaggccgggcagtggcccacgcctttaatcccagcactcaggagnnnnnnnnnnnnnnnnnnnnnntgacttcgagaccagcctggtcactaaagaggtgtaaatggatagggttgagagacagtaaaaatagttttggccaggcagtggtagtgtaggcctannnnnnnnnnnnnnnnnnntcacaggaaggaggatatctgagtttgagaccaatctggtccacaagagcttgttccaggacagcttccaaatccacagagaaaccctgtctcgnnnnnnnnnnnnnnnnnnnnnnnnnnnnnnnnccacattttttaacttcctttttaaagttaagatacctctaaagtatcaaggttggttcagttttgcagtcaagttcacagctgttaactgcccctcaaccaatcaaaaattcaaaatcaacacaataacatacaggatccaaattcccagtgtatttcccttcttacatgtctcttttcttttatattattttacttctcttagagatggaaagacttcatttttaaaaaaattctttctgtgactgtctatacttattttctttcttaagcctacaccattgttaaacacactggaacctattgagggtttttccatctgtaccttttattattgcttatcttttagccttttcaattgccaagtacaaactttaaactgctaagtggtgtgtctgcagcattggtggctggctccatccacttcctcagctgtgaaagcaagacctaaagcacacagtcaggttggaagtctgggaccaacaactgtattcaacctccctagagttctagaatgatattgcttgcagtgtggcaggcatttttacttagatttttgttcctacttcacatactggctgcttaagtgctccgcagcaggcagaatcacttaaaggagctgtatccttttcttcaagctttctcaggccctatgtaaatttgaggcccatggtggtatgccaaaatattcttggttgttttattctttggggggccggccaccaagctcccaaataaatacatagagtcttattattttcttaagtataaatgctaggcctatcttggcttgtttcttgccagctttccttttattgccacctacctttgtcttctgggcttttacttttcttacttctatactcttactttcactcttaatctgtggcaaggtgtgtagtagggtgattgccccctgccttgtccctcttcggctccttctttttttctcccagatttctcctgctatttattctcgatacctgccagccccacctgtcctttctcctgcctctctattggctgttcagttttttattagaccatcaggtgttttagacaggcacagtaacaaagcttcacagagttaaacaaatacaatataaacaaaagtaacacactttaaaataatattctacaacattttcccttttctgtcaaaatggagaggcagactggataatgtaaattaagaaaagcaagtcaaaatgaggccgggtatagatagataataataggactctatgtgtgattgatttgagtgctgagtggtagacctcccaaagagcaaaaatatcatacaacacaaatgtgtatccattaaggttacttccattcataaggaaatctccctcttgtgttctgaggaaattactaactaggtctgcaagactcaaacaggacaaaaacatagactcacatacacacagcaaactgatctttgttcaagatgcttgaacaaagtttctgtttttaaaaaacagaaacttcagtcnnnnnnnnnnnnnnnnnnnnnnnnnnnnnnnnnnnnnnnnnnnnnnnnnnnnnnnnnnnnnnttagaggccagcctggtctccagagcgagtgccaggaataggctccaaannnnnnnnnnnnnnnnnnnnnnngaaaaacaaaaaacaaacaaacaaacaacaaaaaaatctccacttcttcacagcagactttctctgttattatctatgacggaaattaagcctggaagcatattctgtttgccatgtaatctggaggtttattcctgtctctgctttctctaatgtgcatatgacattttcatgttaataaactatttttaagaaaactcaatgatggaaggtatgtgatgtatggtcttctaactttctaaacagcaaaatcagttgcctgctacacttccttcctaactctaaaatgatggatgaccaggaacaaaaccagctgtgatcactatggatgcaggagggagggaaggaaagctggggggaggtggcatggcttatggttccattattattgtatggcagggattagcctgtgtaagtgttgtctaggtagtaacagccacagtatgttcaagcatgaaatggtactgacatgtctagcaatgtttcagtgttctagaaatgtttcaaaatttctatggtcacactgcaggtatctactatatctggccctgaaagtcattctcccacttttacttcaggaatccctgactttgggctttagatgtgtgtgtagggaacttcttttacaatgtgtgacacatgcgtcacttttagattggngctctccacaggctaatattctttatattttgactaacttgcatctgtgtttattcttcatctacaacacaattgaagttttctggtgggtattgaagggttgctgacactgtcagtataaggatgagaacttggtttccattagattgtatccacttattagaatttgttctaattagcattatattctctctagggcttatcacctagctaggcacaagcatatcaccaaattaacatcacttcagttacgatttcagtggaataaccccactttaaatccaatcaaaaaacgactgagaactctagaactctctgcggttattgctctgtgagcagctgtacctgatactctcactgcctcacctgatgactgggcctctacagctgctgcagccaccttgctcctgaggccttagactggaaatgcattctcttccttttaactgagtttctatctctttattctaccaataagagttaagatgctggttgaaaacctactacctcagagagaaagagcttcctgtacaccaggggaaatatgacaggagcttagaggactccactggaaaaaacactcagtaactattgccacagcacagatcttagatttcaggaaaccaatggacaaatttatgacattcgaaaggtttcctggaacatttatagttacaaaagagactcactaatcaaggcaagtttcagacacgctgcttgaacaaactgttggggttactccaaagagaaatttctaccattctgtgatgacattcttagcatttgtgagatgttcatgttgacattccaaaataattaacttagtattttccattaggcattcattaaagttggataggatctgaa

SEQ ID NO: 936 - DNA, 1157 bp, Cricetulus griseus
ggggacggagctaagaggagttgagttaaaagaagatggatgcacagagttcagctaaagtcaattcaaggaagaggaggaaagaggcatccagccctaatggagcaacagaggaagatggcattccttctaaagtgcagcactgctcagttggtttacggcagccggctcctttttctgatgaaattgaagttgactttagtaaaccctacgtcagggtaactatggaagaagcctgcagaggaactccttgtgagcggcctgtgagagtttatgcggatggaatatttgacttatttcactctggtcatgcccgggctctgatgcaagcaaagaaccttttccctaatacctatcccattgtgggagtctgcagtgatgagctcacgcacaacttcaagggcttcactgtgatgaacgaaaacgagcgttatgacgcggtgcagcactgccgctacgtggatgaggtggtgaggaacgccccctggacgctgacgcccgagttcctggcagagcaccggattgatttcgtagcccatgacgatatcccctattcttcggcagggagtgacgacgtgtataagcacatcaaagaagcaggcatgtttgctccaacacagaggacagaaggtatctccacatcagacatcatcacccgcattgtccgtgactatgatgtatatgccagacggaacctacagaggggctacactgccaaggagctcaatgtcagctttatcaatgagaagaaataccacttgcaagaacgggttgataaagtaaagaagaaagtgaaagatgtggaagaaaaatcaaaagaatttgtgcagaaggtggaagaaaggagcattgacctcatccagacgtgggaagagaagtcccgagaattcattggaagtttcctggaaatgtttggtccagaaggagcactgaaacatatgctgaaagagggaaaaggtcggatgctgcaggccatcagtcccaggcagagtcccagcagcagccctactcatgaacgctccccctccccctcctttcgatggcccttctctggcaagacgtccccatcttcctccccagcaagtctctctagacacaaggctgtgacctgtgacatcagtgaagacgaagaggactaacttttcatgcccgctccc

SEQ ID NO: 937 - DNA, 340 bp, Mesocricetus auratus
ggatattcctgcctggtaacctgattcggccgaagaagttttaatgctccattttgcctaaacacaatcttcctcaccattctctccctctccagggagtagagacatgtggagagcttactctgacatgagagaggccaactggaaaaactcagataaatacttccatgcccgggggaactatgatgctgccaaaaggggaccaggaggagcctgggctgctaaagtgatcaggtaacagaggccccagtgagcagagctgactgctttagacagttaggaggcaggtgtcctccgcatcccgtgcacgctgcccgttagccctccccctctccgtgcg

SEQ ID NO: 938 - DNA, 413 bp, Mesocricetus auratus
cagcctactcctaggctactctcgcggccacctctgggggaggaacccggagggtgggactactgccttccgcgtggttatggctcttcttcttgtctgtcttgaatacagtgatgccagagagggtattcagaggttcacaggacgtggagcagcggactcgagagctgaccagtttgccaacaaatggggccggagtggtaaagacccccaccactttcgacctgctggcctgcctagtaaatactgagtttcatcttcatgctattaacagccatgcagcccccaaggttgcatttactagattaagttagttcccgagccccggacgtccaagcaccccgaaatttagaataaatacccgtgaaatgccaccatgtcactgcattttgtaacgagccattagggaagtg

SEQ ID NO: 939 - DNA, 3442 bp, Mesocricetus auratus
  misc_feature (34)..(63): n is a, c, g, or t
  misc_feature (292)..(307): n is a, c, g, or t
  misc_feature (2586)..(2606): n is a, c, g, or t
  misc_feature (2622)..(2648): n is a, c, g, or t
cgcggaggagatggccttgtccaccgtggagagnnnnnnnnnnnnnnnnnnnnnnnnnnnnnngctggagcgggacgccgaagtggaggaacgcaggtcctggcaggaacacagttctctgaaagagctccagagccgaggggtgtgtttgctgaagcttcaggtatccagccagtgcaccgggctgtacggacagcggttggtcacctttgagcccaggaaattggggcctgtggtggtgcttcccagcaacagcttcacatccggggatattgtgggtctgtatgatgcnnnnnnnnnnnnnnnnctggccactggggtcctgacccgcatcacccaaaagtcagtcacagtggcctttgatgagtcccatgatttccagttgaacctggaccgagagaatacgtacagactgctgaagctcgccaatgatgtcacgtacaagcgactgaaaaaagcgctgatgacactgaagaaataccactctgggccagcgtcctcactcatagacgtccttttgggtggctcctccccgagtcccaccactgaaatacccccattcactttctacaacacggccctggacccttcccagaaagaagctgtgtcttttgcactggcccagaaagaagttgccatcatccatgggcctcctggcaccgggaagactacaactgtggtggaaataatcctccaagctgtgaagcaaggcttaaagattctgtgctgtgctccctccaacgtcgctgtggacaacctggtggagcgtctggctctgtgtaagaagcggattctgcgcctggggcaccccgcccgcctcttggagtccgctcagcagcactcactggatgcagtgctagctcggagtgacaacgcccagattgttgctgatatcagaaaggacatcgaccaggtctttggcaagaacaaaaagacccaggataagagagagaaaagtaattttcgaaatgaaattaagctactgaggaaggaactgaaggagcgagaagaagcagccatagttcagagcctcactgctgcagacgtggtcctagccaccaacacaggtgcatcttccgatggccctctgaagctgctgcctgagaaccactttgatgtggtggtggtggacgagtgtgcccaggccctggaagccagctgctggatccccctgctgaaggccccaaaatgcatcctagccggagaccacagacagctgccacctaccaccatttctcacaaggcagcactggctgggctgtcccgcagcctgatggagcgtctggtggagaagcatggcgctggtgcggtaagaatgctgacagttcagtaccgaatgcaccaggccatcactcgctgggcctcggaggccatgtaccatgggcagcttaccgcccatccctctgtggcaggacacctcctgaaggacctcccaggtgtggctgacacagaggagacaagtgtccccctgctgctcatagacacagccggctgtggactgttggagctggacgaggaggacagccagtccaagggaaaccccggcgaagttcgcctcgtcactttgcacatccaggcactggtggatgctggggtccatgcaggtgacattgctgtcatcgcaccctacaaccttcaggtggacctgctcagacagagcctctccaacaagcaccctgagctcgagattaagtctgttgatggcttccaaggccgagagaaggaggctgtgatcctgacctttgtcaggtccaacaggaaaggtgaagttggttttctggctgaggacaggcggatcaatgttgctgtcacccgtgcccggcgccatgtggcagtcatctgtgattcccgcactgtcaataaccatgcctttttgaagaccctggtggattatttcacagagcatggggaggtacgcacagcctttgagtacctggatgacatcgtccctgagaactacacccatgagggctcccagggccacagccatgctcccaagcccaggggccctgtcacctccatcaggaagcctaccaatgagcaggagaatggccaagaggccagagcagctgctggacagggccgcaggaagccgaacgagaggcccccgggctctcaggtccactcccagcccagctctggtgcgagaggctgtgatagaactggagcaatagaccgcacagagcactttagggccatgatcgaggggtttgtggccagcaaggagtcacagttggagtttcccgcatccctgagctcccatgacagactactagtccaccagatagctgaggagcatgggctaaggcacgacagcaccggggaggggaaggcccggcacatcactgtgagcaggaagagccctgcaggttctggcggtgtggccccacagcttccttcaccccccagccctgcacaggctgagcctgaaccactgtcacaacagccccttgggcagccacattgctccacacagctggatctgaaggcactgcacctgcagaggctgcagagacagcagggcagccaagcccaacccgccaaggcacagccaggtgtgggtttgcatccacagaagactcaacnnnnnnnnnnnnnnnnnnnnncaaaaggtccagctcnnnnnnnnnnnnnnnnnnnnnnnnnnntggtgtcagctgtgattaaggctgacaacacctgtagctttgccaagtgcacggccagcaccaccaccctgggccagttctgcatgcactgtagccgccgctactgcctcagccatcacctgcctgagatccacggctgtggtgaaaaggctcgcgcccatgcccggcagatgatcagtcgggaaggagtactctatgcaggcagtgggaccagggatagggctctggacccggccaagagggcccaactgcagaggaggctggacaagaagctgggtgagctcagcagccagaggacaagcaagaggaaggagaaggagagggggacatgaggcgatgtccccatgcagggccgagtggggcagagggccagggcctgtgaccagcttcctcggcagcaggtggaacacagtccagcactagccatttctatgctcattctggcatatccccctatttctcagtgacaagggtggtgttctcaaagagacctgcttggtcttagactccatcagattaactgcctgactgcccagaccccattaatgctgctcaggtgcgtgtcctgagaagtgagtgccgtgcatggctagctggccatggccacctccatcctgtcttcaatgacacagtgggcataaagtgtgtgctctggggataggagggtggctgctccagggctgggaggctcctagcctgtgattgcctgcactctgctgctgcttggtgactggtgagaaggagccatcccagggcacctcactgctcacctcacaaagtctgcatcctctcca

SEQ ID NO: 940 - DNA, 2147 bp, Cricetulus griseus
  misc_feature (603)..(652): n is a, c, g, or t
  misc_feature (1803)..(1948): n is a, c, g, or t
aatcgggacaggcgctgccggccgcagggtcccctccgtgccggcgccgcagctgccgggcctctcgagtcggtggacgcgtcctcccgccggcctcgcaaccgccgcaccccggcctcggctgcgtcgcgccatggcggcccctggcgccccgcggtcgctgctcctgttgctgctggcaggccttgcacacggtgcctcagcattgtttgtggtgaaagacagcaatggcacagcttgtataatggccaacttctctgcctccttcttcaccatctacgagactggacatggttctaagaactcaacctttgaactgccgtcctctgcagaagtactgaatagtaacagttcttgtggtagagaaaatgtttctgaacccatcctcacaattgcttttggaagcggatatttattgacgctcaacttcacaagaaatgcaacacgttacagtgtccaggacatgtattttgcttataacttgtcagacactcaacatttcctgaatgccagcaacaaggggatccactctgtagactcctcaactgacatcaaggcagacatcaacaaaacataccggtgtttgagtgctatccaggtccnnnnnnnnnnnnnnnnnnnnnnnnnnnnnnnnnnnnnnnnnnnnnnnnnnctgttgaatagcaacttcagcaaggaagagacacgctgcacgcaggatggaccttccccgaccactgtgccgcctagcccctcaccaccacttgtgcccacaaaccccactgtgattaagtacaatgtgactggtgaaaacggaacctgcctgcttgcctctatggccctgcagatgaacatcacctacatgaagaaggacaacatgactgtgaccagagcattgaacatcagcccaaatgacacagctagtgggagctgcagtcctcatgtggtgaccttgacagtggagagcaagaacagtatcctggatttgaagtttgggatgaatggcagttctagcctgtttttcctacaagaagtccggttgaacatgactcttcccgatgccaacgtgtcgtcactcatggcctccaaccaatcactgagagctcttcaggccacggtcgggaactcctacaagtgcaacaccgaggagcacatctttgtcaccaaggagttttccctcaatgtcttcagcgttcaggtccaggctttcaaggttgaaagtgacaggtttgggtctgtggaagagtgtatgcaggatggtaacaacatgctgatccccattgctgtgggtggtgccctggcagggctcgtcctcatcgtcctcatcgcctacctcatcggcaggaagaggagtcatgccggctaccagaccatctagccggtggacaggcgggtgcgcgtgcgccagacgcacaggggcctgttcttatgtccccgagcttagataggtgtggaagggaggcacactttctggcaaactgttttcaaatctgctttatcaaatgtgaagttcatcttgcaacatttactatgcacaaaggaataactattgaaatgacggtgttaattttgctaactgggttaaatattttgctaactggttaaatgttaatgttaccaaagtagagctctaaggaggacaagaaggctttcagaatcgcacggctcccccatttgacttttttaagacttggtgtttggtttcttcatcctgttactcagatttaagccttacaaagggaatctctggcctgacacttgggcgtggtaagggcggctgatctttaggctgcacgctgaagatgctagaagggaagagcaggnnnnnnnnnnnnnnnnnnnnnnnnnnnnnnnnnnnnnnnnnnnnnnnnnnnnnnnnnnnnnnnnnnnnnnnnnnnnnnnnnnnnnnnnnnnnnnnnnnnnnnnnnnnnnnnnnnnnnnnnnnnnnnnnnnnnnnnnnnnnnnnnnnaaaaaggcattatttttatttactttttgtaaagtgatttccagtcttctgttggtgttgagggtggccccgtttctgcactgtgtacaataaaagattcacactgctgacctgtcctgccgcataggtgggttgtacactgaggaccagctcacgtaatgcattgcctgtaacgatgctaataaaaagtctccttctt

SEQ ID NO: 941 - DNA, 2460 bp, Cricetulus griseus
atgatggatcaagccagatcagcaatctctaacttgtttggtggagaaccattgtcatacacccggtttagcctggctcggcaagtagatggagataacagtcacgtggagatgaaattggctgtagatgaagaagaaaacactgacaataacatgaaggccagtgtccgaaaacatagaaggcttaatggaagactctgctttgggacaattgcagtagtcatctttttcttgattggatttatgattggctacctaggctattgtaaacgcacagaacaaaaagactgtgtaagactggcagaaacggagacaggcaattcagaaatcatccaagaagaaaacattcctcaatcttctcgcttatattgggcagacctcaaaaaactgttgtcagagaagctggatgccatagagttcactgacaccatcaagcagctgagccagacctctcgggaggcaggatctcaaaaagatgaaaatcttgcctattatattgaaaatcagttccgtgactttaaactcagcaaagtctggcgagatgaacattatgtgaagattcaggtgaaaggcagtgctgctcaaaacgcggtgaccataataaatgtaaatggtgactcagacctagtggagaatcctgggggctatgtggcatatagtaaagctacaacagtttctggtaaactgatccatgctaattttggcactaaaaaagactttgaagatttaaagtatcctgtgaatggatctttagtgattgttagagcagggaaaatcacttttgcagaaaaggttgcaaatgcccaaagctttaatgcaattggtgtcctgatatacatggaccagactaaattccctgttgttgaagcagaactttcactctttggacatgctcatctaggaactggtgatccatacacacctgggtttccatctttcaatcatactcagtttcctccatctcagtcatcaggattacctagtatacctgttcagacgatctcaagaaaggctgcagaaaagctatttcaaaacatggaaacaaactgtcctcctagttggaacacagattctttgtgtaagctagaatcttcacagggtataaatgtgaacctctctgtgaacaacgtgctgaaagaaacaagaatacttaacatctttggagttattaaaggatttgaggaaccagaccggtacattgtagtaggtgcccagagagatgcctggggtcctggtgctgcaaaatccagtgtgggaacaggtcttctgttgaaacttgcccaagcattctcagatatggtttcaagaggtgggtttaaacccagcagaagcattatctttgccagctggagtgcaggagacttcggagctgttggtgccaccgagtggctagagggatacctttcatctctgcatttgaaagctttcacttatattaatctggataaagttgtccttggtactagaaacttcaaggtttctgccagccctctattatatacacttattgagaagacaatgcaggacgtaagacatccaattgatgggaaacctctctatcgagacagcaattggatcagcaaagttgaggatctttcccttgacaatgctgctttcccctttcttgcatattctggaatcccagcagtttctttctggttttgtgagaatgaggactatccttatttggacactaatttggatacctatgagaaactaattcagaaagttcctcagctgaacaaaatggttcgtgcagcagcagaagtagctggtcagttcataattaaacttacccatgacattgaactgaacctggactatgatatgtataacaacaagatactgtcatttgtgaaggagctgaaccaattcagagcagatatcaaggcaatgggtctgagtctacagtggctgtattctgctcgtggagactttttccgtgctacatctagactgacgactgatttccataatgctgagaaaacaaacagatttgtcgtgagggaaatcaataaccgtattatgaaagtggaatatcacttcctgtcaccctacgtatctccaagagagtctcctttccgacacatcttctggggttccggctctcacactctcacggctttagtggagaacttgaagcttcgtcagaaaaacagtagtgcttttaacgaaacactcttcagaaaccagttggccctagctacttggactattcagggagttgcaaatgccctctctggtgacatttgggatattgacaatgagttttaaatgtaacataattaaataagagcagggcagtctgtttctagacttgtactggttgtgctaaattttcattagagctcaaatctaatgttataattctacccgatcatcctgatactaaatgtctttaggcagcagcttttagtgcagggttggacctacacttgaagttacagtggataacacttt

SEQ ID NO: 942 - DNA, 2571 bp, Cricetulus griseus
  misc_feature (2377)..(2398): n is a, c, g, or t
ggttatgatgatgagtttaatgccgtggactttaagtggtaccttcttcatcaacactgagagagatgatgactatgctggctttgtgtttggctaccagtccagcagccgcttctacgttgtgatgtggaaacaagttacccagtcctactgggacaccaaccccacaagggctcagggatactcaggcctgtctgtaaaggttgtgaactccaccaccggccctggcgagcacctgcggaatgctctgtggcacacaggaaacacccctggccaggtgtgcgcaccctgtggcatgaccctcgtcacataggctggaaggatttcactgcttacagatggcgtctcagccacaggccaaagacaggttacatcagagagtggtgatgtatgaaggaaagaaaatcatggccgactcaggacccatctatgataaaacctacgccggtggtagactaggcctgtttgtcttctctcaagaaatggtgttcttctcagacatgaaatacgaatgtcgagattcctaagcatcagctgtcaatcataaccagcgctggtactgcaccttctggaaccaaggtctagagaaaaccccctgccagcagccacttctcgccttccttgcttctcttcttgcatagtgtggacttctaagagcaggtgacctgcctcaagaaaatgcagtccagactcagcactctcagctcacggatgagacagtctcagactcaagatcatgaaccatgaagaatgactttggtttgcttttgtgaaagcaaacacatctatttacttcccaccaggaaggtgcccactccactctgccttgcccacagagccagggctcctgtgaggtcatcttggagcagcactttcagaagcattttcaggcatgtcagagggagaaggacccactaggactcagcaccgagccacccctgacagaagtctcaggggtggggaagcaggaagccaaagctgtctagggagggtggcatagctcaagagaccatgtatgaagaaaatatgagagctgttacttgttcggtactaaatcattttcaggggacagaaagacttgctgcatttcctttatgctgactcgtggagttaacccaaccatcgatacaggcacttgagtaacaggaagggagggaaagcctggcttctggacttcctccctttgggcacttctcacacacctgcagtggccagggtgggggtcaggagtgtaaggccatgctggctgcccttggctggtcacgcttggaactcttggtttattctgcatacaatgtgcagccaggagagctagagaagcagaccatctcagtgagctctagctcctctgcaggagggcagcatgcctttattttatggttagaaaggctaaatttctatcaacctagctaaaacattccttttccttgtttcttttttcctcccgttaccatggtgcaaaccagcccgagcgatcgacccgttgtacagccttagcattcccctctcgagcctgcgctggaaggatgttctgcaaacaggagcgtggactatctgaaccatcctcatagtgagtctttatgactgtaagattgtaaatacagattatttattaaccctgttctacctggaattagattgcatatggcaaatgtttgccagcaggtagctgaggcggatcagcaaattgctccagaaccagtgtgtggaatgaccaacagaagtcatcacttttcatttggggcttagagtgatgatttggactcctttggctttcccctttcttttctcgttcgtgtaggaattaggtggcggtcccattgcattcagagagtagagtaaaggaagccagaagtcgatcgtacacactctggcattgacagagaaactataagcctctttattacgagaaagcgatacaaacatgtttctttagttcattattttcccaaaagagtcaaaggtggaacttatatacaaatattacctcatttgttgtgtgactgtgtaaagaattttgcaacaagtagaaagagtttaagtgtcaaaaaacttaaaactactgctgtgtctaaaaagtcagctgttgtacctagcataaaaatcctttgcagaagatgatcccaataaagaatagctttgaaagttaaatacaacttctcaaagttactgctttcgttctatcatctttggtaccgttgcttttatttttataattattttctcattgccattggaatagagatctcagacatgtagatatgctatttaaataatttatcaggaaatactgtcatgtagagtattctatttttatacgtttgcacactgaattgaagaaatgttggttttccttgttttagtttagtttgtttcnnnnnnnnnnnnnnnnnnnnnnctttttactccccagttttactattttgccaatacccttttttttcctaggaatgtgcttttttttgtacacatttttattcattttacattctaaaacagtgtaacttgtatattactgtttcttatgtacaaggaacaataataaatcatatggagatttatatttataaa

SEQ ID NO: 943 - DNA, 4436 bp, Cricetulus longicaudatus
  misc_feature (891)..(918): n is a, c, g, or t
  misc_feature (2095)..(2124): n is a, c, g, or t
  misc_feature (3788)..(3817): n is a, c, g, or t
  misc_feature (4383)..(4397): n is a, c, g, or t
tgacaatcactgttaaccatcacaatcgaagcctaaacttgaatgttgcacttttgtccttgttgctattttgcaggactagggataaaattttgggcctgggcctggagcatgctaggaaactgctctaccattgagctagactcctaggcccaatgttgagaaactctttaacaagcacatcccatgtaaagatttaaagtacaggtatgaggtacactaacgccctagggtgaaccatacactgacactcgttcctttactcaacattgcttctccgtgacaaagcccttagggaatgaatacaaagtctatctccaataaatgaactagaaaaccaacctatcacttttccattaagagcaaggaaattggaaaatattttgtccacaagagaaaaattgaaggatgcaaaattcatatgtacccctgcaaaatttacttctgctaactattagctgcacagtgacctcaaaataagcactgttatgaattcaaacagatgagaggcaattttgttacttcagttggatcaggcaatgcttttgtatttatcaaataagctcataaaacaaagggacttttgaagtactcagtaaaagtctacattaaaaattgtttttaatgtgtgactcctgcttgcagttatgaaggtttgccttccacctacaagttgccattatctcaaaggtgaaattttagcacatggctaaaatgttctatagttacagcttcatgattcagcatcagtaattcagagtgagatcataggcagtggaaggtggtgtcatactcttttgcctgtgaaggggcgaccagggaatggcataagcatattgaatttagactgtggctcctgtgagtaccacaatttgtctctcagctcttgcnnnnnnnnnnnnnnnnnnnnnnnnnnnntttaagaatggtaaatttggctcattaggcatgttgatcaccagctccccccacccaccttatatggagtgggcagaagttttatcagcttttcgtggaaaagattccaacttggtaccgtgccatcaccacacaccagtgtgctgggttttctatttggagcttcaaattcttgcacccaaccaaaaataaatcaagccagccatcagggcaccaaaagaatactactgtgaaaaatcagcattgcctgaaacttaacatataaacaacacttctgaagcaagttttgcgtggcacatccggacactttaaaaataccatctgcttactaataacagctaccagggtgcattaaccctggaaataaattgtaaaatcagccccttaacacaaacaacacgagacgaccatcaaaagatctccacaactagaaaaacaattggcaggctgttttcagtacgagctgaggacactggaaccaccaccgcaaagccctcctcaccagatggctccaccaactcccagagctgctcaggaccccgccaacccggtttctgcaccactctcatccctgggggcttccctcccgcgtactcgcccccttccgctcaactctgcctgggctggtggagttagggtctgagtgtcaaagtctgctaatttgcataagccaatgggtgcattgcatgcaaatgaggcgggccctgattggctgacggctagccccataactccggaatcgggggcctttgtcctccagtggcccggaggaagctgtgcagtcctcacctaccgagacttaggcgagaagcggcgaagcggcgggtgggagccgagcgagcgcggggctggcgccgcgcactggggggggcaggagcagcccgcgcgccgcgtgagggactcgcacttgcaatatgactttggaggaattctcggccgcagagcagaagaccgaaaggtaagtgtgcctgcggactctgtggccgctgcccctcccgccgtcggggacccggctgacccactctcgccctgccgcccgcaggatggacacggtgggagatgccctggaggaagtgctcagcaaggcgcggagtcagcgcaccatcaccgtcggcgtgtacgaggccgccaagttgctcaatgtgtaagtggtcccggccgcccgcgcccctgcctnnnnnnnnnnnnnnnnnnnnnnnnnnnnnntctaccccgagctccctggacagtgtgcactcaccgctgccccgctgtccgcagcgaccccgacaacgtggtactgtgcctgctggctgcagacgaggacgacgacagggacgtggctctgcagatccattttaccctcatccaggcgttctgctgcgagaacgacatcaacatcctgcgggtcagcaacccgggccggctggctgagctgctgctgctggagagcgacgcgggcccggcggagagcgggggtgcctcgcagccccctgacctgcactgcgtgctggtgacggtaagggacccggggctgcagcccggaatctgttgggatagacctcggcagtgctagacgctgatctcgcgggggttctgatggtaccgagcgtgtctaagctcgtgggtggcctccagcggcggaagatagccctgtgagtcagcaggctgcccagctacctctgcctacctctgcactacctcgcgtgactattctcagagcaggacagattagataaagccaaataaattcccggctcacccttcattaagaagtcagcttcattcttcatttgctctcaaagctaaatatagaaatagagtaggagacagaccttattaattcgctggagatactctggtgtgtacagagtggaattcttttctctgaacctttgtatttgtttagatgagcccccccccccacgcacacacacacacaaacacacgccctttaaaaatttctggttgaataatgttttcagagagaaatgtgctgtcttggtcttctgtttttttgtttttgtcctttctctgccttgactggtgtaggcaagtggcaccctgattacttttgctgccagtgaaaagtgccattcatcaccagggaagataagagtgaagctaagctgcctgccctgcagctttcacatggtgtgcgagaatgttttcagagctattttacttatgaccctactagggtgcatgcttgataggttcaacttatgaatgataacctcatgcagaatggtacagataattatgcaaaactctgtggcccagtgtgcattacaggtgtttagatcttgccaaatgctacttaacagaatgctcaggttttggccctttcaaaagtagtacaattagtagcataagctgatgattttatggaaaagtaatttttctaaatttgttcttagaacccacattcatcacagtggaaggatcctgccttaagtcaacttatttgcttttgtcgggaaagtcgctacatggatcagtgggttccagtgattaatctccccgaacggtgatggcatctcaatggaaataactgaaccaaattgcactgaagttttgaaatacctttgtagttactcaagcagttactccctacgctgatgcaaggattacagaaactgatgtcaaggggctgagtgagttcaactacatgggggctaggagatgactttgcagatggacagaggtgaaaataaagaaggaagctgtgttgaaacagaaatctaagtcaaaagggacaaaaactacaaagaactgtgcaagaaagaaaactgttgatttaggatggctgagttacattaaataagccaaatattgctttgttgaaaccttaaatgtgtagcaatagtttgttttttttttgtatttgnnnnnnnnnnnnnnnnnnnnnnnnnnnnnntgatctttatgccctcaagtaaaaggaaagtgaaaaggattaattgtattttaaagctacaggttaatgtattttgatgagatgttaaattctcagaaattttattataaatcggactaagttattttatgatatgaaaggttatttatgataaagtttttgaagcacaatatctaaaataaactggtatggaataattgcatcattttcactgtgtggtttgtgttgtgcaacattgactattaacagacatttcattgaagccttgctttacactaggcagaaaaatgggtgattttagagggcttggataagggaaaaaaatgtttacggattccccttgcaaagtttgaataactacaattagttattttaatgctacaaaaatgcatgcaaaatgtagaagcagagaggagggcaaccagggccacttggaagattagtggagcttttgctgaggagaaatcattttcttggggtcttaagaaataaccttaatttctctagttagagagaggaaagggatgttgctaacagcagtttgtgcagaggtgtggaggcctgannnnnnnnnnnnnnncatagagactgactctgcatgcctctggtgtagaaagat

SEQ ID NO: 944 - DNA, 1550 bp, Cricetulus griseus
  misc_feature (113)..(132): n is a, c, g, or t
ttattatttttaattgtgtgtaggtgtataagtgcctatgtgggagtatgtatacatgcatgtaggtacctgaggaggtcagaggttttggagccccttaaagctggagttannnnnnnnnnnnnnnnnnnnaggttaagagcactgactgatctttgacaaacctgagaaaaacaagcaatggggaaaggattccctgtttaataaatggtgctgggaaaactggctagccatatgtaaaaagctgaaactggatcccttccttacaccttatacaaaaatcaattcaagatggattaaagacttaaacgttagactgaaaaccataaaaaccatagaagaaaacctaggcattaccattcaggatataggcatgggcaaggacttcatgtctaaaacaccaaaagcaatggcaacaaaagccaaaattgacaaatgggatctaattaaactcaagagcttctgcacagcaaaacaaactaccatcagagtgaacaggcaagccacagaatgggagaaaatttttgcaacctacttatctgacaaagggctactatccggaatctgcaatgaactcaaacaaatttacaagaaaaaaacaaacaaccccatcaaaaagtgggcgaaggacatgaacagacacttctcaaaagaagacatttatgcagccaaaaaacacatgaaaaaatgctcaccatcactggccatcagagaaatgcaaatcaaaaccacaatgagatatcatctcacaccagttagaatggcaatcattaaaaagtcaggaaacaacaggtgctggagaggatgtggagaaataggaacacttttacactgttggtggaactgtaaactagttcaaccattgtggaagtcagtgtggcgattcctcagggatctagaactagaaataccatttgacccagccatcccattactgggtatatacccaaaggactataaatcatgctgctataaagacacatgcacacgtatgtttattgcagcactattcacaatagcaaaggcttggaaccaagccaaatgtccaacaatgataaactggattaagaaaatgtggcgcatatacaccatggaatactatgcggccataaaaaatgatgagttcatgtcctttgtagggacatggatgaaattggaaatcatcattctcagtaaactatcgcaagaacaaaaaaccaaacactgcatattgtcactcataggtgggaattgaacaatgagaacatatggacacaggaagggaaacatcacactctggggactgttgtagggttgggggaggggggagggatagcactgggagatatacctaatgctagatgacgagttagtgggtgcagggcaccagcatgtcacatgtatacatatgtaactaacctgcacattgtgcacatgtaccctaaaacttaaagtataataataaaaaaaaaaaagaataatggccagggtttgatggacaaggtgcctggggaatctgggtttttctgccttaactcttcaccttattcctggtcacattctaggcatag

SEQ ID NO: 945 - DNA, 1550 bp, Cricetulus griseus; identical to SEQ ID NO: 944
  misc_feature (113)..(132): n is a, c, g, or t

SEQ ID NO: 946 - DNA, 313 bp, Mesocricetus auratus
cgggccaccccttactccctgcaggagacactgacactggtgtgcctggctggcctgctcatgctgttcacagtgtttggcaacgtgctggtcatcattgcggtgttcaccagccgtgcgctcaaagcgccccaaaacctcttcctggtgtctctggcctcagctgacatcctggtggccacgctggtcattcccttttctttggccaacgaggttatgggctactggtactttggtaaagtgtggtgcgagatctacttggcgctcgacgtgctcttctgcacgtcttctatagtgcacctgtgcgccatca

SEQ ID NO: 947 - DNA, 2088 bp, Cricetulus longicaudatus
  misc_feature (458)..(484): n is a, c, g, or t
  misc_feature (1076)..(1126): n is a, c, g, or t
  misc_feature (1196)..(1221): n is a, c, g, or t
  misc_feature (1346)..(1404): n is a, c, g, or t
  misc_feature (1933)..(1950): n is a, c, g, or t
gtggaagattgcatgcgacaccccgcgcgccccccgcatcccttcgtcgggacgctccctgcggccgtctgtgagacctcacgtccccgagccccacgcctgagggcgacatgaacgctctggccttgcgagacctccggacccgagaccgcttctggccacacgaaccggcgctcctgcccccggggtgaagcgcagcccgccgcccagacacatggccccaagcccaagaccccagcatatcctgctctggagggatgcccactccttccacctcctgtctccactgatgggcttcctcagtcgggcttggagccgcctgagggtcccggaagccccagagccctggccggcagaaacagtaactggagcagatcagatagaagctgatgctcatccggcacctccccttgttcctgagaaccacccccctcagggggaggctgaagaaagtggannnnnnnnnnnnnnnnnnnnnnnnnnnggaccctgcctggatgtgcaagccaacagttcccctcctgaaactttgggactttcagatgatgataagcaaggacaggatggccccagagagcagggaagggcacacacagctggcctgcctatactgctgtctcctggtctgcaaagtgctgataagagccttggagaggtggtggctggagaagagggagtgactgagctggcttaccccacatcacactgggagggttgtccatctgaggaggaagaggatggagaaactgtgaaaaaggctttccgagcctctgctgactctccagggcacaagtccagcacttctgtgtattgcccaggggaggcagaacatcaagccacggaggaaaaacaaacagaaaataaagctgacccccccagctctccttcaggctcccactccagagcctgggagtactgctctaagcaggagggagaagccgacccagagccacacagggcagggaagtatcaactgtgtcagaatgcagaagctgaagaggaggaagaagccaaggtttcatctttgtctgtgtctagtgggaatgccttcctgaaggcctgggtgtatcgacctnnnnnnnnnnnnnnnnnnnnnnnnnnnnnnnnnnnnnnnnnnnnnnnnnnngagggtaaggccttgtcttcccctacctctcctgaacatgacttcctgaaggcctgggtatatcgacctnnnnnnnnnnnnnnnnnnnnnnnnnntagtgactggggatcagctgaggaagagggtaaggccttgtcttcccctacctctcctgaacatgacttcctgaaggcctgggtatatcgacctggagaggacacagaggatgaccaagacagtnnnnnnnnnnnnnnnnnnnnnnnnnnnnnnnnnnnnnnnnnnnnnnnnnnnnnnnnnnntgcctttctcaagacctgggtctgttgccctggagaggacacagaagatgacgactgtgaggttgtggtcccagaagattcagaagcagctgacccagacaagagtcccagccatgaggctcagggttgtctgcctggagagcagacagagggacttgtggaagcagagcactctctcttccaggtggccttctatttacctggagagaagccagcaccaccttggactgcccctaagctgccccttcggctgcaaaggaggcttacgttgttgagaacccccacccaggatcaggaccctgagactcctttacgggccagaaaggtgcatttctctgagaatgtcacagtccatttccttgctgtctgggcaggaccagcccaggctgcccgacgtggtccctgggagcagcttgcacgagataggagccgttttgctcgaagaattgcccaggcggaggagaagctgggtccttacctcacccctgccttccgagccagagcatgggcacgccttggaaacccatcnnnnnnnnnnnnnnnnnngcccatctgtgaccacaccttcttcccttcccagtgaagcccctccttccagcctggactgcggtgggaggcgtggctaaacccaagtcgtttcctgttatttattttaataagaaataaagccttttgatttataca

SEQ ID NO: 948 - DNA, 461 bp, Cricetulus griseus
agttaacaagctaaacctgccctgaagggagaaaatgaggaaaccaggcacgtggtctcccggaggggtggtcgagtgccttcctaacattccggcccgggttctgggcagctgcaccccacctacctctgcagacagggtcttccagggcggctcgcgcggggagcgcagaggctgccatagccgggtccagctcagagggcgagcagctcgctttgcagggacagggggagaggggcggggcccacatgcgccctggccttggcacgcctccgtcttcggctgcgattggtcggtgagcttttaaaggaaagcgcgaacctgaggacgcttcccactcaccgaccccggaccttggcgctcaggctcgcacagccgccatgaattacatcaatctgcccaccgtgctgcccggctcccccagcaagacccggggccagatccaggtgcggggtccgggc

SEQ ID NO: 949 - DNA, 1424 bp, Mesocricetus auratus
  misc_feature (304)..(370): n is a, c, g, or t
  misc_feature (819)..(879): n is a, c, g, or t
  misc_feature (915)..(933): n is a, c, g, or t
  misc_feature (973)..(990): n is a, c, g, or t
  misc_feature (1012)..(1034): n is a, c, g, or t
  misc_feature (1089)..(1106): n is a, c, g, or t
atctcttgaccttgagcaacctagctctgtttccctatccgcaaaataggggaatgtctgagaatccattcttaaaataccacttctgagacaaagtcttaaggcgcaatttaaagtcttggctttgaaaaatacctttggattcctgtctttaaaaaaaaaaaaaaaattaccaagtctgactgacagcctgagcccagtcttgagagaagcacttggtggaaagaaagaactgaccactaagagttgtcctctgacctccacagttgtgccatggtatacatagcacacatacacagagatnnnnnnnnnnnnnnnnnnnnnnnnnnnnnnnnnnnnnnnnnnnnnnnnnnnnnnnnnnnnnnnnnnngagacagatagaaatcttaggaaagtcctcctctacggcagtgtaaccatccagacgaggagaagttcatgacaaccgtctgcttcagaggacagagtatcggaaagctggccaatatgtacaaaacttcaccagatgtcatctttgtatttagattcagaacccacttcggtggtggcaagacaacaactggctttggcatgatctgtgattctttagattatacaaagaagaatgagcctacacacagacttacaagacacagcgcctctatgagaagaagaaaaaaagacctcccgaaaacagcgaaagggacacaagatcagaatgaagaaggtcaggggggactgcaaaggccaacgttggtcctgggaaaaagccaaaggagtagatcctgtggtgactgatctgctgtgatgtgcagattctgagaggacaataactaaaannnnnnnnnnnnnnnnnnnnnnnnnnnnnnnnnnnnnnnnnnnnnnnnnnnnnnnnnnnnntccttcaaggaaggaccttgctggcttgatgtcttnnnnnnnnnnnnnnnnnnnattttttgtttttcgagacagggtttctctgtgtagcccnnnnnnnnnnnnnnnnnnctctctacttttttgtttttcnnnnnnnnnnnnnnnnnnnnnnncctggctgtcctggaactcactctctagaccaggctgcctcaaactcagaaatcnnnnnnnnnnnnnnnnnnaaatgctgggattaaaggcatgcgccaccactgcccggcattgatgtcattttaatgtgttcccaaatggcccacatcctagaaaattggtctcctgtgtgtggtgctgatgggggtgaagcctttaagaggtgggacctggtatgaggtcaccacactcaaagatttcatgaggttgtcacaggagcacatgaggctgtctcactggctttggcccttccgtgggtgcttctccaccatgtaataatgttgctgggtagggaagggtttaccagggctggctccgtactcgttggactttgagcacagattgagcaa

SEQ ID NO: 950 - DNA, 542 bp, Cricetulus sp.
tcaggactggttccatgggcggtgtgtgacagtgccccgcctcctcagctcccagaggcccggttttacctcatccccactgctggcctggtgggaatgggacaccaaattcttgtgccctctgtgtatgcgctcacggcgcccacgcttggaaaccatcctggcactgctggtagccctacagagactgcctgtgcggctgcctgagggtgaggctctacagtgtctcacagagagagccatcagctggcaaggccgtgccagacaggttttggcctctgaggaagtgactgctctgttgggacggctggctgaactccgccaacggctacaggctgaatccaagcctgaggaatcccttgcttactcttcagatgctggagagggcgctggccatatacctaaggtccaggggctgttggagaatggggacagtgtgaccagtcctgaaaaggtagccacagaggagggctcaggtaagagagatctggagctactctcctcactattaccacagttgactggccctgtgttggaactgc

SEQ ID NO: 951 - DNA, 2069 bp, Mesocricetus auratus
  misc_feature (372)..(395): n is a, c, g, or t
ttcaaatactacttgtcaacataaagtgactaggcttaaatatacataccacccaaagaaatctgttaaagtggacctctgacaacaggttactttagtctccagcagaggtgcagaaatgccatcggagactgctgtaccgcctccacaccccattcctccggatggaggatggggttgggtagtagttggagcagcctttatctccatcggattttcatatgccttccccaaagctgttacagtattcttcaaagatatccagcaaatattccaagctagctacagtgaaatcgcatggatatcatccatcatgctggctgtaatgtatgcaggaggtcccatcagtagtgtcttggtgaacaactacgnnnnnnnnnnnnnnnnnnnnnnnngagggttgttatgctgtactggaatgatcttggcttccttcagtaacagcgtgttagaactttacctcacgattggcttcatcggaggtttaggattagcgttcaacctgcaaccagccttaacaataatcggaaaatacttctataggagacgacccatggcgaatggcttggccatggctggaagccctgttttcttaagctcactggctcctttcaatcagtacctattcaacagttatggctggaagggaagcttcctgattttgggaggcatatttttgcactcctgtgtggctgggtgcctcatgagacctgtccagacaagtccacgtaagtcgaagtctaaaagtaaagttggttcaagacaagatggaagtatgaagaaagccagtaaggtatcaacagcagagaagattaatcgctttttagatttcagcctttttaagcatagaggatttttgatctacctatctggaaatgtcattatgtttctagggttttttgcccctattatattcttggctccatatgctaaagacaaaggagtggacgaatataatgcagctttattgctgtctgtgatggcttttgttgatatgtttgctcgaccaactggaggattaatagccaactccaagttaatccgtccacgaatccagtacttcttcagctttgcaatcgtgttcactggtatttgccatctcctctgccccctggcagatacctacccagctttggtggtctactctatattctttggctatggatttggaagtgttagcagtgtcctctttgaaactctcatggaccttgttggacctgccaggttttccagtgctgtgggactcgccacaattgtggagtgttgtcctgttcttcttggccctcctcttgctggcaaattggtcgataaaactaaagactataaatacatgtatatagccagcgggacaattgtggtaatatcaggcatttatctgttcatcggcaatgctataaactatagactcctcgccaaggaaaggaaaagagagaaagcaaggaagaagaaatcagccacccatccttccagagaatcggaggctttgagcagatcaaaacaggatgatgtttctgtcaaagtctcaaatccacacaattctccctcagacagagaaagagaaagcaatatttaacatgagtctcatcttcaatcagtgtttatcaatttacttatgagtttctttgtgtttttcaaagtgttgaaaagaattttagctaaaagaaaggatcacaaacagtaacgaaacttgtattttcctcaatgacactctgcaaatcaatattttgacatttgtttggataggtaaattttgagatcgtgaacacaggaaatccatgcagtggcttatttgcatacctgacttggggtgttgtgatgaaaaagaagaatttttaaatctttcactgacatttacttctagctgtagaatgaaatctgcatcccagacccccctggctttcgtaagcatatgtcaattccatagaatgtctctcttcaaagttctttctttttttaatttgatattgttataaaataaattgaggacagcatttctcttcacacacaaagaatcacatatccacactaacactgagtatctggagaccatgaagaaataaatgaatttg

SEQ ID NO: 952 - DNA, 2782 bp, Mesocricetus auratus
  misc_feature (2014)..(2035): n is a, c, g, or t
attgtagaattgcagtttgaaaaagaaaaagtaagcttgaaattagaagaagaaattcaagaaaataaagatttaataaaggagaataatgctacaagacatttatgtaatctgcttaaggaaacctctgctagatctgcagaaaagacaaataaatatgaatatgaacgggaagaaaccagacaagtttatgtggatctaaataataacattgagaaaatgatactagcttttgaggaacttcgtgtgcaagctgagaatgccagactggatatgcattttaagttaaaggaagatcatgaaaaaattcaacaccttcaagaagaatataagaaggaagtaaacgacaaggaaaatcaggtatcactactattgatccaaagaactgagaaagaaaataaaatgaaagatttaacatttctgctagaggaatccagagataaagttaatcagttagaggacaaaacaaaattacaagatgaaaacgtcaaagaattaaataaaaagaaggatcatttaacatcagaacttgaagatactaaaatgtcattgcaaagaagtatgaacactcagaaggctttagaagaagatttgcagattgcaacaaaaacaatttatcagctcactgaagaaaaagaagctcaaatggaagaatttaacaaagctaaaactgatcactcatttatggttactgaacttaaagctactacatgcaccttggaggaattactgagaacagaacagcaaagattggtaaaaaatgaagatcaactgaaaatacttaccatggagctgcagaagaaatcaaatgaactggacgagatgactaaatttaaaaataacaatgaagtgaagcttgaagaattgaaaaaaatattggcagaagaccaaaaacttttagatgaaaagaaacaagttgagaagcttgctgaagaattacaagggaaagaacaagaactaactctccttttgcaaaccagagagaaagaggtccatgatttagaagaacaattacttgtcactaaaataagtgatcagaattattcaaagcaggttgaagaactgaaaactaagcttgaagaagagaaacttaagaatgctgaattaactgctagctgtggcaagctttcccttgagaacaataaattgacacaagaaacaaatgatatggccctagaactcaagaaataccaagaagatatcactaatagcaaaaagcaagaagaaaggatgttgaaacaaatagaaaatttggaagaaaaagaaacacatttaagggatgaactggaatcagtaagaaaagagttcatacagcaaggaaatgaagttaaatgtaaattggataagagtgaagaaaatgctcgaagcattgaatgtgaagttttaaagaaagaaaagcaaatgaagatactagaaaataagtgtaataatttaaggaaacaagctgaaaataaaagcaagtatattgaagaacttcatcaggagaataaggccttgaaaaaaaagagctcagcagaaagcaaacaactgaatgcatatgagataaaggtcaacaaattacagttggaattagaaagtgccaaacaaaaatttcaagaaatgactgacaactatcagaaagaaattgaggtcaaaaaaatatcagaggaaaagcttttgggagaggttgagaaagcaaaagcaatggttgatgaagcagtaaaattacagaaagaaattgatttacgatgccaacataaaattgctgaaatggtagcacttatggaaaaacataagcaccaatatgataagattgttgaagaaagagactcagaattaggactttgtaaaaatcgagaacaagaacagttatctgtgaagactgctttggagactgaactatcaaatatcagaaacgaacttgtatcccttaagaagcaacttgaaatagaaagagaagaaaaagaaaaactaaaacttgaaaaagaaaacacagctattctcaaagataaaaaagacaagaaaatacagacannnnnnnnnnnnnnnnnnnnnnccacttgtcagaaatttgattctaaaacaactccttcacaaaatatatctcggatttcctcatcaatggagagtggcaaaaccaaagataacagagattgtctgcggacatcagcaaaaattttatctacagcattcgtaaaggaatatacagtgaagacaccaactaaaatgcaaatgtatcaaagagaaaacaagtatatacctactggaagaagtaataaaaagagaaaaacagtctttgaatttgatgttaattcagatagttcggaaactactgatctcttgagcatggtttcagaggaagagatatcaaacagactttacaataataattcaccaaattctcatctaacccccaaacagactccattatcactatcaactcctgaatcttttgtgtcacttggaggtgtgagaaaaatgagagaggaccgttgggcaacaattgctaaaactgacaggaaaagaagactaaaggaagcagaaaagttatttgcttaatttcatgaaatcaatgctgatcatagagtctaataacattaaatgtttaactattttattgtttaccagagaccaaactgtactcaggaatttagactttaaaattacttgcataaataatttgtgttcatgttattatatttttggcttaaatatatgttatctgaattttaaaattgtattcagataattacatttgtttttatttgctatggatattaaagttccaagttttttaacttga

SEQ ID NO: 953 - DNA, 2792 bp, Cricetulus griseus
  misc_feature (817)..(834): n is a, c, g, or t
  misc_feature (850)..(868): n is a, c, g, or t
  misc_feature (1895)..(1910): n is a, c, g, or t
cgtcccgtgcgcggtcactcagcgaagatgcctgaggaaacgcagacccaagaccagccaatggaggaggaagaggtggagacctttgcctttcaggcagagatcgcccagctgatgtccttgatcatcaacaccttctactccaacaaagagatctttctgagggagctcatttcaaactcgtcagatgctctggataagatcagatacgagagtctgacagaccctagtaaattagactctgggaaggagctgcacattaatattattcccaacaaacaagaccgaacccttactatcgtggatactggaattggaatgaccaaggccgacttgatcaataaccttggtaccattgccaagtctggcaccaaagccttcatggaggctttgcaggctggtgcagacatctctatgattggccagtttggtgttggtttttacactgcgtatttggttgccgagaaagtgactgtgatcaccaaacataacgatgatgagcagtacgcctgggagtcctcagccgggggctccttcacagtgaggactgacacaggtgaaccaatgggtcgtggaacaaaggttatcttacacctgaaagaagaccaaacggagtatatggaggaaaggagaataaaggagattgtgaagaaacattctcaatttatcggctatcccattactctcttcgtggagaaggaacgcgataaggaagtcagtgatgatgaagctgaagaaaaagaagataaagaggaagagaaggaaaaggaagaaaaaggaatcgacgacaaaccagaaatagaagatgtgggttctnnnnnnnnnnnnnnnnnnaagaaggatggcgacnnnnnnnnnnnnnnnnnnntaaaggagaagtacattgaccaagaagagctcaacaagacaaagcctatttggaccaggaatcctgatgacattactaatgaagagtatggagagttctacaagagcttaaccaacgattgggaagaacatttggcagtgaagcatttttctgttgaaggacaattggaattccgggcccttctctttgtcccaagacgtgctccatttgatctgtttgaaaacagaaagaaaaagaacaacattaagttgtatgtgcgcagagttttcatcatggataactgtgaggagttattccctgagtatctaaatttcattagaggagtggtggattctgaggatcttcctctaaatatttcccgtgaaatattgcagcaaagcaaaattttgaaagttatcagaaagaatttggtcaggaaatgcttagaactatttcatgaactggcagaagacaaagagaactacaaaaagttttatgagcagttctctaaaaatataaagcttggaattcatgaagactctcaaaatcggaagaagctttcagagctgttgcgatactatacatctgcttctggagatgagatggtttctctcaaggactattgtaccagaatgaaggaaaaccagaagcatatctacttcatcacaggtgagaccaaggaccaagttgctaactcagccttcgtggaacgtcttcggaagcatggcttagaagtaatctatatgattgagcccattgatgagtactgtgtgcaacagctgaaggagtttgagggcaagaccttggtgtctgttaccaaagaaggactggaacttccagaagatgaagaggagaaaaagaaacaggaagagaaaaagaccaaatttgaaaacctctgcaagattatgaaagatattttggagaaaaaagttgagaaggtggtcgtatcaaaccgattggtgacgtccccttgctgtattgtcacaagcacatacgggtggacagcaaacatggagagaatcattaaagctcaagctctcagagacannnnnnnnnnnnnnnncatggcagcaaagaaacacctggagataaaccctgatcactccattattgaaaccctacgacaaaaggcagaggctgacaagaatgacaagtctgtgaaggatctggtgatcttgctgtatgaaactgcactcctgtcttctggtttcagtctggaagatccccagacacatgctaacaggatctacaggatgatcaagcttggtctaggtattgatgaagatgatcctactgtggatgataccagtgctgctgtaactgaagaaatgccacccctggaaggagatgacgacacatcacgcatggaagaagtcgactaagcttcaccagagctatatgtttgatgcttactttcattccttctgataatatattttcaaggatttttgtttgatttttgttaacatttaaaacatctgtgtggcatgttttctaaggggaagaaaaatttctttctacttgtgatactgtgatactctaggcttgactcaacgggttggtagtacatttgtgtaagacaaaatgtaacctattaacttgtggtctgcagtgtttagctgttgagctgattccttagtagaccaaatttgtcacttttggaagtgttctaagatagcttcatgtttaaaaggaaaaagattaagatgggcctaagtttcatcttaaaattttcatcccctgtagttaattctgcatgtactagtcttagaagtaaatacacaagctaaaacaactgaggaattccccatgtggcttgttttcaaagtactgagaacaaaactaagcttccctaggtcttgtaagtgagcaaggcttgtgaatggaaatatagtgcccaatcacattctgctttaaaaggtaaatacagatgagataaaaacct

SEQ ID NO: 954 - DNA, 1211 bp, Mesocricetus auratus
  misc_feature (888)..(902): n is a, c, g, or t
  misc_feature (1120)..(1158): n is a, c, g, or t
cagtcccagagccttcggggactgagctggacagacgctcagtcccagagccttcggggagggccaagagctttcaacttggggggggggtccacaggagcaggcgcgtcgtcattggccggggcggggcggggggtgtcccattggccccgtccggaccgcctcgtgattggctcctccctcggctataaggcggcgaccggctggtccgtgggagcgcgcgggagcgcacggcgggggcggcggctcggggaagcaggcgagcggaggcccgtggccgggcgcccatggcgttcgcgctgctgcgcccggttggcgcgcacgtgctgtactcggacgtgcggctgctgagcgaggacgaggagaaccgcagcgagagcgacgcctcggaccagtcgttcgggtgctgcgaagggctggagacgacgcggcgcggcccaggtcccgggggcgggcggcgggcaagcagcggcgcgggcccggtggtggtggtgcggcagcgacaagcggccaacgcgcgcgagcgagaccgcacgcagagcgtgaacacggccttcaccgccctgcgcacactcattcccactgaaccggtggaccgaaagctgtccaagatcgagacgctgcgtctggcgtccagctacatcgcgcacctggccaacgtgctaatgctgggcgacgcagccgacgatgggcagccgtgtttccgcgcggcgggcggtggcaagagcgcggtccccgccgccgacggccgtcagccacgctccatctgcaccttctgtctcagcaaccagcgcaaagggggtagccgtcgtgacctggggggcagctgcttgaaagtgaggggtgttgcccccctcagagggcctcggcgatgagcctggtccctgnnnnnnnnnnnnnnngaaggactccagagaaagaggctaggagccagcccctcactggacagaggagaagattccagaagcccaaaccactcctgctttgtgtagggaccagaggacaatggcctggacacagggcccaccctggagagccatgaggacccaactagccattcaggcccagctggccaaggacaaggcagaaagttcagaaaaccaaagactatttttgaaannnnnnnnnnnnnnnnnnnnnnnnnnnnnnnnnnnnnnntaatgtgatatgtgagagaatttggtggggttaaaataaaggtatttttaaat

SEQ ID NO: 955 - DNA, 253 bp, Cricetus cricetus
acatggagtgggggcctttggggacgatgctcactggcctactcagcacctgcttgatgctagtgtggaccaggcatccatcaatccaggcaaacagaggtatggctagtaggcccaggcagtggtggtgagcaggggctgcaccagcgagcatagctgacggggcctctgctttcacgtggacacgcacgcgccttcatgcaggtttgagaagatgatcagtggcatgtacctgggtgaaatcgtccgcaac

SEQ ID NO: 956 - DNA, 1603 bp, Mesocricetus auratus
ataacaacctaattgtttcctaacagtccagcagcccttcctagggtcacctgcatcatacccaaccccacttcgatctccttcctgtgttgaccatgcctgggtggagctgcctggtgacaggagcaggagggtttctgggccagaggatcatccgcatgttggtgcaggagaaagagctgcaagaggtcagagccctggacaaagtcttcagaccagaaaccagggaggaattctgtaagctgcagacaaagaccaaggtgacagtgctggagggtgacattctggatgcccagtgcctgaggagagcctgccagggcatctccgttgtcatccacactgctgccgccattgacgtctttggtgccattcccagacagaccatcatagatatcaacctgaaaggtaccctgaacctgttggaggcctgtgtccaggctagtgtgccagccttcatctacaccagctcaattgatgttgcggggcccaactcctacaaggaaatcgtcctaaatggccatgaggaacaacagcatgaaagcacatggtctgatccatacccatacagcaaaaagatggctgagaaggcagtgctggcagccaatgggtcctccctgaaaaatggtggcactttgcatacttgtgccttaaggcctatgtacatctatggagagaaaagtccattaatttctgtcacaataatcagggccgtcaaaaatagtggtattctggatgttactggaaaattctccacagtcaacccagtgtatgtgaataatgcagcctgggcacacattctggctgccaggggcctacaagaccccaggaagtcaccaaacatccaaggacagttctactacatctcagatgacacccctcaccaaagctatgatgatttaaattacgtcctgagcaaggactggggcctccgccctgattccagttggagacctcctgtggccctgctgtactggcttggcttcctgctggaattggtgagcttcctgctgcgtccggtctacaactaccagcctcccttcaaccgacacttggtcacactctcaaatactgtgttcaccttctcctacaagaaagctcagcgagatctgggctatgagccccttgtcggctgggaggaagccagggagaacacttcagagtggatcgggtcactggtggagcagcacaagggaacactgaacacaaaggctcagtgatgtgactggcgatggcgggaacatgacctgggtgctgtcaggaaatagttgtcaggttctccagaagagacagaggcacaacccaggtcttactgcctccctttgacacagagatcaacttagtgtcttcctcaagacaccagcagctggtccctgacccagccacagggtttcttccctccacacctgcccagtgacacacatgtggctgtgcctcagctgctgtgacctgtgacaacaggcttcagcaattgcaatttcctgtcacatagagttcagtattggttttctttgcactctcaagttctatatcatatcctgcctttgagaaaatcccattgctttatgaagctcaacagaaatagaaataaatattgcaatacctt

SEQ ID NO: 957 - DNA, 1762 bp, Mesocricetus auratus
  misc_feature (785)..(799): n is a, c, g, or t
atcaattacttgtttccctcgtgccgcttccaaagacagctgctactcctagaactctctgattcctgcttccagttcaagaagggagctctctgctgtggcctgctgccattcagacctctaactcctggaaacaaaacgggtgggagatggacgaggtcttccatgggggatcatgaaaatttcagatgtccttattttatgtatgccatctccagaatcaccctacattacccgctgccctcgctggatctgtttcctgtgttggccatgcctggatggagctgcttggtgacaggggctggagggtttctggggcaaaggattatccacttgctggtacaggagaaggatctggaagaggtcagactcctggacaaggtgttcagaccagaaaccagggaggaattcttcaagctgcagacaaagaccaaggtgacagtgctggagggtgacattctggatgcccagtgcctgaggagagcctgccagggcatctccgttgtcatccacactgctgccgccattgacgtctggggtatcattcccagacagaccatcatagatatcaatgtgaaaggtaccctgaacctgttggaggcctgtgtccaggctagtgtgccagccttcatctacaccagctcaattgatgttgcggggcccaactcctacaaggaaatcgtcctaaatggccatgaggaacaacagcatgaaagcacatggtctgatccatacccatacagcaaaatgatggctgagaaggcagtgctggcagccaatgggtnnnnnnnnnnnnnnngtggcactttgcatacttgtgccttaaggcctatgtacatctatggggaaaaaagctcaatactttcagggataatgattagggccatcaaaaataatggtattctgaaagttactggaaagttctccacagtcaacccagtgtatgtgagtaatgcagcctgggcacacattctggctgccaggggtctgcaagaccccaagaagtcaccaaacatccaagggcagttctactacatctcagatgacacccctcaccaaagctatgatgacttaaataacaccctgagcaagaaatggggcctccgccctgattccagttggagacctcctgtggccctgctgtactggcttggcttcctgctggaattggtgaacttcctgctgcgtccggtctacaactaccagcctcccttcacccgatacttggtcacaatctcaaatactgtgttcaccttctcctacaagaaagctcagcgagatctgggctatgagccccttgtcggctgggaggaagccagggagaacacttcagagtggatcgggtcactggtggagcagcacaagggaacactgaacacaaaggctcagtgatgtgactggcgatggcgggaacatgactgggtgctgtcaggaaatagttgtcaggttctccagaagagacagaggcccaacccaggtcttacttgcctccctttgacacagagatcaacgtagtgtcttcctcaagacaccagcagctggtccctgacccagccacagggtttcttccctccacacctgcccagtgacacacatgtggctgagcctcagcttctagttccaaaatattcagcacctcttgtaccttagagctctctccattggctacatctcccccacaaaaagcatttcttacctttggaaaattcccattactttatgaagtgcaatcaaaggagcaataaatatttgttaatacctc

SEQ ID NO: 958 - DNA, 4863 bp, Cricetus cricetus
  misc_feature (627)..(642): n is a, c, g, or t
  misc_feature (1393)..(1408): n is a, c, g, or t
  misc_feature (2490)..(2785): n is a, c, g, or t
  misc_feature (2928)..(2953): n is a, c, g, or t
  misc_feature (3696)..(3710): n is a, c, g, or t
agccgagcccgtgcgcgcgccgccatgcccttggccttctgcggtaccgagaaccactcggccgcctaccgggtggaccagggcgtcctcaacaacggctgcttcgtggacgcgctcaacgtggtgccgcacgttttcctgctcttcatcaccttccccatcctcttcatcggatggggcagccagagctccaaggtgcacatccaccacagcacctggctgcactttccagggcacaacctgcgctggatccttaccttcattttgctcttcgtccttgtgtgtgagatcgctgagggcatcctgtctgatggggtgacagaatcccgccacctccacctgtacatgccagccgggatggcgttcatggctgccatcacctctgtagtctactatcataacatcgagacctccaacttccccaagcttttgatcgctctgctcatctattggaccctggccttcatcacgaagaccatcaagtttgtcaagttctatgaccacgccatcggcttctcccagctgcgcttctgcctcacggggcttctggtgatcctgtatgggatgttgctgcttgtggaggtcaacgtcatcagagtgaggaggtacatcttcttcaagacgccnnnnnnnnnnnnnnnncctgaggacctgcaggacctgggtgtgcgctttctgcagcccttcgttaacctgctgtcaaaggggacctattggtggatgaatgccttcatcaagacggcccacaagaagcccatcgacctgcgggccatcgcgaagctgcccatcgccatgagagccctcaccaactatcagcgcctctgcgtggccttcgatgctcaggcgcggaaggacacacagagcccacagggtgcccgggccatctggagggctctatgccatgcctttgggagacgcctgatcctcagcagcacattccgcatcctggctgacctgttgggcttcgctggaccactctgcatctttgggatcgtggaccacctggggaaggagaaccacgtcttccagcccaagacacagtttctcggggtttacttcgtctcttctcaagagttccttggcaatgcctacgtcttggccgtgcttctgttccttgccctgctactgcaaaggacattcctgcaagcctcatactacgtcgccattgaaactggaattaacctgagaggagcaatccagaccaagatttacaataaaatcatgcacatgtccacctccaacctgtcaatgggggaaatgactgctgggcagatctgcaacctggtggccatcgacacaaaccagctcatgtggttcttctttctgtgcccaaacctctggacgatgccagtacagatcattgtgggcgtgatccttctctactacatccttnnnnnnnnnnnnnnnnttggagcagctgtcatcattctgctggctcctgtacagtactttgtggccaccaagctctcccaggcacagcggacgaccttggagcactccaacgagaggctgaagcagaccaacgagatgctccggggcatgaagctgctcaaactgtatgcgtgggagagcatcttctgctccagggtggaggtgactcgcaggaaggagatgaccagcctgagggcgtttgctgtctacacttccatctccatcttcatgaacacagccatccccattgctgccgtcctcatcaccttcgtgggccacgtcagcttcttcaaagagtcggacttgtcaccctcggtggcctttgcctccctctctctcttccacatcctggtcactccactgttcctgctgtctagcgtggttcggtccactgtcaaagccctggtgagcgtgcaaaaactgagcgagttcctgtctagtgcagagatccgtgaggagcagtgtgccccccgagagcctgcaccccaaggccaagccggcaagtaccaggcagtgcccctcaaggttgtgaaccgcaaacgcccagcccgggaagaggtccgggacctcctgggcccactgcagaggctggcccctagcatggacggggatgctgacaacttctgtgtccagatcatcggaggcttcttcacctggacccctgatggaatccccactctgtccaacatcaccatccgtattccccgaggtcagctaaccatgattgtggggcaggtgggctgcggcaagtcctcgctcctcctcgccaccctgggggagatgcagaaggtgtcgggggccgtcttctggaacagcaaccttccggacagcgagggagaggaccccagcagcccagagcgggagacagcagctggctcggatatcaggagcagaggccccgtggcctacgcatctcagaaaccatggctgctaaacgccaccgtggaagagaacatcaccttcgagagtcccttcaataagcagcggtacaagatggtcatcgaagcctgctccctgcagccggacatagacatcctgccccacggagaccagactcannnnnnnnnnnnnnnnnnnnnnnnnnnnnnnnnnnnnnnnnnnnnnnnnnnnnnnnnnnnnnnnnnnnnnnnnnnnnnnnnnnnnnnnnnnnnnnnnnnnnnnnnnnnnnnnnnnnnnnnnnnnnnnnnnnnnnnnnnnnnnnnnnnnnnnnnnnnnnnnnnnnnnnnnnnnnnnnnnnnnnnnnnnnnnnnnnnnnnnnnnnnnnnnnnnnnnnnnnnnnnnnnnnnnnnnnnnnnnnnnnnnnnnnnnnnnnnnnnnnnnnnnnnnnnnnnnnnnnnnnnnnnnnnnnnnnnnnagtgccagctctttgagcactggaagaccctcatgaaccggcaggaccaagagctggagaaggagacagtcatggagaggaaagcctcagagccatctcagggcctgccccgtgccatgtcctccagagacggccttctgctnnnnnnnnnnnnnnnnnnnnnnnnnncagccgaaagcgaggaagatgacaacttatcttcagtgctgcatcagcgagctaagatcccctggcgagcctgcactaagtatctgtcctctgctggcattctgctcctgtccctgcttgtcttctcccagctgctcaagcacatggtcttggtggccattgattattggctggccaagtggacggacagtgccctggtcctgagccccgctgccaggaactgttcgctcagccaggaatgtgacctggaccagtctgtctatgccatggtattcaccttgctctgcagcctgggtatcgtgctgtgcctggtcacctctgtcactgtggagtggacgggactgaaggtggccaagaggctacaccgcagcctgctcaaccgcatcatcctggcccccatgaggttctttgagaccacacccctcgggagtatcctgaacagattttcatccgactgtaacaccattgaccagcacatcccatccacgctggagtgtctgagccggtccaccctgctgtgtgtctccgccctgactgtcatctcctatgtcacacccgtgttcctcgtggccctcttacccctagctgttgtgtgctacttcattcagaagtacttccgagtggcatccagggacctgcagcagctggacgacacgacgcagctcccgctcgtctcacactttgctgaaactgtggagggactcaccaccatccgtgccttcaggtacgaggcccggttccannnnnnnnnnnnnnnatataccgactccaacaacatcgcctccctcttcctcacggcagccaacagatggctggaagtctgcatggagtacatcggagcgtgcgtggtactcattgcggctgccacctccatctccaactccctgcacagggaactttctgctggcctggtgggcctgggcctcacctatgccttgatggtctccaactacctcaactggatggtgaggaacctggcggacatggagatccagctgggggctgtgaagaggatccacgcactcctgaaaaccgaggcggagagctatgaggggctcctggcgccgtcgttgatccccaagaactggccagaccaagggaagatccaaattcagaacctgagcgtgcgctatgacagctccctgaagccagtgctgaagcatgtcaacaccctcatctccccggggcagaagatcgggatctgcggccgcacaggcagcgggaagtcctccttctccctggcctttttccgaatggtggacatgtttgaaggacgcatcatcattgatggcatcgacatcgccaagctgccacttcacacgctgcgctcacgcctgtccatcatcctacaggaccccgtcctcttcagcggcacgatcagattcaacctggaccccgagaagaaatgctcagacagcacactgtgggaggccctggagatcgcccagctgaagctggtagtgaaggcactgccaggaggcctagatgccatcatcacagaaggaggggagaattttagccagggccagaggcagctgttctgcctggcccgggccttcgtgaggaagaccagcatcttcatcatggatgaagcaaccgcctccatcgacatggctacggagaacatcctccagaaggtggtgatgacagccttcgcagaccgcacggtggtcaccatcgcgcatcgtgtgcacaccatcctgagtgcagacctggtgatggtcctcaagaggggtgctatcctggagtttgacaagccagagacgctcctcagccagaaggacagcgtgttcgcctcctttgtccgtgcggacaagtgacttaccggagccaaagtgccaccccgcgcctcgcttgcttgcctaggatttctaactgcaaatcacttgtaaataaattaattctttgct

SEQ ID NO: 959 - DNA, 2417 bp, Cricetulus griseus
  misc_feature (31)..(48): n is a, c, g, or t
  misc_feature (665)..(679): n is a, c, g, or t
  misc_feature (2037)..(2061): n is a, c, g, or t
  misc_feature (2064)..(2076): n is a, c, g, or t
  misc_feature (2080)..(2101): n is a, c, g, or t
tgtaggatgaacggagaagcagactgccccnnnnnnnnnnnnnnnnnngcccccaaaggccaagaccgctggtcccaggaagatatgctaactttgctggaatgcatgaagaacaaccttccttccaatgacagctccaagttcaaaaccacagaatcacatatggactgggaaaaagttgcatttaaggactttttaggagatatgtgcaagctcaaatgggtggagatttctaatgaggtgaggaagtttcgtacgttgacagaattgatccttgatgctcaggaacatgttaaaaatccttacaaaggcaaaaaactcaagaaacacccagatttcccaaagaagcctctcaccccttatctccgcttcttcatggagaagcgggccaagtacgcgaaactccatcctgagatgagcaacctggacctaaccaagattctgtccaagaagtataaggagcttccagagaagaagaagatgaaatatattcaggacttccagagggagaaacaggagttcgagcgaaacctggcccgattcagggaggatcaccctgaccttatccagaatgccaagaagtcggacatccctgagaagcccaaaactccccagcaactgtggtatacccatgagaagaaggtgtatctcaaagtgcggccggnnnnnnnnnnnnnnnaggtgaaggactccctggggaagcagtggtctcagctctcggacaaaaagaggctgaaatggattcataaggccctggagcagcggaaggagtacgaggagattatgcgagattatatccagaaacatccagaactaaacatcagcgaggaaggcatcaccaaatctaccctcaccaaggccgaacgccagctcaaggacaagtttgatgggcgacctaccaagccacctccgaacagctactcattgtactgtgcagagctcatggccaacatgaaggacgtgccgagcacagagcgcatggtgctatgtagccagcagtggaagctgctgtcccagaaggaaaaggacgcctaccacaagaagtgtgaccagaaaaagaaagattatgaggtagaactgctgcggttcctcgagagcttgcccgaggaggagcagcagcgggtcctgggcgaggaaaagatgttgaacatcaataagaaacagaccaccagtccagcctccaagaagccttctcaggaaggtggcaagggcggctctgaaaagcccaagcggcctgtgtctgccatgttcatcttctcagaggagaagcgaaggcagctgcaggagcagcggcctgagctctcagagagcgagctgacccgcctgctggcccgcatgtggaacgacttgtcagagaagaagaaggctaaatataaggctcgggaggctgctctgaaagcacagtctgagaggatgccaggtggggagcgtgaagagcgaggcaagctgcctgagtcgcccaagagagctgaggaaatatggcagcagagtgtcattggagactatctggctcgcttcaagaatgaccgagtcaaagccttaaaagctatggagatgacttggaacaacatggagaagaaggagaagctgatgtggattaagaaggctgccgaagaccaaaaacgatatgagagagagttaagtgagatgcgggcccctccagctgctacgaactcttccaagaagatgaagttccaggggatgcccaaaaaacctcccatgaacggttaccagaagttctcccaggagctgctgtccaatggggagctgaatcacctgccgctgaaggagcgcatggtagagattggcagccgctggcagcgcatctcccagagccagaaggagcactataagaagctggcggaggagcagcagaagcagtataaggtgcacttggacctctgggtcaagagcctgtctccccaggaccgtgcagcatacaaagaatacatctccaataaacgtaagaatatgactaagcttcgaggcccaaatcctaagtctagccgaaccaccctgcagtctaagtcggagtcnnnnnnnnnnnnnnnnnnnnnnnnngannnnnnnnnnnnngagnnnnnnnnnnnnnnnnnnnnnnaatggggactcctctgaggatggcggggactcttcagagtctagcagcgaagatgagagcgaagatggggatgagaatgaggacgacgatgacgacgacgatgacgatgaggatgacgatgaggatgaagacaatgagtctgagggcagcagctccagctcttcctcttcaggggactcctcagactctgactccaactgagctcagcccccaccctgggcaggcagccaaggagagccactgcagagctcccctccccacctgaccacctttgtctctccctatgttctgtcccctcagcttcccccactttctt

SEQ ID NO: 960 - DNA, 2306 bp, Cricetulus griseus
  misc_feature (31)..(48): n is a, c, g, or t
  misc_feature (1664)..(1688): n is a, c, g, or t
  misc_feature (1926)..(1950): n is a, c, g, or t
  misc_feature (1953)..(1990): n is a, c, g, or t
tgtaggatgaacggagaagcagactgccccnnnnnnnnnnnnnnnnnngcccccaaaggccaagaccgctggtcccaggaagatatgctaactttgctggaatgcatgaagaacaaccttccttccaatgacagctccaagttcaaaaccacagaatcacatatggactgggaaaaagttgcatttaaggactttttaggagatatgtgcaagctcaaatgggtggagatttctaatgaggtgaggaagtttcgtacgttgacagaattgatccttgatgctcaggaacatgttaaaaatccttacaaaggcaaaaaactcaagaaacacccagatttcccaaagaagcctctcaccccttatctccgcttcttcatggagaagcgggccaagtacgcgaaactccatcctgagatgagcaacctggacctaaccaagattctgtccaagaagtataaggagcttccagagaagaagaagatgaaatatattcaggacttccagagggagaaacaggagttcgagcgaaacctggcccgattcagggaggatcaccctgaccttatccagaatgccaagaagtcggacatccctgagaagcccaaaactccccagcaactgtggtatacccatgagaagaaggtgtatctcaaagtgcggccggatgagattatgcgagattatatccagaaacatccagaactaaacatcagcgaggaaggcatcaccaaatctaccctcaccaaggccgaacgccagctcaaggacaagtttgatgggcgacctaccaagccacctccgaacagctactcattgtactgtgcagagctcatggccaacatgaaggacgtgccgagcacagagcgcatggtgctatgtagccagcagtggaagctgctgtcccagaaggaaaaggacgcctaccacaagaagtgtgaccagaaaaagaaagattatgaggtagaactgctgcggttcctcgagagcttgcccgaggaggagcagcagcgggtcctgggcgaggaaaagatgttgaacatcaataagaaacagaccaccagtccagcctccaagaagccttctcaggaaggtggcaagggcggctctgaaaagcccaagcggcctgtgtctgccatgttcatcttctcagaggagaagcgaaggcagctgcaggagcagcggcctgagctctcagagagcgagctgacccgcctgctggcccgcatgtggaacgacttgtcagagaagaagaaggctaaatataaggctcgggaggctgctctgaaagcacagtctgagaggatgccaggtggggagcgtgaagagcgaggcaagctgcctgagtcgcccaagagagctgaggaaatatggcagcagagtgtcattggagactatctggctcgcttcaagaatgaccgagtcaaagccttaaaagctatggagatgacttggaacaacatggagaagaaggagaagctgatgtggattaagaaggctgccgaagaccaaaaacgatatgagagagagttaagtgagatgcgggcccctccagctgctacgaactcttccaagaagatgaagttccaggggatgcccaaaaaacctcccatgaacggttaccagaagttctcccaggagctgctgtccaatggggagctgaatcnnnnnnnnnnnnnnnnnnnnnnnnnagagattggcagccgctggcagcgcatctcccagagccagaaggagcactataagaagctggcggaggagcagcagaagcagtataaggtgcacttggacctctgggtcaagagcctgtctccccaggaccgtgcagcatacaaagaatacatctccaataaacgtaagaatatgactaagcttcgaggcccaaatcctaagtctagccgaaccaccctgcagtctaagtcggagtcnnnnnnnnnnnnnnnnnnnnnnnnngannnnnnnnnnnnnnnnnnnnnnnnnnnnnnnnnnnnnnaatggggactcctctgaggatggcggggactcttcagagtctagcagcgaagatgagagcgaagatggggatgagaatgaggacgacgatgacgacgacgatgacgatgaggatgacgatgaggatgaagacaatgagtctgagggcagcagctccagctcttcctcttcaggggactcctcagactctgactccaactgagctcagcccccaccctgggcaggcagccaaggagagccactgcagagctcccctccccacctgaccacctttgtctctccctatgttctgtcccctcagcttcccccactttctt

SEQ ID NO: 961 - DNA, 4623 bp, Cricetulus griseus
  misc_feature (2363)..(2377): n is a, c, g, or t
  misc_feature (2664)..(2676): n is a, c, g, or t
  misc_feature (2678)..(2717): n is a, c, g, or t
  misc_feature (2778)..(2800): n is a, c, g, or t
  misc_feature (2803)..(2834): n is a, c, g, or t
  misc_feature (4511)..(4526): n is a, c, g, or t
agcttggagaaggagctgctcctacgcaggacctggggagggcacggggacatgtggggacacggcggggacccacccagaccaggcccaacaaggatccagggtggagcctgcttacctgctgttgtgcgtcaccagctgtgcctacatggggggctcctgtggagcagacgggacatggaagtgggcgtgacaagcgccacacaggagggtgggcaggaggcagtaggggtgcactcaccgagtggggcgggcaaagcctcctggctgaggatctccttgtacagctcctctgcttgttggtacttgttctgtttcaggtaggccgaggcctgcggggagggccggggcagggcgcgggcatcttgctcaggcctgggaatgtctcagacccgcccgcccgcccgccggccggccctcccagcaccctgccccactgatgacggtgcagacccaccatcccagagaaccaggccgcccgtccctggaccactcttgcgcctcagtttcctgcctcactgtgtgaaaagtcaggagcatctgctgtgaattaaagcctgacacaggctactgtcaactgtttgctcctggccttttgtccctgtttgatctacaggaaggagcctgaggtcccctccccacagtgtccccaggacaggacccacccatgcctcaccaggttgttcttggtcttggccacattggggtcattcggcccccccagggcctggtagatgctcagggcccgtgcgtagtgccgctccacatcctggaacttgccttggttctgacacagcaacgccaggttgttgagctgcttggccacatcagggtggtcggcgcccagcacctggggacgcacaagccatgtgtcaacagggtggcccatgagatgccacagtcacccagggtcacaggtggggaatgcagtgacagagtagaagctaacacggtgcgtgggaattagtgaagccagaggtcatgggtgctgtgtccaacgagtcagcttggagataggaagtgggtcgggaggccagggtcaagcagggcattgggtggagcatgggattgggtgctcggctcaatgggggaacctgccaccaaatgcaaggtacaccagggattatggcttgtggtaccagtgacaaggcaaagagctggctgcagcaccttctcacggatctccagagcgcgctggcacaggggctctgcttcccggtaacgcccacgtttcccatagaggacagctaggttgttgagggtggcggccacctgcagggggaaagttggcagaggagggcccctacaggtgtccccccccccaagcccaccctccctgaattggggctcaccgcagggtgttcaggacccagagtctgctcccggatctgtagggcatcatgaagaaggtccgtggcctctttgtatttgttctggtccctgtaggcagggtcaagctgggaccactggctggactgagccaggaatgactgacatctttcaggggacccctggtcttcttcccacacaccccaggcctctagcacagattcccagtctgccagttctgtcaagcatcgggtctcctgtcccttgcccaccctggtgcccagactctggctctcatcacctctccagctctctcttccttttgttgtcctgcccaccaccccccttttccgttgccccccgggtgctttatcttgtcagaggattgccactaccacagacgggggcccctccaatcagccacggctctcacctgtacaccagtgccaggatgttaagcatagtggccacatccgggtggcagtggcccgagctccgctccaggtcctccaaggcctggcgacatagaggcaccgccacctcgtagcggccctggccagcgtactggatcaccaggttgtgcagggtccgaaggcgagctgggatctcataaccaccctgctgcgctgctgcagctcctgctgcctcgggacctgggggaggtggtgtggagttccccacgatgggcctcagcctgcaccgcaccctagggctcctctcgcactaggccttatgctgacactggacacggggttacagaaatctaactggccagtgggatgttaggtgccagaaccgaacccgcctaggtcataggctgcctaacttccagcctcctccctccccatgccctgtgcccggctcagaggccttggcgtcccaggtcaaggctccagccccaggcttagcctgtagtcctgggtgatggccctctgatatcgtgcccagggttcccacacacccacctctcctttcctcctcttcactggggaacagagaagccaggctgtctcggcgaggcggggactcgggcnnnnnnnnnnnnnnngaaagagtaattcccagaacagtgagcgtcagtgccctcaagctacttcaggcctgtccgtgtagctctctgttgtccaggacaggggctcgctctgtagacactcagagagacagatgaacctgcctctgcctccagagtgctgggatgccaggcttcaggactggttttgtctgtgagtctcactgtgtagcccaggctggccttgaactcacagcaccctccagccttagccacgccagctctgagtctgacagaggcgtgggtcaggagcctttgaggtgccnnnnnnnnnnnnnannnnnnnnnnnnnnnnnnnnnnnnnnnnnnnnnnnnnnnngagctctctgagtttgaggccagcctggtctccagagcgagtgccaggataggctccaaannnnnnnnnnnnnnnnnnnnnnngannnnnnnnnnnnnnnnnnnnnnnnnnnnnnnnagcctttggagtttcagtggcctgggaaagacctgggagctcaggggagcactgaggggactttggaagctcaaatggatgtggggatttggggatcccacatgtacttaaagggttatagggtactaagaaaggcctgagggtatctgggggctctgcgaaggactgtgtaccctcttcgccctgcccctggtacctggctctcctcgggcggatcgtactgccgcagctggcccaggaactggagatggctcttctcctcctccagctgggccacagcctcctcactggcccgcagtcgcctctgcgtctcctccagttcctctcgaagccatgtgttctcttgggctagcctccgcgcctgcgcccgcagcctctgcttctcagcctccagcacactcacgtgtgccgacagggccagcagcacctgccaagcatcggaaccatgaggagtggatgcatccctcggacagccccagcccaggctttttacatcaggccggatacacccgttccacacaggtcccccccagattctgaagacaacccagtgtggctctgatagtaagagttttccagaaacccccgattccaaccaaattatgcatagggttaattcctattccatctatttaacccaacaccttcataaaaaaacatctgtgaataacaggggtgtggctcagtggtggagcccctgcctagaatcccccagtgaggggctgggggcgtggctcagtggtggagcccctgcctagaatcccccagtgaggggctgggggcgtggctcagtggtagtgcccctgcctaggatcccccagtgaggggctgggggtgtgtggctccatggtagagcccctgcctagaatcccccagtgaggggctgggggcgtggctcagtggtagagcccctgcctagaatcccccagtgaggggctgggggcgtggctcagcgggagagcccctgcctaggatcccccagtgaggggctgggggcgtggctcagtgggagagcccctgcctaggatcccccagtgaggggctgggggcgtggctcagcgggagagcccctgcctagaatcccccagtgaggggctgggggcgtggctcagcgggagagcatctatctgcctaccaggagcaaaacctagggttccattcataatgaaaactccaatctccctccaggactgagctctccgcgaggaccacatgcgggacacacagggatggaatctctgaactgaagtccctccttccttcttcaggccacctgaacttcctcctctgcacagggtcccctcatccctgggcctcccccaccccgcgcactccgcatccccggtccttctcatggccccacatacctgggcctcgcccagccccagctcgatggcctccagcgagtgcttcaccacctgtcgcttctcctccagcagctccactccaggcacagggcccggtgcagccagggcctccgccaagtgcccagcgagactgcagtgctcagcccgcagggcctccagcccctgcactacctgtctcgtctgccgcaccagctcctcggggttcaggcgctctgggcccagccctgtgcttccgggggctgccacctgcacagacatggctactcctgggggtgggggtgggggtggggggcagtgagggtgagggagnnnnnnnnnnnnnnnnacagactcacagcctctcttcattccagccatccccctgccccacccatcctggctggctcccctttccaccccaggcagccttcatgggggaattc

SEQ ID NO: 962 - DNA, 7951 bp, Mesocricetus auratus
  misc_feature (37)..(63): n is a, c, g, or t
  misc_feature (3203)..(3226): n is a, c, g, or t
  misc_feature (5664)..(5782): n is a, c, g, or t
  misc_feature (6154)..(6168): n is a, c, g, or t
  misc_feature (6286)..(6300): n is a, c, g, or t
  misc_feature (7345)..(7373): n is a, c, g, or t
  misc_feature (7612)..(7638): n is a, c, g, or t
tgtgaggagccgccctcgctatcgctattgccgttannnnnnnnnnnnnnnnnnnnnnnnnnnttggagttaactgtcgctgtcagttggagttaactgtcgctgtcagttggagttaactgtcgctgtcagttggagttaaccgtttaaactgtgcctctcccgtgacgtcatctggggtgatgtgcaaaccaccaatcccggctctacacatctcactcggagctcctaggcttatataaggggctgggtttcttagcttggggtctccctctaagaagctgatcatctatgtctcaagatgcattaaagctttactgcagaaggatccgagtgttctgcgtcgttcttgctggcgagacggtagcgcgggacatctggtgccgaaacccgggaactcttcaacatcgccggcgccgcgggagacccctcggaaaacggggcggattcagaactgcagggacgtaggttcagagaggtatgctttatcctgaacaacccttttctcgactttggccttagtttgtcatcaccgtgggacgggtcagtggaggctttggtgctagtcctgtttgtccttctccttcatcgtggctggtgctgacagaacggcgctgtccatctggcgctgtccgtctggcgctgtccatctggcgctgtccatctggcgctgtccatctggtgctgtcagtctggtgctgtcagtctggtgctgtcagtctggtaacggagttgagcgcgttttttagataagctgtcagcgcgatggggtcgtcacagtcagtggttacagccttacagactgtgctaaaacaaagagatcttaaaattgcaccacgaacacttcaaaattttatgaaggaggtagatagagtggcaccatggtatgcttgttccgggtccctcactgtggcctcatggaacaagctaggtaaagaactagacaggaagcatgcagaaggagatctctgcttaggtaccaaagccatttggaagctagttaaaaactgcttggaggatgaggcctgtcaccctgctataatagaaagtcagggaaccttagaggaagttcaggatagcatgtcagaaactgaacggagtgagagaatgggagctcgcaaaagaaaagacatgtctaagaaaaaaggccctccccaggaagttaagaaagggggagagaaagaagggagttatcattcaccccttaacaaatctaagaaaaagaaaaagccagaatctagtcaataccctgcagtagagctagaagccttggagctagataattctgattctgacactctggattctagcgaagaaggtggtctagaggaggaggtggcacggtatgaggaaaaaagatatcaccctgatagacaccggccactgaaaacaaaaatgaatgtgaggccaccgcctataaatccggcgggctcacgcccctcagcgcctccgccatatgagcttcggctgaatactggtactgactcctttttacctttagaggaacggagaaaaatacaaatggcttttccagtattcgagaatgcggaaggcggaagagtacatacccccgtagattacaatcaaattaaagaattggccgaatccgttcgtaattatggggtcaatgctaactttaccacattacaggtggaaaggcttgctaattttgccatgactcccactgactggcaaacgacagtgaaagcagtgcttcccaacatgggacaatacatggaatggaaggctctctggtatgatgcagcccaggcacaagctagagttaatgccacggctgaagatgagaatcagaggcagtggacatttgaaatgctgacaggtcagggtcaacatgcccttaatcaaaccaactacatctggggcgtctatggtcaggtgtcggccgccgctattaaagcatggaaggccctcacaaaaaggggaggtccagtggacaccttacaaagattgtccaaggaccccaagagccattttcagactttgtggccagaatgacagaggccgccagtcgcatctttggtgattcagaacaagctatgcccctgattgagcaacttgtctatgaacaagcaacccaggaatgtcgagcggctatcgcccctcgcaaaagcaaaggtttacaagattggctcagagtgtgcagggagctggggggacccctaaccaatgcaggactagctgccgccattttacaaacgcacaggtatagagatttatctaatcgaaaagcttgttttaattgtgggagaatggggcaccttaagaaagattgtcaagcccctgaaagaacaagagaatcgaagctttgctatcgttgtggtaaaggttatcatagggctagcgaatgcaggtcagtccgggatgtaaaagggaggcttctgccccctattgaagaatccaaggtaccccaatcaaaaaacgggtcacggggcccatggtcccagggccccagaaatatgggaaccaatttcagaaaagcaatcaagaggaagtagaggtttccgaggaacctccggaatggacttgcgtgccgctccgacttcttactcatgccccaaatgaatgttcaaccggtcccagtccattcccctggacctttgccccctgccaccattgggcttattctgggccgtggctccttaactttacagggactcattatatatcctgggattgttgacccatatcataaagaggagattcaagttctctgttctagccctcggggtgtattttctataaagcagggagatagaattgcacaactggtgttgccgccctccctcggggatggagaaacctacactttacaaaaaagggctatgggatcttctggaagtgattcagcctatctggctatacccctaaatgagagacctacaataaaattgttaattaatggaaaagaatttgaagggataatggattcgggagcagacaaaagcattatttcactccattggtggccgaagtcttggcccactgttgtttcatctcattctctacaaggtcttggataccagtcctctcctgccatcagtgcctcagccttaacctggcgggatgctgaaggcaaacagggatgttttaccccctatgtgttgccactccctgtaaatttatggggacgagatgtgttacaagccatgggcatgaccctaactaatgaatactccccccannnnnnnnnnnnnnnnnnnnnnnnggggtatacaaatggtagaggcttgggtaggcaagaacaaggcagaataaaacccattacacaacacggaaatcggggtagaaaaggactgggttttatttgggggccgttgaggcttcacgacccataccatggaaaacagaggagccgttatgggtctctcaatggcctctatcctctgaaaaattagaggctgtcacaagattagtgcaagaacaggaacggctggggcatctagagccttctacctccccatggaatacaccaatttttgttattaaaaagaaatctgggaagtggagattactccacgacctgcgggccattaacaatcagatgcatctttttggccctgttcaaagaggccttcctttgctttctgcacttcctcaagattggaagcttattattatagatattaaggattgtttcttctctattccactttacccacgggatagaccaaggtttgccttcactatcccttctcttaatcatatggaaccagacaagagatttcagtggaaggtactgccgcaaggcatggccaatagcccaacaatatgtcagctatatgtgcaggaggctttggagccaattaggaagcaatttacatctttaatcgttatccattatatggacgatattcttatttgtcacaaagagttagatgttttacaaaaggcttttcccatgctggtggctgaattaaaacagtggggattagagattgcctcagaaaaggttcaaattgcagatacagggctctttttgggctcaaagattactcccaaaaatatagttcctcagaaaatagaaattcgcaaagaccacttacaaacattaaatgattttcagaaacttctgggagatataaattggttgaggccctttttaaaaattccatctgctgatctaaaacccctcttcgatctcctggagggtgagcctcatatctcctcacccagaaaatttacccctgccgcccaccgagccttacagatggtggaagaggccttacaggaagcacaaattacaacgaattgaggagtcactaccttttaatctgtgtgtttttaagacagctcaattgccaactgcagtcctgtggcaacatggaccattactttggattcatccaaatgcttcccctgctaagattattgactggtaccctgatgctgttgcacagccgcgctcgcgaataaaagcagctgttacacattttggcagggatcctgattccttgattgtgccttatactgctgcacaagttcagaccttggcagccacatctagtgattgggcagttttagttacttccttttcaggacaaattgataatcattttccaaagcatccaattttacagtttgccctaaaccaggctatagtgtttccacaagtgacagctaaagacccactcccagatgggactgtggtgtacactgatggatcaaaaactggtctgggagcttatgtggtcaaggatagggttatatctaaacaatataatgaaacttcacctcaagttgtagaatgtctgatagtactggaggttcttgaggcttttccaggacccctcaatattgtatcagattcctcttatgtggttaatgcagttaatctccttgagatagctggaataataagatcctccagcagagttgctaacatctttcagaagatacaagctgccttgttaaataggagatttcctgttttcattacccatgtccgagcacattctggactcccaggtcccatgtccttagggaatgacttagcggacaaggctacaaagctggtggccactgccttgtctacccatgcacaagcagcaaaagaattccataagcgctttcatgtgacggctgagaccttgcgccgtcgttttgctctatccaggaaagaggctagggaaattgttactcaatgccagaattgctgcgaattcttacctactccccacatgggaataaacccacgtggcattagaccattgcagatgtggcagatggatgttactcatattccctcttttggaaggcttcaatatgttcatgtttctgttgacacctgttctggcgtaatgtttgccacacccctaacaggggaaaaggcctcatatgtgattcaacattgccttgaggcttggagtgcttggggaaaacccagaatttaaaaaacagacaatggaccagcatatacctctcaaaaatttcgacagttttgtcggcaaatggatgttacccatctaactggcctaccttataaccctcaaggacagggcattgtggaacgtgcccatcgtacactcaaatcatatctgattaaacaaaaggggagtattgaggatgttctaccctcggtaccaagagttgctgtatccatggcactttttacccttaatttcttgaactgtgatgcccaaggcnnnnnnnnnnnnnnnnnnnnnnnnnnnnnnnnnnnnnnnnnnnnnnnnnnnnnnnnnnnnnnnnnnnnnnnnnnnnnnnnnnnnnnnnnnnnnnnnnnnnnnnnnnnnnnnnnnnnnnnagctgtgtgtgtttttccacaggaggaagaaaaccccctgtggatccctgaaagactcactcgaagagctccttcacaactccagaataagaaggatggaggccaagtgggtgatgaagactctcctactcgggatgatggttcctagtatgatgggagagttacggtgggccatcatgtctaccttccccctaccgatgccagtgatgcagaatgcccaggtgttccctagatttttcacaaataatagagagttggggcttgcctttttgcctttagatcctcagatacagagttttcaggatgagagaaccttgtcattagtaggaagcttgtgctttactgtgatttcttcattaaaggataattttnnnnnnnnnnnnnnngaaagatctaatgctaatccttttgaattaatggaagctgtactgatctttctcctatgatagtgagaagggacagattggaaaggggcattaggcaacagtctgagtgagggacagnnnnnnnnnnnnnnngattggtcctcctccaatgttaagtataccccttttaagagaactaattattcagctgccctttatttgggttgtgagtaatgataccttaggtaagaatcagaaagaaataaattgttctgcttagaattgtttttatgcattatgctgggatgctattaagcacccttttgctttggtaatgcgcatgcctcgatttattccagctcctgttgaggcgccaagtaatttgagtttgtttagggaaaagcgagatttttgggatctctgctattattgtgggcctgatagccaccgccgcggttactgcttcggttaccgcctcggcccttgcactttctgccactgtgcagacaactcaaaccattaatgaactataggccactgtgaccatggtcctagataaacaggccactgccaattctcagatacaaggaggcctgatgttggtaaaccaacagattaatttggttcaggaacaattggatatattgtggcagatggccaaattgggatgtgaacaaagttgcctggcctttgtgtcacttagtacaatatgagaattttacaagagcagctaacctgtcaaaagctctgtctcaacatttattacagaattggacttttgagtttgagcagacactccgtgagttgagaatggcgatcctgcaagtgaattcgacgcatctggatctttctctgatggaagacctctccccctggatttcatctgcattttcttattttaaggaatgggtgggggtaggatcatttagcctagttctctgctgtggaatagtgttgatgctttggatggtgtgtacgctcagagcccaaacaaaaggagaaagtggtggtggcacaagcacttgctgccttagaacacggagcatcccctgacatttggttaaccatgttaaagcaataggtcgctggcctcccagctcttgcaccccacgaggctagtctcattgcacgggatagagtgggtaggcttcagcagcccaaggagttgcaaggctaagcactgcacaggagaggtctnnnnnnnnnnnnnnnnnnnnnnnnnnnnnagtcatcttgcatgaaggttctatgtcatgatctccttcccccagaaaaaagacatcggactggtcaggacttcctctggggataagaccctggagaggagctttgtacatgttccgaatttgcacatggggatttgacctctatctccactccaaagttgtgggtgtcctattgcttcaaaaataaatgattagggggagatgtgaggagccgccctcgctatcgctattgccgttannnnnnnnnnnnnnnnnnnnnnnnnnnttggagttaactgtcgctgtcagttggagttaactgtcgctgtcagttggagttaactgtcgctgtcagttggagttaaccgtttaaactgtgcctctcccgtgacgtcatctggggtgatgtgcaaaccaccaatcccggctctacacatctcactcggagctcctaggcttatataaggggctgggtttcttagcttggggtctccctctaagaagctgatcatctatgtctcaagatgcattaaagctttactgcagaaggatccgagtgttctgcgtcgttcttgctggcgagacggtagcgcgggaca

SEQ ID NO: 963 - DNA, 117 bp, Mesocricetus auratus
tctatacaggtggtgtcagaggaaggccctaaaaatggtcaaatactccagccacccgagtcatagacttctctctgctaccacaagctctgccacggaggtgttattaccgaagaa

SEQ ID NO: 964 - DNA, 99 bp, Cricetulus griseus
cccatgtgctgcaattttacacttcattgtcttgtgtttgtctttgtatgtatatgactgtcttacactatcaataaaggtgtttccatattaagtggg

SEQ ID NO: 965 - DNA, 591 bp, Mesocricetus auratus
gaattcaaatcaaatatttcaaacgttttaccggagaagcatagctgtggttgctaggcaacctgatagcctcccaagcagggaccaactcgcctcccacactttgaccatctctccccagcagtgggacgcggagtcgccattggtcccgatctcctctcactgaccttcaattggtcagagaacctctcactccgctcccgttggctctcgccgtctctcgccgtcccgccattggccgagatgttctcgggccaccctacgtcaccgtctcaccccacttccccggtcctccgactttgtccccgccccttcccccacccttccagccgcgagggaaaaccctagcgagtcaccgcctctcctttccttcccattggcagaaagcggtatgaggggcgggagctgacgagcgagtctgagctctgggattggctgcggcagccgccatcccgccccctgccgcctcccggcggtgcgggagtcgggtgggtcggtggctataaagctgctgagggcgggaggcacagtgcactgtgctccgtggattgctcctttctttgccccgggtccggtcgtgtttgggtgagt

SEQ ID NO: 966 - DNA, 499 bp, Mesocricetus auratus
gctccagagtcatgcaacaagggactatttttagtagcaaaagaggagggtgaattacctggacaggaactaaatctacagacagaacaatgagtcttctccaatttaacaaacattcggccaatcttttcacctcccttctcccccttgttatcccagatgcggatggagaaggacagattctccgtcaacctggatgtgaagcacttctccccggaagagctgaaagtcaaggtgctgggggacgtggttgaagtgcatggcaagcacgaagagcgccaggtgtgtggaccgctgcttcttttgggagtttcattcagtgcacactggatgccaggcactgccacagtctctgaagctggcggaactccaggccccaaacataaagggttagagcaggagctgctaggaagctaagttagggataaatctgttgttactgttatggttttgctgagagaagtgccccttgatgtttattttgattgccttgttggtg

SEQ ID NO: 967 - DNA, 588 bp, Mesocricetus auratus
  misc_feature (139)..(198): n is a, c, g, or t
  misc_feature (413)..(437): n is a, c, g, or t
cccagctccaggcatttctttttctcttatgatgtcagggcaattcggtctaacctaagggaaagggatgtctgagtttggggaaagtggtggcttccctgttcttacttctctgtttctttcttcattctcttggatnnnnnnnnnnnnnnnnnnnnnnnnnnnnnnnnnnnnnnnnnnnnnnnnnnnnnnnnnnnntgtggatcctctgaccattacttcatccctgtcatctgacggcgtcctcactgtgaatggaccaaggaaacaggcctctggccccgagcgtaccattcccatcacccgtgaagagaagcctgctgtcactgcagcccctaagaagtagactccctttctctcattgcattttttaaaacaagaaagtttcccatcagtgaaggaaaatctgtgannnnnnnnnnnnnnnnnnnnnnnnnagggccggcccagattattaagctaataaaatatcattcagcaatagatttgtctcgtgcttatgtattcagggtgctttgaataactacaagcataacggatctaattcttgtactgtgattcagggaaactccaaggacttttgggtca

SEQ ID NO: 968 - DNA, 247 bp, Mesocricetus auratus
gatcttgtgcccccttctggtgtacaagcatacatgcaggcagaacactgtacaaaataaataaaaattttaaaaaatcctgttattttttaaaaagtgtaaacctctttttaaaaaaaagtgatgggagtgatttcaggaagagttttgagtgtccttaaccctctggggatatggtctctcccttttcaggatcaaccttcccatccagaccttctctgctctcaacttccgaggtgagttgtac

SEQ ID NO: 969 - DNA, 1388 bp, Mesocricetus auratus
gtaccatcctttggctcttgaagtcagctctttagcaggactggtccctggctttacagaaccatctgttgggtgctgggttcaaggaccaggtcttgaagaaggcagaaggttgtcacgaggaaggtggaattggatggtgcatggggcaatgcaacctgggatggagttccatccaaggtgcagcttagatatgaacctgccaggctgagcatggggtgtgtctattatagaaaccagccctgaacaaaggggttctgaagtccacaccaaaaagacggtgatgatcaagaccatcgagacccgggatggagaggtgagtggtctgctggaccccgtgtccttggtggtggcaatggtgtgtctgccagcccggtgtctttcaccctgggtgggggtgaggaggtcctgctgctgtggggtggagtaaatggggccgaggcgcctcttagactggatttctcctcatgctcaggtcgtcagcgaggccacacagcaacaacacgaggtgctctaagccagacactgtcctggtccccgtggtcactgcctcctgaagccagcctcttccactctcggatgtcacacccagccactttccttcactcacagaatctgacccttcctcaccgatcacccctttgtggtcttcatgctgcccaggaaacaccccagcacctctgcagaccttaccatgagtcctggctgtcggcagtcgcaagcctggctcttcagatagaacctagttcaagtcatggccctttccctcccacctttgtaacctcaggctctacgctttggctttggagatggtaccagagaaggtgttgggatctgtagggtcaggacagagctttatagacaccctcacattcgacccccagcctgggtcagagacagagtgaagcctctcagctgaggtgggggaggggctgaaaaaatgtccttgcgtcccctctctttcccatcccagcccaggatgggcttagaaaagctggggctgtaagagggaacctgaaggtgctggatgtgggagcaggagattcagaaggagagcgggtgggtgagaagctggagggaaagaagagagaggcagagagtgggcccaggctggtgggagggccccacctctcacgcctgcccctcccactgcaggggccctggacagaaacaataaagagccaagcacaaacctacatgcccctgctgtcttgactggaccctgtcataccacccatcaccctgagatggacggtgtcaccctcttgccaggtagattgctctaaggcctccaggctgcagtctatgtgctgcataggggaggttggacaaggggcttctgttacaatgccacagtgatgcccctttccttaagctaccttcagatc

SEQ ID NO: 970 - DNA, 1578 bp, Cricetulus griseus
  misc_feature (617)..(631): n is a, c, g, or t
  misc_feature (755)..(768): n is a, c, g, or t
  misc_feature (770)..(782): n is a, c, g, or t
agtctatataagacctctcctggaggcggactcacactgcttctccccgggactccttggtagtctgctagtgggaggtcctcgtcaccctctcttaactcagacctcgcggaccgcttcctagacaacatgcgtgagtgcatctccatccacgttggccaggctggtgtccagatcggcaatgcctgctgggagctctactgcctggaacatggcatccagcctgatggccagatgccaagtgacaagaccatcgggggaggagatgactccttcaacaccttcttcagtgagacaggcgctggcaagcatgtgccccgggctgtgttcgtagacctggaacccacagtcatcgatgaagttcgcactggtacctaccgccagctcttccaccctgagcagctcatcacaggcaaggaagatgctgccaataactatgcccgtggccactacaccatcggcaaggagatcattgatcttgtcttggacagaattcgtaagctggctgaccagtgcacaggtcttcagggcttcttggttttccacagctttggtgggggaactggctctgggttcacctccctgctgatggagcggctctctgtcgattatggaannnnnnnnnnnnnnnagttctccatctacccagccccccaggtttccactgctgtggttgagccctacaactccatcctcaccacccacaccaccctggagcactctgattgtgccttcatggtagacaacgaggccannnnnnnnnnnnnncnnnnnnnnnnnnncattgagcgccccacctacactaaccttaaccgcctcattagccagattgtgtcttccatcactgcttccctcagatttgatggagccctgaatgttgacctgacagaattccagaccaacctggtaccctaccctcgcatccatttccctctggccacatatgcccctgtcatctctgctgagaaagcctaccatgagcagcttacagtagcagagatcaccaatgcttgctttgagccagccaaccagatggtgaaatgtgaccctcgccatggtaaatacatggcttgctgcctgctgtaccgtggggatgtggttcccaaagatgtcaatgctgccattgctaccatcaagaccaagcgtaccatccagtttgtggactggtgtcccactggcttcaaggttggcattaattaccagcctcccactgtggtacctggtggagacctggctaaggtccagagagctgtgtgcatgctgagcaacaccacagccatcgctgaggcctgggctcgcctagatcacaagtttgatctgatgtatgccaagcgtgcctttgtgcactggtacgtgggtgagggcatggaggagggggagttctctgaggcccgtgaggacatggctgccctagagaaggattatgaggaagttggggcagacagtgctgaaggagatgatgagggtgaagaatattagcccatgtgctgcaattttacacttcattgtcttgtgtttgtctttgtatgtatatgactgtcttacactatcaataaaggtgtttccatattaagtggg

SEQ ID NO: 971 - DNA, 987 bp, Mesocricetus auratus
cagctcagcctggccaacagaatagcctcagaggcccagaagcacctgaagaacgcccaagcccagttgaaggacacccagctccagctggatgatgcgctccacgccaatgacgacctgaaggagaacatcgccatcgtggagcggcggaacaccctgctgcaggcggacgtggaggagctgcgggctggggtggagcagacagagcggtctcggaagctggcggagcaggagctgatcgagaccagcgagcgggtgcagctgctgcactctcaaaacaccagcctcatcaaccagaagaagaagatggaggcagacctgacccagctccagaccgaggtggaagaggcggtgcaggagtgtaggaatgcggaggagaaggccaagaaagccatcacagatgccgccatgatggcggaggagctgaagaaggagcaggacaccagcgcccacctggagcgcatgaagaagaacatggagcagaccatcaaggacctgcaacaccggctggacgaagccgagcagatcgcgctcaagggtggcaagaagcagctgcagaagctggaggcccgggtccgcgagctggagaacgagctggaggctgagcagaagcgcaatgccgagtccgtgaagggcatgaggaggagtgagcggcgcatcaaggagctcacctaccagacagaggaggacaagaagaacctggtgaggctgcaggacctggtagacaagctacagctgaaggtgaagacctacaagcgccaggctcaggaggcggaggagcaggccaacaccaatctgtccaagttccgcaaggtgcagcatgaactggacgtggcagaggagagggccgacatcgccgagtcccaggtcaacaagctgcgggccaagagccgtaacatcggtgccaagaagaggcacgatgaagaatgatgctgcccgcagcccttgctgttgctagcccacaataaacacgaatgcctgactctg

SEQ ID NO: 972 - DNA, 364 bp, Cricetulus griseus
attttcttgccaaaagtctggacgatgccttaaaacttattgaacaaccagagttagcagataaagtggacatggtttggatagttggaggcagttccgtttacaaggtaagtagagtcatgtgcaagtagaaaaaattccctgcttctagtcatgaccacaggaagcagcacattatcccagctgtgaactacacagttgtcaaagtgaattatttgacactgtcatgcaaaataaatacaaacataaatgtaaaatttatagtttataccagtctattctttttgttttatgtataaaatcatatttcattatgatgtgacatatttcatgtgctttagtcatattcacccctcccactgcc

SEQ ID NO: 973 - DNA, 420 bp, Cricetulus griseus
gtacctgtacccaatacacataaccagacaaaaagatataatatctacaaagagatagaatatgaagaaaacataaacaaatcttttttcaaaatactttctattgtttgagcaacagtaagcatggatttaatgcctagtacaaacttaattaaaacaagaatcttctagtctctttgtctttcaacatgggttaaggagagtgataccttctattttattttaaaggaagccatgaatcagccaggccatctcagactctttgtgacaaggatcatgcaggaatttgaaagtgacacgttcttcccagaaattgatttggagaaatataaacttctcccagagtaagtactacaattattaactagtcagaagcactttagagactaattacagaagaaaggggagcaagtaaggaca

SEQ ID NO: 974 - DNA, 810 bp, Mesocricetus auratus
tcgaaaatctccctctttagcaatttcttgctcctagagtttcagcaattgctttctcgctccattaggcaacctttcattttctcaccttccccattatgtaacgggagcaatgggttctggaccagtcttccattaaagatgatttttatagtcggtgagcgccgtcagggagtgatgacacctgggggcggtttaaaccgtacaatcccttaaaccagtctggagcggtgactcatttccccagggagaagtggcgcggccattggtgagcacgacgcaagccccgccccacccagcccggccccgccctgctacccctcctgactcactgccccgcccgctcccccgcggcgtccgagcagcagaccgagaaggcacatcgagtccactcgtcgcgtcggtggcaggtaagcggcttctgaagcctggccccgggaagggtgctggagccaggcctcggtaagccttcggcttcccagagccaagcccggcttactccggctctcggggcgctgaggccgcggggctgaggttgagtctggctgggaggtgaccgcgcacccgcagccgcgcgtctccttgagggaccgaaccccaggagaggccaggagccatcccttcctcccgagcccggctcacccccagagtcgctcggggatgggggatgggggatggggtggcatcttttgactgtcgtttgctgttttcttctctctttgtaatagctacagcgaacataattttacccagggttccaccgtggtctcgtccgtcctcggcatctctcagtccagtacatacccaagg

SEQ ID NO: 975 - DNA, 703 bp, Mesocricetus auratus
aattcccttccagtactttgcttgtaagactgtagacattagaccgccacagattcttgcagagctgggagccatccctgtgtggaagcaggctttgctgccaagtggcatgcatgttctcagttgctaagtggtgggaggtgttcctgccctgcttgctttggctgccctaatcataacacagcttaaattgaataaactcccccatacaaccacaagttaggtcttattatactgggaagtaaaatgaaagcagctattagtaaagaaaacattttaataaactccgccttttctccatcccctgagaagccaccctgggtgtagcatgtgaactcaaattaacctgtttttattaatctatgttctgtcacatggcttggttatctctcttctgtaccgtacatcttcagtgtcttgctgggcatctcctgccacacaccaggttcatctcctgttcctctttctccctggaagtcctacctattctctcctacctagctattggccattccactctttattaaacctataacagtgacacatagccacacagtgtaaacaaatactccacaacaaaaaaataaacctttcttccccaagtcgctttggtcatggtgtttaatcataacaaggaagcaggacctttgtcatggaaataaaatcaagattgagccaaatatcacaatctataaacaaagct

SEQ ID NO: 976 - DNA, 500 bp, Mesocricetus auratus
  misc_feature (351)..(367): n is a, c, g, or t
aattcccttccagtactttgcttgtaagactgtagacattagaccgccacagattcttgcagagctgggagccatccctgtgtggaagcaggctttgctgccaagtggcatgcatgttctcagttgctaagtggtgggaggtgttcctgccctgcttgctttggctgccctaatcataacacagcttaaattgaataaactcccccatacaaccacaagttaggtcttattatactgggaagtaaaatgaaagcagctattagtaaagaaaacattttaataaactccgccttttctccatcccctgagaagccaccctgggtgtagcatgtgattctcattaactgccannnnnnnnnnnnnnnnnctcagtactgaagacatttgacctatttgtgtgcatgacgctagtatttcttcaggtattttgcatgactcctttcaaatttctccacccccttgaaggacatctgccacttacctccaacccctcacaattt

SEQ ID NO: 977 - DNA, 150 bp, Cricetulus longicaudatus
tttccccggccaccagcctctttttgttttcagggatatttcgtctttcttgaaggattctgtcttctttcgagcttccatttgctttttggttagttattttaagtccacgcatggcggcaagatcgactacatcgcaggcgagtggcc

SEQ ID NO: 978 - DNA, 1311 bp, Mesocricetus auratus
tcgctattgccgttagaagatgtcgctgacatcactgtcagttggagttaactgtcgctgtcagttggagttaactgtcgctgtcagttggagttaaccgtttaaactgtgcctctcccgtgacgtcatctggggtgaatgtgcaaaccaccaatcccggctctacacatctcactcggagctcctaggcttatataaggggctgggtttcttagcttggggtctccctctaagaagctgatcatctatctctcaagatgcattaaagctttactgcagaaggatccgagtgttctgcgtcgttcttgctggcgagacggtagcgcgggacagatggttcctgcgtaatgcaacttggggttaagatctgtcctccttagtaccatgctaagtgtaataagtgaggcagcaaaacacaaatacgacataatctaaaccttctgatatagagaattaagtgatgattctcataaacttggagatgtcaagggagaggaggtgagagatattagtcaaaggttacaaagcttgattaaatgggatctattctactgatccattgattatcgaggtgactgtaataatattgaacacttatatattttaaagttgtcaaaagagtagaaattaagtgttcttaactcaatgaaagaagtgtgtcaggtgatggacatgtgtggattagctagacttaatcagttcacaatgtctgtatggattatgtattgtaagtacagataatctctattctcaactaaaataaaattgattaaaattgcattctatgtcgcaggccccagctctgccccctcagggctgcacggctgagccaagtgggctggtaggggaagtccaggccagcgggcagcgggtgcagccaaggcagtgctttcttccctggagcatgcggcttgtgctggatgctgcaaaaagagaggagtgtgtgaaggtgatgcgactggtaggggcggcacgagggacttgggccatgggctgggtgccttggggtggcagaaccgtggcagagcaggccaggccgtggtgggggtggagagacagggttccggttggttaatggcaccagttggccgggcttggcccctgacttaactttctgggtgcggcatgcgtgccagttgccgggggctgggggatggggggacctgaacgaggatgtcagtttggaggtctggttaatctatggagtcactgaaagtagatcagtatttatcactagaacacgaatggaatttgggagtctattccacctagagggatattctctctgcctagacacacagctagggtcga

SEQ ID NO: 979 - DNA, 960 bp, Cricetulus sp.
  misc_feature (24)..(41): n is a, c, g, or t
aacggatctggctcaaattctaannnnnnnnnnnnnnnnnnatgactgagagtaaacctcattataatatttagttgctttgtatccctgtaagtcatttaatcctgtggtctccgcttactcaactgtaaaaatggagataaaacccgcaacctctgagagtgctccaataacaaaatgacaaaagcatccaaaactcttagttagtgcaggtacaaagtggctaataataaaaaccaatttcagggctggagatacggatcttttagaggatctgggttcatcaccagcaaccacatggtgctcaccacgcctctaactcagtctcaggagatccgacgccacttccgatctctgctgacacgaggcgcgtacgcagtgcacacatacaggtacgcaaaatacccatacacataaaagaaacagacctttaaaaagtaaaaaccaattgtaacaatacaatataggctgcaaatctaaggttttcaggcagggggctcctccgggaatcggcggaggcgtcagggtggcgtcacctggctgtgacagcctgcggcccggatgcacagagcgcgcggaggtcgaggggctggcggagagcgagccaggcgccgcagcgaggggcccaggtgggacatcatgcagcaggacatcgggcttcctaagaggaccaatggctggaacgaggcagcccaacctcagaaaggcgacagagagctgaagagcctagcaccagctctggaaaacacctgagatcggagttagtccgggttgggaagggggtggaaatgaactcaaatatctcacgctcctgaaccggaaatgcttgtgctctcgctagagacgttctaggcacgaaagccggtgactcgatagccggaagtcatccgaacgtaggctaggtctaccaaggcggggttagacagcaggctgttccgtttggcagccaggatggcatcg

SEQ ID NO: 980 - DNA, 528 bp, Mesocricetus auratus
  misc_feature (143)..(491): n is a, c, g, or t
attctgcttggaatatgatggcgtcttccctgttttgcccttagactattcgagttgcctctgtggattagggctggaggcagcacggatagtctgatggccaaataaggcaggcaagacagctatttgtaactgcgaaatannnnnnnnnnnnnnnnnnnnnnnnnnnnnnnnnnnnnnnnnnnnnnnnnnnnnnnnnnnnnnnnnnnnnnnnnnnnnnnnnnnnnnnnnnnnnnnnnnnnnnnnnnnnnnnnnnnnnnnnnnnnnnnnnnnnnnnnnnnnnnnnnnnnnnnnnnnnnnnnnnnnnnnnnnnnnnnnnnnnnnnnnnnnnnnnnnnnnnnnnnnnnnnnnnnnnnnnnnnnnnnnnnnnnnnnnnnnnnnnnnnnnnnnnnnnnnnnnnnnnnnnnnnnnnnnnnnnnnnnnnnnnnnnnnnnnnnnnnnnnnnnnnnnnnnnnnnnnnnnnnnnnnnnnnnnnnnnnnnnnnnnnnnnncttcagcggggccagcagcaactagctgagcagggtc

SEQ ID NO: 981 - DNA, 2269 bp, Cricetulus sp.
  misc_feature (128)..(165): n is a, c, g, or t
  misc_feature (910)..(974): n is a, c, g, or t
  misc_feature (1189)..(1223): n is a, c, g, or t
  misc_feature (1428)..(1443): n is a, c, g, or t
  misc_feature (1445)..(1481): n is a, c, g, or t
  misc_feature (2124)..(2168): n is a, c, g, or t
gagctccaggacagcaagagcaaatagttaggccctgtctcaacatccccgacaaaatctccacaggtgatctatcaaccaatatcatcagttggcggaaccctgactatgcagaaaattaggttttnnnnnnnnnnnnnnnnnnnnnnnnnnnnnnnnnnnnnncacgcctggaacccaaagtcccacacacaggtctaatccactcacggcaactctgtccttcaggccattgagggaaaccgtgagtggccacaggcgggcaaaaaactcctccagcacacaccaggaagtcacctctccgagaccgtccccatcaggagttaaatctaccgcgcgaggttggacattaagcgagctgtttgagcactgcacacaggcgcgcacacacgcacgcaactgcctttattgggagctgtctctcaggagaacagcggcccgcggcgcaacactagagccccgggatgttctcggctctgccgagggcagccgaggccgcgagctggccccagtggctctaggccctcaacttccggcgctctccggctcctcagcgggaacgcgcggcgagcagttgaggccgccgcggattccaacgggttggggacgttcgcagcgcgggggatgctcgggccacccaccacccccccacccccccggccacgaggcccggagctccaggtagcagtgcagcactaggcggcgtccgggccacgccgcccaattcccccgagccccttccacaagccgcgccaaacgggtctgcaccgcgcaggcggcgaaggcgagccgctagggcgatgcgaagacgcgcacaccagccagtcaacgtccgccttgcgtagagctaggcccgcccccaggggctgccgtcaggccccgcccccggcgacccgcccccacgccgtannnnnnnnnnnnnnnnnnnnnnnnnnnnnnnnnnnnnnnnnnnnnnnnnnnnnnnnnnnnnnnnnggttggtggaggaggggtcacgaggacgccgtcgtcgcctttccagaggcgattactgggcaggctcagtcttttgcctcagacgctagctgtagctggcagtcgctcgtacgtgctccagagtccaccgtgcccgtcgctgccgcccagctcgcgtgggttccccgaggctctcccgagctgcgcccttcgccgcacgcgccgtcgtcgcaacnnnnnnnnnnnnnnnnnnnnnnnnnnnnnnnnnnnctcgcgcgcgccgacgcgacggacgcctgggcctgctttctgaggggcgcgcgcgcgcggtcgctcaggggaggagggcctgcgcgcaatcccgggcgcgttcgagggcgcatgctggggaaagtctcgcgcgactagcggagagggtctcgcggtgtttggcccctgacttggtggtgggggagagccgaggcggtcccgggannnnnnnnnnnnnnnnannnnnnnnnnnnnnnnnnnnnnnnnnnnnnnnnnnnngggcggtgagatcggagccgccgcgaggggagaaggggcgacaggcccgccgaggggagatgggacccaactcgtgggccggcgccgctggcccgcctcctggcgcacgtgctccggtgcgcggcccgccacgtgggttttggcgctctgcgtgtgttccgcgtctcgggctcggggagtcgcggggtaccggggagggggacagcgggactgagctaggtgggttccccggcgatccccagcgcctgtccgtgacgggcaggccagcacgtggtggacacctgagggagcgcgtggtggcctgcgtggtacctccacgtggcccgcctccagagtggcgacgtcggaagtggttctgtgaaagacgtgctcctctccagaaggggctacccaaatagatacccctgccccggcagatgatttagagtgaaattcaaagggcaatgaatgactagtagattgtcttcagttgtctctggaagggaaagacaagttatataggtgattctcaggaaagattgccacatataataatgccaatgatgtcacctgtgcttagggcctttaacaatatagacagtgggcattaagaaagaagataatggcgaaacgcaaaatggcttacaaatagggtatcgacatnnnnnnnnnnnnnnnnnnnnnnnnnnnnnnnnnnnnnnnnnnnnnctaagaaaatggctcctcctccaaaagaggtggaagaagatagtgaagacgaagaaatgtccgaagatgaagaagatgacagcagtggagaagaggtatac

SEQ ID NO: 982 - DNA, 277 bp, Cricetulus sp.
atggtacccccggttcaggtctctccgctgatcaagctcggccgatactcagccctggtcctcggcatggcctacggcgctaaacgctacagttacctaaaaccccgggcagaagaggagaggagggtggcagcggaggaaaagaagagactagatgagctgaaacggatcgagagagaactggcagaaggtgacaccatactcaagtgatgcagagcccatgagcttgcctgtccttagccgctgaggatgaataaagctttgtcatgtgatggat

SEQ ID NO: 983 - DNA, 899 bp, Mesocricetus auratus
gcgcgggacagatggttcctgcgtaatgcaacttggggttaagatctgtcctccttagtaccatgctaagtgtaataagtgaggcagcaaaacacaaatacgacataatctaaaccttctgatatagagaattaagtgatgattctcataaacttggagatgtcaagggagaggaggtgagagatattagtcaaaggttacaaagcttgattaaatgggatctattctactgatccattgattatcgaggtgactgtaataatattgaacacttatatattttaaagttgtcaaaagagtagaaattaagtgttcttaactcaatgaaagaagtgtgtcaggtgatggacatgtgtggattagctagacttaatcagttcacaatgtctgtatggattatgtattgtaagtacagataatctctattctcaactaaaataaaattgattaaaattgcattctatgtcgcaggccccagctctgccccctcagggctgcacggctgagccaagtgggctggtaggggaagtccaggccagcgggcagcgggtgcagccaaggcagtgctttcttccctggagcatgcggcttgtgctggatgctgcaaaaagagaggagtgtgtgaaggtgatgcgtttcactgacagatcaacaggcactgtttgttctctttcttcctcttgaatcaaatccaaaatgctttcattcttatatttttggttgtgccatcaccacccagcttgattctgaatatgacatggttattgcctacatcaactaccaaaacctgcggttgcctgcaaaagatgaagccagataaatttcttgcactaatttgattgggtggaggtgtggctttggcgtgcttgtaagtttgggcggatgaggaagtggggcgc

SEQ ID NO: 984 - DNA, 1437 bp, Cricetus cricetus
  misc_feature (592)..(613): n is a, c, g, or t
aaaaaatatagagttaaaagataatattcacctttctctcttttggtgacctataatactgtagtttaaaattctttttggtgtgtcacatatcacttgtgggaactaaatctgaagtattcccttctgttgtgtttctttactttctcatcaggatggcaacttaacaagagtgctcctccataacctgtgtcttcgttagtagcagaaatgctttagaggtctctcctgcattccaacaagttaatgggggaaagggaatatgaccactgaagactgtggcgtctccaggcatagagtagcagccatatcaataaaaagggaaatagagcaaataatatccagactctggcatgttcctgcatatgtaaaattttgcatatgttcttatttttaaattttgttactccttttttcatgtatttgtgtatcttgtgtgtggtgggggacacatgtttgcatgcagaggtcagaggacagtttacaggagctgggtctctcctcccaccgagtggtctcagggttgttctcaggtcatctaactggcaataggcatttttcccaccccatgagtgctctcaccaataaccannnnnnnnnnnnnnnnnnnnnncttggcattctgtcatgtcatgggaaaacctccaaggcaaatcattagtgactgagtgttgggaatgacagtgccacttggtcaccagtctcttccatcatgctttctgtttcactctgaccagactcctgagcaaagccaggaatatcgttgtaattttgtttaagggacagagtctttgattggcagcaaaatctttgatcagctccgtttacaaattgtgcctggtttcagtgctgcagtgtgggtttctaagccctggaacatccttgtaagggaaacagaaacagtggggagctgttttgtgtttggttactatgatgttgatgaaggaatgaagccaggcagggtggttagactatggtcggctttggagaattgtttttactggtttcttatctttcacttttcctgtacacatctgttttaatacaggtacagcctgactgtttggactggaaaggatgacagttatcccactgaagatttactttatattcgagactactttaataaaacccaagttttctatgatattttggaaccacaaagccatgaatttaaacaagccattgggatctgagtcactctaagaatacaagaagacattttctaatcattttctctcttggcttcaccatcattctctgctttgtctgaattcattgctgtattaattgtgattattggtttgtactaaattatccaatcaaaatgcttgttgtatacctactcttcctttatcatgtcttcatggctgcacacatctgaaagattttatgaactgcaataaaattgtataaaattatagtaaaaatgctcaa

SEQ ID NO: 985 - DNA, 303 bp, Cricetulus sp.
tagattttaggataagtttgaaggaagtgtgacatttaatgaagtcgtgttcaactatcccacccgggccaacatgccagtgcttcaggggctgagcctggaggtgaagaagggccagacgctggccctggtgggcagcagtggctgcgggaagagcacagtggtccagctgctcgagcggttctacgaccccatggccggaacagtggtgagagcgctttcttagtaaattgattcaagattgtatcttatgtgatcatactggcagttgagtgaaggtccaaaatcctatctgatgtaatg

SEQ ID NO: 986 - DNA, 315 bp, Cricetulus sp.
ccttctatacaattcagttacttactatttaggatcgtttcctaaaaagaaaaacaaaacaaaaaaactgtaatagttgtggatttctgtttttcagctcctagatggacaagaagcaaagaaactcaatatccagtggctccgagcccaacttggcattgtgtcccaagaacctgtcctgtttgactgcagcattgccgagaacatcgcttatggtgacaacagccgggttgtgtcccaggatgagatcgtgagggcagccaaagcagccaacatccaccccttcattgagacactgccccaagtgagctaact

SEQ ID NO: 987 - DNA, 251 bp, Cricetulus sp.
atcttactatagaaatgtctattgattttaatttttgtcttgtaaaaagaactggcttaaaactgcattacctttattgatgactaactttcagaaatacaaaacaagagtaggagacaaggggactcagctctcaggaggccagaagcagaggcttgctatccgtcgcgccctcattagacagcctcgggtcttgctgctagatgaagccacgtcagctctggatactgagagtgaaaaggtctgtctcc

SEQ ID NO: 988 - DNA, 92 bp, Cricetulus sp.
gtgagcacgcttttgtcatcagatcacctaggttttatcatacaaatgcctggtgttatttactcttgattatgagtgcatcgttttgtttt

SEQ ID NO: 989 - DNA, 86 bp, Cricetulus sp.
gctgcaatcccacagtcttaaagtatgattttgctaagtctgaattgtgctggtgctgaagttgatctgtgaacccttgctcccag

SEQ ID NO: 990 - DNA, 97 bp, Cricetulus sp.
gtgagcacgttttttatactcagaacatttgggggttttaattatccagatagctgggtgtgtttaacccttgaacataggtcaatgattttttttg

SEQ ID NO: 991 - DNA, 89 bp, Cricetulus sp.
acatagtagagagaaatcctggcctggttatagagggaggactaaaggagaagggattttatcatagtcttttgtgtgactggaaacag

SEQ ID NO: 992 - DNA, 93 bp, Cricetulus sp.
cccagaattttatactatgaaataatggcagcaattttgctaaaatctgaatcatgctggtgctgaagttgatctgtgaacctttgctcccag

SEQ ID NO: 993 - DNA, 274 bp, Cricetulus sp.
  misc_feature (129)..(146): n is a, c, g, or t
cgcaagctggtaaataccatagatggatgggttcatttaaaatgcagtgtgggggagtgttgggacctgccaaaataagtaaagtctgttcactacattaattaagtagacttgtacatgtggtctatnnnnnnnnnnnnnnnnnntaataccaattcacaattttttcctttcaagtaaatgtggtttgccatcttgaggaattgcaagcagtgctgagagtatgccctgttgataaacaatgcctgttctttttttcctacaggctgaccag

SEQ ID NO: 994 - DNA, 356 bp, Cricetulus longicaudatus
gtgtttgtgtccccaatcccgcccgccgggagggttgcgatctgttgcggatctgttgtgttggttcttggacgatcggatcgagacggctgtcgggcgacacctagcggcggcagtaagctacaacacgcctggtccccgggcgctcggtgacaagggcggtgactcgcctgcagtcagccgaccagagcgacgagaatccaggcacgctggcgggtgtgtcccggaggcggtgcgacgtttgtgaacggtctctgtgcaggaggttgtaccggtagaataaacgagaaggtggtggctgttctgtgtgctaccatggccagatggaggtgtggtggcggcttgagctggtcgac

SEQ ID NO: 995 - DNA, 444 bp, Mesocricetus auratus
  misc_feature (133)..(182): n is a, c, g, or t
agccctaggtgaccagctataatcagaagccatcagcaagcaggttattgttctaccatgaccctgtggatgcgccttctgcccctgttgaccctgctggtcctgtgggagcccaaccctgcccaggcttttnnnnnnnnnnnnnnnnnnnnnnnnnnnnnnnnnnnnnnnnnnnnnnnnnngtgtggggagcgtggcttcttctacacacccaagtcccgtcgtggagtggaggacccacaagtggcacaactggagctgggtggtggccccggagcagatgaccttcagaccttggcgctggaggtggcccagcagaagcgcggcattgtggatcagtgctgcaccagcatctgctcgctctaccagctagagaactactgcaactagtcctcaccactacccagcccaccttcctgcagcgaataaaacctttgaaggagc

SEQ ID NO: 996 - DNA, 648 bp, Mesocricetus auratus
acaacaggaggcctcatttcctatatcccaagtcccgcttgatccgtagcctcctccctcctccccactatgggcccctgagcttccacgacatgttccagcctttcctcgagatgatacaccaggcgcaacaggccatggatgtccagttccacagcccagccttccagttcccggacatggatttgttaagagaaggtgaagatgaccgtgcagtgtgcaaggagatccgccacaactccacaggatgcctgaagatgaagggccagtgtgagaaatgccaggagatcttgtctgtggactgttcagccaacaacccagcacaggctcacctgcgccaggagctgaacgactccctccaggtggccgagaggttgacccagcgatacaacgagctgctccattccctccagaccaagatgctcaatacctcatccctgctggagcagctgaacgagcagttcaactgggtgtcccagctggctaacctcacacagggcgaggaccagtactaccttcgcgtctccacagtaacaacccactcttctgactcagaagtcccctcccgtgtcacgtaggtggtggtgaagctgtttgactctgaccccatcacagtggtgttaccagaagaagtctccaaggatcacc

SEQ ID NO: 997 - DNA, 204 bp, Mesocricetus auratus
tacctggcccaagctccaaaccacgttgtggtctcacggaaagagaaggcagcccgggttagcacagtgctgcttaaccagcagacttcatttggaaggggtgtatctgactgcactacgaacttctgtatgttcaaatctgacaccagcgaccttctgttcagagatgacaccaaatgcttgtttaaacttcctgatggtatc

SEQ ID NO: 998 - DNA, 890 bp, Mesocricetus auratus
  misc_feature (854)..(890): n is a, c, g, or t
agcggctttcctctgttgtagtccacagtgcaacacatcttctcagagatgcagctgcctttgactccactgtccttctctgggacactccttttgatggcaatgtcaaattttctcctttgggaacatgtgacctcctcagcaagtcctcgtttatccactagaaacttgtaccagcgtgtggttgaattgtcacactgcacccatgatcttgcctcaaaagttttcactgactttaatatgaagtttggtaagagtatttgcagacagaaactgatgttatacacctgccacacctcctctattcctactccagaaaacagagagcaagtccaccaaacaaactcggaagatctcctgaaagtgacgatcagtgttttacaagcctgggaggagcctgtgaagcacatggtggctgcagtagctgctcttccaggtacatctgatgccatgctgtcaagagcaaaagagttggaggaaagagttttaggccttctggagggactgaagatcatactcaacaggattcatcctggagctgttgaaaatgactatactttctggtctggatggtcagatttgcagtcatctgatgaagctactcgtaacattgctttttatactatgggccgttgcctgcgcagggatacacacaaagttgataattatctcaaggttttgaaatgccgagatatccataataacaactgctgagctcaaatccttaaccactgtcatggagaaggtccagacctcaaagttccattgagtctttaccttttggttcattccttggtttaatgggcatgttattcaaaaataaacattgattctttgaaatgcttaattcaaannnnnnnnnnnnnnnnnnnnnnnnnnnnnnnnnnnnn

SEQ ID NO: 999 - DNA, 862 bp, Mesocricetus auratus
  misc_feature (611)..(627): n is a, c, g, or t
  misc_feature (741)..(772): n is a, c, g, or t
tctagggaagggtggagtcagtcttctacagacagactgcagagaggtatgatggttatgaagcccccacatgcctctctggaaacttcctatacagttgtagttcggctggcaaaactgaaatataatgtgctttaaagtaatggtccatttgcaaagtatcggacagtgggattctagtgaaacaggtagaaatggggatctagataactccctggaatccactgtatcatccgtctctcacaagtgtgtgggtttatgtataaaatccagttggacctgttactggaatttgaggacagctcaacattacagaagcatcctccaccccaagaaatggcatattcatcctgtgttttcctggccctgaagcaggatgaagcctttccttgccatcattttttgcttcttgatcctgggagttgacagccaaaggtggttccagttcatgaaagaagctggccaaggtaaggacaaaggatgggggcaggaggttgtacgtgtgaggtttcaagtacttaccagagcagggaccacataattaagggaaaacatccttgtgaagtccccatggacagagaagcagtgtctctcttcccgtgtagttctgnnnnnnnnnnnnnnnnnttgacctttttctgtgaggatccgaagcctgagatcacgtcctgatgtgtctgcagctttcccacaggaatgtaggaacaatctgtccttgtaagatgcagattcaccagccannnnnnnnnnnnnnnnnnnnnnnnnnnnnnnnacgatgaacagctcatttctatgtggctgtgagacaaagtgtatctcaaggtgctacaatattcagaccaggcacaggaacaactgtgag

SEQ ID NO: 1000 - DNA, 2214 bp, Cricetulus longicaudatus
ctaaaacatcccaagtagggagacttctcattggtcagctaggtaacctggggtagccagtgaggccctgggccgacctctgaggtcatcccgcatacagggtcacagcacctaaaagaacagaagcaagccgaattatctcctaactctcttggccccaagctgcctcttcgcgatggcctcagccccgcctggcgtcgcacgtcagcactgcgggccacacccctgcgcacgggttgggtccggcgatatgatgaaacttcccgcacgcgttacagtagcccggctgctctaaggtaagaagcagtcctctgctccttcgtgtccctgtgctgcctcctctcccgcctcctctggccctagccaccagcgagcagagtgcctgcagttctcctgcaggatgtgtggcatttgggccctctttggcagcgatgactgcctttccgtgcagtgcctgagtgcaatgaagattgcacacagagggccagatgcatttcgttttgagaatgtcaatggatataccaactgctgctttggatttcaccggttggccgtggttgaccccctgtttggaatgcagccaataagagtgaagaaatacccttatctgtggctctgttacaatggtgaaatttacaaccacaaggcgctacaacaacgctttgaattcgagtatcagaccaatgtggatggtgagattatcctgcatctctatgacaaaggaggtatcgagcaaaccatttgtatgttggatggggtgtttgcattcatcttgctggacactgccaacaagaaagtttttctgggcagagatacctatggagtcaggcccttgtttaaagccatgacagaagatggatttctggctgtgtgttcagaagctaaagggctcgtttccttaaagcactccacaactcccttcttaaaagtggagcccttccttcctggacactacgaagttttggatttaaaaccaaatggcaaagttgcatctgtggagatggtgaaataccatcactgcagagatgaaccactgcacgccctctacgacagcgtggagaaactcttccaaggctttgagttagaaacggtgaagagcaatcttcgtatcctgtttgacagtgctgtcaggaagcgcttgatgacggacaggaggatcggctgccttttatcagggggcctggactcgagcttggttgccgcctccctgctgaagcaactcaaggaggctcaagtacagtatccactccagacatttgcaattggcatggaagacagccctgatctactagccgctagaaaggtggcaaattatattggaagcgagcatcacgaagtcttatttaattctgaagaaggcattcaggccctggatgaggtcatattttccttggaaacttacgacattacaacagttcgagcatctgtaggtatgtatctaatttccaagtatattcggaagaacacagacagcgtggtgatcttctctggagaagggtcagatgaacttacacagggctacatatatttccacaaggctccttctccagagaaagcagaggaggagagtgagagactgctgaaggaactctacctgtttgatgttctccgagccgaccgaactactgctgcccacggtcttgaactgagagtcccgtttctggatcatcggttttcctcctattacttgtcactgccaccagaaatgagaattccaaaaaatgggatagaaaaacatctccttcgagagacgtttgaggactccaacctgctacccaaagagattctctggagaccaaaagaagccttcagtgatgggatcacctcagttaagaactcctggtttaagattctacaggattatgttgaacatcaggttgatgatgaaatgatggcaacagcagcccagaagtttcccttcaatactcccaaaactaaagaaggctattactaccgccagatctttgaacgccattacccaggccgggctgattggctgacccattattggatgcccaagtggatcaatgccaccgatccttctgcccgaactctcacccactataagtcagctgccaaagcttagatattctctaaactctagtgtaaaagtgttcttctcactctgaaggcagagaccgtgagacaaacacagtaatgcaaatcaaccatcaactgctcaggcttacataggcatggaaagaaataaaaaca

SEQ ID NO: 1001 - DNA, 261 bp, Cricetulus sp.
  misc_feature (12)..(12): n is a, c, g, or t
ggactagtgtcncagcagctgagagttagtcctctgtcccttgcagggagagcatcctctggacgcaggattgcctgttccatttattagctgtcagtcatgggtcagctgttttcttcacctaaggatgaacagcatgaagatttggcctccagctttacccaatattttaagaagtttaagacagtagacacaatcattcctcaggaaactctggcttcaattgggtcaagcctgacaagaggaaacattcaggtagtc

SEQ ID NO: 1002 - DNA, 242 bp, Cricetulus sp.
ggactacatgagagtcacagtgtgagatgaggttcagtgcatctctgctgaggaagggaaattcccaggctctaagcccaacccctcattccttcggctctccggaccaaaggacaccattttggcaggttataccaccaactaggcaaacatcttacaagatgcaatggccatactaattataccctctgcaaagcccaacttgaaaccttcacttgggaacataatcgtatcgctagtcc

SEQ ID NO: 1003 - DNA, 906 bp, Cricetulus migratorius
  misc_feature (26)..(47): n is a, c, g, or t
cggctttctgtctcccactcaagtannnnnnnnnnnnnnnnnnnnnntcatagccctggacaaagagcatggacaagatgctgctgctgcttggggtatctatcctcctttcagaagtctttgctcagacagacctcacaggaaaggtatttgtgttccccagagagtctgaaagtgattatgtgaagctgatcccacgtctggaaaaaccactggagaacttcacactgtgttttcgaacctatactgacctttcccgccctcacagtcttttctcctacaatacaaagaacaaagacaatgagctgctaatttataaggaaagaatgggagaatacggattgtacattgaaaatctgggagccatagtccgtggggtggaagaatttgcttctccggtgcatttctgcaccagttgggagtcctcttctggcattgctgaattttgggtcaatgggataccttgggtaaaaaagggtctgaagaaggggtacactgtgaaaacccaacccagtattatcctaggacaggagcaggataattatggaggagggtttgataagtcccagtcctttgtaggggagatgggggatttgaacatgtgggactctgtgctgaccccagaagaaattaaatctgtatatgaaggttcctggcttgaggctaacattctagattggcggactttgaactatgaaatgagtggctatgcagttatcaggcctcggtgtgtggcattaagctcttacaacaaaatctcatgaaaatgaaatgaccaatgtccaagaggtcaagtcagcacaactcaacacttaatcctgaatctgcagccttttctcccttgtgaacttcctgcctacttatctgcctaataaaaaattatcaagttcaaaaaaacgatatcaa

SEQ ID NO: 1004 - DNA, 1671 bp, Mesocricetus auratus
agatctgcctgcccctgcctcccaaatgctgggatttaggcatatgccaccatgcccagcttttccctctacttttgacctagaaatgtaagagaatctaagcagatatttgaatatttgagaaaagtacttaatgagatccggtgatgtcctcccatccaagtaccatacttctgagctgagaggagattggctcttcagtgtcccatggccttagactgtagtgactctagttttcctctggctcccagaaatgtgtcctgagaatggctcttgtgcaccggaaggccctggtcttttgcagtgcgtttgtgcggatggtttccacggatacaagtgtatgaggcaggtaaggaactgggcctttcacaactaaaggttcttgcatttggcaagaacctcccaggaagatacaaggagctgacgctagttgctggtaggcaacttcaagggaagtgcctggaggaggggctgcgtggctaagaaagaagtaggtcagagagaccctgtgttctgctgtgacttgtttgtttgtttgctaatcacagggctccttttcgctgcttatgttctttgggattctggggtccaccacgctagccatctccattctactttggggaactcagcgccgaaaggccaaggcttcatgaacctcacagggcttcttgctcacccgagatcgctctgatcatgacaaacattactcgccagccagcggatcctgctcaaggctgaagcggccattgataatgaaggaaggtgtcaaattttaccacttcggggtggtggacactcggttcaggagcggacgagtacttgcatgtattattgactacaataaacactttttttccattgttttaggaaatagtgccctacctttgcgtgttccttgcttgaggggctggtttgggacggtcgggtttctcgggtctccaggttttgcttggtgtgatgctgtggacccacccatggtcccgccccttacgtgcccggccccgcccctcacgctgccggctgcctgcgccgtcgcagtcgtgctccagctcagtacgattagggctgccgcttaccgcgcccgcctgctctccagcgccccgctcagcgagccacgtggaccaacttcggcgcgcggtgttcgcttggttccagtggggctcgccgcgcctcccgcttctcggtgctcgcctcgtctcagctccgaccccatggcggctctggtgttggaggacgggtcggtgctgcagggccggccctttggggccgctgtgtcgactgctggggaagtgggtaagcaagcccgagcggcgtgcctaacctgtccacccctcctgcacacccctctctccgattcggtggctccagctccctctcaccgctcacgaccgaagcagtcacctcctccgggatctgcagcgctcggggcagtgttccgaaggctgcccttgccagatctcagccctgcctctttcttcagtgtttcagaccggcatggtcggctacccagaggccctcactgacccttcctacaaagctcagatcctggtgctcacgtaccctctcatcggcaactacggcattccctcagatgaagaggacgagttcggcctgagcaaggtagtcacacccagtgctttctctacatcccttctcacgtcagaagttaac

SEQ ID NO: 1005 - DNA, 317 bp, Cricetulus sp.
aagcttgtcttgtaattcaaaccactttcctgtggatcatcaaaattcttgtttctctgtgttaagcacacagaataaaaaatcaggatgatgccccacaacatttgcctatgtattagaaagccatcatgaggtacatggaaggaaattgtgatctatctggccctaagggaagatggaaaaagagataaatggaaataaaagctgtgagctgtttctgctccaaactgtaaacatctttgtggtatttttggcagatggagtggtctattttgttggttttggtactgaagtcataattaagagggttgcttggg

SEQ ID NO: 1006 - DNA, 321 bp, Cricetulus sp.
aagcttgccttgtatttcaagccactttgatgtggagcatcaaaattcttgtttctatgtatgcttatacagaataaagtatcaacctgaggccccacatcatttgcccatgtattagaaagcaatcatgaggtactcggaaggaaaccatgatctatttctggcaccaagggatggtggaaaaggagaaaaaatggaaatgcaaactgtgtgcactatctgctctgaactgtaaacatcaatgcggaattgttggcagatggcttgtttctattttgttggttttcagaactgaggccataattaagagggatgcttggg

SEQ ID NO: 1007 - DNA, 2601 bp, Cricetus cricetus
  misc_feature (1502)..(1531): n is a, c, g, or t
  misc_feature (2336)..(2377): n is a, c, g, or t
  misc_feature (2503)..(2521): n is a, c, g, or t
gaattccttgatataagcctgcagttctgtccatatactcaagtaagctttgacccagtccacatgcttcttatccacatctttgtactccttgaggactcggtttgtgtaaaacatggcagcatcagtcatctctttcacaaaggggccaggttttgcagccagagccacccagcccagggcctggatgctttcactgacagctgacaaatgattgaaaaacttgctgcctcggttcttctcccggaaggttataacttcttgaatctgctctgagataggtgccaacaaatcagagagcttattaccggccggctgctggcactgagaagctgtaaccaggagagctccaacttcaggcctgtgtggaccatctctgcatgtttctgcacgtctcccccaatctccttactcatcttcaacttgtggcctccccgcaacgaggacaggaagatgccacccaagcgcatagctaagagaaggtcacccccagaagatgccattcccaaaagcaagaaagttaaagtctcacacaggtctcacaaaacagaaccaggcttggtgctgacactgggccagggcgacgtgggccagctggggctgggtgagagtgtgctggagaggaagaagccggccttggtgccccttctgcaagatgttgtgcaggctgaggctgggggcatgcataccgtgtgtctgaaccaaagtggccaggtctactcctttggctgcaatgatgagggtgccctgggaagggacacatcagtcgagggctcagagatggtccctggcaaagtggaactgcaagagaaggtggtacaagtgtcagcaggggacagtcacacagcagctcttactgaagatggccgtgtcttcctctggggctctttccgggataataacggtgtgatcgggttgttggagcccatgaagaagagcatggttcctgttcaagtgcagctggacatgcctgtggtaaaggtagcctcagggaatgaccatttggtgatgctgacgactgacggagacctctacaccttggggtgtggagagcagggtcagctgggccgtgtgcctgagttatttgccaaccgaggtggccgtcagggccttgagcgactcctggtccccaagtgtgtgctgctgaaatcccggggaagtcggggccgtgtgcggttccaagatgccttctgtggggcctatctcacttttgccatctcccgtgagggccatgtatatggctttggcctctcgaactatcaccagcttggaactccgggcactgcatcttgcttcattcctcagaacttaacatccttcaagaattccaccaagtcctgggtgggcttctctggtggccagcaccatacaatctgcatggattcagaaggaaaagcatacagcctgggcagggctgaatatgggcggctgggccttggggagggtgctgaggagaagagcatacccaccctcatttcccgactgcccgtcgtctcctctgnnnnnnnnnnnnnnnnnnnnnnnnnnnnnntgtccaaggatggtcgtgtttttgcctggggcatgggcaccaactaccagctgggcacagggcaggatgaagatgcctggagccctgtggaaatgaccggcaaacagctggagaaccgagtggtcttaactgtatccagcgggggccagcacacagtcttactggttaaggacaaggaacagagctgatgaagtctttgtgggcctggcttctggcccccaacccaccttcacagaacaggaaaacagccagatgcaaattccagaaggcccctccccagccctgaacagctgtcatctcctgtcttacccatcaccaccacagaatcctttccttctgtttcgtcctcttttctagaatcatcctgagaagtacaggatgagggaggatgggaagggggtctcagaaggagtttgcttacttacgtccttacaccgttccctatattaccctacttcctgtggtcctagcaggccctggctcattgcctacaaaacccaaagcttggggtttgggtgcccatactctgaaaagttgggaactccgttcacacccccattcctatgtgccactttttctgttcctaacatcagtttaaaaggagacggatggtacagtcatcagatccagttgtcatggacctatgcctagagagatctggacaaaggcttcacaaggctggggtgaccctaagccaaatatttggctctaaacaggtgtccatgggcaaaaacagcgatccacttgaaagaaatccaactagctgtctcccaaaagcaccaaagcacccactgtctcttgggcnnnnnnnnnnnnnnnnnnnnnnnnnnnnnnnnnnnnnnnnnnggactggaaagccatgctgggctctgctgggcagtcaaggcagggtactggggaagcgtggaggggaacacttggagggacggaggctggtcctaagaaaaggaagaacagtggttgagacagtannnnnnnnnnnnnnnnnnnaattataaagtattttggaggggagagtgaaagtcttttaacactttgaataaatttagagttttataaaaatggaattc

SEQ ID NO: 1008 - DNA, 2726 bp, Cricetulus griseus
  misc_feature (563)..(612): n is a, c, g, or t
  misc_feature (1054)..(1080): n is a, c, g, or t
  misc_feature (1948)..(1965): n is a, c, g, or t
  misc_feature (1968)..(1991): n is a, c, g, or t
  misc_feature (2033)..(2048): n is a, c, g, or t
  misc_feature (2051)..(2068): n is a, c, g, or t
catggtgatttttctttagatattctgggcctcctgaaactgacaagattctgtaaagcaaaagacataatcaacaagataagacagcagtgcaaacaatgggaaaagttcttcaccaaccccatatctagccaagggcaaatttctaaaacatacaaagaactgatgaaagcagtcaacaaaacaccaaataatcgccctcactctccgccaccagcctgctttgccagatgagaccagtgtcccgggcgctggctcctcatgtcactcgggcctatgccaatgatgtaaaatgtggggcaaatccttgatccttaaagcttcaagttgtagaccttttagccgatgctgtagctgttacaatggggccaaagggaagaacagtgattattgaacagagttgaggaagtcccaaagtaacaaaagatggggtcatttttacaaaggcaattgatctaaaggatacatacaaataatatcagagctaaacttgttcaagttgttgccaataactcaaatgaagaggctgggatggcactaccactgctactgttctggcaagnnnnnnnnnnnnnnnnnnnnnnnnnnnnnnnnnnnnnnnnnnnnnnnnnntagaaatctggagaagtgtgatgttggctgttgatgctgtaattgctgaactaacaaaacaatctaaacatgtgacaacccatgaagaaatttctcaggttgctacaatttctgcaaatggacacatagacattggaaacatcatatctgatgcaatgaaacatgttggagggaaagacgtcatcacactgaaggatagaaataccctgaatgatgaattagaaattattggaggcatgaagtttgaaagaagatgtatttctcagacatcaataagtcaaaaatgtgaattccaagatgcctatgttctattgagtgaaaagaaaatttctattgtcgagcccattactgctcataggaaacaaatggtgatatttgctgaagatgttgatggagaagctctaagcacactggttttgaacaggctaaaagctggtcttcnnnnnnnnnnnnnnnnnnnnnnnnnnntttggggacaataggaagaataagcttaaagatacggctattgctactgatggtgagcaatttggagaacaggggctaaaactaaatattgatgatggtcaagttcatgatttaggaaaatttggagaggtcattgtccccaaagatgatgccatgcttttgaaaggaactgatgactaaactcaaattgagaaaccaattcaagaaatcactaagcagctagacatcacaactagtgaatatgaaaaggaaaagctaaacgaaacacttgctaaactttcagatggtgcagctgtgtttaaggttggaggaacaagggatgttgaagtgaaggagaagaaagacagagttacaaatgctctcaatgctacaagagcagctgttgaaaagggcattgttttaggacttagctgtgctctgcctctgtgcatcccagccttggattccttaaagccttcaaatgaagatcagaaaataggtatagaaattattaaaagagcactcaaaattcctgcagtgacaattgctgagaatgcaggtgttgaataatctttgagagttgagaaaattctgcagggttcctagggagttggttattaggctatgcccgcaaattttgtgaacatggtagaaaaaggaatcattaatccaacaaaggtaaatgagtcagcaattcttaaacattggatggcttgttctatggtatgtgttttcattaatcattttataaacatttttttgtaggttgtaagaactgctttagtagatgcctccttgctaacttcagcagaagctgtagtgacagaaattccaaaagaagagaaggaccttggaatgcgcacacatgcctttaatcctagcacttgcnnnnnnnnnnnnnnnnnntannnnnnnnnnnnnnnnnnnnnnnnactccggagtgagtgccaggatagtctccaaagctatccaannnnnnnnnnnnnnnngannnnnnnnnnnnnnnnnnagacatttgtacattcctgaaaaaaacccaaataatccaattaaactaggggtcagcctaataaagatacccgaataggtttttacatcttaagagaaaaatctactaataaatgacttggagcaggtccttcacagacaatatttagtgagagtaggtagcctcatgtgggttagtagttccagttgcttcaaaatgccctcaccttttgtcataggctcatgtggaggatctactccattggatggtgatattaaaagtagcacatgggtacatgccttaagatattaagatccccaagtaaaaactgcatctcagatgctctctgtttcttgggccatgatatgggcagtgagatttctgtcacacttgccaggaaacacttatgatctgtctgtcacaatctcttatattgtcaagtacttaaccaaacacaatcacccatgacctctcatatcctcctggacttagacaggaggcacaagtctactcaggtataaatatttttacttctgatgccccacagtaacctacaatggcttcagtccagtacacaggtaagtaaacccaccaatataccattccagctgattgataacctcttagatacatcccatatgctgcagttcccaaatggagacaacccaaagtttcttga

SEQ ID NO: 1009 - DNA, 1845 bp, Cricetulus griseus
gttccccgctgtggtggccgcagtccggcctctgagcggagatcccggccgtccgcggtgttagcgaggccagccaggttccctaacgatggagggccctttgtccgtgttcggggaccgcagcactggagaggcgatccgctcccagaatgttatggctgcagcttccattgccaacattgtgaaaagttctctggggccagttggcttggataaaatgttggtggatgacattggtgatgtaaccattaccaacgatggggccaccatcctgaagttactggaggtagaacaccctgcagctaaagttctttgtgagctggctgacttgcaagacaaagaagtgggagatggaactacctctgtggtaattattgcagcggagcttctgaaaaatgcagatgaactagtcaaacagaaaattcatccaacatcagttattagtggctatcggcttgcctgcaaggaagcagtgcgctatatcagtgagaacctaattattaacacagacgaacttggaagagactgtctgattaatgccgctaagacatccatgtcttccaaaattattggaataaatggtgatttctttgctaatatggtggtagatgctgtacttgctgtcaaatacacagatctgagaggccagcctcgatatccagtcaattctgttaatattctgaaagcccatggaagaagtcaggtagaaagcatgctgatcaatggctatgcactgaactgtgtggtgggatctcagggcatgcccaagaggatagttaatgcaaaaattgcatgtcttgacttcagcctgcagaaaacaaaaatgaagcttggtgtgcaggtggttattacagatcctgagaaattggaccaaattagacagagagaatcagacatcaccaaggagagaattgaaaagattctggcgactggggccaatgttattctgaccactggtgggatagatgatatgtgtctgaagtactttgtggaggctggtgccatggctgttagacgagttctaaaaagggatctcaagcgtatcgctaaagcttctggagcaagtatcctgtccacactggccaatttggaaggcgaagaaacttttgaagctaccatgctggggcaagcagaagaagtggtccaggagagaatttgtgatgatgagctgatcttaatcaaaaataccaaagctcgtacatctgcatcaatcatcttacgaggagcaaatgatttcatgtgtgatgaaatggagcgatctttacatgatgctctttgtgtggtgaagagagttttggagtcaaaatctgtagtcccaggaggaggtgctgtagaagccgccctgtccatataccttgaaaactatgcaaccagtatggggtctcgggaacagcttgctattgcagagtttgcaaggtctcttcttgttattcctaatacactggcagtgaatgctgcccaagactccactgacctggttgccaagttacgagcttttcacaatgaggctcaagttaacccagaacgtaaaaacctgaagtggattggtcttgatttgatcaatggaaaaccacgagacaacaagcaagcaggggtgtttgaaccaaccatagttaaagtgaagagcctgaagtttgcaacagaagctgcaatcactattcttcgaatcgatgatctgataaaattacacccggaaactaaagacgataaacatggaagttatgaaaatgctgttcactctggagcccttgatgactgattggatttcccttttatttatagcagtgtcaggtgcaatgtagccttgggtatctcacattaaagtacagtgagctgtccacctga

SEQ ID NO: 1010 - DNA, 5302 bp, Cricetulus griseus
  misc_feature (230)..(250): n is a, c, g, or t
  misc_feature (2859)..(2878): n is a, c, g, or t
  misc_feature (3003)..(3024): n is a, c, g, or t
  misc_feature (3549)..(3567): n is a, c, g, or t
  misc_feature (3746)..(3763): n is a, c, g, or t
  misc_feature (3765)..(3803): n is a, c, g, or t
  misc_feature (3815)..(3833): n is a, c, g, or t
  misc_feature (3852)..(3882): n is a, c, g, or t
agatctggtcacagcgacacgcagcacccggagtccttaataagccatcttggtcgccggcaggcttagcctccttggaaaccgcaatagaggcttcttccgggagccgggattccctccgtgacctcagaggtacacttccggaatacggaagtgacccgtctgcccgccccttccttctctctctttccggtggagaagtctggagacgacgttcaggtagggaggcnnnnnnnnnnnnnnnnnnnnngcatcctctggccaggggcgtctgcgggcttggggtcgcggtttgtgcgcggtaaccgagccaggtgcgtgatggtgacgggcggctgtccgctcgccgcgatccacccggcctggggctgcgccgtgtccgggaggcggccttctggcctgagatcggaaggtctgaggtggaagtgcggggcctgcctgggccttgccgtcacgccacagtcgtcgcccgagcgttcggggagcgtgtccctagtcgcgggtgggccgtcaccggcaccccattagattcttaggggccgtcgacgacctgcacctaacctcatgcccctcatgtggaaaatacgagcagcgttcgtatctgccccttctgtaaaccgaagcgtaaaatgggatgtcagaaaacctggtcacgcaggattagagtgcttctaacccatggtggttacccctccgagtcggacacattgcctgttggggtgccccctagtagagtaggactgatgccatatgtttacatttctctgaatagccctctcgtctccactgaggacggcaaagctacactgaacagatgtcatgtcttatggaatcgtgtttgttagcctaatttgagggtatgagcaggtgactacatcctggacctgcccttgtgcttttggcaaataagtcccaaatagtgtgtgagggaggcactacagagatcccaggtgtggttgaaacttttaaggcctaggaggaactttgtggagtaggagcatcttggttctaggaggagtataagacaggctttggtgcagtattgtcctggacagacttagcctcgggttggtcaaaggcatgcctgcagctttggcaaaaaaaaaaaaagcctctttgcttgtgtattttccctgggtcctgtgactgtacttacattattgactaggcaggaaggggttacatgtcaggtgtatttgcagttcataacaatagcaaaattagagttatgaagtagtagcaatgactttttgtgtggggggcaccacaatatgagaattgtactaaagggtcacagcgttaggttgagaaccaaagggtagactcacttgatgctgaacactgaattttaggtatggatatctttaccattaaacttcctggaaggcataccctgaccatcctgggacttgctacgtagaccataactacgatatcctcctgcctgtgactcccaggtgctggggctaaagttatacacaagcacacattgctgtggcagtgctttttaatgtttattactagtaaagggtgaaagatttggttctaaacagtgagaggctgtcagattaagaattgtgtgtggacagggagtccgttaatctgcagttggcttcagttgtgtcatgttaatcaaataaacttcccagcttaaggagagggagaggggagttgtgaatggggctttgccccaacacctgagttcagcatcctctattttggataactacttgtgaaagtttgaggtgcatattgttcattgctggaatcttaggctcatcctgaaaatgcttggagcttttgtttagaaattgtctcctctcttggcgcctcccttttagttacaactcagtaattccccaagtacaaatatgttggatattagagagccaaaggagcttgggttttcctttagtaggctaaagtatttggggatgttttgtctgttaacatggaggttctccttccactcagaaatggcacctcgcaagggaaaggaaaagaaggaagaacaggtcatcagcctcggacctcaagtggctgaaggagagaatgtatttggtgtctgccacatttttgcatctttcaacgacacctttgtccatgttactgatctttctggcaagtgagtacttggggacatgaagacataaaaccaagcctcacagggactgaggtgggagaaaaaggcataggagtttatgggattccctctaaagaattactgattttcttattttcccataaattataagagaaaacagttgaatgtagctgaggattcatccacagaaaatcaccgcaaataggaagtggaagcagaggatcagaaactcaattatcctcagctacacgcacatgtaaaatatatgcattatggaagtgattatggggataaaatgcaaaactaattgttgtattaacagggagtttgtctagatagggtccttggacccctgtaattatacacaactcctgtcttgttcagaaccaggatgtgtgcttgttggggttcagcaagtgtttcctgtgtccttgttggaaaatgaaggcatggatctgcttttgtctctagggaaactatctgccgggtgactggtggaatgaaggtaaaggctgacagagatgagtcttctccttatgcagccatgttggctgcccaggatgttgcccagaggtgcaaggagctgggcatcactgccctgcatatcaaactccgagctacgggaggaaacaggtatggaagtctagggctggacatttgtaagttcactgggcttgggggtggatctgagatttgagtctctgctgtgtctgagagcaagccgttttaggaatgtatgtatgttcttcgtcagnnnnnnnnnnnnnnnnnnnntaatcccagcactccggaaccaatataggaggaggatctaaagtttggtgctaacctgggctacacagtgagcctcaaaaataagatagtttgttcctttatgtttgtccctgtagagtgctgcnnnnnnnnnnnnnnnnnnnnnncatacatgagactgactcttccccagcaccaggtagactgggtgtggtagtatacacctgttgtctcagaaagtggaggtgaggagagctagagtttcaagttggttattggttgcatattgagtaggtggccagcttgagctgaacagtgatgcttaaatgatgaactgggggtgcatagtccagatagagacaaaacttcaagagaagcatcttggggtgagaaagaagttgggctttacagggatgattggtgtaagatatgatctaagaagcagggatggagcctctggggtcttaagttttacaaaacagagcaagggcttgggcatgaaaactagaataggtggctactgagtggaaagatactgcataggaagccctaaggaagttacatactggatgtaggagctgggaagtaggcatcacagcaaggggaggacagccacaggccaggtgactatcccctcccccccccacacacacacatgtacacttttaaaggatttgtaggcatggtggctnnnnnnnnnnnnnnnnnnntctcttggggggcgtccccccacaaaagtgggaaaaattacatgcgtatgttgcctgtgtgcatgcatgcgtgcattatcggttccctgtggaggacagaagaggaccatgaatctcttggaactggtgttgctgagccacctctccaggcctcagttagcagttttgaaagggtttgnnnnnnnnnnnnnnnnnncnnnnnnnnnnnnnnnnnnnnnnnnnnnnnnnnnnnnnnnggcactggcttnnnnnnnnnnnnnnnnnnnaaactcacagagatccgannnnnnnnnnnnnnnnnnnnnnnnnnnnnnncaccaacgcaggatttggttttgttgtgagattgtataatatatgaaaaccgtagcagcctacaaagtctagaattttgtgtaatcccctcacagtgtgcagatctttaactatagccccaccaccattcagaagtgaattaaaaccatgtgaacattcccactgacttgaccaacaatccttcattttttaggaccaagacccctggacctggagcccagtcagccctcagagctcttgctcgttcagggatgaagattgggcggattggtaagtgacccttctagctaacattgggtttattttgaagcattgaccccttccaaactatgtgatgtgcatattggttcaagcttgtctggtgactggtgcagttaacttttgttaacctgtaaaagacattgagagcgttgatttctgtaaatgccccttaactgttatattttcccatttgcaattgggaagacttaaaaaacacttgtgaatctgtcctagcagcctttttccctgctagctaaatgttaagggtatgcccttgggacagtccaagtgaataattgcacacacctggcctaaagagcaaacagccacaggtgctcagtgtaggggctctgagttagaaacttgaaggagtccttcccctctgatgtttgtgtgccttctcagagcctgtgttgtcctcgtccaatgtgggttgagatgaggaaatgacaggtgaggtgggcccttgtttattgaccactggtgatacatttggggaagaataaagtctgctagttagtctaatggctagggaggctgtgtttatgtagctatgggcaatgacattttttcttcttgcagaggatgtcacccccatcccctctgacagcacccgaaggaagggtggtcgtcgtggtcgccgtctgtgaacaggacttctcaaattattttctgttaataaattgctttgtataagctattttggttctgatgtttgtttgttttgaggcaggatctctctccatgtctatgtagaagagtctggcctccaactcagatccacatacctgtctctgcctcccaagtactggggataaaggaatgcaccaccacaccccggtgaccttaggggccacccagggcaacaccaaggcagtgttttgaggggatgttaagattgcatgtaggagcttctaatgtaggttgggggttggcaaacctgggtttgcaggctggctttctgagaatgggaacctgagagaggagatgctgaggctgccactctggcattaatttgccagccagtattttcaaagtggaactgttagtagcccatgctgtcatgggacagctaaacaccacacacacacacaccccaagcagggtagtagagatcacaagttggaagccagtttaatatggtctacttggggaattc

SEQ ID NO: 1011 - DNA, 311 bp, Cricetulus sp.
tgacctcttgtcctgtatagcaacctatttgactgcttcatggactctttgctgttgatgttgatctcctggtagcatgacctttggcctttgtaagacacacagcctttctgtaccaagcccctgtctaacctacgaccccagagtgactgacggctgtgtatttctgtagaatgctgtagaatacggttttaagtgactgacggctgtgtatttctgtagaatgctgtagaatacggttttagttgagtctttacatttagaacttgaaaggattttaaaagatcatttctcatgtgctttgtagcttt

SEQ ID NO: 1012 - DNA, 636 bp, Cricetulus sp.
  misc_feature (66)..(102): n is a, c, g, or t
tgacctcttgtcctgtatagcaacctatttggtaatgattccagcactcacagaacagcttgcgtnnnnnnnnnnnnnnnnnnnnnnnnnnnnnnnnnnnnncactaaccagtgcaagttggtaaataaactttaaagaggcataacaaaaaccttatctatcacaagtatatattagaaaaacgtttttagttaatactcggaagagctacagacagaactgaccaccatccctagctcaccagttttcctgggacagcacatgagtgtgcacacatgtgcgtgcacacacacccagggcatggtgggaacctaggtgcacacctgtgtgcacacagtatgatgggagcctgggtgcacacgtgtgtgtgcacacactcacacagggcatggtgggagcatgggttgggaatcctccggacagccctagggttttactttccaagacccactctatgagcagggcaggcagagggaggcctggctcagtccatccggcctgcccactctacattctacaaggctgcctgctcagctctgccctgcccctgctcaaattccaaaaccctttcagaaatggtcaacactctaaacatccccctactccacagccacagcagaaaactctaaggacct

SEQ ID NO: 1013 - DNA, 843 bp, Mesocricetus auratus
gtgggctttgtcatcgtcaccttccaggagcagggagaaaaagagtataagaactgtgagctcgacaaaaatcagcgtcagtgtgttgagtatgccttgaaagcacgccccttacggagatacatccccaaaaacccctaccagtacaagttctggtacgtggtgaactcctcgcctttcgaatacatgatgttcgtcctcatcatgctgaacacgctctgcctggccatgcagcactacgagcagtccaagatgttcaatgatgccatggacattctgaacatggtcttcacgggggtgttcactgtcgagatggttttgaaagtcattgcgtttaagcccaagcactatttcactgatgcatggaacacttttgatgccttaattgttgtgggtagcgtcgttgatattgctataactgaagtgaataactctgaagagagcaatagaatctccatcacctttttccgtcttttccgagtgatgcggttggtgaagcttctcagcaggggcgaaggcatccggactctgctgtggactttcattaagtccttccaggcactaccatatgtcgccctcctcatcgccatgctcttcttcatctatgcggtcatcggcatgcagatgtttgggaaagttgccatgagagataacaaccagatcaacaggaacaacaactttcagacgtttccccaggcggtgctgctgcttttcaggtgtgccacaggggaagcctggcaggagatcatgcttgcctgcctcccggggaagctgtgcgacccagactcagactacaaccccggagaggaatacacttgcggaagcaacttcgccatagtctat

SEQ ID NO: 1014 - DNA, 1711 bp, Mesocricetus auratus
agagaacctggtagaagtctctatgaagacaaattacagagcacagggccatatagggctgtgcttgggctccccctaacccttaagatggggatccctgtgctctgtgccctcttgctgatggctgcctcccaagccccgaccaggacccatgctggtgagtgcaggctcaggagggaaatgacctctgtgtgtttggcgggggctgcaccaggaaagctgtgtccctgcatcgcccagccagaccctcctgcctcttccccacccgcatcctgagctctgcgcccagctcccctcccggcctgagtaccagcctgaggtccggggaggaggtcaaggtctcaccatgctccacacccaggctcgcactcgctgcggtatttctacatcattgtttcctggcccgacctcgtggagccccggtacatggaagtcggctacgttgacgacacacagttcgtgcgcttcgacagcgacctggagaatccgagatatgagccgcgggcgccgtggatggagcaggaggggccagagtattgggagagggagacacggggagccaaagactgggaacagattttccgagttgacctgaggaccctactaggctactacaaccagagtgagggcagtgagtgaagatggaggttaagactttccatgtccctaggtaagggcctgagttatgccaggtcccaagtccaaggtccaggaggaggagaccagggaccaggaccagtttccctttcaggttagaggatacctgggtgggcggggcacgagcaggacaggagggcaaggctgacctggggtgagcagggctgaccttgggatccccgcagtctctcacatcattcagagtatggtcggctgtcacgtggggtcggacgggcgcctcctccgcgggtacagtcaggacgcctatgatggcgatgattacatcgccctgaacgaggacctgaggacgtggactgcggctgacacagccacacagatcaccaggcgcaagtgggacctggctggtgttgcagagcatgaaagggcctacctggaggacgagtgtgtgcagtggctccgcagatacctggagaacaggaaggagcagctgctgcgcacaggtgcaggggctgcgggcaaatcctacctctgacctcgggcttagttctgaggaagaagagacccctcacctgggggtaatgccccattttctacttatttttaatttttaaaatttagtacagaaaactcacactctaaaattgacaagaacaaaggctatatccctctcagtgaatatacatggttggtgaagccatcatgaattcgtggaagttccagttggattttacacattccttttgaaatataattcatgaacttatccagcaccaacacgcaaaaaaaaaaggatagaaagaaaatccaagacagatatataactggaaaacaattaaccttataacctgtttcaaaactcagacctgtactcagacctttctcattcccaatatttagcctttcttgttgtcttttcgtcgtcatgctatactgtacacatacgtaaacttatttacatatctgcatacattgctgactacatatgaggaaatacaatgtagattttctacctgagattgtatgacctcacttaatatgtacatgctaagttcatccagtttcctgtgtagttttgtagttacattgtttagag

SEQ ID NO: 1015 - DNA, 2534 bp, Mesocricetus auratus
cttcttcttgtcctactttgatcccatttataccaatttctgtctatttctgatagcttatataaaatcttctctgtatcaaatacaaaggtggagagtgtacacccttgtctccttcctgtatttacaggaagctctgggtgtctctcctttagacataatatccacctgtctccatgtttctcacatatgggatgtgggaagttctatagtgtctcctgaccctttatgagagactggctttcccaggctcgcccttctgtcaggcagttcagagtgtctcaggagggaaggagagaaggtccctgaaatgactaaggcagttcaccttcagtctgcagtgctgtgtagggccacaagccttgctcaggcccagttctctgcccacacctgaggtctctggggtctgaattcccaaagaaagcattatccagaacccagtgtctaagctacaggggcttttcacccctccctcaccccatttctgatccacacagggatggtcacagggaccctgctggagtccctacaaatcacctgacatttccaactcttctcctcagaccctccaaaggcacatgtgacccatcactccaaccctgaaggtaaaaccaccctgaggtgctgggccctgggcttctaccccgctgacatcaccctgacctggaagagggatgaggaggaactgacccaggacatggagatggtggagaccagacctgcaggagacggaaccttccagaagtgggcagctgtggaggtgcctattggagaggagcagagatacacatgccatgtggagcatgagggactgtctgagcccctcaccctgagatggagtaaggagggaggggtgcagagatggggtcagggaaacatggagccttctgcagagcctgagcagggtcagggctgagagatggggtcatgaccctcaccttcccttcctgtccttcccttcccagagcctcctcagtccactgtccccagcatggcagtcattgctgttctggttctccttggagctgtgaccatcattggagctgtggtggctgttgtgaggaagaggaggagaaacacaggtaggaaggggcagggtgtgagttctctctcagccccttttagcagtgtgctctgctcatggaaacacatccacaccctcattgttcctgtctctagccagggtctgctgtcagttctggaaacttcctagggtcagggtcttccctggtctctcacatcttttcttgtcacaggtggaaaaagagggaactatgctcaggctccaggtaactgtggggaaccggcttgtccctaaagcctgttgagtgaagctggttgggaaacccaacagcccataattcctcctccatccacatcctctcagtaaccgcaatggtccttgtcatttcttcttctgcagacagggacagtgcccagagctctgactcctctctggagacttgaaaaggtgacactctggggtcctgggttggggctgaggaacaaaggaaaagactggtgaagggaccagaccctcacccagcccccctgctttatcagccatgacaggctgcagaaaagtcatggaggcccctgactcagcacatgttggacttgctggtcctgcccaggtcactaggaggtcagataccaatcagaagttagctggtggactctggatgtgtttaaggctctgggcatgctttatggtaaaagtggtctaccagtgacttgcaaacacatgacaaccagttgaccaatcggcacaggacagattgcccagcacagaagtgcaccaatcctgagactgttgcttacccttagacactccccttatactgcctggcagtttctctgggtccttctcatgccaactgtcctgttggacatacgatggcccctagttaatggggttagctcattaaacaacaataactgactctttgcttttgcatcggaatgggtctcttggtgattttgggggttcagaatttaagcacaacactgtgtcccaggacttctcagaacttagacatttgaatgagtcacagtgggcgtttgagatgtctttatactgactgtccatcactctttgtctttagcttcagacagtggcctcacagggacacattctcactcaagaaagagcaatgttggaagctgtctgctttctcctgtgaagagcatccagcccggtcctgtccaccaggaccctacccctgcacggccccttctacctccacagtcaaccttcctggtccagcacaggcaggaggagacaactctatcctgtcacctgcatgcttccatgagctgcacaccttggcttccccactgaaaataaaaatctggatgtgaacttgatagttcatgtccttgacctctgaaagtgtgatggagaaaataaatggcagcatggagaatcttccagaacctgtgtctgctgtggtgactgtcagcggggacaggagtctgtgggagctgagtgagatggggctgtgacaggtagagctcagtccacgtggctttgg

SEQ ID NO: 1016 - DNA, 2090 bp, Cricetulus sp.
aagcagcggttccaggagcctgctcccatctccccaggcccgctaaactcggaatcgcttcttccaattctacgactgggcggactttgcgaaggaaagcggaggtcgtgatggagtttgaagaggactttagcggaagaaaagacaagaacttcttgaagatgggcagaaagagtaaaaaggagaagaaagagaagaaaccagtgggcttcacatttggcaaagctggagagatcctcaccaagcgactccgatacatggttttcaaatccatgctgagacaggatgtgagctggtttgataaccctaaaaacaccactggagcattgaccaccaggctcgccaacgatgctggtcaagttaaaggggctacaggagccagacttgctgtcattacccagaatatagcaaatcttgggacaggaatcatcatatccctaatctatggctggcagttgacacttctactcttagcaattgtccccatcattgcaatagcaggagtggttgagatgaaaatgttgtctggacaagcactaaaagataagaaggagctagaaggttctgggaagattgctactgaagcaatagagaacttccgcactgtcgtctctttgactcgggagcagaagtttgaaaatatgtatgcccagagcttgcagataccatacagaaatgctctgaagaaagcacacgtctttgggatcacattctccttcacccaggccatgatgtatttttcgtatgctgcttgtttccggtttggtgcttacttggtggcacgggaattaatgacatttgaaaatgttctattagtattctcagctattgtctttggtgccatggcagttgggcaggtcagttcatttgctcctgactatgccaaagccaaagtgtcggcatcgcatatcatcatgatcattgaaaaagtcccttccattgacagctacagcaccggaggcctgaagcctaatacattggaaggaaatgtgaaatttaatgaagtcgtgttcaactaccccacccggcctgacatcccagtgcttcaggggctgaacctggaggtgaagaagggccagacgctggccctggtgggcagcagtggctgcgggaagagcacagtggtccagctgctcgagcggttctacgaccccatggccggaacagtgtttctagatggcaaagaagtaaaccaactaaatgtccagtggctccgagcacacctaggcattgtgtcccaagagcccatcctgtttgactgcagcatcgctgagaacatcgcttatggagacaacagccgggtcgtgtcccaggatgagatcgagagggcggcgaaggaagccaacatccaccagttcattgagtcactgcctgacaaatacaacaccagagtaggagacaaagggactcagctgtcgggtgggcagaaacaacgcatcgccatagcacgcgccctcgtcagacagcctcacattttgctcctggatgaagcaacatcagccctggatacagagagtgaaaaggttgtccaggaagctctggacaaagccagagaaggccgcacctgcattgtgatcgctcaccgcctgtccaccatccagaacgcagacttgatcgtggtgattcagaatggcaaggtcaaggagcatggcacccaccagcagctgctggcacagaaaggcatctatttctccatggtcagtgtgcaggctggagcaaagcgctagtgaactgtgttaaatatttttttaatatttgtattaacacatagcatttaaccaaagttaaaaagaaagtacgtaccagaataaccagttatctatttcctgtcattatgagaagcatttagtccagtttagagttttcagagactttgtaattaaagggacagaaatagatatatcatcaaatggaaaggaatcatttaaattgcactataaaattatacaagaattaaaagtaaatgtttcataatatatacttttatttatactttctcatttgtaactataactgatttccttgctaaacaaatcatgtgtgtatcaaaaattaatgaaatgtttgtataaagtatatatagtgaaact

SEQ ID NO: 1017 - DNA, 946 bp, Mesocricetus auratus
  misc_feature (191)..(213): n is a, c, g, or t
cccatataattccgcgctctgcaccagcaccatgcctgtgacactgggttactgggacatccgtgggctggctcatgccatccgcctgctcttggagtacacagacacaagctatgaggaaaagaaatacaccatgggggacgctcccaactttgaccgaagccagtggctcaatgagaagttcaagctgnnnnnnnnnnnnnnnnnnnnnnnctacttaattgatggatcacacaagatcacccagagcaacgccatcctgcgctacatcgcccgcaagcacgacctgtgtggggagacagaggaggagaggattcagctggacattctggagaaccaggctatggacacccgcatgcagttggccatggtttgctacagccctgactttgagaaacgaaagccagaatacttggagggtcttcccgagaagatgaagctgtactcggagttcctgggcaagagatcatggtttgcaggggacaagatcacctatgtggatttcctcatctatgatgtccttgaccagcaccgtatatttgcgccaaagtgcctggatgcatttccaaacctgaaggacttcttggctcgctttgagggcctgaagaagatatctgactacatgaaaagcagccgctttagctgcaaacaaatctttgcaaagatggccgtttggaactcaaaataggacttcgaagcccagacctggctccccactcctctatttcttctcacaagcccttccttcagtcaagcctctggatcctactcctgttcctttgccctgccctgagtcctgccatccctcagtgctgtttggaggaagggccagactccagaatccagcgagcccgagagatcagatctgcctgtgtgctggctctggtccccagagtgagcaacggggccctgtttgatctccagtaaagtctgaatgacacggaat

SEQ ID NO: 1018 - DNA, 385 bp, Cricetulus griseus
cgttgtaacccacaggtcagtaatagcagcacatgccagacccaaagtcggggggctccctgtgacccttccccctgtgtttcaccctcaaagcgtggcttgaaagattggtcttgagagtggcactggatatgggctggcaggaaaattaaagtggtcctgccatcctgtcaagggcccacatgatttagttgtagcacttgaggggcaaatgtacttttctgaggaatacagaagatggaaaagaaatctaacaagaaaattaagctatttaaaaatgaagctgttactatgcatggaactttgtggactttgtttctcaagttaaaggtaggcagtcacatctctcagtgcacagtgtgacattctgtggtttccatcacta

SEQ ID NO: 1019 - DNA, 175 bp, Cricetulus griseus
ctgtaacctccttacgcgaagggctgtatatgggaaccttgtgggtcaaagtgatggggcactgggcacttgttgatgtaagaacctgggtttacaggcacatatctatcataagagatggcactgtctgatcgacccatgatagtcttttctagagatttagcagaccagcagg

SEQ ID NO: 1020 - DNA, 1242 bp, Cricetulus sp.
  misc_feature (1012)..(1041): n is a, c, g, or t
cagtggcccggaggaagctgtgcagtcctcacctaccgagacttaggcgagaagcggcgaagcggcgggtgggagccgagcgagcgcggggctggcgccgcgcactggggggggcaggagcagcccgcgcgccgcgtgagggactcgcacttgcaatatgactttggaggaattctcggccgcagagcagaagaccgaaaggatggacacggtgggagatgccctggaggaagtgctcagcaaggcgcggagtcagcgcaccatcaccgtcggcgtgtacgaggccgccaagttgctcaatgtcgaccccgacaacgtggtactgtgcctgctggctgcagacgaggacgacgacagggacgtggctctgcagatccattttaccctcatccaggcgttctgctgcgagaacgacatcaacatcctgcgggtcagcaacccgggccggctggctgagctgctgctgctggagagcgacgcgggcccggcggagagcgggggtgcctcgcagccccctgacctgcactgcgtgctggtgacgaacccacattcatcacagtggaaggatcctgccttaagtcaacttatttgcttttgtcgggaaagtcgctacatggatcagtgggttccagtgattaatctccccgaacggtgatggcatctcaatggaaataactgaaccaaattgcactgaagttttgaaatacctttgtagttactcaagcagttactccctacgctgatgcaaggattacagaaactgatgtcaaggggctgagtgagttcaactacatgggggctaggagatgactttgcagatggacagaggtgaaaataaagaaggaagctgtgttgaaacagaaatctaagtcaaaagggacaaaaactacaaagaactgtgcaagaaagaaaactgttgatttaggatggctgagttacattaaataagccaaatattgctttgttgaaaccttaaatgtgtagcaatagtttgttttttttttgtatttgnnnnnnnnnnnnnnnnnnnnnnnnnnnnnntgatctttatgccctcaagtaaaaggaaagtgaaaaggattaattgtattttaaagctacaggttaatgtattttgatgagatgttaaattctcagaaattttattataaatcggactaagttattttatgatatgaaaggttatttatgataaagtttttgaagcacaatatctaaaataaactggtatggaataattgc

SEQ ID NO: 1021 - DNA, 2257 bp, Cricetulus sp.
  misc_feature (1)..(37): n is a, c, g, or t
  misc_feature (791)..(838): n is a, c, g, or t
  misc_feature (1235)..(1269): n is a, c, g, or t
nnnnnnnnnnnnnnnnnnnnnnnnnnnnnnnnnnnnncagccccaggggccgccgcctccgctgcccagcacgctccggggacgccggccgccttagcacccgccgcgccgcagctccgggaccggtcccggccgcgacgccgccgcgatgggcaacgccgccgccgccaagaagggcagcgagcaggagagcgtgaaagagttcctagccaaggccaaggaagaattcctgaaaaaatgggagagcccttctcagaatacagcccagttggatcactttgatagaatcaagacacttggcactggctcctttgggcgagtgatgctcgtgaagcacaaggagactgggaaccactatgccatgaagatcttggacaaacagaaggtggtgaagctgaagcagattgagcacactctaaatgagaagcgcatcctgcaggctgtcaacttcccgttcctagtcaaacttgaattctccttcaaggacaactcaaacttgtacatggtcatggagtatgtgcctggtggggagatgttctcccacttgcggcggatcggaaggttcagcgagccccatgcccgtttctacgcggcgcagatcgtcctgacctttgagtatctgcactccctggacctcatctaccgggacctgaagcccgagaaccttctcatcgaccagcagggctatattcaggtgacagacttcggttttgccaagcgtgtgaaaggccggacttggaccttgtgtgggacccctgagtacttggcccccgagattatcctgagcaaannnnnnnnnnnnnnnnnnnnnnnnnnnnnnnnnnnnnnnnnnnnnnnngagatggctgctggttacccacccttcttcgctgaccagcctatccagatctacgagaaaatcgtctctgggaaggtgcggttcccatctcacttcagctctgacttgaaggacctgctacggaaccttctgcaggtggatctcaccaagcgctttgggaacctcaagaacggggtcaatgacatcaagaaccataagtggtttgccacgactgactggattgccatctatcagagaaaggtggaagctcccttcataccaaagtttaaaggccctggggacacgagtaactttgacgactatgaggaggaagagatccgggtctccatcaatgagaagtgtggcaaggagtttactgagttttaggggtgtgcttgtaccccatgggttttctttnnnnnnnnnnnnnnnnnnnnnnnnnnnnnnnnnnnggttgggggtgggagggttggatcgaacagccagagggccctagagttctgtgcatctaatttaacacccactccacccccaagttagggagagcaggaaagccagatattggggaaggggcaacatcagctgctcccccctcccccactgagacacccttctccccacttctctgcctgttttcaatgaatttctcagcttcagtcacacccagacttatggtgtatccaagggcagggtaaggaaagagaggcccaaattcaccccagcctccacccccactccagcactggacactaaggatgaacagaaatgccaaccaccccttccatgcagtcctacttggaaagggagattttagtgacaggtacagagggctgcttgctagtgggtttttggtttctttttttttttccttttcttttttaaatattcatttaaattaagttccaccagtgcctcccttcctccagactgtccctcccctaccaaaccccctctacaagcccccaatccactctgaggccgggatagccaactgactctgtcaaggaaggaaccgggctttgaacctcgccctgagctgctagcctcccggtccttttccaggggtctcatgccaattctttggcgcatcagcccccttaagaagcccctccccatcctgggcacctcacttctagcttagctgtcagctgtccatcacctcttgctctgctccccactcactgcacccccaagtctgattgtgcttttctctcaatagaaaggtggggagctgctggggaaattaccccatttatccctgtgtttatccctctcgtaacttctcccaaacaggaggagctctcaggcctgggtgggggccccgggtgggcgaggggggccattcaacctgtgtgctgcgaaggatgagacttcatcttgaacagtgtgctgttgtaaacatatttgaaaactattaccaataaagttttgttttaaaat

SEQ ID NO: 1022 - DNA, 1311 bp, Mesocricetus auratus
  misc_feature (499)..(540): n is a, c, g, or t
atgcagcgggccttattcaggcagtaccatggggctgagctaccagctcctcctgtgtctcctgctgtgtggaggcgccaagcagtgctgttcccagcctctgtggctcttgccaggcggaactccgaccccaggaaagctcacgtcatccgtggaggtggagtgtctggaagctgagctcgtggtgactgtcagtagagacctttttggcaccgggaagctcatacagcccgaggacctcacccttggctcagaaaactgtcggcccctggtttccgtggctacggatgtggtcaggttcaaggcccagttgcatgaatgcagcaacagggtgcaggtgacggaagatgccctggtgtacagcaccgtgctgctgcaccaaccccgccctgtgcccggcctgtccatcctgaggactaaccgtgcggacgtgcctattgagtgccgctaccccaggcagggcaatgtgagcagccacgctatccggcccacctgggtnnnnnnnnnnnnnnnnnnnnnnnnnnnnnnnnnnnnnnnnnnctctctccgcctgatggaggagaactggaacactgagaaattgtcacccacctcccacctgggagaggtagcctacctccaggcagaggtccagactggaagccatctgccactgctgctgtttgtggaccgctgtgtgcccacaccttcgccggaccagaccgcctctccctatcatgtcattgtggacttccatggttgccttgtggatggtctatctgagagcttttctgcatttcaagtgcctagaccccggccggagactcttcagttcacggtggatgtattccattttgccaatagctccagaaatacgatctatatcacctgtcatctcaaagtcaccccagccaaccagaccccagatgagctcaacaaagcctgctccttcaacaggtcttccaagagttggtcgccagtagagggcgatgctgaggtctgcggctgctgcagcagtggcgactgtggtagctcaagccgttcacggtaccaggcccatggagtgagccagtggcccaagtcggcatctagacgccgcaggcacgtgagagacgaagctgatgtcacggtaggacccctgatcttcctgggaaaggcaagcgaccaggctgtggagggctgggcctcttctgctcaaacctctttggctcttggtttaggcctagccgcagtggcattcctgaccctggctgctattgtcctcggtgtcaccaggagttgtcacaccccttcccatgttgtatccctttcacaataaaaagtccagttctg

SEQ ID NO: 1023 - DNA, 1054 bp, Mesocricetus auratus
aacgtcatctccaacatcatggctgactttgtccagacaagggctgccagcatcatctcagacagagacgtcgaggtggacatttccttgacaagatcacccgtcatcacggccacccaccttgagtcccatcacaagggccatttcgtctacaagaacatctctgaggacctccccctccctgccttctcacccacgctgctgggggacacccggatgctctacttctggttttctgagcaagtcctcgactccttagccaaggtcgccttccaggatggtcgccttcagctcagtctggcagaggcggagttcagggcggtgctggagacctggcacttcaaccctaaccaggaaatcattccagagctgttcagtgcctccctcaccagcccaggccgagtcactgtccactgcccggggaggcccacaatctcctgccaaaacaagggtgtcgtggtcagttctcccgtggtgatagaattcctcttcccacataaggatgggcaagattctgtgactcacacttttgaagaggatatcgttactaccatccaggcctcctattccaagaaaaagctcttcttaagccttagcgatttccagattaaaccaaagatggcctccaacatggatgaggactccgcgtccatccagagcttcctgcagttgatgatcaccacagtaggcatccccgaggtcatgtctcggctggaggtggctttgacaaccctcattaacagtaaaggcctggatcttttcgacatcatcaaccccgagatcatcagtcgtgacggcttcctgctgctacagatggacttcggcttcccagagcatctgctggtggacttcctgcagagccttaactaggagactttaacaatggaggctgatggggctgggatcaaaggcgtgcacccaactcacaatggaactggagcgtcggattgctggcatctcctgtgtggggctcagagtggggacaaggagatggggactggctccctccttcctggattattaaaggcctactcattaaatgctctgaccagta

SEQ ID NO: 1024 - DNA, 6404 bp, Cricetulus sp.
  misc_feature (4858)..(4877): n is a, c, g, or t
tgtagggagccggttccttcattatccattacaataatggtgcctgaagacaccaagatgtaaattacttcacaggcgctgggtaatctccattcctttgatctctgcctatcccgtggctcatttggcctgaggagctgaagccattcatagggtaacacttcccaggcggctggccagcctttataagggatggttttcttggttcagtgtctccgctctggtaagcttatgcattaaagcttgtctgcagaaggatccgagtgtcctgcgtgtatttcttgctggcgagaaaatacagcgcgcgggacatctggtgcggaaacccgggaacttgttaacatctccggcatcacggagacccctctaacagggcggattcagaactgcagggtggtaagttcggagaggtatgcttcattctgacaccttcttttttgactttgcttttaatttgccaccactatgggatggaaaagccttaattctagtctttattctaattttgttcacattggtcttatattatgcccaccgtggctggtgttccagttcgagaccaagcttaccccaggtagcctccagcattatgggctcttcaaaacagagagacctaattaaaaactgtctagagattgaggcttgctgtcccatggtagcagagagtcaaaaaatgcttaaagaggtacaggataatatatcagaaaccgaacgagatgagagaataggggctcaaaaaaggaaggacatgtccaaggaaaaaggccctccccaggatataaaaaaagggggagagaaaatagggaataaccggtcacaccccggtaaatttaagagaaataaagactcaaaacctagcctctgccctacaacgaaactagaggccttggagctaagcagctcagactctgagattttagactctagcaaggaagcagagctagaggaggagctgccaaaaataaaagcaaatatgaggccaccgcctgttaatccagcgggtgtgcttccatcagcacccccattatttggtattgactcttttttaccattagaggagcgaaggaaattgcagatggctttcccagtctttgaaaatgagggggcaagagtacatgctcccgtagactataatcagattaaagaattggctgaatcagtccggaagtatggggtcaatgccaattttacaacaatacaagtagaaagactagcaaactatgctatgacacccactgattgggagacaacagtaaaagcagtgctccccaatatgggacaatatatggagtggaaggctcttttttatgatgcagcccaggcacaggcaaaggccaatgtcacagcagaaaatgaaaatcagagacaatggacctttgaaatgctgacaggacaggggccacatgccctcaatcaaactaattacatttggggcgtatatgcccagatatcagctgccgccattaaagcatggaaagcattgacaaaaagggatgaatcaggtggacatcttacaaagatagtccaggggccccaggagccattctcagactttgtggccagaatgacagaggccgctagccggatattcggtgatgcagaacaagccatgcctctgattgaacaattagtctttgaacaagcaactcaagaatgccgagcagccatagctccccggaaaagtaaaggtttacaggactggttaaagatctgcagagaactcggagggccacttactaatgcaggcttggccgcagccatcttacaaacccaaaggcgccgaaatacgtctgcctgctttaactgtggaaaaacacggcaccttaaaaaggactgtagagtccctgaaaggattagagaagtggagttgtgcaggcgctgtggaaaaggttatcatagggccagcgaatgcaaatctgtgcgggacataaaaggtaggcttttaccccctagggaggaacctaaagcatcccaaccaaaaaacgggcctcggggcccatggtcccagggccctcagaaatatgggaaccagttctggaaaagcaactcagagaaggaagggactcccgaggacactccggagtggacctgtgtgccgcctccgacttcttattaatgccccaaatgaatgttcagccggtcccaatccagtctccggggcctttaccccccgctaccattgggcttattttgggccgaggttccttgaccttacaaggactcattgtgtatcctggaatcgtagatccatatcataaggaagaattccaggtcctctgctccagccctcgggggtgttctccataaagcagggagataagatcgcacaattagtgctattgccctcccctggggatagagagaattgcacctcccgaaaaagagccttgggctctaccggtaatgattcagcatatctggccatacccctagatgagagaccaactatgaaattattggttaatggaaaagaatttgaggggattacagatacaggggctgacaaaagcatcatttcattgcattggtggccgaaatcctggcctactgtgacttcatcacattctcttcaaggccttggatatcaatcctctccagctgttagtgctgccgccttggtctggcggagcaccgagggcaggcagggacgctttaccccttatgtcttgcccctcccagtaaatctgtgggggcgagatgtgttacaagccatgggcatgaccctgaccaatgagtattcccctcaggcatcagctataatgacaaaaatgggctatgtaccaggaaggggcctgggcagaagggagcaaggtagaatagagcccattgaacaaaaagggaatcaaagtagaaaaggactgggttttatttaggggccattgaggcttcacgacccataccatggaatacagaggacccggtatgggtctctcaatggccattatcctctgaaaagctggaagtagtcacaagacttatacaggagcaagaacagttggggcatttagaaagttctacttctccctggaacagcccaattttcattataaaaaagaaatctggaaaatggaggttgctccatgacctgcgggctattaataaccaaatgcgccctctgggtcctgtccagagaggtctccctttgctttctgcgctaccccaaaattggaagcttattattatagatattaaggactgttttttctccatccccctctttcctcgggaccggcaaaggtttgcctttactgttccctcactcaatcacatggagccagacaagaggtaccaatggagggtgctgccacagggcatggccaatagtccaactatatgccaattgtatgtccaaaaggcattggaacctgttaggaagcagtttacatccatgattatgattcactatatggatgatattcttatctgccataggaagatagaggtcctgcaacaagccttccccatgctggtagctgagttaaaacaatggggactggagatagcatcagaaaaggtccaggtctcagataccggtctcttcctgggctcagtaattaccccaacaaaaataatcccacaaaaaatagaaatacgcaaggatcatctgagaaccttaaatgacttccagaaactcttgggggatataaattggctgagaccctttttaaagatcccctctgcagatttaaaacccctttttgacatcctggaaggtgagcctcatatttcttcccccagaagctttactccggctgcttgtcaagccctacaaaaagtggaaaaggccttgcaggatgcacaattgcatcgcatagatgagacattgccattcagcctatgtgtctttaaaacggctaagttaccgaccgccatcttatggcagcatgggccgttgctttggattcacccaaatgcttcccccgctaagatcattgattggtatccggatgctgtcgtgcagctcgcacttcggggaataaaagcagctgtcgctcattttggcagggaccctcatctcttggttgtaccttacaccactgcgcaaattcaaactctaacagctacttctaatgactgggcggtgttagttacctccttttcagggaaaattgataatcatttcccaaaacatccaatcctacaatttacacaaaatcaggctatagtgtttccacagatgacagcaaagcatccaatcccgaatgggacggtggtttatactgatggttccaaaaccggtgtaggggcttatgttataggaaataaggtagtttctaaacaattcaatgaaacctcaccccagatcgttgaatgccaagtggtgctggaagtccttgaggcctttccggggccacttaatattgtatcagattcctcttatgtggttaatgcagtcaacctccttgaaactgctggtataatacgaccctccagcagagttgcaggtatctttcaaaaaatacaaattaccctatcaaacaggaggttccctgtttttgtcacccatgttcgagcacattcggggctcccaggacctatgtcctctgggaatgatttggcagaccgggccacaaagctgatggctgccgccttgtccacccagatacaagctgcacaagaatttcatcagcgctttcatgtgacggctgaaaccttacgccgtcaatttgctttgacaaagcaggaggctagacaaatcgttactcaatgtaaaaactgctgtgaatttttacctgcacctcatgtaggaataaatccgcacggcattaggccgctgcagatgtggcaaatggatgttacacatgttgcctcctttggaaagctccaatatgttcatgtctcagtggacacctgctcnnnnnnnnnnnnnnnnnnnnctttgacaggggaaaaggccgcgcatgtgattcaacactgtttagaggcttggggtgcctggggtaaacctcatatcctaaaaacagataatgggccggcttatacctctcaaaagttccagcacttctgcagacagatggaaattacccatctaactggcctaccttataaccctcaaggacaaggcattgtggaatgtgcccatcgcatcgcacacttaagtcttatttaatcaaacaaaaggagggaatgggagcatccttaccctcggtgccaagagttgcaatatccatggcactctttacccttaattttctaaacaccgacgctcagggccatacagcggccaagcgtcatacctcagaacctgaaaggtctaaggagatggtaaaatggaaagatgtcttaactggtctttggagaggcccggatcctattctcataagatccaggggggcgatatgtgtttttccacaggattgaagaaaatcctctgtggatcccagaaagactcacccgaagagcctcttcggaccttcaaaagtcggaactccaccctctccccgggagttgagagccgctattgttatccagattaactcctgtccttggcagagagattgtatcactgcttaaggggtgggggtgggattgtttgatgcagccgtttgcggattgctgttacctctggctgatgtatgagaaagaggtgggggtggaattgtttgatgcagccgtttgcggattgatgttacttttggctggcatgtaagctccagggctcaaaccaagagatcgcccaagcgcttatattttggctaactatgcttaagcaatagccgccggccagacagctcttgcacacccggagcctaggctcattgcacagggtagagtgtctggtttgagcagccccaatgagggatgctgagcaaaggcatcgcacagagttgcctaatatacaggcttccctgggaggtacgttgacctgcataagggttacctgccccgagactccctttcccagaaaaacggcagaggacaggtcgagagtacttcgggccaagctaacagcctgatggcgactctcgtacacagtcttaatgtttgatttgggaaggttcaacctctgcctctatccctcaacatatgggtgacctatttgcttgtaaaaatataaagccttatcattaattaataaaaaaagggggatatgtagggagccggttcctgcattatccattacaataatggtgcctgaagacaccaagatgtaaattacttcacaggcgctgggtaatctccattcctttgatctctgcctatcccgtggctcatttggcctgaggagctgaagccattcatagggtaacacgtcccaggcggctggccagcctttacaagggatggttttcttggttcagtgtctctgctctggtaagcttatgcattaaagcttgtctgcagaaggatctgagtgtcctgcgtgtatttcttgctggcgagaaaatacaacccgcgggaca

SEQ ID NO: 1025 - DNA, 1963 bp, Mesocricetus auratus
  misc_feature (169)..(212): n is a, c, g, or t
  misc_feature (1724)..(1788): n is a, c, g, or t
gggaatgtgaacttctctgtgaccgcagaagcacgacagtccccagagccttgtggttctgaggtggccatagttcctgaaactgggaaaaaggacacagttgtcaaagtcctgatagttgagcccgaaggagtaaagaaagaacataccttcagttcactgttctgtnnnnnnnnnnnnnnnnnnnnnnnnnnnnnnnnnnnnnnnnnnnnaacggcggtggtggacgactcagccagagcccatttctctgtgttgggtgacatcttgagttcggccataaaaaacacacaaaaccttctccatatgccctttggctgtggggagcagaacatggtgctttttgcccccaacatctacgtactgaaatatttgaatgagacacagcagctgactcagaacatcaagtcaaaggccattggctatctcaataagggctatcagaaggagctgaactacaaacacaaggacggctcctacagtgccttcggggatcaaggtggccggaaacaaggaaacacttggctcacagcctttgtgctcaagtcttttgcccaagctcgagccttcatcttcatcgatgaaacacacatcgcccatgccttcacctggctctcccagcagcagcaggacaacggctgttttaggagctctggatatctgttcaacaatgccatgaagggtggagtagacgatgaagtgaccctctctgcctatgtaaccatcgcccttctggagagttcactcgaagacacacatccggttgtctccaaagccctggcctgcctagagtcatcctggaagacgatacagcaagagggaaatgggaactttgtgtacaccaaagcgctgctagcctatgcccttgctctggcagggaaccaggacaagagaaaggaaatcctgaaatctcttgataatgaggctatagaggaaaaaaactccgttcattgggaaagacctgagaaaccgacgaaaccagagaggtgtctgtacgaaccacaggctccctctgctgaggtggagatgaatgcctatgtcctcctcactctcctcactgcccagccagccccgagccctgaagacctgggtttggcagtgcgcatcgtgaagtggctcacgaagcagcagaattcccatggtggcttctcctccacacaggacactgtggtagctctccatgctttgtccaagtatggggcagttactttcgccagaagtcagaaaactccttcagtgaccatccaatcttcggggacattttccagaaagttccaaatagagaacagtaatcgactgttactgcagcaggtctccctaccagacatccctggggactataacatcagtatgtcaggagaaggatgtgtgtatgctcagacaacactgaagtacaatgttcacttggagaaagaggagtctgcattcactctacgggtgcagacagtacctctgacttgtgataaccccgaaggccacaacagtttccagatctcactagaaatcagttacatagggagccgtccagcctccaacatggtgattgttgatgtgaagatggtatctggcttcattccattgaaaccaacagtgaaaaagcttgaacgatcagagcatgtgagcagaacagaagtgagcaataacaaggtcttgttatatgtggatcaggtgaccaatcagacactggccttctcctttgtcgttcaacaagacatcccagtaannnnnnnnnnnnnnnnnnnnnnnnnnnnnnnnnnnnnnnnnnnnnnnnnnnnnnnnnnnnnnnnngaatacagcgccccctgcagttcagagaaacaaaacttttgaaactccaatctgtggacaagccattgctggaatccccaaaccccttcaagatggtgatttttgcctgtgtctgcaatactaattctgaacaagcatgatgaataaacgcacacttctagacagtcaggaattc

SEQ ID NO: 1026 - DNA, 1434 bp, Mesocricetus auratus
  misc_feature (1159)..(1185): n is a, c, g, or t
cgggaacccactgcaaatggcctggtcaaccagaacaatgatgtcacttgctctgtacacctgtttcctctggctcctcaccagtggcctcaagactgtccaatccttgcatgattctcaccgaggcctagctcctactaatgttgactttgccttcaatatgtatcgtcacctatcgaccttggatcctcacaagaatatcttaatttcccctgtgagcgtctccatggccttggccatgatgtcccttgtcgccgtaggctccaaaaagaaccagtttttccaggatgtgggcttcaacctcacagagatcagtaaagaagagatctatcagagcttcgagaagctcagtcaccttctcagcaaggcagacagcagcttggagatgcgcatgggcaataccatgttccttgaccagagcctgaatatgagggactcattcttaacagacatcgaacactatcatgaatcagaggccttgactaccgatttcaaggacggggctgatgcccgtgagcatatcaacaggcatgtggagactaagacacagggagaaattacacatgtgttctcagaccaggatagtccagctcccctcaccctggtcaactacaatgtcctcaaaggcatgtgggagctccccataagcccagagaataccagggatgaggacttccatgtaagcgagaatagcacggtcagggtgcccatgatgttccagtcaggtgtcatcggttatcttcatgactcagagatcccctgccagttggtacagatgcagtatttgaaaaatgggactaccttcttcatccttccagacgagggccagatggacgctgtcaccgctgcacttcatagggacacagttgaaaggtgggacaagctgctgaccaaaaggctggtgaacctgtacatccccagagtctacatgtctggtacctacaacctcgaagatgtgctggagggcatgggcattacaggcttattcaccaaccaaacagatttcttagacatctcccaggatcctccacagaaagcatcaaagatagtccacaaggtcatgctgcaactggatgagaaagatgaaccgcctgttaccaccacagaggctcccccacagacaacatctgaaccgctcaccctcaccttcaacaaaccnnnnnnnnnnnnnnnnnnnnnnnnnnncacttggagcagcctgttgttgggcaaaatcatgaatccagcttagtgcatgctggagaagctatggtaccgcctgactttggggggtagaagcctttccccagtcttctccaggttcttccgaacccaactaggtatccctacttttagatatcctgtaatgtataaccattgttgctactcccaagacaggtcaactgataaagtagcactgagatagagggaactgttattaaagggtgtttttgc

SEQ ID NO: 1027 - DNA, 6108 bp, Cricetulus longicaudatus
  misc_feature (1216)..(1264): n is a, c, g, or t
  misc_feature (4738)..(4760): n is a, c, g, or t
cccctgtgctccccggcccgcaacctgctggcatggacgtacacacccgctggaaagatcggctcccggtcggccccgctgctgtcccgccgctgctcctgctcctgctgctgctgtgggcgccgcctcagagccgcgcagctcagccaacagatcttctggagatgctagattttcacaatttgccctcaggggtaacgaaaaccacaggtttctgtgccactcgacggtcttccagagggccggatgttgcctaccgagtctctaaagatgcacaactcagcatgcccaggaagcagctgtaccctgactctgattttgctgaggacttctccatcctgactaccgtgaaagccaagaaaggcagccaggccttcctggtctctgtttacaatgagcagggcatccagcaggtggggatggagctgggccgctccccagtcttcctctatgaggaccacacagggaagcccgggcctgaggagtatccactcttccctggcatcaacttgtctgatggcaagtggcaccggattgctatcagtgtctacaggaaaaatgtcaccctgattcttgactgtaaaaagaaggttgtgaagttcctcaaccgcagtgaccaccccataatagatgtcaatggcatcatcatgtttggctctcggattctggatgacgaaatatttgagggtgacatccaacagttgctctttgtctccgaccaccgggctgcctatgattactgtgagcactacagtcccgactgcgatactgcggttcctgacacccctcagtcacaggaccctaacccagatgaatattatccagaaggagatggtgagacctattactacgagtacccatattatgaagaccctgaagacctggggaaggagcctgcccctacgcagaagccagtggaagctgccagagaaaccacggaggttcccgaggaacagacccagcccccaccagaagcccctacagtgcctgagaccagtgaccctgccggcaaggaggatgatccagggtttggggactatgactatgtgcccactgacgactactacactcctgccccctatgaagaccttggctatggcgagggtgtggagaaccctgaccagcccaccaaccctgactcaggggccgaggttcccaccagcaccatcataacctccaacacctccaatccagctccatctccaggggaagacannnnnnnnnnnnnnnnnnnnnnnnnnnnnnnnnnnnnnnnnnnnnnnnnggaaaactactatgacccctacttcgaccccgactctgactccaacgtctccccatcggagatagggccaggcatgccagctaaccaggacaccatctatgaggggattggaggacctcgaggtgagaaaggacaaaagggagagccagccatcattgagccgggcatgctgatagaggggcccccaggccctgaaggccctgcgggtcttccaggaccgccaggaactacaggtcctactggccaagtgggtgaccctggagaaaggggtccccctggtcgcccaggtcttcctggggctgatggcttgcctggtcccccaggaaccatgctcatgctgccgttccggtttggaggaggcggcgatgctggttctaagggccccatggtctctgcccaggagtctcaggcccaggctatcctccagcaagccaggttggcactgaggggaccagctggtccaatgggtcttaccggaagacctggccccatgggtcctcctgggagtggaggcttgaaaggtgagccaggagacatgggaccccagggtccacgaggtgttcaaggtccacctggcccaacagggaagcctggaagacggggccgtgctgggagtgatggagcaagaggcatgcctggacaaacaggccccaagggtgaccgtggctttgatggcctagctggattgccaggcgagaagggccacaggggtgaccctggtccttctggcccacccggacttccaggagatgatggagaaaggggtgacgatggagaagttgggcctagggggctgcccggggagcctgggccacgtggtcttcttgggccaaaagggcctcctggccctccaggacctccaggtgtaactggaatggacggccagcctggcccgaaaggaaatgtgggtccccagggagagcctgggccccccggacagcagggtaatcccggtgctcagggtcttccaggtccccagggtgccattggtcctccaggagaaaagggtcctttggggaaaccaggtctcccaggaatgcccggtgctgatggacccccggggcaccctggcaaagaaggtcctccaggagagaaaggaggccagggtcctcctggcccccagggtcccattggctacccaggtccacgaggagtcaagggggcagatggcatccgaggtctgaagggcaccaagggcgagaagggtgaagacggcttccctgggtttaaaggcgacatgggaataaagggtgaccggggggagatcggcccacctggtccccgaggagaagatggtcctgaaggtccaaagggtcgtggtggtcccaatggtgaccctggtcctctgggacccactggggagaaggggaagctcggagtgccaggattaccagggtaccctggaagacaagggccaaagggctctattggattccctggcttcccaggtgccaacggagagaagggcggcagggggacacctggaaagccaggaccgaggggacagagaggcccaacgggtccgaggggtgagagaggcccacggggcatcacagggaagcctggtcctaagggcaactctggaggtgatggcccagctggccctcctggtgagcggggacccaatggaccccaaggacccacaggcttccctggacccaagggtcccccgggcccaccaggcaaggatggactccctggacatcctggacagagaggcgagaccggcttccaaggcaagactggccctccaggacccccgggagtggttggccctcagggtcccacaggagaaaccggcccaatgggagagcgtggccaccctggccctccaggcccccctggtgaacagggccttccaggagttgctggaaaagaagggactaagggggacccaggccctgcaggcctccctggaaaggatggccctccaggattgcgtggattccctggggaccgaggacttcccggccctgtgggagctcttgggctaaaaggcagcgaaggccccccgggccctccaggtcctgcgggttctccaggagagagaggaccagctggggctgctgggcccatcggaattccagggagacctgggcctcagggacctccagggccagctggagagaaaggggttcctggcgagaaaggtccacaaggcccagctggccgagatggcctccaaggtcctgtggggcttcctggtccagccggccccgttggtcctcctggagaagatggagataagggagagatcggggagccagggcagaaaggaagcaagggggacaaaggcgagcagggtcctcctggacctacgggtcctcaaggccccattggacagccaggtccctcgggagcagatggtgagccaggtcctcgtggacagcaaggcctgttcgggcagaaaggagacgaaggctcaagaggtttcccaggaccaccggggccagtgggattacagggtttgccaggacctccaggagagaagggtgagacaggagatgtgggccagatgggacctccgggtcccccaggcccccgaggaccctctggagctccaggtgctgatgggccacagggtcctcccggaggaattggcaaccctggtgcagtgggagaaaagggggagcctggtgaagctggagagcctggtcttccaggagaaggaggtcccctgggacctaaaggagaaagaggggagaagggagaggtaggcccctctggtgctgctggaccccccggacccaaaggccctcctggagatgatggacccaaaggcagccctggccctgtgggctttcccggagaccctggtccccctggagagccaggccctgcaggtcaagatggtccacctggagacaaaggggatgatggtgaacctggacagacgggatccccaggccctactggtgaacctggtccatctggacctccaggaaagaggggtcccccaggccctgcaggtcctgaaggcaggcaaggggagaaaggagccaagggagaagccggcttagaaggccctcctgggaagactggtcctatcggcccccaaggggcccctgggaagcctggccccgatggtcttcgtgggatccctggccctgtgggtgagcaaggcctcccaggatccccaggccctgatggtccacctggccccatgggtcctccaggactccctggactcaaaggagactctggtcccaaaggtgaaaagggccatccaggcctgattggactcattggacctccaggtgaacagggtgaaaaaggtgaccgaggactcccaggcccccagggctcatctggtcccaaaggagaacagggtatcactggtccttctggcccacttgggcctcctgggccccctggcttgccgggccctccaggtcccaaaggtgctaaaggctcttcgggtcccactggcccgaagggcgaggcaggccacccaggactccctggcccacctgnnnnnnnnnnnnnnnnnnnnnnncccctgccaatccaggcatccaggactcggcggaacatcgatgccagccagctcctagacgatggggctggggagagttacttggactatgcagatgggatggaggagatctttggctccctcaactccctgaagctggagattgagcagatgaaacggccactgggcacacagcagaaccccgcccgaacctgcaaggacctacagctctgccatcctgatttcccagacggtgaatactgggtcgatcccaaccaaggatgctccagggactccttcaaagtctactgcaatttcacagccggagggtccacatgtgtcttccctgacaagaagtctgagggggccaggatcacttcttggcccaaagaaaacccaggttcctggttcagtgaattcaagcgtgggaaactgctctcatatgtggatgctgaaggcaaccctgtgggcgtggtacaaatgaccttcctgcggctgctgagtgcctctgcccaccagaacatcacctacaactgctaccagtcagtggcctggcaggatgctgccacaggcagctacgacaaggctatccgcttcttgggctccaacgacgaggaaatgtcttacgataacaacccttacatccgcgccctggtggatggctgtgctaccaagaaaggctaccagaaaacagtgctggagatcgacacgcccaaagtggagcaagtccccattgtggatatcatgttcaacgactttggtgaagcctcacagaaatttggatttgaagtggggccggcttgcttcctaggttaggagctgctgagcccacggtcttcagagcaacctcgtgacctcagcaccccacctgtgggtgtcctgtgcacggcccatcctggacagtgaacatttctcacccctgcctgcctgactcatctgtgcctcggaccctccgtggcattggaccccacaccaatgagaacaaagggaaagagccgtgttcccacggagccgaatcacatgacctagccacaccacagcctcttgccacactgcaggcctggtccccagctctcctaataggttcatcaaaggtgttcgtgaactgttggccgggagtcagggtggggcagtatttggaaatcactttaaaaaaaccaacttgaaaatatgtattccccttgaccttcaaaagatgttctaaggtggtcttgtaaaggtcgccaaagccttctctttttttgtttttaaacaaccctcaatacatccactcagaggccaaatgtcattccacgtgtgcctttccgatggattaaaggtgcttatgtttttgtgagagttttaagtaaatatttgtattgtattgtta

SEQ ID NO: 1028 - DNA, 1623 bp, Cricetulus griseus
cagctgggttgtcacctgttacctgtttcaggaaggtggaggcagaaggatcagggggctcacggtcatacttgacaagctcaggtaggggcggaggactgaggctcgggctcagagaattttcagttaaaatgaggaccacacagacaagtgaagcagggaatagacacagagaagtggcgctccgagacgggcgggcgggagggcgagcgggcgggcgggcggggtagaggcgcaccctcctcctcgctctgggcggagcaagcaaagagcaagcaccacagagcagggcagagtccagtgaggaggctcacagcctcctggaactccagcttcagagactctcacccctctgtgggctccctaagcaccaggcatgcctgtggtgcccagacatgcatgcaggcaaaacacccatacacataaaacaacaacaacaaaaattttaaaaaataaaatcaatctttaaacagtaaccacaaaaaggacttacagaaggaactggaagactggatttagcacctgcctacccactaaaaaccttaggaaggaccagcaggatggctcagtgagcaaagggacttgctactatagctgtggttctcacccgatgggtcgcaaccccttcaggggtcacatacaaagggtatttacattgtaattcacaaaagtgtgaaattacagttatgaagtagcaacgaaatacttatatgtctggtgtcaccataactcaaggaactgtattaaagggcgctgcttcaggaaggttgagaacactgtactacagtgtgggccactggcccatggcaagcaaataacgaaaggtcaaagcaaaacttgtgaaacacacccagcctggcgaatgttcatggggcaccgccaagggccgaagggtggaaaacaagccagtgttcacagagggaggaccaaactgtggcgcatggtggaatattgctggaccatgaaaaaggaatgcaaacctgttccctgctgaaacgtggatagatctcaaagacatcacctaacgtacagctctgttgtgttggtatctctgtggagacagaaatcggtggggagcgtgggggctggaggagccagggtgtcgagccactgcttacggtataggggtttgctctacagatgactaaaatgtctgggaactaaagctaagtcatatttgtagttcttgcactggagaggctgaggcggaagaatttcagagagttcaagttcaagtgaataccaggatattcaagcacataaaataataataataaataatcaaggaagaattggggctaatgttttgcaagtttttgttctcttccatcttatcgaagtaggaaaatcctagctataaggtaaggtctgctaatcagccaatgggagcagctactgtcaatcacaaaaccccacctacctctccaggaaggtgattagtcctctgagagtcaaggcatgccttgagtctcaaggagcaagaagtgtaccaagccctaagttagggcaccttgccaggaagcctggtctgtcatatccccaatgtctccctgtccagccagaggacaagtagtcctaacatggccactcagctctgcaaaccagagctcccagaaggaattc

SEQ ID NO: 1029 - DNA, 779 bp, Cricetulus griseus
  misc_feature (122)..(134): n is a, c, g, or t
  misc_feature (136)..(149): n is a, c, g, or t
  misc_feature (167)..(188): n is a, c, g, or t
ggatccgacacccacaccggtggcagaaatgaagacatgcatgtggcatattagccaaaacaaacaaacacctgaatcttaaaatatctcaggcaggccaggccgtggtggcgtacaccacnnnnnnnnnnnnngnnnnnnnnnnnnnncgaaaatctctgagtttnnnnnnnnnnnnnnnnnnnnnnaaagttcttgaacaaccagagctacatagagaaacccatcccaaacaaacaaaaatcaaaacaaatacctcaggcaaaaccatgcaagctggcagcactagggaaaccgaggcagatatggagaactcaagactagtcttaggtatataacaagttcaaggacagcctggaacacgtaacgagttaggaagaccatgctctcctactaaattcaaatcgttttccccccaactccagttcaacccagtaagttcccattggaaccggggcaccagggacttacatggggttgtcatctggctcccagccttccagctccttaaagcagaaaaaacactgggccaagtcaggctcgttctcggtagggcagtggatgaagccggcttccgccatctgaaaatgacagcacagctcgtgagcagaaccaaccgtctggttttgattctgtcactctctggggtcgttccgggccggcctctctggggacggagggaagaggtcgccctgtctggccctgtctaccgggccggggcctgacgcctgacaacagccgtagcgaaggctgggggattagtggggtgccctggtcga

SEQ ID NO: 1030 - DNA, 1629 bp, Mesocricetus auratus
  misc_feature (294)..(321): n is a, c, g, or t
cgggcagtcaggcttgatctcaagcaagctgagtatttccttggtggaagatccaggtaaccaagctctccagcctgaacagagagagcagctgggactcccaggactcagaggcaaagccgagagcaagggcactgctcctattcacagaagccatgacgaggacaaccacctgcgtatatcacttccttgtttggaactggtacatcttcctcaattattacatcccacttattggaaaggatgatgagaagttaaaggaattccacgatggcggacgttcaaagtacttgnnnnnnnnnnnnnnnnnnnnnnnnnnnnttttctttggggtcgcctgcctagatgacgtgctgaaaagaatcataggaaggaaagacatcaagttcatcacatcaaccagagatctacttttttccacattggtttttccaatatccacatttatattcctggtattctggaccctcttttactatgatcgaagtctcatttaccccaagggcctggatgactactttccagcatggcttaatcatgcaatgcatacctacatactgctctttgtactggtggaaaccattctcagaccacaccactatccatcgaagaagctaggacttgccttgctgggtgcttgcaatcttgcctacattaccagggtcctgtggcgctactctcagaccggaaactgggtgtaccctgtgtttgcctccctcaacccactgggtattatcatcttcttcttggtctgttatatcctgaatgccagcatctacctggttggagagaagattaatcactggaaatggggtgccacagtgaagccgttgatgaagaagaagaagtgactacacactgttttccaagagtcatagaagaagaaacataaaaactggtcatctgtctattctcattaatattactccttttgggatcagtggtggaatagcatggggagatataaaggacagagaacggtacctaagtttaataaagggtatgaagggggcttcacttgagatcttttggttttctgaaaggctgatagacaattcctgatgtctcagaatctactgattttgtctgtccttcatggaagattgtttctggctaaaaaggctaaagaagcctgtgtagacttgctggtggactgtttagaggaggggtgtggggaaaggaacttagattcatccaatcacttcaccttcaagggggatagtgaggacccagataatgagttgttgcattcatcaaaatcattgtcacactggagtagcagggcacacggcgcagctgaactcaaggctgccctggcctgctgagtaagaccctgtggtggtttgaaagaaaatgacccccaaaggaagtgcactaatagaaggtgtgatcttgttggagtatatgtggtcttgttaagggaagtttgtcactgtggaggcaggctttgaagtctcatacatgctcaaggcatgcccagtgaggtagaccacttcctgttgcctgcctatcaagatataagactcaactccagcaccatgtctgcctccatgccaccgtgtcacacaatgataataatggaccaaacctctgaaatgtaagccaccccaattaaattttttttccttt

SEQ ID NO: 1031 - DNA, 186 bp, Cricetulus longicaudatus
  misc_feature (10)..(38): n is a, c, g, or t
gcagaaggcnnnnnnnnnnnnnnnnnnnnnnnnnnnnngctgacccggcacatcagaatccacacgggccacaagccctttcagtgtcggatctgcatgcgaaacttcagcagaagtgaccacctcaccactcacatccgcacccacaccggggagaagcccttcgcttgtgactattgtggccgc

SEQ ID NO: 1032 - DNA, 413 bp, Cricetulus longicaudatus
atggcacggtcagtgctggtaccgccaggacctgacagcttccgcttctttaccagggaatcccttgctgctattgaacaacgcattgcagaagagaaagccaagagacccaaacaggaacgcaaggacgaagacgatgaaaatggcccaaagccaaatagtgacttggaagcaggaaaatcccttccttttatttatggagacattcctccagagatggtgtcagagcccctggaggacctggacccctactatatcaataagaaaacctttatagtattgaataaagggaaagcaatctctcgattcagcgtcacctctgccctgtacatcctaactcccttcaaccccattagaaaattagctattaagattttggtacattctttattcaatgtgcttatcatgtgcac

SEQ ID NO: 1033 - DNA, 601 bp, Cricetulus longicaudatus
  misc_feature (325)..(374): n is a, c, g, or t
tccaatgattgtgagctcccacgctggcacatgcatgacttcttccactccttcctgatcgtgttccgtgtactgtgtggagagtggatagagaccatgtgggactgcatggaggtcgccggccagaccatgtgtctcactgtcttcatgatggtcatggtgattggcaacctagttgttctgaacctcttcttggccttgctcctcagctctttcagctctgacaaccttgcagccacagacgatgataacgaaatgaacaaccttcagatagctgtgggaaggatgcaaaggggaattgactttgttaaaaggaagatacgtnnnnnnnnnnnnnnnnnnnnnnnnnnnnnnnnnnnnnnnnnnnnnnnnnncaaaccccttgaagatctgaataacaagaaagatagttgtatctccaaccacacgaccatagaaataggcaaagacctcaattacctcaaagatggaaatgggacaaccagtggcataggaagcagtgtggagaagtatgtggtagatgagagtgactacatgtcattcataaacaaccccagtctcactgtgaccgtgcccattgcccttggagagtctgactttg

SEQ ID NO: 1034 - DNA, 598 bp, Cricetulus griseus
  misc_feature (395)..(448): n is a, c, g, or t
ctacatggccgtgatacacgtggtatcttccgagtccatcagtttgagaagattgaacagttcgtgtacacatcacctcatgacaataagtcatgggagatgtttgaagagatgatcggcaccgcagaagaattctaccagtctttggggatcccttaccatatcgtgaatattgtctcaggctctttgaatcatgctgccagtaagaagctcgacctggaggcctggttcccaggctcaggtgccttccgtgagttggtctcctgttctaattgcacggattaccaggctcgccggctccgaatccgatatgggcagaccaagaagatgatggacaaggtggagtttgtccatatgcttaatgccacaatgtgtgctaccacccggaccatctnnnnnnnnnnnnnnnnnnnnnnnnnnnnnnnnnnnnnnnnnnnnnnnnnnnnnntgagggagttcatgcctccaggactccaagaactgatcccatttgtgaagcctgcacccattgaccaggagccatctaaaaagcagaagaagcaacatgagggcagcaaaaaagaaagcaaaagaggtcaccctggagagccagctgcag

SEQ ID NO: 1035 - DNA, 2452 bp, Mesocricetus auratus
  misc_feature (2399)..(2413): n is a, c, g, or t
ggcggcaagtagacaccggctgtgggtgggggaggcggccagctcagtggccttgggccgcgtggcctggtggcagtggagccatggtttctaaactcagccagctgcagacggagctcctggctgccctgctcgagtccggcctgagtaaggaggctttgattcaggccttgggggagccagggccctacctgatggttggagatgctcccctggacaagggggagtcctgcagtgggagtcgaggtgacctggccgagctgcccaatggcctgggggagtcgcgtgtctcggaagacgacacggatgatgatggggaagacttcgcgccacccattctgaaagagttggagaacctcagcccggaggaggcagcccaccagaaagccgtggtggagtcgcttctgcaggacgacccgtggcgtgtggcaaagatggtcaagtcctatttgcagcagcacaatatcccgcagcgggaggtggtcgacaccacgggtctcaaccagtcccacctgtcgcagcacctcaacaagggcacgcccatgaagacgcagaagcgggccgctctgtacacctggtacgtccgcaagcagcgagaggtggctcagcaattcacccacgcggggcaagggggactgatcgaagagcccaccggtgacgagctgccgaccaaaaagggaaggaggaaccggttcaagtggggcccggcatcccagcagatcctgttccaggcctatgagaggcagaagaatcccagcaaggaagagcgggagaccttggtggaggagtgtaacagggcggagtgcatccagaggggggtgtcaccatcacaggcacaggggctaggctccaaccttgtcacggaggtgcgtgtctacaactggtttgccaaccggcgcaaggaagaagcctttcggcacaagctggccatggacacatacaacggacccccacccaggccaggcccaggcgccacactgtctgctcacagctcccctggcctgcccacatccgccctctcccccagtaaggtccacggtgtgcggtacggacagcctgcaaccagtgaggcagctgaggtgccctcaagcagcggtggtcccttagtgacagtgtctgcggctttacaccaagtgtcgcccacaggcctggagcccagcagcagcctgctgagcactgaagccaagttggtctcagccactgggggtcccctgcctccagtcagcaccctgacagcactgcacaacttggagcagacgtctccaggtctcaaccagcagccacagaacctcatcatggcttcactgcctggggtcatgaccattggacctggggagcctgcctccctgggccccacattcactaacacaggcgcctctaccctggtcattggtctggcctccactcaggcacagagtgtgccggtcatcaacagcatgggcagcagcctgaccaccctgcagccggtccagttctcccagccactgcacccctcctaccagcagccactcatgccccctgtacagagccacgtggcccagagtcccttcatggccaccatggcccagctgcagagcccccacgccctctacagccacaagcctgaggtggcccagtacacgcacacaagcctgcttccgcagactatgctgatcacggacaccaacctcagcgcccttgccagcctcacgcccaccaagcaggtcttcacctcagacacagaggcctccagtgagcctggacttcatgaaccatcgtctccagccaccaccatccacatccccagccaggacccatctagcatccagcacctgcagccggctcaccggctcagcaccagtcccaccgtgtcctccagcagcctggtgttgtaccagagctcggactccaccaacgggcatagccacctgctgccatccaaccatggtgtcatcgagacttttatctccacccagatggcctcctcctcccagtaaccatggtgatggcctctcaggagctgggttcccagagcccacactgcctgcatagggggtgagaaggccaaggccatgctgcctggaggacatctgcgactgccatgtgtctcctgccgtaggctggtggccttcccatacacccccgctttcaccccgacttctccagcagcatcagagagggatggctctggggggagtctcaccctgagaagggaccataaagggcttgaggacagcccggtctggacagcgttggaagaccatcctcctgcagagaatagggaactcgacacttgggacaaaggggagcctgtgatgctggtacccacacaggatctctgtgttgagcttgggggcctagatccacatggctgcctcctgtctcctgtgcaaccccaggccatcccacgagcaccagcnnnnnnnnnnnnnnnacatggctgtttggcggtcacctaccccagcccagacag

SEQ ID NO: 1036 - DNA, 2081 bp, Mesocricetus auratus
tgcgaacatcaggactcacctaacgcagacactggcagcggcaacagctctgcagagagcagagaagatggccctccgggtagcttttattcttttggtggctgcattctgccctgctgtcctctgccaacaagatggaacattgggaaaggaaaccacagtccaggaagaacaaaacaatgagacaaaagtggacagcttaaccctggcctccatcaacaccgactttgccttcagcctctacaagcagctggctttgaagaatccagataagaacgtcattttctccccattcagcatctcatttgccctggccttcctgtccctgggagcaagcagcaacaccctggaagagattctggaaggtctcaagttcaatctcacagagactcctgaggcagatatccacaggggctttggacacctcctccgcatgctcagccagccaggggaccaggtgcaggtcagcacaagcagcgccatgtttgttgaaaaacgcctgcagatcctggcagagttcaagaagaaggcaagggccctgtaccaggctgaagcctcctcgactgacttccagaagcctcatgaggccaaaaagctcatcaatgactatgtgagcaaaaagacccatgggaagatcaaggaactgatgtccgacctggatgatcagacgtcaatggtgctggtgaattacatctactttaaaggaaaatggaaggcgccctttgaccctgatttcacatatgagtctgacttctacttggacaacaagaggtctgtgaaggtgcccatgatgaagcataaggacctgaccacaccctacttccgggatgaggagctgtcctcctatgtggtggagatgaggtacagaggcaatgtcagtgccatgttcatcctccctgacaagggcaggatgcagcagctggaatccagcttacagccagagaccctgaggagatggaaggactctctgagacccaggatgatccatgagctctatgtgcccaagttctccatctccactgactacagcatggagggcatcctttcacagttgggcatcaaggaagtcttctcctcacaggctgacctgtctgggatcacaggggacaaggacctgagagtctctaaggtcgtccacaaggctgtgctggacgtgggtgagacgggcacagaggcagcggctgccacaggcctcaggatgatgggatcagctctaattatgaaccctctgagactgcgtttcaacaagccgttcctgatgattatctataacacaaacactcagactccactctttatggccaaagtcacaaatcccaagcaaaactagaacatcccaagtgctgaggcttcttcccaggagccagggattaatcctgtatgagagtatctatctgcatttttgcttccatgctctgattggctgtggcatgcctggattggacaatgacagtaactaactgtatgactgccacatgcacagagtcctggggacagtcagtgtcaggctcccagtcctcttggcagcactagctcatattcctgaagctgaaatctatccttgtggccactccttcccgccactattttatctgcctctacacaaaagcctgggccctggaaggtaggctcacccctgtctaggctcttgttatgtctacattcagcttccacagccttcatggaatcatgcaaacttataggtgaaccatgtgtccctcagccccaggacacagaagggaacccgctaccatgagtctatttccagcatctggggaccagttggtgtccagttcctgcctcacacctttcctcttccattcactgtcccttcaggggatcctcacacttcccacatctggcacagtgttggagccctcactcctgcagctgcatggagcctgtccttcagatcagctcccttctcccttctatacctacttagggtagaggagcctttctctagtttcctaatgaccacactcacagaacagaaagactcctcttctttccttacccaaactggagggcttgaagcaaaagatcaataaacataactgcatgaaaagtgaaaaaaaaaa

SEQ ID NO: 1037 - DNA, 408 bp, Cricetulus sp.
atggcctgtggtctggtcgcaagcaacctgaatctcaaacctggggagtgtctcaaagttcggggcgaggtggcccctgacgccaagagctttgtgctgaacctggggaaagacagcaacaacctgtgcctgcacttcaacccccgtttcaacgcccatggggacgccaacactatcgtgtgcaacagcaaggataacggagcctgggggactgagcaccgggagcctgccttccccttccagcctggaagcactgtggaggtatgcatcacctttgaccaggctgacctgaccatcaagctgccagatgggcatgagttcaagttccctaaccgtctcaacatggaggccatcaactacatggcggcagacggtgacttcaagattaagtgcgtggcctttgagtga

SEQ ID NO: 1038 - DNA, 117 bp, Cricetulus griseus
  misc_feature (31)..(56): n is a, c, g, or t
ggtcctgtgagaggcatctctatcaagttgnnnnnnnnnnnnnnnnnnnnnnnnnntaattatgttcctgaggtctcagccctagaccaggagatcattgaggtggatcctgacacc

SEQ ID NO: 1039 - DNA, 1184 bp, Cricetulus griseus
  misc_feature (76)..(476): n is a, c, g, or t
  misc_feature (1014)..(1184): n is a, c, g, or t
atcactctctgaggtggttctgcaaaacagacggggattagatttattatttttacaggaaggggggctatgtgcnnnnnnnnnnnnnnnnnnnnnnnnnnnnnnnnnnnnnnnnnnnnnnnnnnnnnnnnnnnnnnnnnnnnnnnnnnnnnnnnnnnnnnnnnnnnnnnnnnnnnnnnnnnnnnnnnnnnnnnnnnnnnnnnnnnnnnnnnnnnnnnnnnnnnnnnnnnnnnnnnnnnnnnnnnnnnnnnnnnnnnnnnnnnnnnnnnnnnnnnnnnnnnnnnnnnnnnnnnnnnnnnnnnnnnnnnnnnnnnnnnnnnnnnnnnnnnnnnnnnnnnnnnnnnnnnnnnnnnnnnnnnnnnnnnnnnnnnnnnnnnnnnnnnnnnnnnnnnnnnnnnnnnnnnnnnnnnnnnnnnnnnnnnnnnnnnnnnnnnnnnnnnnnnnnnnnnnnnnnnnnnnnnnnnnnnnnnnnnnnnccctttctttctcaagtttgtctcctcttcctcctgtcggcggcttccccgatccccacccccggtggcctttccccgcccggcccgagaacaagcaccggatggggccggcccgagaacaagcaccgggtggggccggcccgagaatgagcaccaggtgggccagcccgagaacgagcaccgggtgggctggcacgagggcgagcaccaggtgggtcagcacgagaacaaacaccgagtgagccggcctggagctctgcccctgagcccccgccccgcccgaagagaaacactccgtcccaaggtctccgcccccaaggtcaggccatcaggaagggggggggggaattgagtctgctgtaccagacaccagaccttgagaatatgctgatctggaatggctctgtgtctcatttgaaccatccaatagaaataattctgtatttcgcctcatttgaaagactctgtgtttcacctcatttgaataactctgtacttgcctcattgaataaccctgtatagcgcctcatatacattnnnnnnnnnnnnnnnnnnnnnnnnnnnnnnnnnnnnnnnnnnnnnnnnnnnnnnnnnnnnnnnnnnnnnnnnnnnnnnnnnnnnnnnnnnnnnnnnnnnnnnnnnnnnnnnnnnnnnnnnnnnnnnnnnnnnnnnnnnnnnnnnnnnnnnnnnnnnnnnnnnnnnnnnnnn

SEQ ID NO: 1040 - DNA, 469 bp, Cricetulus griseus
  misc_feature (370)..(390): n is a, c, g, or t
  misc_feature (426)..(450): n is a, c, g, or t
  misc_feature (453)..(465): n is a, c, g, or t
tacgttatgctctgatttgaaatcagctgtctttctttttcagattagtgatgatgaaccaggctatgacctagattttgcccagcgatgatggcagacacaaaaacccaacctcatctttggaggttctttgcctcatagcattaaattggggcttttttttttcttaccttataggtcctttgcatatatattatagcttccagatttgtgtttttatgggattttgtgtgtgcaaatgcatgtgtctatatgtgtttcttgtgctttttctttgcctccttttcttgtttgtggtttattctgattggaaaaggtgtttattcctcatggagtgattatggacaggtaagtaagatcttaattgaannnnnnnnnnnnnnnnnnnnncggttaagagcactgactgctcttccagaggttctnnnnnnnnnnnnnnnnnnnnnnnnnatnnnnnnnnnnnnnccct

SEQ ID NO: 1041 - DNA, 2352 bp, Mesocricetus auratus
  misc_feature (1408)..(1453): n is a, c, g, or t
  misc_feature (1531)..(1561): n is a, c, g, or t
  misc_feature (1885)..(1916): n is a, c, g, or t
  misc_feature (2043)..(2059): n is a, c, g, or t
agtttgtaataaataacctacattgatttctctgttccagaatgattttggcttcccttcctttaagtggtctgatgtttaccccaagagacagtgttaggaaatcatttacaaagtggtacagcctctccttctggtatagttataaatacaaggttgggctgggactgaagcaagggatccagaacttctcatcgtgatttttcagacaaaactgagttttcctaatgtgaaaatccaggtccagcagcatcaatagccatggagaagctgctgtggtgctcactggtcatgatcggcttctctcaggcttttgcccagaaaggtaggatctattataaagatctgatctggggggagacgggtgagagcctaatttcttacatatggaattcaagaaacagcatcaggtacagatgtgtgtttgtgtaacctgggaaaaggccacatgcctcttgatcctaaactctacttgtaagtgagggatgatagatctttgttatctgagaaactactcactttcttcgtttcctgtctcacagacatgtctaaaacagccttcgtatttcccaaagagtcagccaattcctatgtatccctggaagcacagtcaaagaagacattgaaagccttcactgtgtgtctccacatcttcacggaactgagcacaacccgcagcttcagtattttctcttatgctaccaagaacagccctaacgaaatcctcatattttggtctaaggatagagggtatgcttttggagtgggtgggcctgaagtactattcaaggcttctgaaattcctgaagttccaacacacatctgtgccagctgggagtctgctacagggattgcagagttatgggttgatgggaaacccaaggtgcggaaaattctgcagaagggctacactgtggggacagatgcaagcatcatcctggggcaggagcaggactcatatggtggtggttttgatgcaaaccagtctttggtaggagacattggagatgtgaacatgtgggacattgtgctgtctccagaacagataaacacagtttgtgttggtgggacactagaccccagtgttttaaactggcaggcactgaagtataaagtacagggtgatgtgtttattaagccccagctgtggccctgacctactgttgtgagccctgagacaacccttgggattacattgtcttccttgtctctggttatagaccttttaaccccaacagatgctgtagttctattctgtgaatatggtctttcacttccctgctctgcctttcctcagcaccagagcatgcaatttaagtgtatggcttggcagtatgtacatcatattaggaatatttatcaaagagaatcctaattacatgtttttgtttatatacacactataagnnnnnnnnnnnnnnnnnnnnnnnnnnnnnnnnnnnnnnnnnnnnnnatttccaggtgtaacagccccggctgacctggaacttgctgtgtagaccaggctgacctcaaactcactgagatccannnnnnnnnnnnnnnnnnnnnnnnnnnnnnngggcctgtgctatcactatctggattttttacatatatttttaattgaaagaattttaaacaatccctcaccctcacaaagatgagaaaccacacagaaagaagaatgaaaattttaatttaatctttttgtttttaaaatttcatatatgaatgctatatttacttcatttatatccctccctctccaaatcttcctgtatcttgacctcttatttattagctttatatgcatacacatacattatatacacaatatctatcatctatgtatctatgtatgtaagtacaatgtatctatgtgtctatgtatctatgtatctannnnnnnnnnnnnnnnnnnnnnnnnnnnnnnnctatcattcatccatcctactggttccatttagtgttgcttgtacgctgttgagggttggtcacttgggacttggataatctattagatggcacacccctgaagaaaacggactctccttttctcannnnnnnnnnnnnnnnngtagctcttcatataggggtggggctttgtgaaatttcttctgtccatgttgcatgctagtgttgtcattatgtaggtcttatttaggcaacccagactgatgggggaccgactatactgggctcagagttagtccttttctggaataaaaatctgtatctgaacttcctgggtccatgagtcaataaagctacctttggtttggatgaattggagttattgcatgattcattttattatcaaccctctggaataaatagtctgaagttcaggctgactgtcacttccctgca

SEQ ID NO: 1042 - DNA, 312 bp, Cricetulus sp.
ttttaactagaatgatcagtcaacaggggacataaaagttattggtggggatgatctctcaactttaactggaaatggctccaagttagtgtttcccacctccctaactagctttatcagctctctggattgataggaaacggggactagggaggaaatgaaacttggcccctgaagtgttgcccagagcattgccttccaaaggtggtatcctgaaggtagaatgatgacaatgagaggagtctagatggaattgatggattcaggctaagagtatctattgttttcccagggggagttaaagggaaagca

SEQ ID NO: 1043 - DNA, 866 bp, Mesocricetus auratus
ccttctttggtgaagtgtgttcccaggaatcatcatcaccatgaacagccagggatcagaccggaaagcagtgacactcctgctgcttgtgatgtctaacctgctgttctgccaaaatgcgcaccccctgccaatctgccctggtgggaattgccagatgcccctccaggagctgtttgaccgggtgatcatgctttctcactacatttatatgctgtctgcagatatgttcattgaattggataaacagtatgctcaagatcacgagtttattgccaaggccatcagtgactgccccacttcttccctggctacccctgaaggcaaggaagaagcccagcaggtccctccggaagtccttctgaacctgatactcagtttggtgcactcctggaatgaccctctatttcaactcgtaactgaagtagatggtattcatgaagcctctgatgctatcatatcaagagcgaaagagattggggaacaaaacaagcgccttctagaaggaattgagaagatacttggccaggcctatcctgaagccaaaggaaatgagatctactcggtttggtcacaatttccatctctgcagggagttgatgaagaatccagagacttggctatttacaacaaggttcgctgcctgcgcagggattcccacaaggttgacaattatctcaagctcctgagatgtagagttgtccacaacaacaactgctaagcccgaattcaatccgtgtacttctgagatggcctttaacagttcatttcttcaaaacttctattagtattatagctttcagtgaatgcttgggtgcaatgggtctcttcttaaagaataaaaactaacttttaaaaaaaaaaaa

SEQ ID NO: 1044 - DNA, 809 bp, Mesocricetus auratus
  misc_feature (358)..(380): n is a, c, g, or t
cagatcccaaactgctcagggtcttgtggaccgatcactgcccggcaatggctgcagactcccagacctcccggctcctgaccttcaccctgctctgcctgctctggcctcaggaggctggtgccttccctgccatgcccttgtccagtctgtttgccaatgccgtgctccgagcccagcatctgcaccagctggctgctgacacctacaaagagtttgagcgtgcgtacatccctgagggacagcgctattccatccagaatgcccagactgcgttctgcttctcagagaccatcccagcccccacaggcaaggaggaggcccaacagagaagcgacatggaattgcttcgcttctnnnnnnnnnnnnnnnnnnnnnnnctgggacctgtgcagttcctcagtagaatcttcaccaacagcctgatgttcggaacctcagaccgcgtctacgagaagctcaaggacctggaagagggcatccaggctctgatgcaggagctggaagatggcagtccccgtgttgggcagatcctcaagcaaacctatgacaagtttgacaccaacatgcgcagtgatgacgctctgctcaaaaactacgggttgctctcctgcttcaagaaggacctgcacaaggctgagacctacctgcgggtcatgaagtgccgtcgctttgtggaaagcagctgtgccttctagcagggcactacggtgtctctgctgtactcccccagcgcctccctttgccctagcaactgcccatccctatcgttcgccctaataaaattaagatgcatcataaaaaaaaaa

SEQ ID NO: 1045 - DNA, 1853 bp, Cricetinae gen. sp.
  misc_feature (585)..(613): n is a, c, g, or t
  misc_feature (1825)..(1845): n is a, c, g, or t
tgactgtggtgtgaaggagcggaaccagcgtgctatctatcaggatgcctcctgctctgagattgattactccatctccacaagatggttgaatggtctgactggaagcctgttttctgctgagcctaactcatttctgctggagctgtaggtgtggccccctggctacacgtgtctgcttgtaaattgtcctcactcccatatatcttcacacaccaaagaggacttctcttctgtagcaattctagaaagaactgcaggccagaccctgtgttcctggcccagaatcggccatggggggccgtgccattgtcactgacaccaacatcttttctggcctcgagagcaacaccactggtgtcaccgccttctccatgcctgcctggcagctggcactgtgggccacagcctacctgggtctggtgctggtcgctgtaacaggcaacgccacagtcatctggatcattctggcccacgagagaatgcgcacagtcaccaactatttcatcatcaacctggccttggcagacctctgcatggcagccttcaatgccaccttcaactttgtctacgccagtcacaacnnnnnnnnnnnnnnnnnnnnnnnnnnnnntttccagaacctctttcccatcacagccatgttcgtcagcatctactccatgactgccatcgctgccgacaggtacatggccatcgtccaccccttccagccacggctctcagcccccatcaccaaggcgactatcgcgggcatctggctggtagctctggctctggcctccccacagtgcttctactccaccatcactgtggaccagggagccaccaagtgtgtggtggcctggcctaatgacaacggaggcaagatgctccttctgtatcatctggtggtttttgtcctcgtctacttcctaccccttgtggtgatgttcgtggcttacagtgtcatcggcctcactctgtggaaacgcgcggtccccagacaccaggctcacggtgccaacctgcgccatctgcatgccaagaagaagtttgtgaaggccatggttctggtggtgttgacatttgccatttgctggctgccctaccacctctacttcatcctgggtagcttccagaaggacatctactaccgcaagttcatccagcaggtctacctggcgctcttctggctagccatgagctccaccatgtacaatcccatcatttactgctgcctcaaccacaggtttcgctctggattcaggcttgctttccggtgctgcccctgggtgacgcccactgaggaagacagactggagctgactcgcactccatccctctccaggagagtcaacaggtgtcacacaaaagagactttgttcatgactgcggacatgacccactctgaggctaccaatggccaggttgggagtccccaagatgtggagcctgccgcaccctgaagtcttgagactgtctgcagggccaggcttagtccctttgagaaacagctgatagaaaaggcctgatgtaatagcttgtcccacactccattcttcaaccaccaatagaaaaacaagatggtgcctggagctccacaggcaatgctaatacaaagagctcacatacccaccataagcattcctgggatggaggaaagagccaggaagacagggagccaacacttggccaatctaggagctgcaaagtgaaatgtctccctgcagtataaagatggatgggaaaactggatctcattaaagataactgcaggtgtcatgagaagaggcagttgaagggatgatgagatggtaaaggcacttgctgcctagcctggtgnnnnnnnnnnnnnnnnnnnnnctacatgg

SEQ ID NO: 1046 - DNA, 540 bp, Cricetinae gen. sp.
aattcggcacgaggggaacgctgaggcgcgcgtcgctcttctgccttccggaccggccagtgcgggcaaggaaggcatcatgtcagacaacgaggacaatttcgacggcgatgactttgatgatgtggaagaggacgaaggactagatgacttggaaaatgcagaggaggagggtcaggagaatgttgagattctaccctctggtgaacgaccacaggccaaccagaagcgcatcaccactccttacatgaccaagtatgagcgagcccgtgtactgggcacccgggcactccagatcgcgatgtgtgcccctgtgatggtggagctggagggggagacagaccctttgctcattgccatgaaggaactcaaggcccggaagatcccaatcatcattcgccgttacctgccagatggaagctatgaagattggggcgtggatgagctcatcatcactgactgagcagagctgccaattgtgcctgggcaacccttctgtacccactttatacatgtaaataataaatgtcaccttcccac

SEQ ID NO: 1047 - DNA, 1060 bp, Cricetinae
cagatatgggagacatgggcgatccaccaaaaaaaaaacgtctgatttccctatgtgttggttgcggcaatcaaattcacgatcagtatattctgagggtttctccggatttggaatggcatgcggcatgtttgaaatgtgcggagtgtaatcagtatttggacgagagctgtacttgctttgttagggatggaaaaacctactgtaaaagagattatatcaggttgtatgggatcaaatgcgccaaatgcagcattggcttcagcaagaacgacttcgtgatgcgtgcccgctccaaggtgtaccacatcgagtgtttccgctgtgtagcctgcagcaggcagctcatcccgggagacgaattcgcgctgcgggaggatgggcttttctgccgcgcggatcacgatgtggtggagagagccagcctgggagctggagaccctctcagtcccttgcatcctgcgcggcccctgcaaatggcagccgagcccatctccgctaggcagccagccctgcggcctcacgtccacaagcagcctgagaagaccacccgcgtgcggactgtgctcaacgagaagcagctgcacaccttgcggacttgctacgccgccaaccctcggccagatgcgctcatgaaggagcaactagtggagatgaccggcctcagcccccgagtgatccgagtctggtttcaaaacaagaggtgcaaggacaagaagcgcagcatcatgatgaagcagctccaacagcagcagcccaacgacaaaactaacatccaagggatgacaggaactcccatggtggctgctagtccggagagacatgatggtggtttacaggctaacccagtagaggtgcaaagttaccaaccgccctggaaagtactgagcgacttcgccttgcagagtgacatagatcagccggcttttcagcaactggtcaatttttcagaaggaggaccaggctctaattccactggcagtgaagtggcatcgatgtcctctcagctcccagatacacccaacagcatggtagccagtcctattgaggcatgaggact

SEQ ID NO: 1048 - DNA, 1503 bp, Cricetinae gen. sp.
atggcactcagggcaaaggcagatgtgtggctggcaagaccctggcagtgcctgcccaggacgagggcactgggcaccacagcagcactggcccccaacacactgcggccctttgaagccataccgcagtactccagaaacaggtggctgaagatgctacagatcctgagggaggagggccaagagggcctgcacctggagatgcatgaggccttccgggagctggggcccattttcaggtacagcatgggaagaacacaggttgtgtctgtgatgttgccagaggatgccgagaagctgcaccaggtggagagtatgcaccctcgtcggatgcacctggaaccttgggtagcccacagagaacaccgtggcctgagtcgtggagtgttcttgctaaatgggcctgaatggcgcttcaaccgactgaggctcaacccacacgtgctgtccccaaaggccgttcagaagtttgtccccatggtggacatggtagcacgggacttcttggagtccctgaagaagaaggtgtttcagaatgctcgtgggagcctcaccatggatgtgcagcaaagcctttttaactacagtatagaagccagcaactttgttctttttggggagcggctgggactccttggccatgacctgagccctgccagcctgacgttcatccatgccttgcattccgtgttcaagacgaccccacagctcatgttcttgcccaggagcctgactcgctggacaagcacccgggtgtggaaagagcattttgaggcctgggatgtcatctctgagtatgtcaacagatgtatccggaaggtgcaccaggagctcagacttggcagccctcacacctacagtggcatcgtggcagaactaatgtcccagggagctttgcctctcgacgccatcagagccaactcaattgagctcaccgctgggagtgtagacacgacaaccttccccctggtcatggctctctttgagctggctcggaacccagatgttcagcaggctgtgcggcaggagagcctggcagctgaggccagcgtggctgcaaatccccagagggctatgtcggatctgcccctgctgcgggctgtccttaaagagaccttgaggctctatcctgttggtggctttttggagagaattctaagctcggacttggtgcttcagaactaccacgtccctgctgggacattggtcctactttatctctactccatgggccgaaaccctgcagtatttccgaggcccgagcactacttgccccagcgctggctggagaggaatgggagtttccagcacctgaccttcggctttggggtgcgccagtgcctggggaagcgcctggctcaggtggagatgctcctcctgctgcaccatgtgctgaaatccttcagggtggagacgcaggagcgagaggatgtgcggatggtgtaccgctttgttctggcgcccagctccagccccctgctcactttccggcctgtcagctag

SEQ ID NO: 1049 - DNA, 292 bp, Cricetinae
tcatatcttatgaaccactttgatttgccaacatgtgatagctgcagagatgctgatgacaaacacaagctgataaccaaaacagaagccaagcaggaataccttctgaaagactgcgatttagagaagagagagcctgcgcttaggtttatcgtgaagaagaaccctcgtcactcacagtggggcgatatgaagctctacttaaagttacaggttgtgaagcgggctctggaagtttggggtagccaggacgcgctggaagacgcgaaggaagtgaggcaggaaaaccgag

SEQ ID NO: 1050 - DNA, 1217 bp, Cricetinae gen. sp.
  misc_feature (577)..(595): n is a, c, g, or t
acagcgaggcaggcgctcagagcccgcagcccaacgacaccgaggaccgcgacgagtggcatctaggacccgctcctccagcagcctgctccatctgaactgcctgcggcaaccccatggcgcggttcctgagactttgcacctggctgctagtgcttgggtcctgcctcctggctacagtgcaggcagaatgcagccaggactgcgccaagtgcagctaccacttggtgagcccaggcgacatcaacttcctggcgtgcacactggaatgtgaaggacaaatgccttctcacaaaatctgggagacctgcaaggatctcctgcaggtgtccaagcctgagttcccttgggatagcatcaacatgttcaaagacagcaacaaacaggatgagagccacttgctggccaagaagtacggagggttcatgaaaaggtatggaggcttcatgaagaagatggatgagctttatcctgtggagcccgaagaagaagcgaatggaggcgagatccttgccaagaagtacggtggcttcatgaagaaggatgcggatgagggcgacaccctggccaactcctnnnnnnnnnnnnnnnnnnncctgggaacaggagacaaccgtgcgagagagggccgccaccaagagagcactgacaatgatgacaacatgagcaagaggtatgggggcttcatgagaggcctcaaaagaagcccccaagtggaagacgaagcaaaagagctgcagaagcgctatgggggcttcatgagaagggtgggccgcccagagtggtggatggactaccagaagagatacggaggcttcctgaagcgctttgcggagtccctgccctccgatgaggaagctgaaagttactccaaagaagttcctgagatagaaaaaagatatgggggattcatgcgattttaaagccctttcccaaaggtgaccccaggcacccaccagcctgctgcatccccagtgagcgactgcctacccagtggtgtttgttgtcacttgctgcttgtactgttgcccttctggtctggataactacactgcctgaaagctgtgatgtgtggggtctgtgttctcttgagtctcggggctcagtactggcctgttgcagctatcccggtatcatgctgtaagtttctgttacctcatcccctaacttttggcagaaacgtcaataaatgcttacttgtatatagatataataaa

SEQ ID NO: 1051 - DNA, 833 bp, Cricetinae gen. sp.
aaaggagatagacgtgctgaaaatgactaaaagtaaaaagtacatgggaaagtaatgggagggcatttaaaaaacaaaaactaattctgtgtattatttaagcaatgtacataagatggtcttaaaagagaaggttgattaccaattccagagaaccagcaacatctgcaacatcaacagcaatgggcaggctctttgctttcttgatggccctagtgatgatgagctactggtcaacctgctctctgggatgtaacctgcctcagattcataacatcagaaacaagagagccttgacactcctggcacaaatgaggagactctcccctctctcctgcctgaaggacagaagggactttgcattccctctggagaaagtagatgtccagcacatgcagaaggctggagccatccctctcctgcaggagctgacccagcaggtcctcatcctcttcagctcaaaggactcatctgctgcttgggagacaaccctcctagacacattctgcactggcctctaccagcagctcagtgacctgaaagcctgtctgattcaacaggtagggattgaggaacctcctctgagccaggaagactccctgttgactgtgaggaaatacttccacaggatcactgtctacctgagagagaagaaccacagcccctgtgcctgggaggtggtcagaacagaagtctggagaaccctgtctgccacagcaaacttgctggcaagattgagtgaggagaaggagtaagtcctgagccaaagtgaacagaactctcctgaactaggacactgcacctcactcctcagattctccaggccagaagtc

SEQ ID NO: 1052 - DNA, 171 bp, Cricetinae gen. sp.
tcagctacacctagatagacataaattaataaaaatcgtcttaaccaacttatctaataaaaattggcaaccagccactattttgttgactatgagaaagtttaagtttatgttaatttttagggtctgatagatattcatgtgtattacagtggtattcatatgctatgt

SEQ ID NO: 1053 - DNA, 404 bp, Mesocricetus auratus
  misc_feature (117)..(140): n is a, c, g, or t
tgtgtgtattcaagaatatgcatgtaaatgatgtttttttttaactagaatgatcagtcaacagggggggaaaggaggaaacaaagaaagaatgaaaaagaaagggaaggagggggnnnnnnnnnnnnnnnnnnnnnnnnattggttgcatactctattctctgtccaatgtaggtgtcagtgggaggaggtgatggacctgacctccaggcagtcattgccatgagagggagatgcagtataaataaaacaaattacatgttgtattatcaaaaaacataaaagttattggtggggatgatctctcaactttaactggaaaggtaagtaccttaaagggaaagcaaagaatcatttttataccaagaatcaattagtaactgtgctttcaatcactcacttgg

SEQ ID NO: 1054 - DNA, 249 bp, Mesocricetus auratus
acttaccacttaccattaaatacctcttttctttttaaaaggacataattgacactggtaaaacaatgcaaactctgctttccctggtcaagcggtacaaccccaaaatggttaaggttgcaagcctttgcacactctgtctctttcttgggtcagcggatttgataggaagggcagagaagagttcccgaggttctttattatctgtgtagatgtttttttttcattgggagcaataagcaattgctt

SEQ ID NO: 1055 - DNA, 534 bp, Mesocricetus auratus
  misc_feature (182)..(239): n is a, c, g, or t
atgtcctgcaaattcgtgctccagctcctggggttctggctgctgctgagccagccttgcagggcgcgggtcacgaaggaatggctggatgaagtcatccacgtgtgcggtcgggaatatgtccgtgcgattttggacatctgtgcggccaccgtggggttggaggcaccacctctgcgacnnnnnnnnnnnnnnnnnnnnnnnnnnnnnnnnnnnnnnnnnnnnnnnnnnnnnnnnnncgacacaatgccaaatttgtcagagaaacccaagacagcactgcctgaagggcatccatctctaccagagcagcaacaatatgtgcctgtatcgagcgattcagttggtagcttggacgactttaagaaaagtttccatgctacacaaggtgaagcagaagacagcagtcttccagaacttaaatccttatacttggacactctttcgcggaaaaagaggtacactagtatatacatgagtcatcagtgttgcttccgtggttgctcaagaagatctcttactgcagcctgctga

SEQ ID NO: 1056 - DNA, 146 bp, Mesocricetus auratus
attcaggccacctggtatcagtacttagccaggctgagggcacctttgtggcctctctggttaaggagagtggcataacagtctccaatgtctggattggactccatgaccccaaaaataaccgtcgctggcattggagcagtgga

SEQ ID NO: 1057 - DNA, 645 bp, Cricetulus migratorius
gaggtgcagcttcaggagtcgggacctggcgttgtgaagccctcacagtcactgtccctcagttgctctgtcactggttactccatcagcagtggtaccttgtggacatggatcaggcagttcccagggaataagctggtgtggatggggtacataggctatggcgggggcacggattataacccatccctcaagaaccgcatctccataaccagagacacgtccaagaatcagttctcccttcagctgaagtctgtgaccactgaggacacagccacatattattgtgcaaaaatttttgggttcaatgctttggattcctggggccaagggatcctggtcaccgtctcctcagccacaacaacagccccatctgtctatcctttggcccctgcctgtgacagcacaaccagcaccacgaacacggtgaccctgggatgcctggtcaagggctatttccctgagccggtgaccgtaatctggaactctggagccctgaccagcggcgtgcacaccttcccatctgtcctgcattctgggctctactccctcagcagctcagtgactgtaccttccagcacctggcccagccagaccgtcacctgcaacgtagcccacccagccagcagcaccacggtcgactta

SEQ ID NO: 1058 - DNA, 2591 bp, Cricetinae
  misc_feature (408)..(430): n is a, c, g, or t
  misc_feature (1043)..(1134): n is a, c, g, or t
  misc_feature (2569)..(2591): n is a, c, g, or t
gaattccggggacagggctgcgggcaggctgggaccgacgcgcgcagagctccgtagcccggctggcgcgcgtctgtgcggccgcctgactcccgagcccaggcggtggccggccccgggcagcttggcgggccatggcgatggagcgcgggctgcacctcggcgcggcggcggcgagcgaagacgacctcttcctgcacaagagcctgggtgcctccaccgccaagcgcctggaggcggctttccgctccacgcccccaggaatggacctgtccctggcaccgccgcctcgtgaacgcccagcgtcgtcgtcgtcctcgcccctaggctgcttcgagccggctgaccccgaaggggccgggttgctgctgccgccgcccggaggaggaggcggcgcgggtggtggcnnnnnnnnnnnnnnnnnnnnnnnggtgagtgtccctgggctactggtgggctcagcgggcgtggggggcgacccgaacctgagcagcctgccggcgggggccgccctgtgtctcaagtacggagagagcgcgggccgcggctcggtggcagagagcagcggcggcgagcagagccccgacgacgacagcgacggccgctgtgagctggtgctgcgagccgggggcgccgacccgcgggcatccccgggagcggggggcggcggcaccaaggtggtggagggctgctccaacgcccacctgcacggcggcgcgggcctccccccggggggctctacgggcagcggtggcggcggaagcggcggcggcggtggcggcggcagcagcagcaagaaatccaaagagcagaaggcgctgcgcctcaacatcaacgcccgcgagcgccggaggatgcacgacctgaacgatgctctggacgagctgcgagcggtcatcccttacgcgcacagtccctctgtgcggaagctctccaagatcgccactctgctcctcgccaagaactacatcctcatgcaggcgcaggccctggaggagatgcggcgcctagtcgcctacctcaaccaaggccaggccatctcnnnnnnnnnnnnnnnnnnnnnnnnnnnnnnnnnnnnnnnnnnnnnnnnnnnnnnnnnnnnnnnnnnnnnnnnnnnnnnnnnnnnnnnnnnnncgttcagcgccgggctacccccggctgcctcctgtcccgagaagtgcgccctgttcaacagcgtctcgtccagcctctgcaaacagtgcacggagaagccttaaacactccctccctggaaagcctcgagacccactccaaagccagaggaaagcaagaagctgctccctaccccttttattttggtcctctccgagttgtgaaacacttgcaaggcaaacaaagcagagacagaaactgaggcgtatctgagacaaaccggactttcagccttggcatgccctgactcacagtctttggggtagggagggaggggagagggagttgagatgagatcgagtgtggaggtcttttttcccccctcagaaaagtggcaacttagacttcgaggaagtacagtcttcttggaaggtgaaaaataagttggaaagtagtgcttgtttattagacgtgaaaaatattgactgacaaaatactaaccttactaatagcggagaatttggctagtactgaaggggagaggagtatctcttgaaaggcttgggggacagaatattcattcagacaaatcagaaagggcactcgaaaataaattttgattctgagccaggagaaaaacttgaaatgcatacttaatttaagtggagggaaagcagagagagacacacgttgctatgaaagacttgtattttttattgcctctctgaacttaaaaatcccgtggaaaaaatgctcaaagttttggggagagtgatattaaacaaatagcaggctgtggatgaaagaattgcttttaaaatatttatgtgcaccttgttacttttcactctgcaatgatgtattaacgattcatgatatttatttgttattctttaatgatccacatgaacagtatttattacgtgttaaggtcttgggtctttaatgtgaagattttcttttaatgcttctaaaattctgttttatatattaacttacactgtgtgccaagtgttttaaaggtttatttgccaacgattatgaagaggaacattgatgtatctgagctgcttgggtttttgaaaggtcacctggatacttgagttgcatcatccctgtatttaaattgagctttaataaattgcttcagtccaaaaattacaggaaaggtgtattcttaattgatgaacgaattgatttctttttcaaatggggacctatttgcattccaaaaggggaaaaccatcacagagatagatcttgtaactgagaacctgctaggcaaatatattttccaggttgtgctgtgctttttgaaaggcctaatttaattgattttaatatagatgtacatatataagttattctaactgtgaagacttactacgttaaaagactgctttgattcgcttatgttgtgaaatcatttgttatttttctaaaaaaaatctaaaannnnnnnnnnnnnnnnnnnnnnn

SEQ ID NO: 1059 - DNA, 1791 bp, Cricetinae
accacgccggcctcaggtcatgcacggacacaaccgaaacgggcaggcccacgtgccgcggcggaaacgccgcaaccgctttgtcaagaagaacggccagtgcaacgtctactttgccaacctgagcaacaagtcccagcggtacatggcagacatcttcaccacctgcgtggacacgcgctggcgctacatgctcatgctcttttctgcggccttcctcgtctcctggctctttttcggcctcctcttctggtgcatcgccttcttccacggcgacctggaggccagcccctcggtgcccgctgcaggagccccggggggcaacggtggggcagccccggcggcccccaagccctgcatcatgcacgtgaacggctttttgggagccttcctgttctcggtggagacgcagacgaccatcggctatggtttccggtgcgtgacagaggagtgcccgttggcggtcattgcagtcgtggtccagtccatcgtgggctgtgtcatcgactccttcatgattggcactatcatggccaagatggcacggcctaagaagagggcccagacgctgctgttcagccaccacgcggtcatctccgtgcgcgatggcaagctctgcctgatgtggcgcgtgggcaacctgcgcaagagccacattgtggaggcccatgtccgggctcagctcatcaagccctacatgacccaagagggtgagtacctgccgctggaccagcgggacctcaacgtgggctatgacatcggcctggaccgcatcttcttggtgtcacccatcatcattgtacatgagattgatgaggacagtccactctacggcatgggcaaggaggagctggagtcagaggacttcgagattgtggtcatcctggagggcatggtggaggccacggctatgaccacgcaggcccgcagctcctacctggccagtgagatcctgtggggtcaccggttcgagcccgtggtctttgaggagaagagtcactacaaggtggactactcacgattccacaagacctatgaggtggctggcacgccctgctgctctgcccgtgagctgcaggagagcaagatcacggtgctgcccgccccaccgccccctcgcagtgccttctgctatgaaaatgagctggccctcatgagccaggaggaagaggagatggaagaggaagctgctgctgcagccgctgtggctgcaggcctgggcctggaggcgggccccaaagaagaggcgggcatcattcggatgctggagtttggtagccatctggatctggagcgcatgcaaggcaccctcccgctggacaatatctcctaccgcagggagtctgccatctgacctccaggccctgccctcctctattcctgcaagagcctctgccacgggtggggatccaggacaagcctcccactctcaggacagagttggacccggaggaaggtgggggcttcaaagactgggagatcccttcccgttgactgcagagcccaggactgggaaggaaggacccaggtactcagccctgctggcctgagccccgccccccagcacctccccacaggtggctctgggcccccagaccttccaccctttccccactgacccttcaaggatgcgtcccttctgttctcaggaccttggggaaggcggctggactgctggggggtgggcatcatgggagttctgggtgggcagggtgggcctggggagggggaggggtgtgttttttttgcatgaccatggtctgtgcccttgactcccttttgtaaatatct

SEQ ID NO: 1060 - DNA, 2076 bp, Mesocricetus auratus
  misc_feature (1073)..(1090): n is a, c, g, or t
gccaagatggccgacctggaggcggtgctggccgatgtgagctacctgatggccatggagaagagcaaggccacgccggccgcgcgcgccagtaagaagatcctgcttccagagcccagcattcgcagcgtcatgcagaagtacttagaggaccgaggagaggtgacttttgaaaagatcttctcacagaagttagggtacctgcttttccgagatttctgcctgaactatctggaagaggccaagcccttggtggagttctatgaagagatcaagaaatatgagaagctggagacagaggaggagcgtgtggtccgtagccgtgagatctttgactcctatatcatgaaagaactcctggcctgctcacatcccttttcaaagaatgctaccgagcatgtccagggccacctggtgaagaagcaggtgcctccagatctcttccagccatacattgaggagatttgtcagaacctccgaggggatgtgttccagaagttcattgagagtgacaagttcacacgattttgccagtggaagaacgtagagctcaacatccacctgaccatgaacgacttcagtgtgcatcgcatcatcgggcgtgggggcttcggtgaggtctatgggtgccggaaagcagacacaggcaagatgtatgccatgaagtgtctggacaagaaacgcatcaagatgaagcagggagagaccctggctctgaacgagaggatcatgctttccctcgtcagcaccggggactgccccttcatcgtgtgcatgtcatacgcattccgcacaccagacaatctcagtttcatcctggatctcatgaacggtggggacctgcactaccacttgtctcagcatggagtcttctctgaagccgacatgcgctcctacgcagctgagatcatcctgggccttgaacacatgcacaaccgttttgtagtctacagggacctgaagccagccaacattctcctggacgagcatggccatgtgagaatctcagacctgggcctagcttgcgacttctccaagaagaagccccatgccagtgtgggcacgcacgggtnnnnnnnnnnnnnnnnnntacagaagggcgtggcctatgacagcagtgctgactggttctctctgggttgcatgctcttcaagttgttgcggggacacagcccctttcggcagcacaagaccaaagacaagcatgagattgatcgcatgacattgacaatggctgtcgagctgcctgactccttctcccctgaactgcggtccctgctggaaggtttgctgcagagggatgtcaatcggaggctaggctgtctgggccgtggggctcaggaagtaaaagaaagcccgtttttccgctcactggactggcagatggtcttcttacagaagtacccgcccccactgatccccccacgtggggaggtgaatgcagctgatgcttttgacattggctcctttgatgaggaggacacaaaaggaatcaagttaccggacagtgaccaggaactgtaccgcaactttcctctcaccatctcggagcggtggcagcaggaggtggcagagactgtttttgacaccatcaatgctgagacagatcggctggaggcacgaaagaaagccaaaaacaagcagctgggccatgaggaggactatgctctgggtaaggactgcatcatgcatggctacatgtccaagatgggcaatcccttcctgacccagtggcagcggcggtacttctacctgttccccaaccgacttgagtggcggggtgaaggcgaggctccgcagagcctcctgaccatggaagagatccagtcagtggaagagacgcagatcaaagagcgcaaatgtctcctccttaaaatccgtggaggcaagcagtttgtcctgcagtgtgatagtgaccctgagctggtgcaatggaaaaaagagctgcgtgatgcctaccgtgaggcccagcagctggtgcagcgagtgcccaagatgaagaacaagccacgctcacctgtggtggagctgagcaaagtgccgctgatccagcgtggcagtgccaacggcctctga

SEQ ID NO: 1061 - DNA, 2094 bp, Cricetinae
  misc_feature (665)..(688): n is a, c, g, or t
gaggggatggcgatggcactcagggcaaaggcagatgtgtggctggcaagaccctggcagtgcctgcccaggacgagggcactgggcaccacagcagcactggcccccaacacactgcggccctttgaagccataccgcagtactccagaaacaggtggctgaagatgctacagatcctgagggaggagggccaagagggcctgcacctggagatgcatgaggccttccgggagctggggcccattttcaggtacagcatgggaagaacacaggttgtgtatgtgatgttgccagaggttgccgagaaggtattccaggcagacagtacacagcccagccgcacgctcttggaaccttgggtagcccacagagaacaccgtggcctgagtcgtggagtgttcttgctaaatgggcctgaatggcgcttcaaccgactgaggatcaacccacacatgctgtccccaaaggccgttcagaagtttgtccccatggtggacatggtagcacgggacttcttggagttcctgaagaagaaggtgctggcgaatgcccatggaagcttgtcaatgaacttctattccagtatgttcaactataccatagaagccagccactttgttctttttggggagcggctgggcctccttggtgatgacctgaattnnnnnnnnnnnnnnnnnnnnnnnnccttgaattccataatgaagacgactccacagctcatgcttttgcctagtggtctgactcgctggataagcacccgggtgtggaaagagaactttgattcctgggatttcgtctctgagtacgtcacaaaaaatgtcaagaatgtgtatcaagaggtgcaaagtggtggcccacagtcctggagtgtcatatcacagctggtagcagagggtgctctgacaatggatgccattctggccaactctctggaactcactgctgggagtgtggacacgacatcagtgcccctggtcatgaccctctttgagctggctcggaacccagatgttcaacaggctgtgcggcaggagagcctggcagctgaggccagcgtggctgcaaatccccagagggctatgtcggatctgcccctgctgcgggctgtccttaaagagaccttgaggctctatcctgttgctgtctttttggagagaattctaagctcggacttggtgcttcagaactaccacgtccctgctgggacgatcctccacatgagtctctactccatgggccgaaaccctgcagtatttccgaggcccgagcactacttgccccagcgctggctggagaggaatgggagtttccagcacctgaccttcggctttggggtgcgccagtgcctggggaagcgcctggctcaggtggagatgctcctcctgctgcaccatgtgctgaaatccttcagggtggagacgcaggagcgagaggatgtgcggatggtgtaccgctttgttctggcgcccagctccagccccctgctcactttccggcctgtcagctagtcagtcagctttgcagctggggttccagtcaggccagcagctccctcctgtcctgatgacaagctgccctcatttctaccttgggccaccatgcctgtagccacagctaccttcttgtctaggctctggaggattactgcccctcctctgtcagtcccttcacccccagcctccacctcaactgtgatcattcaagtgagcccatatgctggctttgctttcctctctggtcccaaaaatccctgtcactctcttcctgaaccctctcttaaagtttcttcgtatggtttgcacattgtcgaatactaacccagcatcagcaaggacatctcatgtcaacagtgaaagcccaggattcactcatgacacattctcatgcctgaggagagacagaactggccaagtgtatgctgcacaccccagacgtcatgtggtgtggcggagtcaggggcgcagtggatgctccctggtcagcttccattccagacattgtgccgatcttgaggatgctgagagggctaagggctcaagaatggccaaacaaaacggaaacaaacaacacacataaaagcccaacaaaca

SEQ ID NO: 1062 - DNA, 2264 bp, Cricetulus griseus
  misc_feature (1323)..(1408): n is a, c, g, or t
ggtttaaaagtttgacgtgctcaccaggtgctactcagctgccagtgggtagagaaccgaggacaggtgcttctgtggggcttgactgtttacacagcacagccagagatggataactcctccatctgcaaccccaacgcgaccatctgcgaaggcgactcctgcatagcaccggagagcaacttcaacgccatcctcagcgtggtgatgagcaccgtgctcacaatcctcctagccttggtgatgttttccatggggtgcaatgtggaactccacaagtttctgggacacctaaggcggccatggggcatcgtcgtgggcttcctctgtcagtttggaatcatgcctctcacaggtttcgtcctgtccgtggcctttggcatcctcccagtgcaagctgtggtggtgctgatccagggttgctgccctggaggaactgcctccaatatcctagcctattgggtagatggcgacatggacctcagcgttagcatgaccacctgctccacgctgcttgcccttggaatgatgcccctttgcctcttcatctataccaagatgtgggttgactcagggacgattgtgattccttatgacagcattggcacttctctggttgctcttgttattcctgtttccattggaatgtatgtgaatcacaaatggccccaaaaagcaaagatcatacttaaaattggatccatcgcaggtgcaattctcattgttctcatcgctgtggttggaggaatactgtaccaaagtgcctggaccattgaacccaagctgtggattataggaaccatatatcctatagctggctacggcctggggtttttcctggctagaattgctggtcaaccctggtacaggtgccgaacagttgccttggaaaccgggttgcagaacactcagctgtgttccaccattgtgcagctttccttcagccctgaggacctcaaccttgtgttcaccttccccctcatctacagcatcttccagatcgcctttgcagcaatactattaggagcttatgtcgcatacaagaaatgtcatggaaaaaataatactgagctacaagagaaaacagacaatgaaatggagcccaggtcatcatttcaggagacaaacaaaggatttcaaccagatgagaagtaaaaactaaggggacagaaaagaaagcttactaacaacattcattaaactacaactatttcatttggtggaatgatcagcagaaaaaaatgtttaaaattcaattcgaaatttgttattgttttggtacaaagtgactagcaatccattctttattgtgacaaacatctnnnnnnnnnnnnnnnnnnnnnnnnnnnnnnnnnnnnnnnnnnnnnnnnnnnnnnnnnnnnnnnnnnnnnnnnnnnnnnnnnnnnnngagtgtgtacatatccacaggggactgactggtcacaggatatcccttgatactaaattcacagaagcatgagcttctttcataaaatggcaaaatgtttgcattcatctctcatatacttcagatcaatactaacttacttaaaatatttaacatgatgtaaatgctatgtaaatagtcattttactgtattgtttaggaaatgatgtttttttaagtctgtgatattttatgttcagtacagacatcatttttcctgaaatttttgacaaaagtgggacttatccatagagttcaaacttattcttgggaggaaaactgaatttacatagatagatatgatcaatcatcactaatatattatcagaaaatatctaaagacctaactgaatgtagatcagactggaaaccttgttatagtatgctgaattcagaaacaagcacttttatatgttaaaatataacagattattattataaaatgttgattttcttcagtatttatgattgtaaaaagatgtgaatgaatgtattcctttaatattttaatcatcagtttgagactctgcaacctatttatttgtgatgtttacactatactctgtcaagtgtctgtctttttactttagaaaagtggcttctttcagtgatattccaaaagcagaagtgagataaagattactaatgaattcaataacaaatcagaattgagttaaactcaccacggatattttacatccgttcacatacttctatggtccaccaatgaccactatatctttcaaggaaaagacctcattagaacagtttatatctggcaacttagtttgttgaactctagagatgtttactaaag

SEQ ID NO: 1063 - DNA, 2640 bp, Cricetulus griseus
  misc_feature (64)..(134): n is a, c, g, or t
  misc_feature (415)..(432): n is a, c, g, or t
gtgttgtagtgcgcgtggtgctcgagccagaccgctgctgctggctgaaccaggtggagtgtcnnnnnnnnnnnnnnnnnnnnnnnnnnnnnnnnnnnnnnnnnnnnnnnnnnnnnnnnnnnnnnnnnnnnnnncatgtgaggagcccaggcaggaccgcgaactcaagtcctggagatgcctagtattctatctctgcttcttcggcttcatggcacagttgcggcctggggagagcttcatcacaccctacctcctgcaacaaaacttcacaatcgagcaggtgaccaatgagatcattccggtgctgccctactcccacctggccgtgctggtgccaatctttctgctcacggactacctgcgatacaagccaatcctgatcctgcagtgcctgagcttcatgtgcgtctgnnnnnnnnnnnnnnnnnncacctctgtggtacacatgcagctcatggaagtcttctacagcgtcaccatggctgcgcgcatcgcctactcctcctacatcttctccctggtgcgcccttcccgctaccagcgcatggccagctactcaagggcagcagtgctcctgggagtcttcaccagctctgtgttgggccaggtgctgtggcccctggaacaaaaatcccagaactccaacatgctcaactacatttccctgggctttatcatcttcagcctgggcctctccctctttctaaagcgtcctaagcacagcctctttttcaaccgcagtgcacttgtgcacaaagccttgccctgcgagctggaccagatgcacccgggccctggccgaccagagcctgggaaactagagcgagtgctgggcagttgcaggaactccttcctggtgtgcatgctaagtgaactggtgggaaatttacgacaaccacacgtgcgcctctggtgcctttggtgggtcttcaactctgcaggctactacctgattgtctactatgtgcacgtcctgtggagtattgacaaaaacctcaactacaatggcgccgtagatgctgcctccacactgctgagcgccatcacatccttctctgcgggcttcgtgaagatccgctgggctctgtggtcaaagctggtcatcgcaagtgttatagccatccaggccggactggttttctgtatgtacatggtccactacgtgacctgggtccacaaaatctgggtactctacatgacctacgtgcttttccgcggggcctaccagttcctcgtgcccattgccacttttcagattgcatcttccctatctaaagagctctgtgccttggtcttcgggatcaatacattccttgccactgcgctcaagactgccatcacgcttgtggtctccgacaaacggggtctgggcctcaaagttgaaaaacagttttgcatctactccgtgtacttcatggtgctttctgtcatctgctttgtcggggccgtgctggatggcgtgaggtactgccggcgtggtcgccaccagcccctgcccctgccccaggagctgagtcccttggagaattctgtgcaggtgccaagtatgcaggatagaggcctagggggactgcagccctcagcaccacagctgctcccagaggatggcgtggaggacagcgaggcaagcttgagagctgaagccaaggcctgacagtcacatcttgaccttcctggcttcatcccagttcggggggagaggggggattcctgacttaagcaacctctcccatgtgcgctccatcctgaaccagcctggcctgatgcctcagataagactgtactgtcttgagtcccagggcccaagatgtggggcccctgtgttacctttcaggagccctcagaatgtccacaggtttcaccttaggagccacctgctttaactgagggatgatagatagtttgttctactgatagctctaggaccgtagacagctacatcatctttagctgtgcaaagctgctgggacactcagggcagctgacctgcttgtgatcacgtgcagggcgctgtgagcctggattgcctatgcgttgccaagaagagcccgtgttggggtcaactgtgcccaccaggccagcccgccttagccccaggaagctcaggacaaatcatgtctgtcctcagggctggtgaggtagcccagacaccagccaaggcacactggccctgcgggtgctggtccttctatgtggggtggatgcctctcctggcttctgactagttgtcatttccaccattggaggtacttgcttggatggctatctgatctttttttaaaaaaaaactaaaacaaaactgacattaaaatggacaactacatttggcttttctgttgtgaaaagctggagtcaggtgggcgccaggcacatttccgactgatagagtagcggtaggcccttttcgcctgcagacgccatccccgagcaagttagtactcacctgacacacattcaggcagcatgggtgtaccagccttgattggaaccaaggcccttctagaggggaatgcctcaggggcttgcactggggagccatgtgagagttaccagagtcagctgtgaggttaagactagctgtggtgtgagcactttttccaatactttataaacagactctgttaaaaaaaaaaaaaa

SEQ ID NO: 1064 - DNA, 1125 bp, Cricetulus griseus
agacgctgttttggggggtgtcttgagtcagttaggtctggacacagattttaataaagccgtgattgtgtggcacaactacgcctttgtaactgcaagcctccaagctctccgttaccctcccctcccctctcctctcggtcctcaccgggacagcccggaagaggtgcgagccggatcgactctatcggctctcttccttccacgcgctcctgcgccgtcctccacgatcctcaagcgatgcctcgggccccgcctccccccaagagcccgccctcccgccgccacgcgcaggcgcgcgtcttccgattggcggagtgacgggcaggctcggccaatagcgtcgcgaggaaggcggggctccaggcccaggcccctcccctcctccctcgttgaatattcaagaggcgggcgagcggacgccgcgggaagacgccatgaagtgagcggcgggggggctcgggggagcggctcgctctgcggggggcgatggggcggccgctgggcctcgctggggccggagaggctgccgaggccgggccgggtggctccggggtcccgggctgggggccgggcgagcgggcgagcgggcgggcgggcggagcgagagcaccgggcaccgacgcgtcgccttcgccgccaggctcaacgtggacgggctgctggtctatttcccgtacgactacatctacccggagcagttctcctacatgctggagctcaagcgcacgctggacgccaaggtgggtgccggggtcgccgacggctcgacggctcgacggctgcctgcgctcgccgccttgcacgccctccccgcctccctcaggctaacttcctggtctggtctggtcgggggaggggggggaacccgggcacgttggccccaggcctgcaatcgcagcagcaccctgggaagcgcaggctggagcatcgctgcaagtttggaggccagcctgggctacacagtgagaccctgtgtcagcaacagcggcacaaataagtagcagggctgggaatgtggctcacccggtagctagggtgcttgctagcatcatggatctgatgctccccctttcatcctcgccaccgcgtaaactgaacgtgacggtgtgtgtctgcaagctt

SEQ ID NO: 1065 - DNA, 13667 bp, Cricetulus griseus
  misc_feature (1550)..(1574): n is a, c, g, or t
  misc_feature (2054)..(2082): n is a, c, g, or t
  misc_feature (2119)..(2161): n is a, c, g, or t
  misc_feature (2298)..(2321): n is a, c, g, or t
  misc_feature (2935)..(2961): n is a, c, g, or t
  misc_feature (2967)..(2979): n is a, c, g, or t
  misc_feature (2982)..(3001): n is a, c, g, or t
  misc_feature (3009)..(3026): n is a, c, g, or t
  misc_feature (3028)..(3041): n is a, c, g, or t
  misc_feature (3066)..(3078): n is a, c, g, or t
  misc_feature (3080)..(3100): n is a, c, g, or t
  misc_feature (4385)..(4402): n is a, c, g, or t
  misc_feature (4412)..(4427): n is a, c, g, or t
  misc_feature (4429)..(4448): n is a, c, g, or t
  misc_feature (4511)..(4530): n is a, c, g, or t
  misc_feature (4732)..(4784): n is a, c, g, or t
  misc_feature (4823)..(4845): n is a, c, g, or t
  misc_feature (6447)..(6470): n is a, c, g, or t
  misc_feature (10723)..(10745): n is a, c, g, or t
  misc_feature (11408)..(11428): n is a, c, g, or t
  misc_feature (12161)..(12175): n is a, c, g, or t
  misc_feature (12946)..(12961): n is a, c, g, or t
aagcttggaggccagcctgggctacacagtgagaccctgtgtcagcaacagcggcacaaataagtagcagggctgcgaatgtggctcacccggtagctagggtgcttgctagcatcatggatctgaagctcccgctttcatcctcgcgtaaactgaatgtgacggtgtgtgtccgcaggtttggaggccagcctgggctacacagtgagaccctgtgtcagcaacagcggcacaaataagtaacagggctgggaatgtggctcaccaggtagctagggtgcttgcctagcctgctagcatcatggatctgaagctcccgctttcattctcgccaccgtgtaaactgaacgtgatggcgtgtgtctgtgggtttggaggccagcctgggctacacagtgagaccctgtgtcagcaaaagtaacagggctgggaatgtggctcactcagtagctagggtgcttgcctagcctgctagcatcatggatctaaagatcccgctttcatcctcgccaccacgtaaactgaaggtgacggtgtgtgtctgcgggtttggaggccagcctgggctacacagtgagaccctgtgtcggcaacagcggcacaaataagtaacagggctgggaatgtggctcaccaggtagctagggtgcttgcctagcctgctagcatcatggatctgaagctcccgctttcatcctcgccaccgtgtaaactgaacgtgatggcgtgtgtctgtgggtttggaggccagcctggcttttatagtgagttcctggccagctagggctgtgcatagggggactatttcccaaagtatctaaggtaacttgtggagggagagttgtagcccagttagtagaatgtttgcctagcatactcgaatccaaacattgaattaacccggtgtgacatgatgcctgcctgtaaacctagcgctggggaggctgaggcaggagaatgagtggggggatttgcagccagcctgggtgagctccaggcaagccagggctatatagtaagacctttaaaaaggtaagggagggccaggtgacttagtgggtgaggtgtttgctgcaccagtgtagagttggatcccaggagccgtgtagaagtggagggagaaaaggatctccacaaagttagatgtcctatgaccttgtcatccaaacatatgtcatgtacacacactccccagaatagtaatcacgggatttgataatagaatcaaggctgagtcttagggacataggtacttttttctgtcacccaggatctacacatgggcttctagctgtgcactgttgggcatgtcatttaagctcttgccacaatttccacccctgtaaatggtgttcatgcttctccagagagagagatgtactttggttggggcatgcaccaggccctggtttcatcttcgacacagtgtaagtctggtgattcacccctgtaatcccagccctcagaatgtgcaggcaggaggatcaaaattcattctctggtacaatagggtgttcggggccatgcatggtggaacatgcttttaattnnnnnnnnnnnnnnnnnnnnnnnnnaggagccctgtaacttggtctatagcctggtctacatatggaatttcaggacagcctgggctacatagacagaacctgttctgtagaaagaattgaaccagtgtgctgggcaaatacctacacctccagctacatcagagccctctctttacttttcactattcaacaggacctcactaacttgcccaggctcacgctgaatttaagaaccctcctgccttaggtccatgtcttgaagaagaggaagaaagaaagaatgtgttggtgatgataacaggaggggctggagaggtggcacggtggttgagaggacttgctgcccttccggaggatcccagtttgattcccagtgcccatgcctggcactgacaaccagcagtgacttcagctctagggggtccggcatcctctccctgcttctgcaggccctgtacacacagagtgtacacacatacacacacatataaattaatctttgtnnnnnnnnnnnnnnnnnnnnnnnnnnnnngttttatgagacagagtttctctgtattgctttggannnnnnnnnnnnnnnnnnnnnnnnnnnnnnnnnnnnnnnnnnnaaggtgtgcgccaccaatgccgggccctaaattaaagtttttaaagttggagctagtgcagccttcctaggttgtgaggactgtgccagttcacacagaaaaggcagcagtttccagctcagggtgattttgttgcnnnnnnnnnnnnnnnnnnnnnnnnctgggaattagaccaacatgctgggcagagtgtctgcacctggagctccatcccagccctgtttcctttctgtatgagacaggacataactaaattgcccaggctcactctgtagcccaggctgacactgatcttagcagttctcccgccttaggttccaggtgacagacagactttgacaggctgactggtgttgatactcagagtctatttggcctgtgtacggtcacagtagtggaaggggggggggttcaggatgtggaggacagaggacaactttgtggacttggttgtctcctacttttatgcgggtcctgggaatcaaattcaggttggtagacttgatggcaactgcctttacgtgctgagctgactcaacagccctgaacacaaactttctttaaaacaatttttaaaaattgtatttatttatttagagtgtgggtgtccatgctctggtgtgcatgaggaggtcagtggacaacttctgggaggcagtttggttcttccttcagtgtaggtgccggggattgaactcagtgatcagctgggccccaggtacctttacctgctgagtcatctcactggcccacaagtctattgatactcttaannnnnnnnnnnnnnnnnnnnnnnnnnnctttcnnnnnnnnnnnnncannnnnnnnnnnnnnnnnnnnacagcccnnnnnnnnnnnnnnnnnncnnnnnnnnnnnnnntggcctcaagctcacaaagagcctnnnnnnnnnnnnngnnnnnnnnnnnnnnnnnnnnngtgcgccaccaacgcctggcagtcctcacaatcttgttccaagtaagggctgtggagccaaggagtcaagcaaggatgctgtgacccaggtgtgatccagagaggtcaacgaaatagggctcagcctgcaaccccagtactcaggaggtagaggcaggagcatcaccaagtgtacaaagccagccagaggtgcatagcaagtactagactagccaaggctacagagcacgatccttgggatgaaaattaaggatgaaaaataaaaactccagcaaaaaagaagcagagatgaagccccttgttccctgggccttgatggcagttcaccgttgtgtgtgtcatgttcctaggtaatggtgtcctctagggtccccagagtttatgaccccgaggttctgagagcccgtgttttgtctcttctgtgcccaactttcagggtcatggagtcctggagatgccctcaggcaccgggaagacagtgtccctgctggccctgatagtggcctaccagagggtgagtgaccatcatgggtgtctggactggggggcggggaggggctggatggggctgagctgattgtcacccacaggcttttccgctggaggtgaccaaacttatctactgctctcggactgtgccagagattgagaaggtgggcagtgaggatggacccagtggtctgtcccctcccctcggcctcagtggtccccagttgctgccctcactggcctggtgggcaggggcttatgctggtcctgaggtccccacgcaatgctcccatcgtctaagcaggtcatagaagagcttcgcaagctgctcagcttctatgagcagcaggagggcgagaagctgccgttcttgggactagctctgagctcaagaaagaacctgtgcattcatcccgaggtgagacccgggcctcgccctcagccttgggctacccattgcaagccccagagacagcccgtggccatgtgaggtgaccaccagtgtaactcccttttcagttagatcttgagtcatcagtcagagcgcaggttagctcctgctcctagaacagaaactgctggagtgccagggtgacgcctcagaatttctcatttgacctcatgggataagtcaaagtctaaacggtagagcacatttgaagtgttaggatttttatatacatgaaacataagtgaatttcatggcagcctcctgtcctatctgacgatatctattatatgtatgtaggtattccagaaccccaaaacacagttgagccaagggctactcagtgannnnnnnnnnnnnnnnnngtagccctannnnnnnnnnnnnnnncnnnnnnnnnnnnnnnnnnnntaaactaacagatcctcctgagtgctgggttcaaaaacatgtgacactaactgtcggcttgannnnnnnnnnnnnnnnnnnngatttatttatctaatgtgagttctctatctgcatgtacacccttattccagaagaggccatcagatcccattatagatggttgtggttggtaagaactgaactcaagacctctggaacagcagccagtgctcttaacctctgagccatttctctagccctgtctagcttgttttttaaaagagaaacttagagccgggcgnnnnnnnnnnnnnnnnnnnnnnnnnnnnnnnnnnnnnnnnnnnnnnnnnnnnngagtgtggtctacagatcgagtgccaataggctctgaannnnnnnnnnnnnnnnnnnnnnncaaaaaacaacaaaaaataaaagagagagagagagggagaaacttaggtttttattttttaaacacttataaacacttctatgttgtttttttaagattaatttatgtgttatgtaaacagtgttctgcctgcgtatctccctgcacacgttttattgtgaggtagggccttggtgtttgcccgggctggcctgagttggtgcattcctcctgctccagctgtcttagtaactgggattcaggtctgtgctgccgtgcccagctctggggacggttctgatgtcccactctgacatccctgcagcaagtccttttaactaatagtggctcaggtgaaggttctggctgcccagaaaccccagctgacctgctacttgtgatgtcccgagttgggaaacccaggttggcatagctggcacgcactacctcctgtctctgttgtaacttgtcccctgaacccccaggtgacaccactgcgctttgggaaggacgtggacggcaagtgtcacagcctcacagcctcatatgtgcgggcccagtaccagcaggatgccagcctgcctcactgccgcttctatgaggtgcagggaagggcccgggccggggagggcagagacactctggacagcagctctccctgacccttccatcttctggcccgggccggggagggcagacaccctcaggacagcagctctccctgacccttccatcttctggcccgggccggggagggcagacaccctctggacagcagctctccctgaccctgccatcttctggcccaggccggggagggcagagacactctggacagcagctctccctgacccttccatcttctggcccgggccggggagggcagacaccctcaggacagcagctctccctgacccttccatcttctggcctgggccggggagggcagacaccctctggacagcagctctccctgaccctgccatcttctggcccaggccggggagggcagagacactctggacagcagctctccctgacactgccatcttctgcctccccaggagtttgatgcccacggacgccaggtgcccctcccggcaggcatctacaacctggatgacctgaaggccctggggcagcggcagggctggtgcccctacttcctggctcgatactcggtgaagagttgttttgttttcttctggggcagggtctcacttataacccaggctggcctcaaacttagaagaaccttacgcaggttcccagctatgggggttataggcatgagccacttttgcccacccctccgttagcccatctgtctgcttgcatctttgttgacctggtacctaggtcttcctgtctccagcctctgtttatgccttgcctgggtggtcccatctgtcttttccatccacctgctgtctgtcttggtgttacgtctgtacacctgggaaggagtggtatggcgggggcagcagggcccaaggcaaaaacttatccctccatgttcctagatcctgcatgccaacgtggtggtttacagctaccactatctcctggaccccaagatcgcagacctggtgtccaaagagctggcccgcaaggccgtcgtgnnnnnnnnnnnnnnnnnnnnnnnnggtgaggagggtgccagggtgtgcagacagcggcggcctctctgccccgcctccaagccggctgagcccatgtctgtctgctttcctcctagacaatgtctgcatcgactccatgagtgtaaacctcacccgcaggactctggaccgctgccagagcaacttggacaccttgcagaagacggtgctcaggtgcccactctgctccctgtgtgccgcctgcctctgtggccctggacacctgccccattccagctctgtcccatgtccccgccaggatcaaggagacagacgagcagcggctgcgggacgagtaccggcgcctggtggaggggctgcgggaggccagcgcggcgcgggagacagacgcgcacctggcgaaccctgtgctgccggacgaggtgctgcagggtgagccgtgccccaccccccaccctcacacgccttccttcccttgccagctgactcagtctccctgcagaggccgtgccaggctccatccgcactgccgagcacttcctgggcttcctgcggcggctgctggagtacgtcaagtggcggctgcgcgtgcagcatgtggtacaggagagccctcctgccttcctgagcggcctggctcagcgcgtgtgcatccaacgcaagcccctcaggtgcgcgtgctgccatggggacctcaggtccagacctgtggctggtgacggggtcaggggtcaggtcagagtcggatgtggagcgagccgtgtcactgtgaggtcagctcttggctgtgaccgctgcaggactacctggtacttctgcagccctatgcgtgtgcatgtgcgagcctgggaaagtgtgtggctgttctttctgagcgtggggcccacgacactggctgcacagcacagtgactgatggccatgggtcttgtttgacaagaatttgcatacaagcggcaaacctgggcgccgtgtgctagtgctgtgcggtagctctggatgcttgcagtgtggggacagcttggccacagacgatgcccaggtaaacaggtggcgagagtcccagccgttgctgcttccctccctctcccgaccccatggcttctcaggttctgtgctgagcgcctgcgctccctcctgcacaccttggagattgctgacctggctgacttctccccgctcacactccttgctaacttcgccactctcgtcagcacttacgccaagggtaagctcccctcttgctcctcctggcagcggacttgggggcctagccaagtcgggtggggtattagcaggaagtctgggcatgtgagaccggggatttgagctactatgagggccctggggaacaagcgagtgagcgagcctcgtgttcagattcgtgtgtctagaggctcctcctggctgcagggggagaactcgagtgagctgtgatactgagcagagggatgctgtgcggtcagcccacctttggccggggggagaagtcctcatgtgtgcctgagggcaccgggagccatggcagggtctgggcaagggatgtacttggtgaggttgttgttttcaaggttcatccaacagagagggggagccatagactgtgggtacaggaaaagggagccttggggagagctatgggagaaagcggccaggtgtaaaagcccttgagggagagggatgcaggtgatgcacagggagaggggacaagctacagcttttgttgcccccgcccgccccagctttgcactgagtttttaagcttatccctggggattagtaccgtagccaggaaaccaggtcagctggcgtcctgcagctggcccagcctcggaagaaggggctgctggcagctgtctgcttccttctgccctcacccagccccttctcctggccttcattgttctccctccggcccccacctactgatgcatccatcacagtcttacagaaagcctccttccctgtgccccatcacctgcccgagtcaagtcctttacctctcagaaagtcacccccactccattccatcctgggcctgcccctccctctgtcccagctgggtctctggctagctgtctcccccgtgcaaggagagcccttttgggtaggaccgagattctgttggtttctgctgggtcctcagcatgatgctggacacaagacctggtctttccttgccaagtgaaacagaatctgtgaatgtaatcatttgttcagtcaacagatgggccaggctgggccccgtggagacagcgggatctaacacagccaggctgggcccggagtctaacacacacagccaggctgggcccagcacagccttagttgcccccctcatcctcctgtccatatccctaccctcatctgggagccacagcctgggggctaggagcaaagatcactccagaaggggacactagaaagtgtggctgtgctgtgaggagcaggagtcctggctcccagggtgcctgtggaacaaggacccaaccaaccaagtgggccctgggacatgacgctgataccgtagctgggagcaagggctggccctgcagagttcatgggcacacttctgggtatggcaggagtgtggagacaccagccaacttaaggttccatagcgtctccccgactgcagtgtggggagcagggggggacaggtgggagtgaggccggcctgggggagggcgggcctggcctccctgcggggccgtgcagtgaagccctggctcaccctgcttccacacctgagcgtttgtacagtcctgtcctgcgctagccatggcaggggcaggggcaggcgggggctgtcgtgcacactcaccggcctcctcctccccaggcttcaccattatcatcgagccctttgatgacaggaccccgaccattgccaaccccatcctgcacttcaggtgagatgcaagcctgtgtggacaggatggcttcgcccccggcctctgccctgggtgacgactgtgttatcccacagttgtatggacgcctccttggccatcaagcctgtgtttgagcgcttccagtctgtcatcatcacctctggggtgaggactctgtgctgttgttccatgggggccctggtccctgccccagtctgctgaggtcctccttgctgtctcttgcagacactgtccccactggacatctaccccaagatcctggacttccaccccgtcaccatggcaaccttcaccatgacactggcccgagtctgcctctgcccaatggtgagtgggtgagacccatgggagcaccaagccaccaaatggtgcctggaagggtctcttcccagcaacctggaccatagtgctcagggagcaggcctggtgctttatcaccgtataggtcagggtgagtgtgccatttgtcatccagctgtgacttggataatgagcctgcctctgttttggagtttagagtgtggccggctgttagacatattcaccccacagtccatgggccacatgaagccagctgtggctggggatgctgtttggcacatcagaaacactttaaaccttacgcaaggtttgtagcctgcttgcatgcttgtggagcacgagctgtgtacagcctgtctgcaggcctgctctcggcagcaggggttagttagacggttgttttcagagctgtgggctttttggaatgttccctctgaccattcactggcatggtggactggggagggaggctaatggggtgtgtgttttgggtgacctgtgttctgaaactacctaaggctggagtgtagccttgcctagaagcagaggtccctgccctgggacctgttgcagggcattggcccaagcagttgcagccataggcttagggccactgtctatgtctacatgacgctttcctgagctcgggccttatttggtacagtgctcgcctaatacatggaagtgcctgtgctagctagctgtggtaatgcaggcctgtgatcttgggaagtgggcaggaggaccaggagttcatggaacttcagaggttggggaaacagcttctcatgggtttgggagggtaggtagcctcagtgaggctcgcgtctaaaggccagcctgggctacatgagacactaagtcaaaaaaggggacatttgtcaggtgtatcacagaaccttcactctgtttcagatcattggccgtggtaatgaccaggtggccatcagctccaaatttgagaccagggaagatattggtgagtcacctgtgtgggcttggttggggtgggttacaggtggacaaggacttgctaccatannnnnnnnnnnnnnnnnnnnnnnccagcctctgtggcggacacaggcccactgtgggttgagcccaccctgggtctcttcactttggaagctgtgccaccaggcaccactgagccgtagcaccagcagagggcctttggaacagtgggcactggcttctgagtgtcatctagaagagacaccgccacctctatgtatttcttgtgctgtggcatgtctctgggtggcttgggaggaaggaactggataactagcctcagtgagcagcaggagaggatccagtctccaatcccctctccctagctgtaatccgcaactacggcaacctcctgctggagatgtctgctgtggtccccgacggcattgtggccttctttaccagctaccaatacatggaaagcaccgtggcctcctggtatgagcaggtatgcctagtccccaccgcccaaaccctcagctctgctcttcctgtgggggcttcactccccatgtttccaccatgacacatgtcacaggacaggatggtggtgctaacagaccctgcaggctcatcagtgtttcccttgaccagagaggaccaccattggggttactgcagactacatccccagcaagcaggcctggtgccagggggacggtgttgtgagcttaaggttccactctaggagctcttgtgtgtgggtgagnnnnnnnnnnnnnnnnnnnnncaattaaaggcgtgcgccgccgccacccggccaggaccctgtatcttgtcctagtggacagcctgacttttgtctcagtcattacagtgacagatttgaactctcgggataacccctgggtgtggtccttgcctggattacggtcaggccctccacctccactggccactttaggccccgtgcccaccttcttgggtggggatcagctccccactttggactgccaaagaggttggactgctgagggcccagagaaggatctccacggaaggccacagcagcggggctggaaacaggagcacgtggtcctgtgccctgacctccctgtccccccagggcatccttgagaacatccagaggaacaagctgctcttcattgagacccaggacggggcagagaccagtgtggccctggagaagtaccaagaggtgggtgcctgggacaggcaggcagagcagtgccagctgccaacaggggaacgggaaggggctgaggagtgactgcctccacctccctaggcgtgtgaaaacggccggggggccattctgctctcggtggctcggggcaaagtctcagaagggattgactttggtgagtggacctggctggctcttggcccagtggcctgcccaccctcccgtggctgctcccctggggaccactgggcatgcagagggatcctttccacgtgccccctaataccagccgagaatgcactgtaaccctgctgtnnnnnnnnnnnnnnnccactatgggcgggctgtgatcatgttcggtgtcccctacgtctacactcagagccgaatcctcaaggtgagtggggaagctgtggtgtctggagaggggcgttgtgtttgggaaggaagggcaggagccctaccttagactcctccctcattccccaggcccgcctagagtacctgcgggaccagttccagatccgcgagaatgacttcctcacctttgatgccatgcgccacgcagcccagtgtgtgggtcgtgccatcaggggcaagacagactatggtctcatggtctttgccgacaaggtgaggcctgtgggcaccccagcctaacctatcccccttcctcacaggggacagggtggtgggcagcctgggttccaacctggggtttgctgtcctccctcgccacagcgctttgctcgggctgacaaacgtgggaaactgcctcgatggatccaggagcacctgactgactctaacctcaacctgaccgtggacgagggtgtgcaggtcgccaagtacttcctgcggcagatggctcaacccttccaccgggtaagcccttagcccctccctcccagtgtgcacacttcccctagtccccacagggtccccatgtccaggaagtgagggacactgatgagagacctagcgcccttttcccagtttggccacgcattgcagtcatgttgacgtgtgccatttgacgcctgtcctttacctctgcgccttccaggaagatcagctgggcctgtcactgctcagtctagnnnnnnnnnnnnnnnnggagacgctacggcgggttgagcagatcgcacagcagctctgaccaggactgtgggtgacgtctgtggcaccaggaggtactgaaaggtcccaggaccctcaggcaatctcccagtcccagagtacagtctttaattgcagggaggacagcaggatcccgatccacaggtgccacccacccttcccagttcctgagcggctgtggccactgcagccagtccacttatcgagggctcaagtcctgggtgctggcgctcatggtccgcaaggcctcactcaatttccgggttgagaactgggggcaggtacaggaacggtcagagttcttttccagttgacactgggatcgtgtcgtgcctctgccctccacccccgactggaccccatcatgagtgccggggaggaagccccacctttcctgtcgagcctgtcagcagcaccctactccaccaccggcccctcacctgcggcctggcagccctcgggccttccacattcagcatgttgagtgacacggctctcttcatccttcagaggccgagaggacagagtgagtcaggaaggcctgcagggccctggctctgaccagtgtcgcagacgggctgctgagctcacccagcactcaccctgcagcgcccgccatgctctcccctcggaggcgcgagaccagcttctcactcccccgccggatggactctcgaagctt

SEQ ID NO: 1066 - DNA, 1925 bp, Cricetulus griseus
gcaagatggcggccgctgaggaaggttgcgatgctggggtcgaagcggaccgggaactggaggagcttctggaaagtgctcttgatgatttcgataaagccaaaccctccccagcaccccctcctaccacctcggcccccgatgcttcaggaccccagaagaaatcgccaggagacactgccaaagatgccctcttcgcctcccaagagaagtttttccaggaactgttcgatagtgagttggcttcccaagccactgcagagtttgagaaggcaatgaaggagctggctgaagaagagccccacctggtggaacagttccagaagctctcagaggcagctgggagagtgggcagtgatgcaaactctcaacaagaatttacttcttgcctaaaggagacattaagtgggctagccaaaaatgccactgaccttcagaactcaggcatgtctgaagaggaactgaccaaagccatggaagggctgggcatggatgacggggacggggatgggaacatcctccccatcatgcagagcatcatgcagaacctcctgtctaaggatgtactgtacccgtccctgaaggagatcacggaaaagtatccagagtggctgcagagtcaccaggagtctatccctccagaacagtttgagaagtaccaggagcagcacagcgtcatgggcaaaatatgtgagcagtttgaggcagagacgcccacagacagcgaggctactcacagggctcgttttgaggcggtgctagatctcatgcagcagttacaggacttggggcatcctccaaaagagctggccggggagatgcctcctggcctcaactttgacctggataccctcaatctatcgggcccaccaggtgccaatggcgagcagtgtctgatcatgtgaaacacaacacgttttcctccctgagtcccagacctggggaacatctggagtcagcagaactattgggaactgaggcaggaatgtcgtctctgggagctggctgccccacactctccatcccattcaagactgtgccctgccagctgcggatctgctgaatctgctctgtaggccatttctgtgagccttactccatcatgtgttctgctgttagaaacaggccagctcattgccccgtaaaggaagacatcacttcttcccactcccaaaaataatggtctatatggctgtactcatgttcccctttattcccagggacttcgtgccttgtttctactccctctcttggatctggggagcaggagctgagtcctaagactttgtgtttgtttctattaggcagggcttctgggaatgaggagaaaatgtagcttaccctggggctgtaggtttgtcaccacatctccttgccttcatttcgagctctctgaagggaaaggaatttgcacttaacctgtggtcaggttggaagagaagccctgggcttttcctgtccctaggtgctgcccacttaattcccctttcttcctgagaactcaagttgctacctaccttggttctttcaacagctctggtttgggtgaacccagctcttgaccttccttggccccttgactgtcctcttacctcctctcgttttagattcttattttactccagcccctctgaaccactgtgactgatgaaggccaatcttgttccctttcatctactcctgtgtcattctcttcccttcccttccctagacccttcccttccctggccaacacgtaattgtagtgtcagagctggtaaatgagtggccatgctacccagatacattctggcttacttgagacatcagattccctagaatccttggttcaggaagatgcttgggaatggggtgcagcctgagtcttttttcctgcaagccccaggggacagtatctaataaatactctgagcgcaaaaaaaaaa

SEQ ID NO: 1067 - DNA, 1366 bp, Cricetulus griseus
cgggggatggatcatctgcagggcctcggttaaaagtgagaaaagccggtcctcccttctccatttggattacaagctcaaagggactgcttataacctggaggaatgatctccgtgctcccggggggagcactgcccacagtacgtgcatagagaggctttgagaggaattaagatctcaggcccatggcgacttgccctgtcctgcagaaggagacgctattccagacaggagactatgcttacagaatccctgctctgatctacctgtcaaagcagaagaccctgctggcctttgcggaaaagcgtctgaccaagacggatgagcatgcagatttgtttgtcctacgaagaggaagctacaatgcagacacccatcaggtccagtggcaagctgaggaggtggtgacccaagcctacctggagggccaccgctccatgagcccatgtcctttgtatgacaagcagacaaggacccttttccttttcttcatcgctgtccgtgggcaaatatcagaacaccaccagctccagactggggttaatgtcacacggctatgccacatcaccagtactgaccatgggaagacctggagcgctgtccaggaccttacagataccaccattggcagcacccatcaggattgggccacatttggcgtgggtcctgggcactgtctgcagctgcgaaacacagctgggagcctgctggtccctgcttatgcctatcggaaacaaccccctatccatgcacctgccccctctgccttctgcttcctcagccatgaccatgggagcacatgggagctgggccactttgtgtcccagaactcgctggagtgccaggtggctgaggttggcactggcgctgagagggtggtctatctcaatgctaggagctgcctgggagccagggtccaggcacaaagtcctaacagtggcctggatttccaggacaaccaggtagtgagtaaacttgtagagcctcccaaaggctgccatggaagtgtgattgctttccccaaccccacctcaaaggcagatgccttagatgtgtggctgctctatacccaccctacagactcccggaagaggaccaacctgggtgtgtacctcaatcagaagccactggaccccaccacctggtcagctcccaccctgttggcaacaggcatctgtgcctactcggacttgcagaacatggggcacggccctgatggctccccgcaatttgggtgtctgtatgagtcaaataactatgaagagattgttttcctcatgttcaccctgaagcaagctttcccagcagtgtttggtgcccagtgatcttgctgcatgcggcccaaagtgcttcaaaacccccccg

SEQ ID NO: 1068 - DNA, 3816 bp, Cricetulus griseus
  misc_feature (2059)..(2103): n is a, c, g, or t
  misc_feature (3658)..(3673): n is a, c, g, or t
ctcctgcgaagcctggcgggcgccgccgccatggacgagctgcctttcggtgaggcggctgtggaacaggcgctggacgagctgggcgaactggacgccgcactgctgaccgacatccaagacatgcttcagctcatcaacaaccaagacagtgacttccctggcctgtttgattccccctatgcagggggcggggcaggagacacagagcccaccagccctggtgccaactctcctgagagcttgtcttctcctgcttccctgggttcctctctggaagccttcctgggggaacccaaggcaacacctgcatccttgtcccctgtgccgtctgcatccactgctttaaagatgtacccgtctgtgccccccttctcccctgggcctggaatcaaagaagagccagtgccactcaccatcctgcagcccccagcagcacagccatcaccagggaccctcctgcctccgagtttccctccaccacccctgcagctcagcccggctcctgtgctggggtattctagccttccttcaggcttctcagggacccttcctggaaatacccaacagccaccatctagcctgtcactggcctctgcaccaggagtctcgcccatctctttacacacccaggtccagagctcagcctcccagcagccactgccagcctcaacagcccctagaacaaccactgtgacctcacagatccagcgggtcccagtcgtactgcagccacatttcatcaaggcagattcactgctactgacaactgtaaaaacagatacaggagccacgatgaagacggctggcatcagtaccttagcccctggcacagccgtgcaggcaggccccttgcagaccctggtgagtggtgggaccatcctggccacagtaccattggttgtggatacagacaaactgcccatccatcgactggcagctggcagcaaggccctgggctcagctcagagccgtggtgagaagcgcacagcccacaatgccattgagaagcgctaccgttcctctatcaatgacaagattgtggagctcaaagacctggtggtgggcactgaggcaaagctgaataaatctgccgtcttgcgcaaggccatcgactatatccgcttcttacagcacagcaaccagaagctcaagcaggagaacctggccctgcgaaatgccgctcacaaaagcaaatccctgaaggacctggtgtcggcctgtggcagtgcaggaggcacagatgtggctatggagggtgtgaagcctgaggtggtggatacgctgacccctccaccctcagacgctggctcgccctcccagagtagccccttgtccctcggcagcagaggtagcagcagtggtggcagtgactcggagcctgacagcccagtctttgaggatagccaggtgaaagcccaacggctgcacagtcatggcatgctggaccgctcccgcctagccctgtgtgcgctggtcttcctgtgtctgacctgcaaccccttggcatcactgtttggctggggcatccccggtccctccagtgcctctggtgcacaccacagctctgggcgtagcatgctggaggccgagagcagagatggctctaattggacccagtggttgctgccacccctagtctggctggccaatggactactagtgttggcctgcctggctcttctctttgtctatggggaacctgtgacccggccacacactagcccagctgtacacttctggagacatcgcaaacaggctgacctggacttggctcggggagattttgcccaggctgctcagcagctgtggctggccctgcaggcattgggacggcccctgcccacctcgaacctagacttggcctgcagcctgctttggaacctcatccgccacctgctgcagcgtctctgggttggccgctggctggcaggccgggctgggggcttgcggagagactgtggactgagaatggatgcacgtgccagtgctcgagatgcggctctcgtctaccataagctgcaccagctgcatgccatgggcaaatacacaggagggnnnnnnnnnnnnnnnnnnnnnnnnnnnnnnnnnnnnnnnnnnnnngagtgcgcaggagatgctgtatccatggcaacgctggcagagatctatgtggctgctgccctgagggtcaagaccagtctcccaagagccttgcactttttgacacgtttcttcctgagtagtgcccgccaggcctgcctggcacagagtggctcagtgcctcttgccatgcagtggctctgccaccctgtaggccaccgtttcttcgtggatggggactgggctgtgcatggtgccccacaggagagcctgtacagcgtggctgggaacccagtggatcccctcgcccaggtgactcgactattctgcgaacatctcttggagagagcactgaactgtattgctcaacccagcccggggacagctgatggagacagggagttctctgacgcacttggatacctgcagttgctaaatcgctgctctgatgctgtcgggactcctgcctgcagcttctctgtcagctccagcatggcttccaccaccggcacagacccagtggccaagtggtgggcctcactgacggctgtggtgatccactggctgcggcgggatgaagaggcagctgagcgcctatacccgctggtagagcgtatgccccacgtgctgcaggagactgagagacccctgcccaaggcagctctgtactccttcaaggctgcccgggctctgctggaccacagaaaagtggagtctggcccagccagcctggccatctgtgagaaggccagcgggtacttgcgggacagcttagccgctccaccaactggcagctccattgacaaggccatgcagctgctcctgtgtgatctacttcttgtggcccgcactagtatgtggcagcgccagcagtcaccagcctcagcccaggtagctcacagtgccagcaatggatctcaggcctccgctttggagcttcgaggtttccaacaggacctgagcagcctgaggcgcttggcacagaacttccggcctgctatgaggagagtgttcctacacgaggccacagctcggctgatggcaggggcaagtcctgcccggacacaccagctcctggaccgaagtctgcggaggcgggccggctccagtggcaaaggaggcactgtagctgagctggagcctcgacccacatggcgggagcacacagaggccttgctgctggcctcctgctatctgccacctgccttcctgtcggcccctggacagcaaatgagcatgttggctgaggcagcacgcactgtagagaagcttggtgatcatcggctactgcttgactgccagcagatgcttctgcgcctgggcggtgggaccactgtcacttccagctaaaccttggatggtctccccagtattagaggcccttaaggacctttgtcactggctgtggtcgtccagagagggtgagcctgacaagcaatcaggatcatgccgacctctagtgacaaatctagaaattgcagaggctgcactggcccaatgccaccctcttgctctgtaggcacctttttcctgtcctatggaaaggaacctttcccctagctgagggccaccctgnnnnnnnnnnnnnnnncactcctggaagacttgtatatagtgtagatccagctgagccagtttcctgtgcaggctcatgtactactttaacttttgcaaactttattttcataggttgagaaattttgtacagaaaattaaaaagtgaaattatttata

SEQ ID NO: 1069 - DNA, 9603 bp, Cricetulus griseus
  misc_feature (598)..(2723): n is a, c, g, or t
  misc_feature (3301)..(3353): n is a, c, g, or t
  misc_feature (3791)..(3889): n is a, c, g, or t
  misc_feature (4504)..(4612): n is a, c, g, or t
  misc_feature (4665)..(4698): n is a, c, g, or t
  misc_feature (5185)..(5217): n is a, c, g, or t
  misc_feature (5246)..(5293): n is a, c, g, or t
  misc_feature (5314)..(5351): n is a, c, g, or t
  misc_feature (5618)..(5648): n is a, c, g, or t
  misc_feature (5699)..(6078): n is a, c, g, or t
  misc_feature (6145)..(6295): n is a, c, g, or t
  misc_feature (7036)..(7101): n is a, c, g, or t
  misc_feature (7322)..(7444): n is a, c, g, or t
  misc_feature (7935)..(8343): n is a, c, g, or t
  misc_feature (8803)..(8825): n is a, c, g, or t
  misc_feature (8919)..(8944): n is a, c, g, or t
  misc_feature (9236)..(9277): n is a, c, g, or t
gtcgactcgatctactttaaactgatggattctgcgagagagacattggttgtcttcagccacatataccaatggtgaacctaccagactccagtggatagttacaaatctacagccacacagaagctcctggttaaaattagttggttgtagtagatcagtacttatccctagcataggaatggacttttcaagccccattccacatagaggggatactccctgagcctagctagacacacagggttgggcctaggcctatcgaaaggatatgacagactctgaagaccccctatgtaaggccttcacccttcccttggggagccagaaaggatatgggatagtgaaagacccccacccctgggctgtagcctttctactctggtcggcagctggcggggcgcgcgaatacatctttccctccttagcacttccctccttagcaccttttgatctctgcagctgctggctctcactccccgccccacgcaaggccaacccccgccggatcgctcggtcccaaggccagccatctggaccggcaggagataaggccatttcgcctggctattaaaccttgagaaaatgctgatttgannnnnnnnnnnnnnnnnnnnnnnnnnnnnnnnnnnnnnnnnnnnnnnnnnnnnnnnnnnnnnnnnnnnnnnnnnnnnnnnnnnnnnnnnnnnnnnnnnnnnnnnnnnnnnnnnnnnnnnnnnnnnnnnnnnnnnnnnnnnnnnnnnnnnnnnnnnnnnnnnnnnnnnnnnnnnnnnnnnnnnnnnnnnnnnnnnnnnnnnnnnnnnnnnnnnnnnnnnnnnnnnnnnnnnnnnnnnnnnnnnnnnnnnnnnnnnnnnnnnnnnnnnnnnnnnnnnnnnnnnnnnnnnnnnnnnnnnnnnnnnnnnnnnnnnnnnnnnnnnnnnnnnnnnnnnnnnnnnnnnnnnnnnnnnnnnnnnnnnnnnnnnnnnnnnnnnnnnnnnnnnnnnnnnnnnnnnnnnnnnnnnnnnnnnnnnnnnnnnnnnnnnnnnnnnnnnnnnnnnnnnnnnnnnnnnnnnnnnnnnnnnnnnnnnnnnnnnnnnnnnnnnnnnnnnnnnnnnnnnnnnnnnnnnnnnnnnnnnnnnnnnnnnnnnnnnnnnnnnnnnnnnnnnnnnnnnnnnnnnnnnnnnnnnnnnnnnnnnnnnnnnnnnnnnnnnnnnnnnnnnnnnnnnnnnnnnnnnnnnnnnnnnnnnnnnnnnnnnnnnnnnnnnnnnnnnnnnnnnnnnnnnnnnnnnnnnnnnnnnnnnnnnnnnnnnnnnnnnnnnnnnnnnnnnnnnnnnnnnnnnnnnnnnnnnnnnnnnnnnnnnnnnnnnnnnnnnnnnnnnnnnnnnnnnnnnnnnnnnnnnnnnnnnnnnnnnnnnnnnnnnnnnnnnnnnnnnnnnnnnnnnnnnnnnnnnnnnnnnnnnnnnnnnnnnnnnnnnnnnnnnnnnnnnnnnnnnnnnnnnnnnnnnnnnnnnnnnnnnnnnnnnnnnnnnnnnnnnnnnnnnnnnnnnnnnnnnnnnnnnnnnnnnnnnnnnnnnnnnnnnnnnnnnnnnnnnnnnnnnnnnnnnnnnnnnnnnnnnnnnnnnnnnnnnnnnnnnnnnnnnnnnnnnnnnnnnnnnnnnnnnnnnnnnnnnnnnnnnnnnnnnnnnnnnnnnnnnnnnnnnnnnnnnnnnnnnnnnnnnnnnnnnnnnnnnnnnnnnnnnnnnnnnnnnnnnnnnnnnnnnnnnnnnnnnnnnnnnnnnnnnnnnnnnnnnnnnnnnnnnnnnnnnnnnnnnnnnnnnnnnnnnnnnnnnnnnnnnnnnnnnnnnnnnnnnnnnnnnnnnnnnnnnnnnnnnnnnnnnnnnnnnnnnnnnnnnnnnnnnnnnnnnnnnnnnnnnnnnnnnnnnnnnnnnnnnnnnnnnnnnnnnnnnnnnnnnnnnnnnnnnnnnnnnnnnnnnnnnnnnnnnnnnnnnnnnnnnnnnnnnnnnnnnnnnnnnnnnnnnnnnnnnnnnnnnnnnnnnnnnnnnnnnnnnnnnnnnnnnnnnnnnnnnnnnnnnnnnnnnnnnnnnnnnnnnnnnnnnnnnnnnnnnnnnnnnnnnnnnnnnnnnnnnnnnnnnnnnnnnnnnnnnnnnnnnnnnnnnnnnnnnnnnnnnnnnnnnnnnnnnnnnnnnnnnnnnnnnnnnnnnnnnnnnnnnnnnnnnnnnnnnnnnnnnnnnnnnnnnnnnnnnnnnnnnnnnnnnnnnnnnnnnnnnnnnnnnnnnnnnnnnnnnnnnnnnnnnnnnnnnnnnnnnnnnnnnnnnnnnnnnnnnnnnnnnnnnnnnnnnnnnnnnnnnnnnnnnnnnnnnnnnnnnnnnnnnnnnnnnnnnnnnnnnnnnnnnnnnnnnnnnnnnnnnnnnnnnnnnnnnnnnnnnnnnnnnnnnnnnnnnnnnnnnnnnnnnnnnnnnnnnnnnnnnnnnnnnnnnnnnnnnnnnnnnnnnnnnnnnnnnnnnnnnnnnnnnnnnnnnnnnnnnnnnnnnnnnnnnnnnnnnnnnnnnnnnnnnnnnnnnnnnnnnnnnnnnnnnnnnnnnnnnnnnnnnnnnnnnnnnnnnnnnnnnnnnnnnnnnnnnnnnnnnnnnnnnnnnnnnnnnnnnnnnnnnnnnnnnnnnnnnnnnnnnnnnnnnnnnnnnnnnnnnnnnnnnnnnnnnnnnnnnnnnnnnnnnnnnnnnnnnnnnnnnnnnnnnnnnnnnnnnctattggccacagtagtgacaggtcagagacagaataggcagagggatggcagaagggggccccacctggacagggatcaatgcgcttactgcaaagaaaaaggacattgggcaaaagaatgccctaagaacccccgggccaagcctccacggccaagaacctctgaccttctaaacctagaagattagagaagtcagggccaggagcccccccctgagcccaggataacactgcaagtcggggggcatccggtcaccttcctagtagatacaggggcacaacattccgttctgaatcggtcacccggacccctgagtcaccggactgcatgggtacagggagctacaggcggaaagcagtaccattggactacaaatcggcagctccagctcgcgactggtaaggttatgcattctttcctccatgtgccagattgcccctaccccttacctaggacgggacctattgaccaaattaagagctcaaatacactttgagaggtcagaagtcaaagtcacagggccagagggaattccccttaccatcttgacaatgtccatagaagatgaatacagannnnnnnnnnnnnnnnnnnnnnnnnnnnnnnnnnnnnnnnnnnnnnnnnnnnntgcggaatttccccaagcctgggctgaaacaggaggaatggccttgccatcaaccaggccccaattatagtaaccttaaaagctgccatccttcctgcatccgtcagacagtatccaatgcctaaagaagcccgagaaggaattcggccacatattaaaagttacttgaacaagggattctggtgccctgtaaatctccttggaatacacctttgttgcccgtcaggaagccaggaaccaatgactataggccagtacaggatctgagggaggtcaataaaaggatagaggacatacaccctactgtccccaacccttataatttgctgagcggattgccacccaactatacctggtatacagtcttagatcttaaagatgccttcttctgcctccgcctgcatcccaccagccaacctatatttgcctttgaatggnnnnnnnnnnnnnnnnnnnnnnnnnnnnnnnnnnnnnnnnnnnnnnnnnnnnnnnnnnnnnnnnnnnnnnnnnnnnnnnnnnnnnnnnnnnnnnnnnnngatctggcaggattccgggtccggtaccccgcgctaatcctcttacagtatgtagatgacatcctcctggcagccaaaaccaaggaagaatgcaaggaaggcactcgagccctcctccagactcttgggagcctaggataccgggcatccgccaagaaggcccagatatgtcagaaacaggtgacctatttaggatacaagataaaggatggacggcgatggctaacggaagcccgtatgcgagccatcttagacattcccaccccacaaaatccccgccaactgagagagttcttgggaacggcaggcttctgccgcctatggatccccgggtttgccgaaatggcggctcccctctaccccctcactcggccaggggttgcttttaaatgggaagagccccaaaagaaagccttcaccaacatcaaaaaggctctccttgaatcaccagccctgggtctaccggacttagctaagccatttgaactctttatagatgagaaaggaggctatgccaagggagtcctcacccaaaaactggggccttggagaaggcccactgcatacctctccaagaaattggatcctgtagcatcgggatggccaccctgtctnnnnnnnnnnnnnnnnnnnnnnnnnnnnnnnnnnnnnnnnnnnnnnnnnnnnnnnnnnnnnnnnnnnnnnnnnnnnnnnnnnnnnnnnnnnnnnnnnnnnnnnnnnnnnctccagacagatggctcactaatgcccgaatgactcattaccagactatgctnnnnnnnnnnnnnnnnnnnnnnnnnnnnnnnnnngtgactctgaatccagccaccttgctccctctcccaggggagccagaggctcataattgcttacaggtactggctgaggcccatggggcgagacccgacctgactgaccagcctctacccagcccggaccacatctggttcacggatggaagcagctttttgcatcaaggaaaacgaagggcgggcgcagcagtcaccacagagaatcaggttgtctgggctcaggcactccctcccggaacctctgcgcagagggcagaactcattgcactcacgcaggctctaaaattggcagaaggtaagaggctcaccgtgtacacagacagtcgttatgcctttgccactgcccatatacatggagaaatttacagacggagggggctgcttacctccgaagggaaagacattaagaataaggaggaaatcctcgctctcctaagagctcttcatctgccctccgccttaagtatcatacattgccccggannnnnnnnnnnnnnnnnnnnnnnnnnnnnnnnnaatcggagggcagacttggctgcccgagnnnnnnnnnnnnnnnnnnnnnnnnnnnnnnnnnnnnnnnnnnnnnnnnccaacgaccgtccctcccccnnnnnnnnnnnnnnnnnnnnnnnnnnnnnnnnnnnnnngaaattgggagccacaaaggaaccaaacggggattggacttatgaaggaaagactgtcatccctaccgggtaaccaagtacctagtgacatttttacataagatgacacatctgagctccaagaagatgcgggagctcctcgaacgagaagagaattcaatttcctttttggggaagaatgacattctaaaacaggtaactgaacaatgtgatgcgtgcgcccgagtcaacgcatccagactgaagcttcctcctgggaaccgggtnnnnnnnnnnnnnnnnnnnnnnnnnnnnnnnatagatttcactgagattaaaccaggtaaatatggatacaagtatctattnnnnnnnnnnnnnnnnnnnnnnnnnnnnnnnnnnnnnnnnnnnnnnnnnnnnnnnnnnnnnnnnnnnnnnnnnnnnnnnnnnnnnnnnnnnnnnnnnnnnnnnnnnnnnnnnnnnnnnnnnnnnnnnnnnnnnnnnnnnnnnnnnnnnnnnnnnnnnnnnnnnnnnnnnnnnnnnnnnnnnnnnnnnnnnnnnnnnnnnnnnnnnnnnnnnnnnnnnnnnnnnnnnnnnnnnnnnnnnnnnnnnnnnnnnnnnnnnnnnnnnnnnnnnnnnnnnnnnnnnnnnnnnnnnnnnnnnnnnnnnnnnnnnnnnnnnnnnnnnnnnnnnnnnnnnnnnnnnnnnnnnnnnnnnnnnnnnnnnnnnnnnnnnnnnnnnnnnnnnncctgcatggagtacctactcctatcattaactttcttgatcaagatgtctcagattttgctaactcnnnnnnnnnnnnnnnnnnnnnnnnnnnnnnnnnnnnnnnnnnnnnnnnnnnnnnnnnnnnnnnnnnnnnnnnnnnnnnnnnnnnnnnnnnnnnnnnnnnnnnnnnnnnnnnnnnnnnnnnnnnnnnnnnnnnnnnnnnnnnnnnnnnnnnnaggccaagaaccttgaaccccactggaagggaccctacatcgttttgcttaccactcccaccgcactcaaagtaagacggcattgccgcttggatacatgcttcacatgtaaagccagcccgacccaccgattcagccactacatcagaatggaccgcacaccgcactcaaaatcctttaaagataagactctctcggtacaccctcctgttgattggttgtctgtttaccccccatgtagcaactaacccccacagggtttataatatcacctggaaaatagccaatctagggaccggggaaatagccaacctcagcacttatatagggactctacatgatgggttccctcctctctatgtcgacctatgtgacttagtagggtctgattgggatccctctgaccaggaaccattcccagggtacggatgccaccaccctgggggaaggatagggacaagaagcaaggatttttatgtttgtctggccatagaccaactcatgactgcggggggccacaggaagggtactgtgcaagctggggatgtgaaaccacaggggaggcttactggaaaccctcttcctcttgggatttcatcactctcaaacggagggagatcccagggtacgcagggaaaggaccatggagatgtgggcaaagagcctgcgaccctgttatgatagtgggaggttttcaaggcgccacccccgaggaaaatgcaaccgctctcatcctaaggnnnnnnnnnnnnnnnnnnnnnnnnnnnnnnnnnnnnnnnnnnnnnnnnnnnnnnnnnnnnnnnnnngcagggaaagatccggtgaccttattctccctgtacagacaaattactcccctaagccaacaatcagtcgggccaaacacagtaatagcggaccagagggccccaacccaattccaagtcctgaccccctaccgttcctaaagctatcactcctaccccagatgctgtcatcttctcccccaccccagatgccctaaacatcgagttaaccagagaccctnnnnnnnnnnnnnnnnnnnnnnnnnnnnnnnnnnnnnnnnnnnnnnnnnnnnnnnnnnnnnnnnnnnnnnnnnnnnnnnnnnnnnnnnnnnnnnnnnnnnnnnnnnnnnnnnnnnnnnnnnnnatcaagaattatgtaaccaagtagagccattatctcaggacagccgataccttgttgccccttatggaacttattgggcttgcagtactgggttgactccctgtgtctctaccactgttctcaacaccaccattgatttttgtatattgatagaactttggcccaaagtcacataccaccaacctgaatatgtttacagcgtactagggaaatcaacccgatataagagggagccaatatcccttaccgtggccctattattaggaggaataacagtggggggcatagcagccggcatagggaccggaaccgttgccctacagggaattaatcattttaagcttctacaacaagccatgcacacggacatccaggtactggaagagtcagtcagtgcactcgaaaaatccttaacatcactctctgaggtggtcctgcagaacagacgaggattagatttattatttttacaggaaggggggctatgtgcnnnnnnnnnnnnnnnnnnnnnnnnnnnnnnnnnnnnnnnnnnnnnnnnnnnnnnnnnnnnnnnnnnnnnnnnnnnnnnnnnnnnnnnnnnnnnnnnnnnnnnnnnnnnnnnnnnnnnnnnnnnnnnnnnnnnnnnnnnnnnnnnnnnnnnnnnnnnnnnnnnnnnnnnnnnnnnnnnnnnnnnnnnnnnnnnnnnnnnnnnnnnnnnnnnnnnnnnnnnnnnnnnnnnnnnnnnnnnnnnnnnnnnnnnnnnnnnnnnnnnnnnnnnnnnnnnnnnnnnnnnnnnnnnnnnnnnnnnnnnnnnnnnnnnnnnnnnnnnnnnnnnnnnnnnnnnnnnnnnnnnnnnnnnnnnnnnnnnnnnnnnnnnnnnnnnnnnnnnnnnnnnnnnnnnnnnnnnnnnnnnnnnnnnnttctactctggtcggcagctggcggggcgcgcgaatacatctttccctccttagcacttccctccttagcaccttttgatctctgcagctgctggctctcactccccgccccacgcaaggccaacccccgccggatcgctcggtcccaaggccagccatctggaccggcaggagataaggccatttcgcctggctattaaaccttgagaaaatgctgatttgatgcttttcgcttctgtactatgcctgttttcccttataaaaggaccctccttccggggctcggggcttggcaaaacagaagctaagccccggatatccgtgttattaataaatcctcttgttcttacatccaaagttcgtgtttcgctgattcctgggtgtgggtcttcttccacgaaagaacctctccgggggtctttcaataggtagggtgttagttggagaggggcaggggaannnnnnnnnnnnnnnnnnnnnnnatgtaaacaatgctgtttctaattcaaattaaaagttgagaaaattaattggtcacacacacagagaaagttctattgtggggagtttctaagnnnnnnnnnnnnnnnnnnnnnnnnnnacatccaagttttgtgggacactcaacctcttgagcagtctgggtctagggacttgcttgtaacttatgaagtacataacacaagtgtatcacttgtaatttctgaaataagattacagaagctgaagaattagatggtgtgtgcttctttacaaagaattcctgacaaataatgccattaagtgacagctaatgatgaattgtggacttagtcagatgatcataccgacagaaactacatgaagagagtacatgcctgagccaaggtgaactctagcatcacctataagannnnnnnnnnnnnnnnnnnnnnnnnnnnnnnnnnnnnnnnnncatcacctatagaactactatgagctgcagttgacattcttcagtccatcctgatatggtctctgttactgataactccaggtctttggtaatgactgtgaaccagaaaactcagaagtagcacccagatttccagcccagacaaaacataacatattaagtcactgaggtttgggaaagatttttagacatccatgggtagcttatatagttccttttaatcagttgttgaaagtagtctcaatattcatatagtagtcgtttcattgtgtgaccaaatttatagacaatgttctcacctttgttattttcgttgttgtttctgg

SEQ ID NO: 1070 - DNA, 3612 bp, Cricetulus griseus
  misc_feature (1348)..(1366): n is a, c, g, or t
  misc_feature (2862)..(2914): n is a, c, g, or t
  misc_feature (2978)..(3010): n is a, c, g, or t
  misc_feature (3129)..(3166): n is a, c, g, or t
  misc_feature (3521)..(3548): n is a, c, g, or t
ctctaggagtatgctacatttaaaaggaatggacaaaataccttgctattgtcaactcaaaatgccatgctattgtcaccaattctctgtggtggactcctctctgaggaatgaaaaacatttgccacctaagagatcaatgtttcagtgaactgctactgcagaacagatgtccaaaggcaagtgacttggaggcagaaacctgattgtagacccacaggctcaacggaggtgtggttaacctctcctgcctggttagctcttttcaaagcctcagtttgtctctgtgttttgagagcttggcacaatgctgtgatcaaacaccaagttaaagtccctgtttcaatccaatacccaaaagcacaaacagctccctcactggcgaaatgcagccgtgggttgcccagcaacaaactgctatagtggaggcagaaggtgggtgggctgttgaggggaaagtacctggatcgagaacaagaaaaaaaaaaaatgggaagggcttttcgagtgtctgagctttcgaatttacaaaaatcccttcaaattgtggctgcgtttctggaagcagtgtgtttaccttggcttcctgctgtttggcaacagttttcctgcaaagagcagttgtggttccacactctcttccctcctgaccaaaggctttcggtgccatattttcagccccggggcatcccagattaagtttaggctgctagccctttaagcccgacctgcgaggggacgacgtggaaccacagaacaagctgtgtcagtcagccacgtggtacaaggaagccttcatgttggaactgggcaaagcgtatttactctttgagctgtacaatatgatgttccgagagtgtccacttatcttttcttcggttgagtttccaaaactctaatgatgccgctcctctccaacaaaagtttagtttaaaaataacaccactcgtccggctctggtgcccgttttaaaaatggtgcctcggtcttcagcagcgatagttcttttgcaattaagatccgggcggaaacaatgggtaggtgcagcggggcagagccgaggttgcttcacagaacctcttgcaggtcaggagggagggtcaggtcatagttgggttttgttcctgctggcgcggaatactcttgcgtgtaggaagcggctctaccgactgccgaggcctctgggattgtgccgggttgctagttagctcagttggcggcggagcggcggcccctggcgggtcaccatgtgggccttcccggagttgccgctgccgctgctggtgaatttgttcggctcgctgctgggatttgtggctactgtgaccctcatccctgccttccgtannnnnnnnnnnnnnnnnnncctctgtggccaggacctcaacaagctcagccggcagcagatgtgagtaacggcacatgagtgcgctggggtagggtgccaggttgtacagggtgcaggggcgaggactgaggtgcttggctttgcgctggcgggagagagctaacctaggcaacccagaactcttggtggtgatagaattgtctatcctggggaggacgaaatgggagctttgggtgtcaggactaatagcggtagtatcctcttccctgtgcacagtctccctactccctcacaaacaaaacaaaatcctgggaagaaagtcactttgggttattgtaaccccatacaatagtgagtaaccacgcccctttcctcttcctcctccaccccttgctgctgggccgcagcccagaatcccagggagtgatctgcggtgctgttttccttatcatcctcttctgcttcatccctttccccttcctgaactgctttgtggaggagcagtgtaaggcattcccccaccatgaagtaagtgcattagtgggaacggttggctggggtcggggacttgcttgagttggggttatttggattgggcagagggtgcttgtgggcccaactctagagacaggagtacttggattggtgatatataactcagtgatagagcctccctagtatgcccaaagccacgggttcaatcctcaactccaaaataaaaagatgggaaaagggaaacataggaggcaggaattcttgaaaggcagactagtaagtaggcttgagacgtaacttgcctgagccttccccagtttgtggccctgataggtgccctccttgccatctgctgcatgatcttcctgggcttcgctgatgatgtactcaatctgcgctggcgccataagctgctgctgcccacagctgcctctctacctctcctcatggtttacttcactaactttggcaatacaaccattgtggtacccaagcccttccgctggattcttggcctgcatttggacttgggtgagtattcctatcactattgcccctgtggcacccacttgtacccttccctctgagatcccagtaaaacactcttcctggtggtccacattctccatcaagtattccctttctgtctctggatcaacccagatttctctttttccttccctctttctttcctatcttttctttccttcctgtatcaaggaattgaagctaagacctcatgcttgctagacaagcactctgagctataccaaagcctttcctttctattttttccattttctaaaaatttcaaaacaggagggcaggagagattgctcagtcaagaacactcacttctcttccaaagatcctgagttcaattcccagtacccacatgatagctcacaactgtctgatgccttcttctggtgtgcagatgtacatgcaaagtaccaatatacataaaatacataaataatcatttttaagaaattcaaaggctgggcagtggtgtcaannnnnnnnnnnnnnnnnnnnnnnnnnnnnnnnnnnnnnnnnnnnnnnnnnnnntgagaccagcctggtctacaagagctagttccaggacagcctccaaagccacagagaaaaaccnnnnnnnnnnnnnnnnnnnnnnnnnnnnnnnnnttcaaagctgggtatggtgtcgcacacctttagtctcagcattagggaggcaaaggcaggcgcatctcagtacaaggccaccctgatctacagagggagttccaggacagctggagatnnnnnnnnnnnnnnnnnnnnnnnnnnnnnnnnnnnnnnattttcaaaacagggtcacacactaagttgccttgaactttcttagcccaggcaggccttaaactggtaaccctcttatcccagcctttcaagtagttggaattatagacctgtgctactaggtcttgcctattcagatcctttcattcctcctgtgctcttttctcaaaaaaagatgcaaacctccttccctaggtagcactatctgattctgtttccccaggaatcctatactatgtctacatgggactgcttgcggtgttctgtaccaatgccatcaacatcctagcaggaattaatggcctagaggctggtcagtcactagtcatctctgcttctatcattgtcttcaacnnnnnnnnnnnnnnnnnnnnnnnnnnnnagagataggaagaaacagacacctgtgtgttaagaggattgcttggtgtggatttagagaattc

SEQ ID NO: 1071 - DNA, 3806 bp, Mesocricetus auratus
  misc_feature (303)..(320): n is a, c, g, or t
  misc_feature (330)..(349): n is a, c, g, or t
  misc_feature (1543)..(1679): n is a, c, g, or t
  misc_feature (2570)..(2588): n is a, c, g, or t
gatcctggaagtgagggagccggctgcgtgctctccgagcccctgcttcccttcagcatccaggtccctccccgtggataagatgagcaagccccaagacaagcgttccctccacaccaaactcctgacacactgacatcacacctccccgacaccccccttactcatcaaacacccccaaaacaccctgtgcagcacattagcaacagccaagtccggaacctggaagtgcgcgcaggtggccagattgatccttcctgtggtcctggagaacaggattcccagaacctggtttttggtttnnnnnnnnnnnnnnnnnngttttgttannnnnnnnnnnnnnnnnnnnatgttccttttgtttaggttaggggggattgttttgttttgtgtgcctgaggtattgcttctgtagcgacagatttcactgatctaaaggagaaagccttcaagatccacagaaagttccaactactgatttctgtaaccactaactgaatgcctactgtgcacctgacgctgttagcaagaaagtcagggcagatgggtgaaaaaattacgcctttcggataactgtgcagtggatgccctcgcaggactcctggagaggaggtgggggaaggggcaggttcgcggaatccgagggtgtccaccttctcatagaaacccaagtccatctgccctttcaaacacccccatccacggtgccaccaaagtgattcaccgcagagaaagcagtttgcccgcggtgccctccccagagttcctaactgcgcggtggggggggacctccggcgcccactcgcaccctccacccccgggggccgcgtgctgtgctgggggagcccctccgccaggcgtcggcgcgggctggcgtagggcctgcgtcagctgcagcccgccggcgattggggcgcgcgcgcctcttcggtttggggctaattataaagtggctgtggcgctgccaacctccggacagcgaggcaggcgctcagagccccgcagcccaacgacaccgaggaccgcgacggtgagttcgcgatctgccccgcaccttgcccagctctccgctgccgcttcacacttaccttgtttttctctctcttgcagagtggcatctaggacccgctcctccagcagcctgctccatctgaacggcggcaacgtgagtgactttgccccccaagactcctaaggcgtggtgaccatcacctgttccctaattgcatcgtcccccactttctcggggctcctctttgccatggggaccaggtcctatatcccaagtgcccgctccccagcagcgatctccaatgcttgctgcagaatctcgccccaggcaaccgacgccagagaagacagtacaccctaggaagaataggatggatgccaccgggtagccaggatgctccggggaagataggtggccccaggaaacaggaagcccccccggaaagacagaatggccctaggaagacagtatgtccccggggaagcctcaggacaactggagccactcctgaccaagtcatccctgagtaannnnnnnnnnnnnnnnnnnnnnnnnnnnnnnnnnnnnnnnnnnnnnnnnnnnnnnnnnnnnnnnnnnnnnnnnnnnnnnnnnnnnnnnnnnnnnnnnnnnnnnnnnnnnnnnnnnnnnnnnnnnnnnnnnnnnnnnnctcctacagcccatggcgcggttcctgagactttgcacctggctgctagtgcttgggtcctgcctcctggctacagtgcaggcagaatgcagccaggactgcgccaagtgcagctaccacttggtgagcccaggcgacatcaacttcctggtgagtagaattcttggtgaggggttgtccttgcgcactcacgaggcagccctgcaaacatcaagtggtcactcgcgctcaaagtgcttgcacgagcctttggtgacctgggtgacccttccaaaacgttgatccctatccgctctgtctcccaattttggaaccagcctatctgggatcagcttggatccctttgaaaccctgggctggtgcagcatacccagcaagctctccagcaagactttcgtacccattcgcttcctttttccaagctcccttgttccgtgcaagagaaagctgtgataagagactagaaatggccttttctctgtgacagtgtgtatactaaagcagataactatggtccatcactggctggaagggctcttttagtcatgcatctccttgttcttcccaggcgtgcacactggaatgtgaaggacaaatgccttctcacaaaatctgggagacctgcaaggatctcctgcaggtgtccaagcctgagttcccttgtgatagcatcaacatgttcaaagacagcaacaaacaggatgagagccacttgctggccaagaagtacggagggttcatgaaaaggtatggaggcttcatgaagaagatggatgagctttatcctgtggagcccgaagaagaagcgaatggaggcgagatccttgccaagaagtacggtggcttcatgaagaaggatgcggatgagggcgacaccctggccaactcctnnnnnnnnnnnnnnnnnnncctgggaacaggagacaaccgtgcgagagagggccgccaccaagagagcactgacaatgatgacaacatgagcaagaggtatgggggcttcatgagaggcctcaaaagaagcccccaagtggaagacgaagcaaaagagctgcagaagcgctatgggggcttcatgagaagggtgggccgcccagagtggtggatggactaccagaagagatacggaggcttcctgaagcgctttgcggagtccctgccctccgatgaggaagctgaaagttactccaaagaagttcctgagatagaaaaaagatatgggggattcatgcgattttaaagccctttcccaaaggtgaccccaggcacccaccagcctgctgcatccccagtgagcgactgcctcaccagtggtgtttgttgtcacttcctgcttgtactgttgcccttctggcctggataactacactgcctgaaagctgtgatgtgtggggtctgtgttctcttgagtctcggggctcagtactggcctgttgcagctatcccggtatcatgctgtaagtttctgttacctcatcccctaacttttggcagaaacgtcaataaatgcttacttgtatatagatataataaacccattaccccaactgcacattggtcttgtgagaagtgactatcatttgtctgtgggtgttcacggcaaaggctagactgagagaccgtgccatcacctgctatgacagaataatcactggcttctttcccctgacccaggctaaaaaacattttatttaacaatttgtatgtaaactcttaaatgagcaaatgcaaagaaacaaaattagatgcaatgacaatttggtcctgttttatatgtacagaaagtgaacgccacaatggctaattagttgatctaaatttgctcaagagttgaaacaacagaagtgagattaacaccttttcctcatctcctatccaggattccagcaagagcagaaagaacttcgaactctgtcttgcacacccttcaccatgaccatagtaggaacctccaatagctgatgagtgggtgaatggcatggataaattaactcacttggcaatcagacaatccagaagggtaccgtgttactatgtgaattctcaaaacacttgatgaatatttcacaataacaagctgtttgattcgttattcagatatcaaaaatacaagtttcactttctagttga

SEQ ID NO: 1072 - DNA, 1000 bp, Mesocricetus auratus
cccgcggggatgtcgtacaagccgaacttgaccgcgcacatgcccgccgccgccctcaacgccggaagtgtccactcaccatctactagcatggcgacatcctcccaatatcgccagctgctgagtgactacggaccaccgtcactaggctacacccagggaactggaaatagccaagtgcctcagagtaaatatgcagaactgctggccatcattgaagagttggggaaagagatcagacccacttatgcgggaagcaagagcgccatggaaagactaaaacgaggcatcattcatgcccgaagcctggttcgggagtgcttggctgaaacggaacgtaatgccaggtcctagcccctggccagtctgaaggcccatcttgctaccccttggagatgagaggctttgttcaaaatggcagttttcctgccatggtcattaagctctgaacccacattcaaaagactgagaagacattttgcagttactgatgatgtgcattttaagtagttaggaacaatccaagcattgattttaaagatgtttgtgaagccacttcacagcaagctattgttttcccccaaataccagtgtccccttaatctccctttggatacatttgccatttgcatcaccccagttgacttcctttccaggaggtcacctgcctctgaggacctgagtgcaaaccacagcacgtttgtttagtagctggcccgcctgtgtacaccctgcttcacggagcttctctgcttaagtgtttgcatgactgagtgctttgaagtcaatcttaaaaatgcacaagttacagatacagaagaagagcgatctccaacctaccaagcgccctgcaaatgtccatcctgagactgtagttctcggttccatgtttactgtgagatgatcacaacatctggaagaaaatgactgaaactgttgcatctttgtatttattacttgatgtaataaagcttattttcattaacagtttgtattaaga

SEQ ID NO: 1073 - DNA, 2962 bp, Mesocricetus auratus
cccagcctgtgacaggttccatccatcctccttgcccctgctccctgcgaccctttttaagaggcgactagattcctcggttctatgccgcacaccatggacaagttttggtggcacgcagcttggggactctgcctcttgccgctgagcctggcgcagcagcagatcgatttgaacataacctgccgctatgcaggtgtattccacgtggagaaaaatggccgctacagcatctcacggactgaggcagctgacctctgccaagctttcaacagcactctgcccaccatggaccagatggtgatggccctgagcaagggctttgaaacatgcaggtatgggttcatagaaggccacgtggtgatcccgaggatccagcccaatgccatctgtgcagccaaccacactggggtgtatatcctcacatccaacacctcccactacgatacatattgcttcaatgcctcagcaccccttgaagaagactgtacatctgtcacagacctgcccaattccttcgaaggaccagttaccataactattgtcaaccgtgatggtacccgctacagcaagaagggcgagtatagaacacaccaagaagacattgatgcctcaaataccacagatgatgatgtcagcagcggatcctccagtgagaagagcacctcagggggctatgttttccacacctaccttcccactatacactcaactgcagaccaggatgatccctacttcatcgggagcaccatggccaccactaggagtggtggtaaagacggaagaagaggtggaggcctccccaaagacgcaactacttctctggaaggctacaccactcattacccagaaacaatggaaaatgggactctcaccccagtgactcctgcaaagactggggtctttggagaaactgaagtgactgttgctgaagactccaactttaatgttgatggctccttaccaggagaccaagactcatccatggatcccagggggaattccctcactgtgactgatggatccaaattaactggacactcaagtgggaatcaagacagtggggcaaacacaacttctcgtcctgggaggaaacctcagattccagaatggctcatcgtcttggcatctctcctggcgctggctctgattcttgctgtttgcattgctgtcaacagtaggagaaggtgtggacagaagaaaaagctggtgatcaacagtggcaatggaaaggtggaggacaggaagccaagtgagctcaacggggaggccagcaagtctcaggaaatggtgcatttggtgaacaaggaaccatcagagactcctgaccagtttatgacagctgatgagacccggaatctgcagaatgtggacatgaagattggggtgtagtgcctataccagcaatttggaaagacaccaaaaatcgcagacttgtcaatactgggagctgggacccttaacagatgcaatgtgctactgattatttttattgggggtagtttctgtgtaaaatttctattcctttttcattttgttaatagtccattccaatttataaaaaccagcattgctttctgaaatgagggcccaaagaatattccattaagattttgactcttccagctccttcctagaggtcttgcattcccaagggatgctatggacggcttcgatcaaatgcatattcttggtccctattgaatcttttccctaaactaagtcccaagtaacagtcaccagccagggacttaccccagggcttagaggtattggtctctgggaggaaatttgaatgggtccatattgcctctccacaagtccagtccttgggtattgttttccagttgggtgggagatcaggtgtactggttacacacctttttatagactcccctttctgctggaaaattttcagatgcttctgagagatccccaaagggtgaagctatttatctgtagtaagctatttatctttgtttttgaaatatcaaaccctggaggtcctttgtgcagtatgacttttgacttttttttaggttactttgtcagaagcataacagggtataagttgattcataataaacacctgtcaatcttccatcttaacctgttgttgtgctgtgatccttcagtttctaaaccagcaaggtttgagtcttcatagcacatcaggatgactttagaacggtcctcctaaactggtgccagactacctatgcccaactcaggttcatctggctgaatctcctaaaagatcaaggaaagaagcactgttctgtacctagggctatgaaaggggtttctctcctgttctggagtctggattgtgagcaggagagctttggtcatctttgtgctatggccacccttttctcttccttaaagggaacattacgtttctatgtccttctatttcatagaaactgatcctagtagtggttttcacagaacagcatggtgcgtgcttgtgacaccttacaataaaaggagaagccaacagaaattaaagtgcacaaacaagcagtagattggcataaggagggtgtggtgcacaacccatcccactatttccatggatgtgtttgttgatattttcacaaaccagttggtcctcagagtgaggtgcctgggaatctcccagaaagcctcagggctgcccactactggaatctcatcaccagataagcaggcttatggtttagccaagggagaatggtgttaccctctaacctcatttttttaacgtagtaggtaagtgtttggtggcatttatccatctgccagaatgtcccattgctcctggatcttccctggttacttgtagaagaaattaaatctataaagtaaggctttctgtaagatgagacttccttcctaagtctcccatgatgttactgttgataaatttatatgtttaatattttttcaaataaaaaaacaagagaaaagtttatcacct

SEQ ID NO: 1074 - DNA, 1788 bp, Cricetulus griseus
gccacctgcagggctactgctgctccggccactgcctgagactcaccttgctggaacgtgagcctcggcttctgtcatctctgtggcctctgtcgcttctgtcgctgtcccccttcagtccctgagccccgcgagcccgggccgcacacgcggacatgggcggcagcgccagggcgcgctgggtggcggtggggctgggcgtcgtggggctgctgtgcgctgtgctcggtgtggttatgatcctcgtgatgccctcgctcatcaaacagcaggtactgaagaatgtccgcatagaccccagcagcctgtcctttgcaatgtggaaggagatccctgtacccttctacttgtccgtctacttcttcgaggtggtcaatcccagcgagatcctaaagggtgagaagccagtagtgcgggagcgtggaccctatgtctacagggaattcagacataaggccaacatcaccttcaatgacaatgatactgtgtcctttgtggagcaccgcagcctccatttccagccggacaggtcccacggctctgagagtgactacattatactgcctaacattctggtcttggggggcgcagtaatgatggagagcaagtctgcaggcctgaagctgatgatgaccttggggctggccaccttgggccagcgtgcctttatgaaccgaacagttggtgagatcctgtggggctatgaggatcccttcgtgaattttatcaacaaatacttaccagacatgttccccatcaagggcaagttcggcctgtttgttgagatgaacaactcagactctgggctcttcactgtgttcacgggcgtccagaacttcagcaagatccacctggtggacagatggaatgggctcagcaaggtcaactactggcattcagagcagtgcaacatgatcaatggcacttccgggcagatgtgggcaccattcatgacaccccagtcctcgctggaattcttcagtccggaagcctgcaggtctatgaagctcacctaccatgattcaggggtgtttgaaggcatccccacctatcgcttcacagcccctaaaactttgtttgccaatgggtctgtttacccacccaatgaaggtttctgcccgtgccttgaatccggcattcaaaatgtcagcacttgcaggtttggtgcacccctgtttctgtcacaccctcacttctacaatgcagaccctgtgctatcagaagccgttctgggtctgaaccctgacccaagggagcattctttgttccttgacatccatccggtcactgggatccccatgaactgttctgtgaagttgcagataagcctctacatcaaagctgtcaagggcattgggcaaacagggaagatcgagcccgtggtcctcccattgctgtggtttgagcagagcggtgccatgggcggcgagcccctgaacacgttctacacgcagctggtgctgatgccccaggtacttcagtatgtgcagtatgtgctgctggggctgggcggcctcctgctgctggtgcccgtcatctaccagttgcgcagccaggagaaatgctttttattttggagtggtagtaaaaagggctcgcaggataaggaggccattcaggcctactctgagtctctgatgtcaccagctgccaagggcacggtgctgcaagaagccaagctgtagggtcccaaagacaccacgagcccccccaacctgatagcttggtcagaccagccatccagcccctacaccccgcttcttgaggactctctcagcggacagtcgc

SEQ ID NO: 1075 - DNA, 1914 bp, Cricetulus griseus
  misc_feature (344)..(369): n is a, c, g, or t
  misc_feature (372)..(384): n is a, c, g, or t
gagcccgggcgcagctcaaacatggcggcggctggcacgggccggtgaggcggtaccaggtgggggccgtcgggtgtcatgggcggtggcggcggcaccgcctccgcgtctccctgagccggacctcacgggggactcagcgccaagctgggcgatggacgagagcagcgagctgggcggtctggagaccatggacaccctcacggagctgggcgacgagctgactctgggggacatcgatgaaatgctacagttcgtcagcaatcaagtgggagagttccctgatttgttttcagagcagctatgcagctccttccctggtggtggtagcagtggcagtagtnnnnnnnnnnnnnnnnnnnnnnnnnntgnnnnnnnnnnnnnaggcaatggtggtgcagccacagatcctggagtgcagcggtcgttcagccaggtcccattacctaccttctccccctcaactgcctcccctcaggctctagccttgcaggtcaaagtctctcctaccccacccagggcaacccctgttctccagcctagaccccagccccagccgcagccccagccttcagctcagcttcagcaacagacggtaatgatcaccccgacattcagcactgctccacagacaaggatcatccagcagcctttgatataccagaacgcagcaaccagcttccaagtcctgcaggctcaagtccaaagcctggtgacatcctcgcaggtacagccagtcacgatccagcagcaggtgcaaactgtacaggctcagcgggtgttgacacaaacagccaatggcacgctgcagacccttgccccagcaacagtgcagacagttgctgcaccccaggtgcagcaggtcccggtcctggttcagcctcagatcattaagacagattcccttgttttgaccacactgaaaacagatggcagccctgttatggctgcagtccagaacccagccctcactgccctcaccacccccctccagacgggcgcccttcaagtaccaactctggtgggcagcaatgggaccattctgaccacaatgcctgtgatgatgggacaagagaaagttcctattaagcaagtacctggcggtgtaaagcagctagagccccccaaagaaggagagaggaggacaacacacaacatcattgaaaagcgatatcgatcctctatcaatgacaaaatcatagagttgaaggacttggtcatgggaacagatgccaagatgcacaaatctggcgttctgaggaaggccattgattacatcaaatatttgcagcaggtcaatcacaagcttcgtcaggagaacatggtactgaagctggcaaatcagaaaaacaagctcctgaagggcattgatttaggcagtctggtggacagtgatgtggacttgaagattgaagactttaatcagaatgtccttctgatgtctcccccggcctctgactcggggtcccaagcaggcttctctccctattctattgactctgagccaggaagtcctctgctggatgatgcaaagatgatgaaggttctgcaagtaaaaagcccaaggtagagttatcagaagaagagctgaaggcccattttgccaagggcacactgggcaagctaactgtgcctacactaaaggaggtctgtaaggcctatgggcttaagagtggaccgaagaagcaggaactgctagatgctctcaccagacacttccagaagaactgactgaaggtcacaccccagctacttcccacactgcagccagaccacctacttatgttctcaccaagttagcaggtgtttcttagctacaaagagttgcctgacagaaatgcaaaggacttgcttcatggagactgtagccctcccactttgttgtgccttatatgaataaacagctctaatgtt

SEQ ID NO: 1076 - DNA, 1084 bp, Cricetulus griseus
  misc_feature (182)..(232): n is a, c, g, or t
  misc_feature (519)..(573): n is a, c, g, or t
atggccccccatcttctttggtgcccggcagatgggctgggtaagtatggccaaagcttgatccttgggtcattggtgattgctctgggagagcaggtgaaattgaatcccaggtgagggggaggcctgtggtttgtagcccctttagaagttccatgagggccgggcggtggtggcacatnnnnnnnnnnnnnnnnnnnnnnnnnnnnnnnnnnnnnnnnnnnnnnnnnnntgagaccagcctggtctacaagagctagttccaggatagcttccaaagccaaagagaaaccctgcctcaacccccccccccaccacccccaaaaagaagtttcatgagtcaggtacagtggggttcctggaatcccagctctctggaggttgaggtgggaggatcagttgagcccaggatagggctaggccagcctaggtgacagtgacctgtgtactaacacagcctcagtccaccttccctccatgaagaaggttcagagggccaggttgaagtgggtggggctnnnnnnnnnnnnnnnnnnnnnnnnnnnnnnnnnnnnnnnnnnnnnnnnnnnnnnntgcgtgctgacacatggggacaaaaccactccttataaatgttcttgttcaggttttgtgatacatgcctggcctgtagttccaggagaggcaagaggattgctttaagtctgacagcctggtttacaaagctagttcaaagtcagctaagaccacatagtgtgcacaccacagcagcttgatccctcacactggcctcttgggtcagtacttgacaatgttgtatcttcaggtcagaggccttccagctgctgctttactcttcagcatgcggtgtccccttgggactgtctccatacatggcacaatcaggcagtgtcttacaggcaaggaaactgaggctgaaaacagagagaaggggcagccatcacacctcaggggtacagtagggctaattgagatctccaacctctagacccagcagggacttagcctccccatctcctgtctctgcaggccttggcagaccttctgctcgtcagtggggtagcaacagccacaaccctagcct

SEQ ID NO: 1077 - DNA, 1640 bp, Cricetinae
  misc_feature (885)..(899): n is a, c, g, or t
gaattccatgaccgcttgagttatcctccacactcagtgtcacctacagacataagcacgagtcttccaccaatgtccagcttccaccgtggcagcaccagcagctcaccgtatgttgccgcctcccatactcctcccatcaatggatcagatagcattctaggagccagagggaatgctgctggaagctcacagacgggtgatgcacttggaaaggctttggcatctatttattctcctgaccatacaagcagtagttttccatcaaatccatcaacaccagtgggatctccttcacctctcacaggtaccagtcagtggcccagagcaggaggacaagctccttcatctccaagctatgaaaactcgcttcactccctgaaaaatcgagttgagcagcaacttcacgagcatttgcaagatgcaatgtccttcttaaaggatgtctgtgagcagtctcgaatggaggaccgtttagacagactggatgatgctattcatgtgcttcggaaccatgcagttggaccttctaccagtctgcctactagccatagtgatatacacagtttattgggaccatcccataatgcaccaattggaaacctcaattcaaactatggaggatcaagccttgttacaaacagtcgatcagcttcgatggttggaactcatcgagaagattcagtcaatctcaatggcaatcattcagttctgtctagtactgttgctgcctcaaacacagacctgaaccataaaacaccagaaaattacagaggtggtttgcaaaatcagtctggaaatgttgttccaacagaaatcaagactgaaaacaaagaaaaagatgagaaccttcatgagcctccttcatcagatgacatgaaatcnnnnnnnnnnnnnnnccaaaaagacatcaaggtctcgtctagaggcagaacaagcagtaccaatgaagatgaggatctgaatccggaacagaaaattgaaagggagaaggaaaggcggatggctaacaatgctagagagcgcctgcgtgtgcgggatattaatgaagcattcaaagagcttggccgaatgtgtcagcttcatttgaagagtgaaaaacctcagacaaaactcctcattcttcatcaggccgtggcagtcatccttagtctagaacagcaagtcagagagaggaacctcaaccccaaagcagcctgccttaagagaagagaagaagaaaaggtctctgctgcgtcagcagagccaccaaccacgctgcccggaaccatcctgggcttagcgaaactaccaacctatgggtcatctgtaaacatcagccagttccagtgtcagcagtaggctagatagaagatgacctctcctcataaagacttggacaactcagattatctgaagacacaaaccaacctgacaggaaggagaagaaaaacaaaacacttgaagcaagaaactcaaatataatcctatgatcaaagcaactggtcaacacttccatcagaagtgaggataggaagctcatgagagaacgccggcccatgaggtgtttacagcatatcattctgctgtaagcaatgtgtcgcttctgcataatcagagactgtctcatctctcactcaacgtggaagttgccggaattc

SEQ ID NO: 1078 - DNA, 1836 bp, Mesocricetus auratus
gcgaccccaggtgcttttctccctgaattggtttcccggtgtttgccctcggttgcggggttcggctaactcttcccggaagaagaaggcaggcgcggcggggctctgcagttctgcacccgaattcctggggactttaatgcagtgtagcctcagcagctggtagccggtgcaacgaggcttgcccggccgctgttgctctacagaatgaagacgtcggaggagcgactcgtagtcccggacagcctctcttctgaccaggccccagctccagtgccccaaggttcccctgtggatgaaaatacagactctgaaccggtgccacagccttgcggtggagatgaccgatcccaggtagccgcagattctgtggctggctcggttgtgttccaggagccgcaacaagggcacccacttcctctctccgctccgctggaagtagagtttaatactcccggtgagttgagtcctcgaatcgaggagcaagaactgtctgaaaatgtgagccttcctgtagaagacacgaatcagcctgagttggcgtcaggagaagacgtggaaggtgtgtctgaagagcccggtccagtggatgagggagacgccttttggagctataacttctcgcaggtaccccgatacctcagtggctcctggtccgagttccgcgcccactccgagaacttcttaaaaggttgtaagtgggctcctgatggttcctgtatcttaaccaacagtgctgataacactctgcggatttacaacctgcccccagagctgtacagtgcgacagagcaggtggactatgcagaaatggttcctgtccttcgaatggtggagggagacaccatctatgactactgctggtattctctgatgtcctccagccagccagacacctcctatgtggcaagcagcagtcgggagaacccaattcacatctgggatgcattcactggagaactccgggcttcctttcgcgcttacaaccacctggacgaattgacagcggctcactcactctgcttctccccggatggttcccagctcttctgtggcttcaaccggactgtgcgtgtcttttccacttccaggcctggtagagactgcgaggtgcgagccacgtttgcaaagaagcagggccagagcggtatcatctcctgtatagccttcagtccatcccagcccctctacgcctgcggctcctatggccgtaccctaggcctgtatgcctgggatgatggttctcctctcgccttgctgggaggccaccaagggggcatcacccacctttgctttcaccccgatggcaacctcttcttctcaggagcccggaaggatgccgaacttctgtgctgggatctccggcagcctggccacctcctgtggtctttgagtcgggaagtgaccaccaatcagcgcatctactttgatctggacccgagtgggcagttcctagtgagtggcaacaccaacggaatggtctctgtgtgggacatcagtggcgctttcggtgacagcagcaagctgggacctgtgatgacttttctgccccagaaggactgcaccaatggagtgagccttcaccctagcttgcctctactggctactgcttccggccagcgcatgtttccagagcccaccaacagtggagatgaaggcgagccagagggggatcttcccctgctctccctatgccacgcccatcctgaatggcagcttcagctctggtggtgtggagggggaccagaccccagtagccctaatgacccccaagatgagaagggacaaggaagggcagagggctgtggggatgggttaatataaagattttgtata

SEQ ID NO: 1079 - DNA, 1836 bp, Mesocricetus auratus; identical to SEQ ID NO: 1078

SEQ ID NO: 1080 - DNA, 1414 bp, Cricetulus griseus
ctgcagagtttctggaacagcctttcccttagaactcagggtcaggactagcctgttggtgtgtctgatgtgaaagaagggtcagtaatgactcttgccatgggctcagatcctctctcccatacaggtacccatcacaggtgtttgtgggagataccttctgttattttgctggcatgacctttgccgtggtgggaatcttgggacacttcagcaagaccatgctactcttctttattccacaagtgttcaatttcctctactcgctgcctcagctccttcacgccatcccctgccctcgacaccgcatacccaggtagccgctctggggctccaaagggtcattatagctttttacttgggatagctaaagccagccagtccatctcctatgtaagaggaagtggaggaaaagaaggagtaactgtatgtgggtcgtccgttttagtttatgaagcacatttacttacataaagtgtgatgcttacaacagttcccttcacccagatgtaagcagctgagccagaaacaaatctcagtgctaagtgtcggtcctcttactaaccgcaggttggaagatgattcagtcacatggtaccatcttccctttacagactcaatccgaagacgggcaaactggagatgagctattccaagttcaagaccaagaacctctctttcttgggcacctttattttaaaggtaacaaggtaacaaggaggtaagccccaggccaccatccttcacttgagaaaagggaatccctggtcttttcagacccgaggggagtttggaaacatcaagaagatcccctgtggatgaaatgtgtaactgaagttgtcttcacctctggcccctccaggtagcagagcgcctccagctagtgacagttcaccgaggcgagagtgaggatggtgccttcactgaatgtaacaacatgaccctcatcaacttgctactcaaaatctttgggcccatacatgagagaaacctcacactgctcctgctgcttttgcaggtaacactgagggtggggtaaattatgtaagtgttcttatctcaagttcaccttggttcttattccagtccatttctccttctagatcctgagcagcgctgtcaccttctccattcgataccagcttgtccgactcttctatgatgtctgagttccctgaagactgactgcccatagcctccgttggacctcacccaggaccaacctgtctggtccaagactgccttctggtccaggcctctccaactgttggttttttcagttttgttttcagcttctcccatcacctgtaatgattattggcctggaccttattggactttaaagtccattagttgcactttgcccctggctttcttcagcttgctactcttcccctttctgtcccatctgcag

SEQ ID NO: 1081 - DNA, 973 bp, Cricetulus migratorius
gtttaaatcctgtagtgaatgatcagtctccacagactgcctactcaaaatgaagttgcctgttcttctgttggcactgctgttgttcatgattcctgattccagaggtgatgttgtgatgacccaaagtccaaacgttttgtcggtcagccttggagagcaagtctccatctcttgcaggtctagtcagagcttagtacagagtaatgggaacacttatgtgaattggttccttcagaggccaggccagtctccaaagcgtctaatctataagacttccaaccgaaattctggggtaccagacacattcagtggcagtgggtcagacaaagacttcacactcaagatcagcagaatggaaactgaggattttggagtatattactgcatgcaaggctcatatgtgccgtggacgttcgggcctggcaccaagctggaaatcaaacgggctgatgctaagccaaccgtctccatcttcccaccatccagtgagcagttgggcactggaagcgccacacttgtgtgcttcgtgaacaacttctaccccaaagacatcaatgtcaagtggaaagtagatggcagtgaaaaacgagatggcgtcctgcagagtgtcactgatcaggacagcaaagacagcacctacagcctgagcagcaccctctcgctgaccaaagcagattatgagaggcataacctgtatacctgtgaggttactcataagacatcaactgcagccattgtcaagaccctgaacaggaatgagtgttagagccagaggtcctgaggcaccaccacctgctccctaggaccattctcagtcttccctcctaaggtcttggagctttctccatagactacctaccactgttgcagtcctccaaacccccacctcgtctccctccctttccttggcttttatcatgctaatatttggggaagatattgaataaagtgaatcattgcaaaaaaaaaa

SEQ ID NO: 1082 - DNA, 1561 bp, Cricetulus migratorius
cccattcagtgagcagcactgaaaacaagacaatcaacatggtgttggggctgcactgggttttctttgttgctcttttaaaaggtgtccactgtgaggtgcagctggttgagtctggtggaggattagtgaagcctgcaggatcactgaaactctcctgtctggcttctggattcgccttcagtgactatttcatgagctggttccgccaggctccagggaagggactggaatgggttgctggcatagacactaaaagttatgattatgcaacctattactctggttcggtgaaaggcagattcaccatctccagagatgattcccaaagcatggtctacctgcaaatgaacaacctgagaactgaggacacagccacttactactgtacaagagaaatcggatactggggccaaggaaccatggtcgccgtctcctcagccacaacaacagccccatctgtctatcccttggcccctgcctgtgacagcacaaccagcaccacggacacggtgaccctgggatgcctggtcaagggctatttccctgagccggtgaccgtaagctggaactctggagccctgaccagcggcgtgcacaccttcccatctgtcctgcattctgggctctactccctcagcagctcagtgactgtaccttccagcacctggcccaagcagcccatcacctgcaacgtagcccacccggccagcagcaccaaggtggacaagaaaatcgagcccagaactgatacggatacatgtcctaatccaccggatccatgtcccacgtgtccaactcctgacctcttgggtggaccatctgtcttcatcttccccccaaagcccaaggatgtgctcatgatctccctgacccccaagatcacatgtgtggtggtggacgtgagcgaggaggagccagacgtccagttcaactggtatgtgaacaacgtagaagacaagacagctcagacagagacccggcagcggcagtacaacagcacctaccgcgtggtcagcgtcctccccatcaagcaccaggactggatgagtggcaaggtgttcaaatgcaaggtcaacaacaatgccctccctagccccattgagaaaaccatctccaaacccagagggcaagtccgggtaccacagatatatacctttcctccgcctatagaacagacagtcaagaaagatgtcagtgtgacctgcctggtcacaggcttcctccctcaggacatccacgtggaatgggagagcaatgggcagccacagccagagcagaactacaagaacacccagcctgtcttggactccgatggctcttacttcctgtacagcaagctcaatgtgcccaagagcaggtgggaccagggagattccttcacctgctccgtgatacatgaggctctgcacaaccaccacatgacgaagaccatctcccggtctctgggtaattgagctcagcacccagaaagctcttaggtcctaagctaccctggcaccctcctccacccttcccttgtataaataaagcacccagcactgccctgaaaaaaaaaaaa

SEQ ID NO: 1083 - DNA, 495 bp, Cricetulus migratorius
tccacaggagcccagccctggattcccaggtcctcccattctgtgatcagcactgaacacaggccacttgccatgaactcaggactccaattggttttctttgtcctcactctaaaaggtatacagggtgaggtgcagctggtggagtctgggggaggcttggtgcagcctggaaagtccctgaaactctcctgtgaggcctctggattcaccttcagcggctatggcatgcactgggtccgccaggctccagggagggggctggagtcggtcgcatacattactagtagtagtattaatatcaaatatgctgacgctgtgaaaggccggttcaccgtctccagagacaatgccaagaacttactgtttctacaaatgaacattctcaagtctgaggacacagccatgtactactgtgcaagattcgactgggacaaaaattactggggccaaggaaccatggtcaccgtctcctcagccaaaacaacagcccca

SEQ ID NO: 1084 - DNA, 4224 bp, Cricetulus griseus
  misc_feature (5)..(35): n is a, c, g, or t
  misc_feature (3209)..(3229): n is a, c, g, or t
  misc_feature (3232)..(3244): n is a, c, g, or t
  misc_feature (3246)..(3268): n is a, c, g, or t
  misc_feature (3621)..(3645): n is a, c, g, or t
  misc_feature (3744)..(3759): n is a, c, g, or t
tctcnnnnnnnnnnnnnnnnnnnnnnnnnnnnnnnaaaaggaggggagagggggtaaaaaaatgctgcactgtgcggctaggccggtgagtgagcggcgcggagccaatcagcgctcgccgttccgaaagttgccttttatggctcgagtggccgctgtggcgtcctataaaacccggcggcgcaacgcgcagccactgtcgagtccgcgtccacccgcgagcacaggcctttcgcagctctttcttcgccgctccacacccgccaccaggtaagcagggacaacaggcccagccggccacagccctcccgtgggcagtgaccgcgctgcagggtcgcgggggacactcggcgcggacaccggggaaggctggagggtggtgccgggccgcggagcggacactttcagatccaactttcagtccagggtgtagaccctttacagccgcattgccacggtgtagacaccggtggacccgctctggctcagagcacgcggcttgggggaacccattagggtcgcagtgtgggcgctatgagagccgatgcagctttcgggtgttgaaccgtatctgcccaccttggggggaggacacaaggtcgggagccaaacgccacgatcatgccttggtggcccatgggtctttgtctaaaccggtttgcccatttggcttgccgggcgggcgggcgcggcgggcccggctcggccgggtgggggctgggttgccactgcgcttgcgcgctctatggctgggtattggggcgcgtgcacgctggggagggagcccttcctcttccccctctcccaagttaaacttgcgcgtgcgtattgagacttggagcgcggccaccggggttgggcgagggcggggccgttgtccggaaggggcggggtcgcagaggattcggggcgcctgctcgcgcttcctgctgggtgtggtcgcctcccgcgcgcgcactagaccgcccggcgggggggcgaaggcgggtcttgcgcccgtttggggagggggcggagacctggcttcctgccgtggggccgcctccggaccagcgtttgcctcttatggtaataacgcggccggcctgggcttcatttgtcccctgagtttgggcgcgcgccccctggcggcccgagaccgcggcttgccggaagtgggcagggcggcaacggctgcgcctagtggcccgccagtgaccgcgaccctcttttgtgccctgatatagttcgccatggatgacgatatcgctgcgctcgttgtcgacaacggctccggcatgtgcaaagccggcttcgcgggcgacgatgctccccgggccgtcttcccatccatcgtgggccgccctaggcaccaggtaggtgacccttccctttgcgggtagcgatgctggggttttcctggggggagaggtgaccatattgagaacatcgttcccctccgcagggcgtgatggtgggcatgggccagaaggactcctacgtgggtgacgaggcccagagcaagagaggtattctgaccctgaagtaccccattgaacacggcattgtcaccaactgggacgatatggagaagatctggcaccacaccttctacaacgagctgcgtgtggcccccgaggagcaccctgtgctgctcaccgaggcccccctgaaccccaaggccaaccgtgaaaagatgacccaggtcagcagccagggtggccacctccatctttgccaacttctcggccacgccctttctcaattgtctttcttctgccgttctcccataggactctcttctatgagctgagtctcccttggaactttgcagtttctgctttttccccgatgaggtcctttttttctcttgattgcctttctgactaggtgttttaaaccctacggtgctgtgggtgtaggtactaacaatgactcgtgtgacaaacctaatgaggctggtgataagtggccttggagtgtgtattcagtagatgcacagtaggtttaaaatggagcccctgtcctgagatttctcccagcacacttaccttagctgtgttcttgcactctgcatgtcccatatctgtcctgacagtcctacctgccttgactacttgtggcttttggagtttgacaatgcctcatttttctttatagatcatgtttgagaccttcaacaccccagccatgtacgtagccattcaggctgtgctgtccctgtatgcctctggtcgtaccactggcattgtgatggactccggagacggggtcacccacactgtgcccatctatgagggctacgctctccctcatgccatcctgcgtctggacctggctggccgggacctgacagactacctcatgaagatcctgaccgagcgtggctacagctttaccaccacagctgagagggaaattgtgcgtgacatcaaagagaagctgtgctatgttgccctggacttcgagcaggagatggccactgctgcatcctcttcctccctggagaagagctatgagctgcctgatggccaggtcatcaccattggcaatgagcggttccgttgccctgaggctcttttccagccttccttcctgggtgagttgaagtgacctagtttcttcatctaatggtgaccaactcttgatcttgagaccatgctataagtctatctttctctttcccttttccctcaggtatggaatcctgtggcatccacgaaactacattcaattccatcatgaagtgtgacgtcgacatccgcaaagacctctatgccaacacagtgctgtctggtggtaccaccatgtacccaggcattgctgaccggatgcagaaggagatcactgctctggctcccagcaccatgaagatcaaggtgagctaagcatccttagccttggacccatgatgggcccttccaggtcaaccccttgactgtgggtaagacaggagtccagagcactcactatcactgtgtcttggcttctcagatcattgctcctcctgagcgcaagtactctgtgtggatcggtggctccatcctggcctcactgtccaccttccaggagatgtggatcagcaagcaggagtacgatgagtccggcccctccatcgtccaccgcaaatgcttctaggcggactgttactgagctgtgttttacaccctttctttgacaaaacctaacttgcgcagaaaaaaaaatgagacaacattggcatggctttnnnnnnnnnnnnnnnnnnnnnaannnnnnnnnnnnngnnnnnnnnnnnnnnnnnnnnnnngttgttttggcgcttttgactcaggatttaaaaactggaacggtgaaggcgacagcagtcggttggagcaaacatcccccaaagttctacaatgtggctgaggactttgattgcacattttttttcttttttaagtcattccaagtacccatgagatggctacaggaagtccctcaccctcccaaaagccatccccattccctagaagaggatggctgagtccattccctgagtccacaccggggaggtgacagcattgcttctgtgtaaattatggactcccaaaatttttttaaatcttccgccttaaaacttcttttgtttttaattttggatggtcaaccatcgtggcnnnnnnnnnnnnnnnnnnnnnnnnnccccccaacttgatgtatgaaggcttttggtctccctgggagtgggttgaggtgttgaggcagccagggcttgcctgtacactgacttgagaccagttnnnnnnnnnnnnnnnnttacaaacagtgctgcttgtttgtggctttgctagattctgggtagcagcgggggagggggtcactattacctttgctccaagaggttctagggtggtctgggccttgcctagtagtttttagtgggaggacacaagcatcatgacctttaaccagttatcacaaataccctgtccattgagttctgaagtcttaattgtgtcttggttggaagggtgtccatcctgaattgggaataccccctgggccaagttgggttcctgcagcaaacaaccctgtaatctcaaccttcctctacctttgtgggaagcaggaatcctgttgggagggtagctttactgcctttgagttctgcaagacagtgggaagtaaaagcagtctcggttctcttgctttaccagatacatgatcacaaagtttaagggtgttaaggctccccaggcatgggtatctttccccggtacc

SEQ ID NO: 1085 - DNA, 2100 bp, Cricetulus griseus
aggagctccggggtcccagtcatctgcccccccatggagctgaggccctggttgctatgggtggtagcagcagcaggagccttggtcctgctagcagctgatgctcgtggccaaaagatcttcaccaacacttgggctgtgcacatctctggaggcccagctgtggctgacagcgtggcacggaagcatgggttccacaacctgggccagatctttggtgactattaccacttcaggcatagagcagtgacaaagcggtccttgtcacctcaccgccagcgacacatccggctacagagggagcctcaagtaaagtggctggagcagcaggtagcaaaacggaggaccaagcgggacgtgtatcaggagcccacagaccccaagtttccccagcagtggtacctgtctggtgtcactcagcgagacctgaatgtgaaggaagcctgggcccagggcttcacaggtcacggcattgtggtctccatcctggacgacggcattgagaagaaccatcccgacttggcaggcaattatgatcctggagccagttttgatgtcaatgaccaggaccctgaccctcagcctcggtatacacagatgaatgacaacaggcacggcactcggtgtgcgggtgaggtggcagcagtagccaacaatggtgtctgtggtgtaggtgtagcttacaacgcccgaattggaggggtgcgcatgttggatggcgaggtgactgacgcagtagaggctcgttcgctgggtttgaaccccaaccacatccacatctacagtgccagctggggacctgaggatgatggcaagaccgtggatgggccagcccgtctcgctgaggaggccttttttcggggagttagccagggtcgtggtgggcttggctccatctttgtctgggcctcagggaacgggggccgggaacatgacagctgcaactgtgatggctacaccaacagcatctacacgttgtccatcagcagtgccacacagtttggcaatgtgccctggtacagtgaggcctgctcctccactctagccaccacctacagcagtggcaaccagaatgagaagcagattgtgacaactgacttaaggcagaagtgcacagaatcacacacaggaacctcggcttctgccccgctggcagctggcatcattgctctcaccctggaggccaataagaacctcacctggcgggacatgcagcacctggtggtacagacctctaagccaggccacctcaatgctaatgattgggccaccaatggtgtgggccggaaaggtgagggcatggtgacccggaatttcaggctctgagggacattggcaaacggctggaggtgcgcaaatccgtgacagcatgcctgggcgagcccaaccacatcacccggctggaacatgctcaggcacggctcaccctgtcttacaatcgccgtggtgacctggccatccaccttatcagccccatgggcacacgttccaccttattggctgccagtgtgcgaggaaggcttctcactgcaccagaaaagctgtgtccagcactgcccaccaggcttcacaccccaagtcctcgatacacactacagcactgagaatgatgtggagatcatccgcgccagcgtctgcactccctgtcatgcctcatgtgccacctgccagggcccagctcccacagactgcctcagctgccccagccatgcctccctggaccctgtggagcaaacctgctcccgacaaagccagagcagccgagagtctcggcctcagcagcagcctcctgcactgcatccagaggtggaggtggagccccggctgcaggctggactgctgccctctcatctgcctgaggtggtggccggcctcagctgcgttttcattgtgctggtctttggcactgtcttcctggtcttgcagctgcgctcaggctttagcttccggggagtgaaggtgtacaccatggaccgtggcctcgtttcctacaaggggctgccccctgaagcctggcaagaggagtgcccatctgactcagaagaggatgagggccggggcgagaggaccgcctttatcaaagaccagagcgccctttga

SEQ ID NO: 1086 - DNA, 2527 bp, Cricetulus griseus
aggagctccggggtcccagtcatctgcccccccatggagctgaggccctggttgctatgggtggtagcagcagcaggagccttggtcctgctagcagctgatgctcgtggccaaaagatcttcaccaacacttgggctgtgcacatctctggaggcccagctgtggctgacagcgtggcacggaagcatgggttccacaacctgggccagatctttggtgactattaccacttcaggcatagagcagtgacaaagcggtccttgtcacctcaccgccagcgacacatccggctacagagggagcctcaagtaaagtggctggagcagcaggtagcaaaacggaggaccaagcgggacgtgtatcaggagcccacagaccccaagtttccccagcagtggtacctgtctggtgtcactcagcgagacctgaatgtgaaggaagcctgggcccagggcttcacaggtcacggcattgtggtctccatcctggacgacggcattgagaagaaccatcccgacttggcaggcaattatgatcctggagccagttttgatgtcaatgaccaggaccctgaccctcagcctcggtatacacagatgaatgacaacaggcacggcactcggtgtgcgggtgaggtggcagcagtagccaacaatggtgtctgtggtgtaggtgtagcttacaacgcccgaattggaggggtgcgcatgttggatggcgaggtgactgacgcagtagaggctcgttcgctgggtttgaaccccaaccacatccacatctacagtgccagctggggacctgaggatgatggcaagaccgtggatgggccagcccgtctcgctgaggaggccttttttcggggagttagccagggtcgtggtgggcttggctccatctttgtctgggcctcagggaacgggggccgggaacatgacagctgcaactgtgatggctacaccaacagcatctacacgttgtccatcagcagtgccacacagtttggcaatgtgccctggtacagtgaggcctgctcctccactctagccaccacctacagcagtggcaaccagaatgagaagcagattgtgacaactgacttaaggcagaagtgcacagaatcacacacaggaacctcggcttctgccccgctggcagctggcatcattgctctcaccctggaggccaataagaacctcacctggcgggacatgcagcacctggtggtacagacctctaagccaggccacctcaatgctaatgattgggccaccaatggtgtgggccggaaagtgagccattcgtatggctacgggctgttggatgcaggtgccatggtggccctggcccagaactggacaacagtggccccccagcggaagtgcatcattgacatcctggtggagcccaaggacattggcaaacggctggaggtgcgcaaatccgtgacagcatgcctgggcgagcccaaccacatcacccggctggaacatgctcaggcacggctcaccctgtcttacaatcgccgtggtgacctggccatccaccttatcagccccatgggcacacgttccaccttattggctgccagaccccatgactactctgctgatgggtttaatgactgggctttcatgacaactcattcctgggatgaggacccctctggcgaatgggtcctagagattgaaaataccagcgaagccaacaactatggtattggaagcacttggagagtggaggaggggaaggagagctggtgggctctaggatgttgacatggtgttcacaccctgacccttgtctcttatcaactctggaatagggacgctgaccaagttcactcttgtgctatatggcacagcctctgaggggctctctacacctcctgaaagcagcggctgcaaaaccctcacgtccagccaggcctgtgtggtgtgcgaggaaggcttctcactgcaccagaaaagctgtgtccagcactgcccaccaggcttcacaccccaagtcctcgatacacactacagcactgagaatgatgtggagatcatccgcgccagcgtctgcactccctgtcatgcctcatgtgccacctgccagggcccagctcccacagactgcctcagctgccccagccatgcctccctggaccctgtggagcaaacctgctcccgacaaagccagagcagccgagagtctcggcctcagcagcagcctcctgcactgcatccagaggtggaggtggagccccggctgcaggctggactgctgccctctcatctgcctgaggtggtggccggcctcagctgcgttttcattgtgctggtctttggcactgtcttcctggtcttgcagctgcgctcaggctttagcttccggggagtgaaggtgtacaccatggaccgtggcctcgtttcctacaaggggctgccccctgaagcctggcaagaggagtgcccatctgactcagaagaggatgagggccggggcgagaggaccgcctttatcaaagaccagagcgccctttga

SEQ ID NO: 1087 - DNA, 2501 bp, Cricetulus griseus
  misc_feature (397)..(411): n is a, c, g, or t
  misc_feature (838)..(861): n is a, c, g, or t
  misc_feature (1334)..(1383): n is a, c, g, or t
  misc_feature (1395)..(1419): n is a, c, g, or t
  misc_feature (1495)..(1535): n is a, c, g, or t
  misc_feature (1683)..(1725): n is a, c, g, or t
  misc_feature (2109)..(2128): n is a, c, g, or t
cgcgagccgctttgtctcgggcggggcgcgcggagaggccgccaggtgccccccccgcgggcccgggcggcggggcggacgagcgcggtgccgggccccggggcggagggcgcgccgggatgggccccaagcggcggcagctgacgttccgggagaagtcgcggatcatccaggaggtggaggagaacccggacctacgcaagggcgagatcgcgcggcgcttcaacatcccgccgtccacgctgagcaccatcctgaagaacaagcgcgccatcctggcgtcggagcgcaagtacggagtggcctccacctgccgtaagaccaacaagctgtccccgtacgacaagctggaggggcttctcatcgcttggttccagcagatccgcgccgcgggccnnnnnnnnnnnnnnntcatcctgaaagagaaggcgctacggatagcggaggagctgggcatggacgacttcacggcttccaacggctggctggatcgcttccgccggcgccacggtgtagtggcctgcagcggcgtgacccgctcccgggcgcgaacgtctaccccacgggccccagcggcacctgccggcccagccgccgtgccctctgagggcagcggtggcagtacaccaggctggcgcactcgggaggagcagccgccgtcggtggctgaggggtacgcctcgcaggacgtgttcagcgccaccgagaccagcctgtggtacgactttctgtccgaccaggcctcggggctgtggggaggtgatggaacggctcgccaggccacccagcgtcttagcgttttgctgtgcgccaaccgcgatggcagcgaaaagcttcnnnnnnnnnnnnnnnnnnnnnnnnccaagccccgtgcaagccagggtggtctgccctgcgactacactgccaactctaagggtggagtcaccacccaggccctggctaagtacttgaaagctctggacacccgaatggctgcagaatctcgtcgggtccttctgcttgcaggccgtctggctgcccagtccttggacacctcgggcctgcggcacgtgcagctggccttcttcccccccggcaccgtgcatcctttggagcgaggagtggtccagcaggtgaagggccactaccgccaggctatgttgctcaaggccatggcagcactcgagggccaggatccctcaggcctgcagctgggcctagtggaggccttacactttgtggctgcagcctggcaggcagtggagcccgcggacatagcaacttgctttcgcgaggccggttttggaggtggccttaatgccactatcaccacttccttcaaaagcgagggnnnnnnnnnnnnnnnnnnnnnnnnnnnnnnnnnnnnnnnnnnnnnnnnnngagggtgaaggnnnnnnnnnnnnnnnnnnnnnnnnngaaggggaggaggaaggaggggaaggagaggaggtgggagaggaggaggaggtagaagaggagggtgatgagagtnnnnnnnnnnnnnnnnnnnnnnnnnnnnnnnnnnnnnnnnngctcctctgagggcttagaggctgaagactgggcacagggagtagtggaggccagtggtggctttgggggttacagtgtccaggaagaggcccagtgcccaactctccatttcctggaaggtggggaggactctgactcggacagtgnnnnnnnnnnnnnnnnnnnnnnnnnnnnnnnnnnnnnnnnnnnaagatgacgatgacgatgaggatggtgatgaggtccctgtgcccagctttggggaggccatggcttactttgccatggtcaagaggtacctgacctcctttcccattgacgaccgcgtacagagtcacatccttcacttggaacatgatctggtccatgtgactaggaagaaccatgcctggcaggcgggagttcggggtcttggacaccaaagctgagctgctggacatatctgtgctccagcccagatgcgagcacctgccaaggcaggagaactccgggcagctgctggagacagctggagaagtcccagggccttcagcaatgctttgccagcctgagacaggccaggggttgaggtctgcctcactgctattgcctctnnnnnnnnnnnnnnnnnnnnccccattagtccctgggctcagggcactgggtgggaggggagctgtccggtgctaccacaccatgccatcagtgggctagaccacagcagcagccagggacgggtcctggaagctcttggccagagagtgcctctccccctgcctcccaaccaggtctttggtggggggatcccaaagccattctggaagggctccagaggaaggtccagcctaggctcccacaaaattagcagcccccctcctgcacctctaggttgtctaaagaagcacagtgtaacttagggcaggctcctgaacctgcctcttcctgctttccacctccctaaatccctttctctggcccagtctttggcccttggttttctttctaga

SEQ ID NO: 1088 - DNA, 1906 bp, Mesocricetus auratus
  misc_feature (255)..(275): n is a, c, g, or t
  misc_feature (336)..(361): n is a, c, g, or t
  misc_feature (663)..(681): n is a, c, g, or t
  misc_feature (691)..(721): n is a, c, g, or t
  misc_feature (727)..(747): n is a, c, g, or t
  misc_feature (977)..(991): n is a, c, g, or t
  misc_feature (1442)..(1502): n is a, c, g, or t
  misc_feature (1505)..(1519): n is a, c, g, or t
ggtacctgagtttcttcttctacctcccctccacagaaataccacgctgcttcattttagaattatgtttctaccaggactccggtgggagtttccagtggcaagcattgactgagtcagctactgtgctttagctatacaagggctttaaagaagtttcctagcgaataatctcttgtaaaagtggtgagaactgggactcatcctccaaatctcttggaaatgcaactcaggcaggaagacctctgtgagtcnnnnnnnnnnnnnnnnnnnnnagtgagttccaagacagtcagctatacagtgaaaccctgtcttgaaaccctgctcccaaannnnnnnnnnnnnnnnnnnnnnnnnngggaaggaagaaaaagaaatgcaacgcacaaaaggcaggactctggtccccagtctggttacctgttggtacagagctctgctctggtggcctcagttggccctactagcacattaatggtggccttcctggtttgttccaacctctgtagtttcacataaagaacagtcacatttcccagacagaagatctaattcaatattatctttatcagtgcggtatgacttaaagtcataaaattaagagtgatttttataatgatttatgagtagtataaaaattaaaaaataagtcaagtggtnnnnnnnnnnnnnnnnnnngccagcactnnnnnnnnnnnnnnnnnnnnnnnnnnnnnnngttccnnnnnnnnnnnnnnnnnnnnnaaagttctaggacaaccaaggctacacagagaaactatctttaaaaacccaataaataaataagtaaataataataacgataggtaatgtgttctagttcagttgggctcagtggggttggggctaattgtacttcatcacgttttcattataaatagggaaatattctaacaggcagttaatgttctagctttggtgatgattttgtacttgagcagaaaagtatcacnnnnnnnnnnnnnnnttggtttctttggcatggctccttggtgcctctgcatttatgcatctgtaagactatgggctggtttagtttggctctcaagatgaaaacttccttgattttccttcttgaatgaaacacatttcttaaaagaccaaaaactgtagcccacctgtgtttaatcattaatagtcagccctcccatgaacttaggtcctgattttggagtttggaatctgacctttcccctatagataaacactgttgtcgcagattctgaggagggtcacttccttgctgcctgccaccagaagagtccgcttctcagagattcctgggaagtggatgccttagagggtagccaggcagcatgattctcctggcagtgcttttcctctgcttcttctcctcgtactctgcctctgttaaaggtaagtgtatgttgcgttttcttaaacgtggatctctctcnnnnnnnnnnnnnnnnnnnnnnnnnnnnnnnnnnnnnnnnnnnnnnnnnnnnnnnnnnnnnttnnnnnnnnnnnnnnnagagttcctaactatacaatttttgaaagtgtatatggttggaatatttgggggtaagtgactaagtggaaatgaaaaaaattaatttctgactctgttttacgagagtggaggtccctttttgcttcacgccatccctgagaccagtgtgtttctagcttcgacttgttattcctggaaaaagatttgagctattgttacctgctgctgacagacacacagaatgcaatgccttcatttgaattgtaaaatgggattttaaaaacccagtcccgaaaattccttccagttgcttagcaatgggacagcaaaaagaatcgaatccaactgggaaaaaaaggcatttgattgccaaagaattatgaatgaaatgttagagcatgtatg

SEQ ID NO: 1089 - DNA, 2449 bp, Mesocricetus auratus
tgaatctgcggctttcatgaagtctccctacaaggtccttcactttgctcctaaacgtggatttttttttcttccccctgccattctagtctccccgcctcttccttgcagccggactccctcctccggtccctgcccacacgcgcactcctctgccccgcgttggccccagcgcccagccctccagccagagggagccagtcaccagacggcagcacctggctggagaggttgggcgggccgcgagggtggggatccgcgggaaccggcgagccgggagctggagcagaagctggaccaagcgcgagcaggagaatggagtctcccgacagcctgccgaggctgatgtgaaattggaccatctgcttccagttggttctgtttcctcttcttcttgtattttcttccctcgccatccacagtggagtgaattatcagatcttgctccgctcccagaaagacgaccaccatggagtgagcccaccctgtccgccacaaggaaaagcacagagaagacatgacgatggccaagttaactgaatccatgacgaatgtcctggaaggcgattccatggaccaggacgtggaaagcccagtggccattcaccagccaaagttgcctaagcaggccagggacgaccttccgagacacatcagccgagacaggacaaagaggaaaatccagaggtatgtgaggaaggatgggaagtgcaacgtccaccatggcaatgtgagggagacctaccggtacctgacagacatcctcaccaccctcgtggacctaaagtggagattcaacctgctcatcttcgtcatggtctacacggtgacgtggctcttctttgggatgatctggtggctaattgcatacatccggggagatatggaccacgtagaggacccctcatggactccctgcgtcaccaacctcaatgggtttgtctctgcttttttattctcaatagagacagagaccaccatcggttatggctaccgggtcatcacggacaaatgccccgagggaattattctcctcttaatccagtccgtgttggggtccattgtcaatgcattcatggtaggatgtatgtttgtgaaaatatcccaacccaagaagagggcagagaccctggtcttttccacccacgcagtgatctccatgcgggatgggaaactgtgcctgatgttccgggttggggacctgaggaattcccacatcgtggaggcttccatcagagccaagttgatcaaatccaaacagacttcagagggggagtttatccccctcaaccagacagatatcaacgtagggtactacaccggagatgaccgtctctttttagtgtcaccattgatcattagccatgaaattaaccaacagagtcccttctgggagatctccaaagcccagctacccaaagaggaactggagattgtggtcatcctggagggaatggtggaagccacaggaatgacgtgccaagcccggagctcctacatcaccagtgagatcctgtggggttaccgcttcactccggtcctgacactggaagacgggttctacgaagtcgactacaacagcttccacgagacctatgagaccagcaccccgtcccttagtgccaaagagctagctgagctggctaacagggcagagctgcccctgagttggtctgtgtccagcaaactgaaccagcacgcggaactggagacagaggaggaagagaagaacccggaagagcagacggagaggaatggtgacgtggcaaacctagagaatgaatccaaagtgtaggccctgctgggtcggcctctccctccctctcagacgtgacccttccttgtctctctcattccccgcccccttccgtcgctctctttggctctgatcccggtttgtttacgtttaattttggcatttccagaaagcaaatcctcgaggtgtaaaatgcctacctgccctctctcggatgttcaggtggacaagcagacagggatttggttgcggtacaagtacctttcacttgtggcccaagcctggcctctctcctctcccttcaccccccccaggagagacttagacgcttacccccacccctgcactgtccaatgcaagtcactcaaaagagctgtcaaagggtttttacccagtgtcacaaaggtcacctgttcaccatggccataggtcacacagaacatgtcccttcagctttattgagcctggtccatctcacctagcacagggcaggcgcttgcccgcacagacgctgagggcgcaggacccagctgagctaaggttagaccactgtacatagatctgccccgtggaattactctcctttggcactcagtaatagaacatgacatgcagtggggcggagctcctggcaatgtacatagatgcatcattcctgtagctttagacgtgcaactttagagacaagaagca

SEQ ID NO: 1090 - DNA, 4410 bp, Cricetulus griseus
  misc_feature (327)..(352): n is a, c, g, or t
  misc_feature (355)..(367): n is a, c, g, or t
  misc_feature (2321)..(2349): n is a, c, g, or t
  misc_feature (2851)..(2866): n is a, c, g, or t
  misc_feature (2868)..(2882): n is a, c, g, or t
  misc_feature (2902)..(2923): n is a, c, g, or t
  misc_feature (2945)..(2962): n is a, c, g, or t
  misc_feature (3418)..(3480): n is a, c, g, or t
taacacgttggcggctggcacgggccggtgaggcggtaccaggtgggggccgtcgggtgtcatgggcggtggcggcggcaccgcctccgcgtctccctgagccggacctcacgggggactcagcgccaagctgggcgatggacgagagcagcgagctgggcggtctggagaccatggacaccctcacggagctgggcgacgagctgactctgggggacatcgatgaaatgctacagttcgtcagcaatcaagtgggagagttccctgatttgttttcagagcagctatgcagctccttccctggtggtggtagcagtggcagtagtnnnnnnnnnnnnnnnnnnnnnnnnnntgnnnnnnnnnnnnnaggcaatggtggtgcagccacagatcctggagtgcagcggtcgttcagccaggtcccattacctaccttctccccctcaactgcctcccctcaggctctagccttgcaggtcaaagtctctcctaccccacccagggcaacccctgttctccagcctagaccccagccccagccgcagccccagccttcagctcagcttcagcaacagacggtaatgatcaccccgacattcagcactgctccacagacaaggatcatccagcagcctttgatataccagaacgcagcaaccagcttccaagtcctgcaggctcaagtccaaagcctggtgacatcctcgcaggtacagccagtcacgatccagcagcaggtgcaaactgtacaggctcagcgggtgttgacacaaacagccaatggcacgctgcagacccttgccccagcaacagtgcagacagttgctgcaccccaggtgcagcaggtcccggtcctggttcagcctcagatcattaagacagattcccttgttttgaccacactgaaaacagatggcagccctgttatggctgcagtccagaacccagccctcactgccctcaccacccccctccagacgggcgcccttcaagtaccaactctggtgggcagcaatgggaccattctgaccacaatgcctgtgatgatgggacaagagaaagttcctattaagcaagtacctggcggtgtaaagcagctagagccccccaaagaaggagagaggaggacaacacacaacatcattgaaaagcgatatcgatcctctatcaatgacaaaatcatagagttgaaggacttggtcatgggaacagatgccaagatgcacaaatctggcgttctgaggaaggccattgattacatcaaatatttgcagcaggtcaatcacaagcttcgtcaggagaacatggtactgaagctggcaaatcagaaaaacaagctcctgaagggcattgatttaggcagtctggtggacagtgatgtggacttgaagattgaagactttaatcagaatgtccttctgatgtctcccccggcctctgactcggggtcccaagcaggcttctctccctattctattgactctgagccaggaagtcctctgctggatgatgcaaagaagtttcaggctcctgcaaaagagatctgtgtggggtgtcagaagaccgtgtaccccatggaacgtctcctggccaaccagcaagtgtttcatatcagctgtttccgctgctcctactgcaacaacaaacttagtctaggaacgtatgcatctttacacggacaaatctattgtaagcctcacttcaatcaactctttaagtctaaaggcaattatgacgaaggctttggccacagaccacataaggatctttgggcaaacaaaagtgaaaacgaagaaacctcagagagatcaccccagtctccagatgttggggagatcccccataactccggggtagaagatgcccccatctctaaggtgggtgtcctggctgcaaatatggaagccaaggcctctcctcagagagagaaggaagataagcctgctgagaccaagaagctgaggattgcctggccgcccccagctgagctgggcagctcaggaagtaccatggaggaagggttcaagggctctaagcccaagtggcctcctgaggatgaaaccagcaagaccgaggctcttggggatgtagatctggacctgaagaagctgaggcgatcttcttcgctgaaggagaggagccgcccattcacggtagccgcttcatttcgaacctcttcgctcaagagccccaagacattgtcacctctcaggaaaggttggagcatgtcggagcagaatgaggagtctggaggcgggatagtcacagcagggaaacaaacagaaaatgccaaagcccctgggaagaaagagaatgtgagnnnnnnnnnnnnnnnnnnnnnnnnnnnnnccagggaggaagtagcgaggaggagcaaggacattcatggtgttgagctggagagtgagaatttcatagaaaatggagcgaacatctatgaaggtgatagcggtgacctcgtgcagcagtctccactagatcccaagtctccaagttggtccggctttgtagacaccactcctactgaagagttcacaacccagaatcaaaaatctcatgatgtggggttccgggagggagaagtggtcagagagctgtcagtggaggaacagataaagagaaaccggtactatgatgaggatgaagatgaagaataacaggccgtcatggtgctggccttaaattcctgtcagcaccagtagtcactgccctttatcaagtggtgcctgagacaggcagccaggcgctagctgtcatttatgtgggagcgactttggaaaggaattccaaaagagaatcaattctaagtgcattattggaaccccatttgaagcctggtgtggtggtgcgnnnnnnnnnnnnnnnncnnnnnnnnnnnnnnngcagcagatctctgagtttnnnnnnnnnnnnnnnnnnnnnntgagttccaagacagccgggannnnnnnnnnnnnnnnnngtctcaaaaccaaaaaaagaaagtccatttcagcagtgaagatgtgccataagagctaagcagggggaaggctctcattggtgtagcccgtcgtccactgcattccccaaagtgaatattcaagtgtctaggcagtggcacattttcacactacaaataccattgtggaattggagacaaacaacagatttagatgcctacatatcatgaccagaagcactttagtataaagggcacagtgtagatatttttaccaatttcattttttagtactcaactgttgaaatcaaatatttagtctttcaaattctttaatgctttttctccctctggtagatatgggaacttattgctctgcattttttaattattgaggtataatacagcaacctctggcccagtgagatggctcactgagtaatggtgcttgctacacaaacctgaccacctgagttnnnnnnnnnnnnnnnnnnnnnnnnnnnnnnnnnnnnnnnnnnnnnnnnnnnnnnnnnnnnnnnagtgccctgtagcacacatgcccatcaataataataataaacaattaaaaaaataagtcaccctttcgagatacctttgagaacaaagaactggcctgtatgctttggtgcttggagagacccactatagcatttgccagagtgtcattctgaactctaggtgattgcttccctagagttcccctgtttgtgctctcacactttacagaaagctgcactgtctttacaagaccttctggatcagggttcaccgtgctttgggtaaaacaacaatggagactccaaaggagggaaaacaagagggactgccagagctcagatctccacggccaccctgaagcaaatcttgtcaatacctatcagctctgaaatgtattgacttttgtggcagatagtatctccggtttggatggtgtcctagcttgattcactgagtgtgtaataaaaccctgggcagaagtaaggaagaagttcatttccacttacaggtcacagccggttgtcaagggaagtgaggcaggaacatggctccctggctccatttccatgtcttactcagcttgcttttcttatacaaccagggccgcctgccaaggggtggctctgctcacaacagtaacaacaaaaagcacttcagacaatgcccacagactaatctgttagagacagtccctcaattgagatccccaggcaattatatttgtcaaattggcaaaacccagcacaggcggttttctctagcattaagactttagaacatttgagcacatttgttgtaagtgactgatatcccaaatcatgtatggctgagggtgtttttgcatttgtagagatttagctctattttagagatgtaaaataatgtttccttatagtcttgtttagcctaaaacatttttattcaataaagcttttaatttacatttcaac

SEQ ID NO: 1091 - DNA, 1747 bp, Cricetulus griseus
  misc_feature (330)..(355): n is a, c, g, or t
  misc_feature (358)..(370): n is a, c, g, or t
taacacgttggcggcggctggcacgggccggtgaggcggtaccaggtgggggccgtcgggtgtcatgggcggtggcggcggcaccgcctccgcgtctccctgagccggacctcacgggggactcagcgccaagctgggcgatggacgagagcagcgagctgggcggtctggagaccatggacaccctcacggagctgggcgacgagctgactctgggggacatcgatgaaatgctacagttcgtcagcaatcaagtgggagagttccctgatttgttttcagagcagctatgcagctccttccctggtggtggtagcagtggcagtagtnnnnnnnnnnnnnnnnnnnnnnnnnntgnnnnnnnnnnnnnaggcaatggtggtgcagccacagatcctggagtgcagcggtcgttcagccaggtcccattacctaccttctccccctcaactgcctcccctcaggctctagccttgcaggtcaaagtctctcctaccccacccagggcaacccctgttctccagcctagaccccagccccagccgcagccccagccttcagctcagcttcagcaacagacggtaatgatcaccccgacattcagcactgctccacagacaaggatcatccagcagcctttgatataccagaacgcagcaaccagcttccaagtcctgcaggctcaagtccaaagcctggtgacatcctcgcaggtacagccagtcacgatccagcagcaggtgcaaactgtacaggctcagcgggtgttgacacaaacagccaatggcacgctgcagacccttgccccagcaacagtgcagacagttgctgcaccccaggtgcagcaggtcccggtcctggttcagcctcagatcattaagacagattcccttgttttgaccacactgaaaacagatggcagccctgttatggctgcagtccagaacccagccctcactgccctcaccacccccctccagacgggcgcccttcaagtaccaactctggtgggcagcaatgggaccattctgaccacaatgcctgtgatgatgggacaagagaaagttcctattaagcaagtacctggcggtgtaaagcagctagagccccccaaagaaggagagaggaggacaacacacaacatcattgaaaagcgatatcgatcctctatcaatgacaaaatcatagagttgaaggacttggtcatgggaacagatgccaagatgcacaaatctggcgttctgaggaaggccattgattacatcaaatatttgcagcaggtcaatcacaagcttcgtcaggagaacatggtactgaagctggcaaatcagaaaaacaagctcctgaagggcattgatttaggcagtctggtggacagtgatgtggacttgaagattgaagactttaatcagaatgtccttctgatgtctcccccggcctctgactcggggtcccaagcaggcttctctccctattctattgactctgagccaggaagtcctctgctggatgatgcaaaggtatgagcttttgacatttctcaccctcagaatctcttgttttccctaaggcattagtggccaggtgactggatcactgcttaaaacaatgtggggtggagaggaccaggaattctgttatgttagctgcatttaaagtggtgaaaactggtggtgcatgcctgaaatcccagtgggagggaggatgaggcaggaagatcttgagatggtaccaagaccatctccaa

SEQ ID NO: 1092 - DNA, 2458 bp, Cricetinae
  misc_feature (289)..(308): n is a, c, g, or t
  misc_feature (542)..(559): n is a, c, g, or t
  misc_feature (1797)..(1816): n is a, c, g, or t
agaaggcaaagtgtcccgaggctccggggttatgagatcgtcactgctcaggacattctaacaacaggaagtggaaacatgaccaaatcatacagcgagagcggactgatgggtgagcctcagccccaaggtcccccaagctggacagacgagtgtcttagttctcaggacgaggatcatgaggcagacaagaaggaggacgagctcgaagccatgaatgcagaggaggactctctgagaaacggaggagatgaggaggatgaagatgaggacctggaagaggaagacnnnnnnnnnnnnnnnnnnnntcaaaagcccaagagacggggccccaaaaagaaaaagatgaccaaggcgcgcctagagcgttttaaattaaggcgcatgaaggccaacgcccgggaacggaaccgcatgcacgggctgaatgcagcgctggacaacctgcgcaaggtggtaccctgctactccaagacccagaagctgtccaagatcgagacactgcgcttggccaaaaactacatttgggctctgtcagagannnnnnnnnnnnnnnnnngccctgacctggtctccttcgttcaaacgctctgcaaaggcttgtcccagcccaccaccaacctggttgctggctgcctgcaactcaatcctcggactttcctgcccgaacagaacccggacatgcccccgcatctgcccacagccagtgcttccttcccggtacacccctactcctaccagtcccccgggctaccgagccctccctatggcaccatggacagctcccatgtcttccaagtgaagccgccgccacatgcctacagcgcgactttggaacccttctttgaaagccccctgactgattgcaccagcccgtcttttgatggacccctcagcccgccgctcagcatcaatggcaacttctctttcaaacacgaaccatccgccgagtttgaaaaaaattatgcctttaccatgcactaccctgcagcgaccctggcagggccccaaagccacggatcaatcttctcgggtgccactgcccctcgctgcgagatccccatagacaatattatgtctttcgatagccattcacatcatgagcgagtcatgagtgcccagctcaatgccatctttcacgattagaggcacgtcagtttcaccattcccgggaaacgaacccactgtgctttcagtgactgtcgtgtttacagaaggcagcctttttgctacgatttctgcaaagtgcaaatactcaaagcttcaagtgatatatgtatttattgtcgttactgcctttggaagaaacaggggatcaaagctcctgtttaccttatgtattgttttctatagctcttctattttaaaaataataacagtaaagtaaaaaagaaaatgtgtaccacgaatttcgtgtagctgtactcagatcatattaattatctgatcgggataaaaaaatcacaagcaataattaggatctatgcaatttttaaactagtaatgggccaattaaaatatatataaatatatatttttcaaccagcattttactacttgttacctttcccatgctgaattattttgttgtgattttgtacagaatttttaatgactttttataacgtggatttcctattttaaaaccatgcagcttcatcaatttttatacatatcagaaaagtagaattatatctaatttatacaagataatttaactaatttaaaccagcagaaaagtgcttagaaagttattgcgttgccttagcacttctttcttctctaattgtaaacagnnnnnnnnnnnnnnnnnnnnttgcacaatttgagcaatccatttcactttgaagttgttccctctccttaaaatagaaaccagattcatagtattcaagaggatgaaaaagagatgcatttcttatcaaaacatatcaattcattacttgcacaagcttgtatatacatattataaacaaatgccaacatacacacacactcctttaaatcaaaagctgcttgactatcacacacaatttgcactctttcatttttagtcttttctttgaattccatgattttatggagtgtctgacactgttgatgtttccagaaaatataaatgcatgattttatacatagtcaaacaaatggtggcttgtcatctattcatgtaataaatctgagcctaaaattattcaggttgttaaagttgggattgatacctacgtagtcagttagtacagtagcttaagtaaaattcaaaccattgaatccataattagaacaatagctattgcatgtaaaaatgcagtccagaacaagtgctgcctaggatgtgatgctggtaccactggaaatgacctgtactgtaatcttgtttgtaaccctgtgtattatggtgtaacgcacaatttagaaaacgctcatgcagttgcaataaaaatagtattgaaaatca

SEQ ID NO: 1093 - DNA, 1827 bp, Cricetulus griseus
acgcgcgatagtgccaaactagggtgagagtgcgaagatggcagctgctgaggagccaaagcccaaaaagctgaaggtggaacgccacaagcgctgagtgaaaatgtgttgtttggaatggggaatcctcttcttgacatctctgctgtagtagacaaagatttccttgataagtattcgctgaaaccaaatgaccagatcttggctgaagaaaagcacaaggaattgtttgatgaacttgtaagaaaattcaaagttgaatatcatgctggtggctctacccagaattcaattaaagtggctcagtggatgatccagaagccacacaaagcagcgaccttctttggatgcattgggatagataaatttggggagattctgaagagtaaagctgctgaggcccacgtggatgcccattactatgagcagaatgagcagccaactggaacctgcgctgcatgcatcactggtgacaacaggtctcttgttgctaaccttgctgctgccaactgttacaaaaaggaaaagcatcttgatttggagaataactgggtgctggtagagaaggccagagtatactacatagccggcttttttcttactgtctccccagagtcagtattgaaagttgctcgctatgctgctgagaacaacaggatcttcactttgaacttgtctgcaccgtttattagccagttcttcaaggaatccttgatggaagtcatgccttatgttgacatcctctttggaaatgagacggaagctgccacttttgctcgagagcaaggctttgagactaaagacattaaagagatagccaaaaaggcacaggctcttgcaaaggtgaactcgaagaggccgaggaccgtggtcttcacacaagggagagacgacactgtagtggctacagaaaatgaagtcatggcttttgctgtcttggatcaaaaccagaaagaaatcattgacaccaatggagctggagatgcatttgttggagggtttctctctcaactggtctataacaagcctctgactgaatgcatccgagccggccactatgcagcaagtgtcattattaggcgaactggctgtacctttcctgagaagccagacttccactgatggaagaaagaaaactcaagctgggaggtgcaggctgcagtgacctcgtcctaagtgttcctgccataagaaagaataattgtactgctatttttgccaaccatgattctcattaatttagagggctcagtattgctcctagaacctttagtctttgaaatctgggggaaaatgtttatttccataatttgttagtgcctcttaaatgtcaaaaaggaatatagcatttcagtagaaacttttatttcattttccattgtttgtaaattcatctgtatttagtaaattaattggtttttttacatttctgctttaaatacaggtgcaatttaatataatagactttttaaagaaattaatgctaacatcattcttgagctttttatataaatatatttaatttggaggtatgtatatgcacacatgtcatatatatacatatatatctgataactggtcagataaggtacagaaatgtttatcacaccaaaggtggccacataagctcttcattgtgcttcagacatatgatggacttggaacaaccgattcccccaacatttgcatcatgttattcaaatcataacctatgcttactgatggtactctgtaatttgatacaaataaattaccatataggaatcctttctgtcttggcttatgctcaataaaactaagaagaaattgtaaaaaaaaacctcgagg

SEQ ID NO: 1094 - DNA, 952 bp, Mesocricetus auratus
  misc_feature (51)..(67): n is a, c, g, or t
ccggccggcccaccccccatctgcagccatggacgccatcaagaagaagannnnnnnnnnnnnnnnngacaaggagaacgccatcgaccgcgcggagcaggccgaagccgacaagaagcaagctgaagaccgatgcaagcagctggaggaagagcagcaggccctccagaagaagctgaaggggactgaggatgaggtggaaaagatctactcagagtctgtgaaggatgcccaggagaaactggagcaggccgagacgaaggccactgacgctgaggcagatgtggcctccctgaaccgccgcatccagctggtagaggaggagttggatcgggcgcaggagcgcctggctacagccctgcaaaagttggaggaggccgagaaagccgccgatgagagcgagagaggaatgaaggtcattgaaaaccgggccatgaaggatgaggaaaagatggagctgcaggagatgcagctgaaggaggccaagcacatcgctgaggactcagaccgcaaatacgaggaggtggccaggaagctggtgatcctggaaggagagctggagcgctcagaagagaggacggaggtggctgagagccgagccaggcagttggaggaggagcttcgaaccatggaccaggccctcaagtcgctgatagcctcagaggaggagtattccaccaaggaggacaagtatgaagaggagatcaaacttctggaggagaagctgaaggaggctgagacccgagcagagtttgctgaaagatctgtggcaaagttggagaaaaccatcgacgacctggaagagactttggctagtgccaaggaagagaacgtggagattcaccagaccttggaccagacccttctggaactcaacaacttgtaagggctggccgtgctgccttccatatagctgcctcctcaggccaataaaacggatgttcctggcgca

SEQ ID NO: 1095 - DNA, 1290 bp, Cricetulus griseus
ccgtctctggtgtttctaccgtgtgtacctgctcgcgtgcaatccgccgccatcgcgctttgggcgagcattgtaatgggtagtagagaggcggcagccgagcggaggccgacctggctttggcgatggtggcgcgcgctctggaggaccgatcggagaccagcgccaggagcgctcactgatgtggaggtgacggaggagcttttggtgtgacctggcgccatgtgtgtgataccacacgagcttgaccgagcgtgccacgcaatcataattcagcgaaccttttgcttcgatgaggtgtgaagtggtgcgtccacctcttgcccctacagaaacttgcaagaaagaagcctatgggaagcaacttgaggcagaggcaggcatcgtgttggtgatgactagaagacatacgtggcttggaagatgacgtgaaatacacaggaaaggaaagaagtaaaaggatgttttgcttaagagtatgccatttgcaaattcattcaataatttggagatttatataagggcctgttcagacagtggtgtttctgattcctgctaaggaaagtgctccacacaagcctgatgacctgagctaattcctgaggcccacagggtggaagatgagagttgactcctgaaagtatcttcaaaccacacatacacaataagaaaaaacaatatagtaaagctgaaacattagagtgttgctgttttattgaaatgtaaaatggtacaagtaattatggaacaaatgtattccataccttgtgacagttttgtgtaaaaccttaccctcttctaaatgagaaagggattaaagttgtcaaaagaatttaacttttaagtctttcattttcttttataaaggtttatttctgatggtatgttgtatgtttgtgtgccctcatacagctggagttacagacagttgtgagctgcctgaggtgggtactgtgagcaacatgctctcacaagtaccaagtcatctctccagcccaactttttgtgaatgaatttgaaagtttttgcattttggagaaaaagcaaaagggaggtgtgctgttgtaatgtggcagttgccaatcaaaatgaactgtaacttcttgtcagttgctgcctggtaagaggctagcccagacacaacctactagaagtgtccttattacatttcaggaaccatgccaaatagggtggctgcccaatacaaccaggtagtttgtcttcagatccaattgtactgctgtctgtccggttcatttgtagtatacttaataaacatagttttctact

SEQ ID NO: 1096 - DNA, 431 bp, Cricetinae gen. sp.
gccgtgataggtgtgcatatggatgacacagaccccctggtcaccgtgatgaaggtggaaaaggccccccaggagacctatgcagatattgggggactggacaaccaaatccaggaaattaaggaatctgtggagcttcctcttacccatcctgagtactatgaagagatggggataaagccccctaaggtcattctctatggcccaccaggaacaggtaaaacattactggccaaagcagtagcaaaccaaacttcagccactttcttgagagtggttggctcagagcttattcagaagtacctgggggacggacccaaactcgttcgggagctcttccgagttgctgaagaacatgccccatccattgtgtttattgatgaaattgatgccattgggaccaaaagatatgattcaaactctggaggtga

SEQ ID NO: 1097 - DNA, 600 bp, Cricetulus griseus
atctcatcagccgttttaagattcccactgtgtttctgatgagttttctggaggccctggagacaggctatgggaaatataagaacccttaccacaatcagatccatgcagctgatgtgacccagacagtccattgctttctgctccgcacaggcatggtgcactgcctgtcagagattgaggtcttggccatcatctttgctgcagccatccatgactatgagcacacaggcacaaccaacagcttccacatccagaccaagtcagaatgtgccatcctgtacaacgatcgctcggtgctggagaatcaccacatcagctctgtttttcgaatgatgcaggatgatgagatgaacatttttatcaatctcaccaaggatgagtttgtagaacttcgggccttggttattgagatggtgttggccacagacatgtcctgccatttccagcaagtgaagtctatgaagacagccctgcagcagctggaaaggattgacaagtccaaggccctatctcttctgcttcatgctgctgacatcagccatccaaccaagcagtggtcagtccacagccattggaccaaggccctcatggaggagt

SEQ ID NO: 1098 - DNA, 504 bp, Mesocricetus auratus
  misc_feature (17)..(17): n is a, c, g, or t
  misc_feature (315)..(393): n is a, c, g, or t
atctgtgtctccacaantgactccatcgacactgctgtctgatcgaggatctaggaaacatcctacttcttctcaaatccctaaaagaacttctcagtctgccctaaattctctacaacatccatcatctgtcccaggatttctgaatccttcccaatctgaacagagcactccagcacctttgttatctcctccaggtactggaatacatggaccatctgcctcagtttctcagaaaatgttcccaggttctgcaacctcagggtatcctgaacctttgccatatgttggtgggcctctgaaactttccctgtnnnnnnnnnnnnnnnnnnnnnnnnnnnnnnnnnnnnnnnnnnnnnnnnnnnnnnnnnnnnnnnnnnnnnnnnnnnnnnnatcatctcaacctgcccaaaggaatcttggtcatttgtcatatgtgagagagcctgtgagaaattctccatctgtcccagttcatagagcgattcaccattgaacaaatcc

SEQ ID NO: 1099 - DNA, 766 bp, Mesocricetus auratus
gaaaaaacaccccagatctctgcaagacaggtaccatgatgcttcccatgaccctctgtaggatgtcttggatgctgctttcctgcctgatgttcctttcttgggtggaaggtgaagaatctcaaaagaaactgccttcttcacgtataacctgtcctcaaggctctgtagcctatgggtcctattgctattcactgattttgataccacagacctggtctaatgcagaactatcctgccagatgcatttctcaggacacctggcatttcttctcagtactggtgaaattaccttcgtgtcctcccttgtgaagaacagtttgacggcctaccagtacatctggattggactccatgatccctcacatggtacactacccaacggaagtggatggaagtggagcagttccaatgtgctgaccttctataactgggagaggaacccctctattgctgctgaccgtggttattgtgcagttttgtctcagaaatcaggttttcagaagtggagagattttaattgtgaaaatgagcttccctatatctgcaaattcaaggtctagggcagttctaatttcaacagcttgaaaatattatgaagctcacatggacaaggaagcaagtatgaggattcactcaggaagagcaagctctgcctacacacccacaccaattcccttatatcatctctgctgtttttctatcagtatattctgtggtggctgtaacctaaaggctcagagaacaaaaataaaatgtcatcaac

SEQ ID NO: 1100 - DNA, 2078 bp, Cricetinae
ccttcctcgccgccgcccgtgccccttctctggtctgtggtgtagccgggacccaggaccatgtcgctctcacgctcggaggagatgcaccggctcacggaaaatgtctataagaccatcatggagcagttcaaccccagcctccgcaacttcatcgccatggggaagaactacgagaaagccctggcaggtgtcaccttcgctgccaaaggctatttcgatgctctggtaaagatgggggagctggccagcgagagccagggctctaaggaacttggggacgtcctcttccagatggccgaagtccaccggcagatccagaaccaactggaagagatgctaaagtcttttcacaatgagctgctcacacagctggaacagaaggtagagctggactccaggtatctgagtgctgcactgaagaaataccaggcagagcagaggagcaaaggagatgctctggacaagtgtcaggctgagctgaagaagctccgtaagaagagccaagggagcaagaaccctcagaagtactcggacaaggagctgcagtacattgatgccatcagcaacaagcagggtgagctggagaactacgtatctgatggctacaagacagcactcaccgaggagcggaggaggttctgcttcctggtggaaaagcagtgtgctgtggccaagaactctgctgcttaccactccaagggcaaggagctgctagcccagaagctgcccgtgtggcagcaagcctgtgctgaccccaacaagattccagaccgcgctgtccagctgatgcagcagatagccagcagcaacggctccatccttcctagtaccctgtcagcctccaagtccaacctggtcatctcagaccccattcctggagccaaacccttgccagtgccacctgagctggcaccatttgtggggcggatgtctgctcaggagaatgtacctgtcatgaatggcgtcgcaggcccggacagcgaggactacaacccctgggctgaccgcaaggctgcccagcccaaatccctgtctcctccgcagtctcaaagcaagctgagcgactcgtactccaacacacttcccgtgcgcaagagcgtgaccccgaagaacagctatgccaccactgagaacaagacactgccacgttcaagctccatggcagctggcctagaacgtaacggccgcatgcgggtcaaagccattttctcccacgcggctggtgacaacagcactctgctgagcttcaaggagggcgacctcatcaccctgctagtgcctgaggcccgtgacggctggcactatggcgagagtgagaaaaccaaaatgcggggctggtttcctttctcctacactcgggtcctggacagtgacggaagtgacaggttgcacatgagcctgcagcagggcaagagcagcagcacgggcaaccttctggacaaggacgacctggccgtcccccctcctgactacggcacgtcctcccgggccttccccacccagacggccgggactttcaagcagagaccctacagtgtggccgttcctgccttctctcagggtctggatgactacggggcacggtctgtgagcagtgctgatgtcgaagtggccagattttgagctgcccctgactagagttagaatcccttcgctgatgtccatctgaaaccaacagtgaccaatgacagatcagcccctctgctcagctgacagctcatctgtgtcgcctgtgttcccactcacgcaaccgagggtagctgcgatgtgttcctgtctggagaagacagcctggctccactccctaacattgtctcacaccagcccagcctgggctggatcccaggtatccctggggaggtggctgcctcaagaagtcaatgcctgctggccatgggtgtgccccaacagagggggcaggcatctccagtcccgactgtggaaccttgaacacagaagaggacattctgtcagcttgtagttggaagggagcctattcccatgctgattttttttttatttttaattttttttagctcatatgtgtcagatcaataaacatgtgcctacctgta

SEQ ID NO: 1101 - DNA, 1910 bp, Mesocricetus auratus
  misc_feature (323)..(344): n is a, c, g, or t
  misc_feature (1396)..(1419): n is a, c, g, or t
  misc_feature (1761)..(1777): n is a, c, g, or t
  misc_feature (1779)..(1807): n is a, c, g, or t
gaagcaactggtggatggttctgtagccttccaaaggtagtaacaaatgatttgaattattgattctttctgagcctcaccagactatttcttgcaaaactgattgcaatttattcatgaataagaagcaagtcacatagaaaacactgtaatcatacctggaacgtgttgagaaacaagcgctacacggtgattcttctcctgcacgaggaaaatgggctgtgatcggaactgtgggctcattgccggagctgtcattggtgcagtcctggctgtgtttgggggtattctcatgccagttggagacatgcttgttgagaagnnnnnnnnnnnnnnnnnnnnnnttgaagaaggaacaattgctttcaaaaactgggttaaaacaggtaccactgtgtacagacagttttggatctttgatgtacaaaacccagatgaagtggcagtgaacagtagcaaaatcaaagttaaacagagaggtccttacacatacagagttcgctatctagccaaggagaatataactcaggacccggtggacagcactgtctcttttgtacagcccaatggagcaatctttgagccttccctgtctgttggaactgagaatgacaccttcacaattctcaatttggctgtggcagctgcaccacatatatacacaaattcctttgttcaagttgtgctcaattcacttatcaaaaagtccaagtcttctatgttccaaacaagaactttgagagaattgttgtggggttacaaggatccattcttgagtttggttccatatcctattcctactacagttggtgtgttttatccttacaatgatactgcagatggagtttataaagttttcaatggaaaggatgacataaacaaagttgcaataattgattcctataaaggaaaaaggaatttgtcctattgggaaagttattgtgacatgattaatggcacagatgcagcctctttcccaccttttgttgagaagtctcgggtactgcggtttttttcctccgacatttgcagatccatctacgctgtgtttggatctgatattgaacttaaaggaatcccagtgtacagatttattcttccagccaaggcctttgcatcaccagtccagaacccagacaatcactgtttctgcactgaaaaggtcatctctaataactgtacatcatatggtgtgctagacatcagcaaatgcaaacaaggaaggcctgtgtacatttcccttccacattttctacatgcaagtcctgacatctcagaacctattgaaggcttaaatccaaatgaagaagaacataggacatacttggatgtggagcctataactggattcactttacaatttgcaaaacgacttcaggtgaacatcctggtcaannnnnnnnnnnnnnnnnnnnnnnnaaagaatctgaagagaaattatattgtacctatactttggcttaatgagactggaactattggcgatgagaaagcagaaatgttcagaaatcaagtgactggaaaagtaaagcttcttggtctggtagaaatggtcttgcttgggcttggagtcgtgatgtttgttgcttttatgatttcatactgtgcttgcagatccaagaatagaaaataagtagcaaacacgactacatttacgcactggctacatgaagatttttgataaaaccaatctaaaaatgaagacttaatatatgctttgtttttacaaaacacacctatatttagttgaagaaatggtgnnnnnnnnnnnnnnnnngnnnnnnnnnnnnnnnnnnnnnnnnnnnnncatatatctcttatatatataatatatatatatgcactaagccaaagcatatttcaaaatgattaatttgacactgtagcctatattttataaaatccagtac

SEQ ID NO: 1102 - DNA, 225 bp, Cricetus cricetus
ggcacctgaagcagagcccagctagtccagagcgggactacagtgcttactacaagaccatagaggagctcaggattaaaatcctggaagccactactgacaacaaccgggtcatcctggagatcgacaatgccaggcttgctgcagatgacttccggctcaagtatgagaatgagctgaccctgcgccagagtgtggaggctgacatcaacggcctacgtaggg

SEQ ID NO: 1103 - DNA, 146 bp, Cricetus cricetus
gcaaaagctcccacggtggaggttttagctcagggggcttcagcggtggctcttttagccgtggaagctctggtggtggttgctttggaggctcatcaggtggctatggaggtttagggggctttggtggaggctatagaggaagc

SEQ ID NO: 1104 - DNA, 286 bp, Mesocricetus auratus
cgaggtgagaagggtttaatgaagaactgcttagtttgttcaactaacacaagtgatacatctcaaagtttggttggaaaagaaaacaccagtaaagctgaaatgagatttatagctctcatggaacaaatgaaggacatggaggagagaatccaaagcatttcagactcaaaagccaacctcatagattcagaacgcttccagaatttcagtatgacaaccgaccagagacttaatgatgttctactgcagttaaattccttgattaatcggttctcaccgcggc

SEQ ID NO: 1105 - DNA, 2500 bp, Mesocricetus auratus
  misc_feature (656)..(674): n is a, c, g, or t
  misc_feature (1172)..(1202): n is a, c, g, or t
  misc_feature (2474)..(2500): n is a, c, g, or t
gcaccagcagcagcagcactcattgccagcgtcatgccctcctacacggtcactgtggccaccggcagccagtggttcgcgggcaccgacgactacatttacctcagcctcattggctctgcgggctgcagcgagaagcacctgctggacaaagctttctacaatgacttcgagcgtggcgcggtggactcatacgacgtcactgtggatgaagaactgggtgagatccagctagtcagaattgagaagcgcaaatactggctgcatgatgactggtacctgaagtacatcaccctgaagacacccacggactacatcgagttcccatgctaccgctggatcacaggcgagggtgagattgtgctgagggatggacgagcaaagctagcccgagatgatcaaatccacatcctcaagcagcacagacgtaaagaactggaagctcggcaaaaacagtatcggtggatggagtggaaccctggcttcccgctgagtatcgatgccaaatgccacaaggatttgccccgagacatccagtttgatagtgaaaaaggagtggactttgttctgaactactcaaaagcgatggagaacctgttcatcaatcgcttcatgcacatgtttcagtcttcctggaatgactttgcagattttgnnnnnnnnnnnnnnnnnnncagcaacactatttctgagcgagtcaagaaccactggcaggaggaccttatgttcggctaccagttcctgaatggctgcaaccccgtactcatcaagcgctgcagagagttgcctcagaagctcccggtgaccacagagatggtggagtgcagcctagagcggcatctcagtttagaacaggaagtacaggaagggaacattttcatcgtggactacgagctactggatggcatcgatgccaacaaaactgacccctgcacacaccagttcctggctgcacccatctgcctgctgtataagaacctagccaacaagattgttcccattgccatccagctcaaccaagcccctggagagaagaacccaatttttctcccttcggatgcaaaatatgactggcttttggccaaaatctgggtgcgctccagtgacttccatgtccatcagacgatcacacaccttctgtgcacacatctggtgtctgaggtgtttggtannnnnnnnnnnnnnnnnnnnnnnnnnnnnnnccccattttcaagctgctggtagcccatgtgaggtttaccatagccatcaacactaaggcccgggaacagcttatctgcgagtatggcctttttgacaaggccaacgccaccgggggtggtgggcatgtgcagatggtgcagagggctgtccaggacctgacttattcctccctgtgcttcccggaggccatcaaggcccggggcatggacagcaccgaggacatcccctactacttctatcgagatgatgggctgctggtgtgggaagccatccagtcgttcacaagtgaggtggtaagcatctactacgaagatgaccaggtagtgatggaggaccaggaactacaggacttcgtgaaggatgtttacgtgtacggcatgcgtggcagaaaagcctcaggcttccccaagtccatcaagagcagggagaagttgtctgagtacctgactgtggtgatcttcacagcctcggcccagcacgcagctgtaaacttcggccagtatgactggtgctcctggatccccaatgctcctccaactatgcgggctccacccgccacggccaagggtgtggtgaccatcgagcagatcgtggctactctaccagaccgaggccgctcatgttggcatctaggcgcagtgtgggcattgagccagttccaagaaaatgagctgtttctgggcatgtaccccgaggaacatttcattgagaagccagtgaaggaagccatgacccgattccgcaagaacctggaggccatcgtcaatgtgatcgctgagcgcaataagaacaaaaagctcccctactactacctgtcaccagacaggattcccaacagtgtagccatctaagcctgccttcctggcccagcatctctctgggaaggccagtggttttggcagccagactcctggcaggctctagatgcaggtgatgtgtcttctttccatgctagctagcagtgctacccctgggcctggctattctagtttggggggacatgctcctgcttcttccggtctttggtggaagtatgtacacagtacagggacctccacctggatcccggctctgcagctgtgacccccagcccagctcagcacttccacactaagtagcaacagtccatcagagtaagtgacatctgtcctggttgggtcagggttaccttattctatttatgctttgtccaactgctttcatgtagtaggtgcctaaaaaaaaactcttgaatgaagattttgttatgaaataaaattcatttaaaacnnnnnnnnnnnnnnnnnnnnnnnnnnn

SEQ ID NO: 1106 - DNA, 3024 bp, Cricetulus griseus
  misc_feature (194)..(225): n is a, c, g, or t
ccacgcgtccgatctttctccgctgtcggactggccgcgttgtggaccggcgtagggacatcgttccacagcgatcctcccgcggctgcccagcctgcccccgacaccgccgcagctgtcctccgcccgcaggcagcttgatggtgggagaagaaaagatgtcactaaggaaccggctgtcaaaatctggtgannnnnnnnnnnnnnnnnnnnnnnnnnnnnnnntctcagatacacagagcaatggtcgcattaccatgaaacagttgatagccaagaagaggcagttggctgcagaggcagaggaattgaagccactgtttctgaaggaagttggttgtcactttgatgactttgtgactaatctcattgaaaagtctgcatctctggacaatggtgggtgtgctctcacaaccttctccattcttgaagaaatgaaaaacaaccacagagccaaagatctgagagcacctccagaaaaagggaagatttttatttcaaggcggtctctgttagatgagctgtttgaagtggaccacatcagaactatttaccacatgttcattggactcctcatcctctttatcctcagcacacttgtggtagattacattgatgaaggaaggctggtacttgagttcaatctcttgggctatgcttttgggaaacttcctactgttatttggacatggtgggccatgttcctgtctacactttcaattccctatttcttgttccaacgttgggcccatggctacagcaagacttctcatccactcatctattcccttagccacggctttttcttcttagtcttccagcttggaattctaggttttgtaccaacgtatgttgtgttagcatacacactgcccccagcctcacggttcattgttatacttgaacagattcgtatggtaatgaaggctcactcgtttgtcagagagaatgtacctagagtactaaatgccgccaaggaaaaatcaagcacagttccagtacccacagtcaaccagtacctgtacttcctgtttgctcctacacttatttaccgtgacagctatccgaggactcctactgtaagatggggctatgttgctgtccagtttttacaggtttttggctgtctgttttatgtgtactacatctttgagagactctgtgccccattgttccggaatatcaaacaggagcccttcagcgctcgtgttctggtcctgtgtgtgtttaactccatcttgccaggtgtactgatgctgttccttacgttctttgcctttttgcactgctggctcaatgcctttgctgagatgctacgctttggtgacaggatgttttataaggactggtggaactctacatcctactccaactactacaggacctggaatgtggtggtccatgattggctctactattatgcttacaaggacctcctctggtttttctcgaagaggttcaaatctgccgccatgttggctgtcttcgccttgtcagctgtagtgcatgaatacgccctcgctgtctgcttgagctatttctacccagtgctctttgtactcttcatgttctttggaatggcttttaactttattgttaacgacagccggaaaaggccaatatggaacattatggtatgggcttctctctttctgggccatggagtcattctgtgcttttattctcaagaatggtatgcccgccagcactgtcctctgaaaaatcccacctttctggattatgtccggccacgttcctggacttgtcagtacgtgttttagaagcctgggctctgcctactttcttgccgatgaggaatggatgttcttcctgattctggccagccgtcttcagcagttactgaatatatctaagccacattgtttggaccactccagcctctccaaatggctcacctgaagctgggctcggctcactaagttattatttttggtttgtttcctttgggagagaaaggagaccaattgctgaggtaaatggcgattttgggggggttatctcagctcaagctttggtagttttatctgtttgtttccttaattctgtccaaggagagactaagcatatcttgaccatgaattagccaaaacacttaggaagaaatcatttcagtacctgtgtcttagaagtttttcgtgcacactgttaggtgagctagctaactgtggcaactggggagaaataaattttgttatttctagtagaaagagagaaaatacctatttcccaaagataatcttgttatgctttctgctcatatctcttgttgctattttgttttgctttgtttctgtgctgggaatggaatccagggccttgcccagtggcagcacactgagccacacaccagtcccatgttgtatttttctgaaagttctggactattcttttttctttcttgtaacttttctgtttgttgtgatttttttaaaaataattagctttctttcaccttgaactcaatactagtacaaattcaagggtcaaaagtatgaaggggaaaatacattcccttttgaaacttcaaaagtcatttaaaacatatttgctgagttagtcataggttttaattatgctagcaaaaattctgtagaagattttattgtcactggtttgggttttttagacgtagggtcttgctatgtagctcaggctggacttgaacttgttatgtagcctggctagccttgaacccctgactgacctcctgcccatgcctcccaagtgctaggatcacagaagataccaccgtgcctggccaagattttcctttcttttagcttttaagttaattagaagtattctttggtacagttgctttattgtctaacaagtagtgactttccttgttatagactagagtccataatggaagtactaatctctctattactactaagcggctactaaggatccagaagctggcttctgaagcatccgctccatcattatactttaacagtatatttttagatgaaataaaatactatgtgatcatttgta

SEQ ID NO: 1107 - DNA, 1940 bp, Mesocricetus auratus
  misc_feature (1741)..(1755): n is a, c, g, or t
  misc_feature (1923)..(1940): n is a, c, g, or t
aattcggcacgagatcggacgccgccgtgggctcccgcccgccaccgtggggacgacgatggcagacgaccagaactgtgctccagagctggagaaagcggatccttccggtgaagacggggtcgatgctaagcccgaccgctcctccattatctcatcgattctcgggaagaagaagaaaaatgcctctgcgtgccccgtcaagactgcccgggaccgagtgcccacctacctgtatagaatggatttcgagaagatggggaaatgcatcattataaacaacaaaaacttcgacaaagtgacaggtatggacgtccggaacgggacagacaaagacgcagaggccctcttcaagtgcttccgcagtctgggctttgacgtggttgtctacaatgactgctcttgtgcgaagatgcaagacctgcttagaaaagcctcggaggaggaccacagcaactcagcctgcttcgcctgcgtcctgctgagccacggagaagagaatctaatttacgggaaagatggcgtgacgccgataaaggacctgacggctcattttaggggagatcggtgcaaaaccctgttagagaaacccaaactcttcttcatccaggcatgccgaggcacggagctcgatgacggggtccaggccgactctgggcctatcaacgaaactgacgccaacccccggtacaagatcccggtggaagccgacttcctcttcgcttactccacagttccaggctattactcatggaggaacccgggaaaaggctcctggtttgtgcaggccctctgttccatcctggatgagcatggcaaagacctggagatcatgcagatcctgaccagagtgaacgacagggtagccaggcacttcgagtcccagtgtgacgacccctgcttcaacgagaagaagcagatcccgtgtatggtttccatgctcaccaaagagctctacttcggccgttgaccatccttcccttccagccgagagcccgcagtcactcatccatgagtccaattgttagtctgcttttattgttttgatgctctcaaagtacccggaaatgttaaagagatttaatttcaggaaagtatattgattcagcagggaggaagttttctggcaatgtctgatattctggatttctagattttttttttaattattttgtttattggatgactttgtactttccttttaaggttaatttcctgttcacagttcttttacctggtcatcacattgagtgcgtgctatggacatgacctctggagaagacttaattggtgttggcatcaatggaaagtcaaaaaccttagtttaacttggcaaagaggattccagttcttaacaaacaaatatagttgagatactcgttgcctctcctggaaaaggtggctgttttgtagagtggttgttttcattggcttaggacagattcttatgcagacctccccccgggaagtgagaaaacagttaatattttagtatgcagggcccagtccagaaaacaagccgttctaggtgtttccatggagaagcgtcaatacagggaattctcttaagtggggaattaagaaaaagagccaacagtggaaatctcttacctcaggtgtgactgggaggttgtaagaggaggccggttccctggtcatcagtgagaaccgtggcagcgctgcctcctaggagctaggaccatagagggttgtggtaaatggagccatgccaaggacaaannnnnnnnnnnnnnngatagaaatcgagccggggctgagtcagataccaaggcctccccaggcctccccaggtttgtcctcatagcctcaccagcacctcagagttccaaggtacctgaaagcagctggtgagggccctggggatggagattccctgggttgcagagcagagcaagagctgtnnnnnnnnnnnnnnnnnn

SEQ ID NO: 1108 - DNA, 1399 bp, Cricetulus griseus
  misc_feature (126)..(143): n is a, c, g, or t
gtagccgggggaacggccggcgcgcttgccggtgggcggaggcgagactccacagcagttctctgccggtcgcccgcgagtgcacccgccatgcacctgccgcccgctgccgcagtcgggctgctnnnnnnnnnnnnnnnnnntcccgcgcgcgtggcctcccggaagccgacaatgtgccagaggtgccgggcgctggtggacaagttcaaccaggggatggccaacacggccaggaagaatttcggcggcggcaacacggcgtgggaggagaagagtctgtccaagtacgaattcagtgagattcggctcctggagattatggagggcctgtgtgacagcaacgactttgaatgcaaccaactcttggaacagcatgaggagcagctagaggcctggtggcagacactgaagaaggagtgccctaacctatttgagtggttctgtgtacacacactgaaagcatgctgtcttccaggcacctatgggccagactgtcaggaatgccagggtgggtctcagaggccttgtagcgggaatggccactgcgacggagatggcagcagacagggcgacgggtcctgccagtgtcacgtaggatacaaggggccgctgtgtatcgactgcatggatggctacttcagcttgctgaggaacgagacccacagcttctgcacagcctgtgatgagtcctgcaagacatgctcaggtccaaccaacaaaggctgtgtggagtgcgaagtgggctggacacgtgtggaggatgcctgtgtggatgttgacgagtgtgcagcagagaccccaccctgcagcaatgtacagtactgtgaaaatgtcaacggctcctacacatgtgaagagtgtgattctacctgtgtgggctgcacaggaaaaggcccagccaattgtaaagagtgtatctctggctacagcaagcagaaaggagagtgtgcagatatagatgaatgctcattagaaacaaaggtgtgtaagaaggaaaatgagaactgctacaatactccagggagctttgtctgcgtgtgtccggaaggtttcgaggaagacagaagatgcttgtgtacagacagcagaaggcgaagtggcagaggaaagtcccacacagccaccctcccatgaggatttgtgacgggcatccaggttcagaagctggactctcacccttttaagttattgagaggacatcctatagaaaatgtggcccatggacatcaaccccatttctccaggaagttttggaggaagaagctgcctgctttgaaacagtagatactcacttggccctttaaaacgctgcatttcttggtggttcttaaacagattcgtatattttgatactgttctttataataaaattgatcattgaaggtcaccaggaaca

SEQ ID NO: 1109 - DNA, 714 bp, Cricetulus griseus
agggggtggtccacacccgcccggggaggaagatgtcaaacgtacgagtatctaacgggagcccgagcctggagaggatggacgccagacaagcggagcaccccaagccctccgcctgcagaaacctcttcggcccggtcaatcacgaagagctcacccgggacttggagaagcactgccgagatatggaagaagcgagtcagcgcaagtggaatttcgactttcagaatcacaaccccctggaagggagataccagtggcaggaggtggacaagggcagcttgccggagttctactacagacccccgcgcccccccaagggcgcctgcaaggtgccggcgcaggagagccaggatgtcagcgggagccgccaggcggtgccttcaattggctcccaggcatactctgaggaccggcatttggtggagcaaatgcctgatccgacggacagtccagcggggttagcggagcagtgcccagggatgaggaagcgacctgctgcagacgattcttcttcgcaaaacaaaagggccaacagaacagaagaaaatgtttcagacggttccctgaacgctggctctgtggagcagacgcccaagaagcccggcctccgaagacaccagacgtaaacagctccaagcagctccgaattaagaatatttccttgtttattagatacatcactgctttatgaagcaaggaagatatacatgc

SEQ ID NO: 1110 - DNA, 2515 bp, Cricetulus griseus
  misc_feature (79)..(93): n is a, c, g, or t
  misc_feature (1075)..(1097): n is a, c, g, or t
ctcctgtcccgaatgacgttgggcaacaaagatggcggcggggaccagcaattactgggaagatctcaggaaacaagcnnnnnnnnnnnnnnntgaacttgacctgaaactagtttccttcagtaaactgtgcacaagttacagtcacagcagcgcccgagatggaggacgcgataggtatagttctgacacaacacccctattaaatggatcaagtcaagacagaatgtttgagacaatggcaattgaaattgaacagcttttggcaaggcttacaggggtaaatgataaaatggcagagtataccaacagtgcaggggtcccctcattgaatgcagcactgatgcacacgttgcagcgacatagagacattctacaggattatacacatgaattccataaaaccaaagcaaactttatggcaatacgggaaagggaaaatctcatgggatcagtacgaaaagatattgagtcatataaaagcgggtctggagtaaacaacaggagaactgaactgtttttgaaagaacatgaccaccttcgaaactctgatcgtctgatagaagaaacaataagtattgctatggcaacaaaagaaaatatgacttcacagagaggaatgctcaagtcaattcacagcaaaatgaacactctggccaaccgttttcctgctgtaaacagcctgatacaaaggatcaaccttaggaagcgacgggactcgctcatccttggaggggtcatcggcatctgtaccattctgttgctgctgtatgcgttccactgaaaggacagccccaggactctgcccaccgccttcatgccctgatctggagtggggaaatgaggaaggagaaaactgccctggctatgagcctggtagccagatgaattctaaactgcacccatgactcggacctggtcagactgagctgaagccacagttttcctgtgctatcttttctaatacacattactctgttttttaattttaaaaacaacaaaaggttttcagtcgcttgtgtctccctaggaggtaagcaagcagaggccgagaacctgggcttcagtgactggnnnnnnnnnnnnnnnnnnnnnnntcatagctggactcctcacagtaccaggctctccacatccaaagatggctttgctttcagccacgagattgggtgtgaataaaaataattcttgtccttttatttaacacttgtgatgagaagtcagctgtcctttgctgatactcggtgatctagattctcctctgtgtccctaattcttggtagtcaagaaaaattccattttgcgacaattttgtcagatgctgatagaccagcttcatcacatgtgaggttgtctgaaatggaaagctctgtagaaagggtgtgtcttttctgtttcagttgtgagcactaggtcagctgtgcggctggaaacgtcaagaatgcagatcttgcactgaggagctggacattgctcattagttctcccattgggttagtatatgcttctacgtggtaaaatcacattaccactggacagacaaacagccagtgtctgtcattgccctcagtggtccctcatcctgtgaagattaatattaggaactgagggaggggactgtggctctcagtgagatctgctcacgagccacatgtgagaagacactgaagggtggctctccatgtcattccatatgacagtgctcttcatcctggatcaaaggctttattactgtagcctgattcgaaggaactctgccctgtgaggacctatcattcctcatctgttaggctctacacccccaagccatggtcccaccattgaaggtgcctgtgactcctttccacctatttattgctatggacagtgacagagattaagtgcttttctaggttagccatttcttagcatctgaatttgataatttgtcttactgagctaacagatattttaaagacatccagcgtttttgctcaccgagagagatggctgctagtccccgctggcacatcctctggcaccacaggcaatgagagggtgttagggtggagctcttcaccacctcatggtgtggggatggtgcgctgggcggacttgatacacttaatgctcatggatagactgacatcggtctgggactgactgagaggtttgtcttctggtgttgaagtgttagtacattctgggtatgaaaggcattcgatatatttttcttaattatggggtttatttttctaaatatgggttaatcagcttgttgactgggcatgcccttaaaaggaatttaaatttcccactgtggaccttaaagaatcagggaattttgtttgttaaattctctttgggagaacagaacttctcttccctgaccactttattatctttgatttttttcaaagggcctcgattggtggttgtgcctcagctagactttatgggactttggttgttatatagtgggcatatataaagcctgaagtatactaaataaagttatttatttaaatataaaaaa

SEQ ID NO: 1111 - DNA, 434 bp, Cricetulus griseus
tggtgggttgagggagaagtaaccactgaggagggtgaagctggtgagagtgggctctgagagagtggggaggggcaaggccagtgtggggctgataagaggggtacagaaaatggcatctcaccagcattgactcccccagggttacaggatgaccaggacctccaggctcttctgaaaggcagccagctcctgaaggtcaaatccagctcatggcggagggaacgcttctacaagctacaagaggactgcaagaccatctggcaggagtcccgcaaggtcatgaggtccccggagtcccagctgtgtgagtgccgtgggtctcgtagtggtcggggggcacaaggtagggtggagaccaatcatggactgtgaccacaggcgggccatgcatgaaatgagaaccgaaaggaagaatcttaggctggttgggg

SEQ ID NO: 1112 - DNA, 983 bp, Cricetulus griseus
actagtagagcccgactgtgtctaacctgctgggctggccctggtcagtagaggggccaggaggctctcatagctataggggccccaaagtccagtgtggcctggaggatgtgtgacctctccctatctcaggcgccaggctccggaacggtgttgtcctgagaggcctgttctatctggtcgtctggtacctcatttcttcattcctgtgaccctggacctaggtcctagctgtccttcctagcccaagatttctgcctctgtctccccgtgcgttcccactctgccactatgggtcgtcctatgccctccctatactgtgccttcctccttttagtctccactcccctgccctcctgcccttctcagcggaccctcggtctgagcccccagtctggctgtgaccctaggccgggctcctcgctcttgtggccttggctgtgtcagagacagtcctttgtctcacagtctgttctgctgtcgaccccctccccctgcagtctccattgaggacatccaggaagtaaggatggggcaccgcacagaaggcctggagaagtttgcccgtgacatacccgaggatcgctgcttctccattgtcttcaaggaccagcgcaatacactagacctcattgccccgtcatcagctgatgctcagcactgggtgcagggcctgcgcaagatcatccatcactcgggctccatggaccagcggcagaagctgcaacagtatccttttgggggcagagggtcatggctgggtgtggaatgtgtgtcggtcattttgtgcagctcttaacaaaataccagaatgtattagttacttttctgattgctgggatacttgacaaaagcaaatcaagaagaagggtttattatcatggtttgagagaatgctgtccatcatggcggaagaggcagtaggagcaccggagacagccagtcacattgtgtctacagtcaggaagcagagtgctgggccc

SEQ ID NO: 1113 - DNA, 5679 bp, Cricetulus griseus
  misc_feature (567)..(586): n is a, c, g, or t
  misc_feature (625)..(669): n is a, c, g, or t
  misc_feature (1561)..(1601): n is a, c, g, or t
  misc_feature (3625)..(3683): n is a, c, g, or t
  misc_feature (4170)..(4191): n is a, c, g, or t
  misc_feature (4442)..(4466): n is a, c, g, or t
  misc_feature (5622)..(5637): n is a, c, g, or t
gaattcttcaaaaattccactgtccttttttttttaacacacccataaagttcattatctttgtttgactctgttctctaattttgaggactgtgctaggatgcccccccccccccgcccccagttcctcagagtctgcaaggaggaaagacgggtgaggtagtacggggccgagatgccccagtcatgatggcttggtccgggctttgggctttcgtgatctatttccactttctgatcagtggctggaaatctgcgcttctgtacattaagcttcaagcactggaggcaggctgactggtgatggtcgagaaacagagggcatgctttgcagtgataatggtggtgctggcattagcaccgggagagatggtccatcagctgggggcgtaattgacaggtttccttctctgagcctaaattgtctacagtgaaggtttttatagtaaatattttcaaacatcaggtttcagaatgagcaaacagaaaaaacaaggcctctagccgggcctggtggtacagtcctgtcatccgagctgctcaggtagctgaggcaggaggataacnnnnnnnnnnnnnnnnnnnnctaaagaactggctggtcggtggtggcgcacacctttgnnnnnnnnnnnnnnnnnnnnnnnnnnnnnnnnnnnnnnnnnnnnntgaggacagcctggtctacaagagcgagttccaggacagcctccaaagccacagagaaaccctgtcttgaaaaaccaataaaataaaataaataaataaaaatgagtttacattaatctgggtagtttcaggagctcctgacttaaaatacaaagtaaagaggactggggtggagtgcggtgtaaggccctgcgttcgttcagtccctagtcccaatcaaaccaacaagcaagaaaaggagggcagaggacaccccagaaggaaggcgtccaggtccttcctctgcttcctggccatccggcctgcaggacactgccccacaggtggctgtggcttcacatggctgggattctgtgggcatcaggcttctgtgtgttttcctaactgcttgcccagctggattcactcctgcttgcggaaggctgacaaaaacaaggacaacaagatgaacttcaaggagctgaaggacttcctgaaggaactcaacatacaggtggatgacagctacgccaggaagatcttcagggtgagctacctcccagtggctgtggggcctcggtcctggccgtgggcctgggctgagcccatgggctgtgctgcctttgcaggaatgtgaccactcccagacagactctctggaggatgaggagattgagaccttctacaagatgctgacccagcgggcggagattgaccgtgtctttgcagaggctgcaggatctgctgagaccctgtcagtggagaagctagtcactttcctgcagcatcagcagcgggaggaggcggcaggcccagcactggctctctccctcattgagcgctacgagcccagtgagaccggtgagggcccagcctcccagagccacaaggctgggagactctgatgaaactnnnnnnnnnnnnnnnnnnnnnnnnnnnnnnnnnnnnnnnnncagaagtgctagagggagccacccccagggctgcagatcagtgtgtgggtgtctatcccatgtgagagctccagtgtttgccctgtctggttttcacttcccttcagacccttcttcaaggggcgttgggtgtccctatcccaagacgtagaaagaagcagctggtgaagcctaggtcattgttactaccttctttttttctgctctggatgcagctttgagacatgacctacagaagacacagccctgctcaccatttccaggccagcctgtcagctcagtgagacccaggctcagagtacagagttaaagaggactagggatacagcacaggggtagagtgcttccctgagagcctgcattcaactctgaggcaatgtcacccagcttggaggcatttagaaaggaaggaaggaaaagagacagggcctcaccacactgtaaccacaatctcactgggagcctgagacgtccgctccccagggttccagggcgctagctgaaggcgggtgggcaggcagagtggagaaaaggcttgtctttccacagtggttaggcaactagctctgactggaaaccttggcttcttcctacctagccaaggctcagaggcagatgaccaaggacggcttcctcatgtacttgttatcagccgatggcagcgccttcagcctggcacaccgccgtgtctaccaggacatggaccagccactcagccactacttagtgtcgtcttcccacaacacctacctgctggaagaccagctcacagggcccagcagcacagaggcctacatccggtgcagtcccgggggcagaactgttaggggcgagtcagggtgggacctgggacaagacctggagggccctagcctacctgtcaccactccctgcagggctctgtgcaaaggttgtcgctgcttagaactcgactgctgggatggtcccaatcaggaacccatcatctaccatggttacacttttacgtctaagattcttttctacgacgtgctcagggccatccgcgactacgccttcaaggttgggtgtgcccatgggagtgaggagaggatactagggatggccattccttctaatgcatcttggggcttctaggcgtccccctaccccgtcatcctgtccctggagaatcactgcagcctggagcaacagcaagtgatggcgcgtcacctgaaggccatcctggggcccatgctgttggaccagcccctggatggggtgaccatgagcctaccctcccctgaggtacagagcgggtaccctgaaggcagggaagccaacctggctgggaggcctagatgggtcttaaccagttagcggtctgtccccagcaactgaagggcaagatcctgttgaaagggaagaagtttggagggctgctgcctgctggaggagaaaatggacccgagactaccgatgtgtccgacgaagatgaggccgccgaaatggaggacgaggcagtgcggagccaagtgcagcagaagtccaaggttctaggggaagctgacggggatggggtggcccgagtccttcccgctcccagtccatgggacagttgcctcgtcttaatttttctatggctgccattcagactttctgccccctctctctgtctgtctcctctctctctctctctgttgtctgggtttctggtgctcagtgcccaccttgtcctaccctctggctctaaccggggcctcctcgtggcctccaggaggataagctaaacgtggcgccggagctctctgacatggtcatttactgcaagagtgtccacttcggtggcttctccaatcctagcacctctgggcaggcattctacgagatggcttccttctctgagaaccgtgccctccggctgcttcaagaatcaggtgagcccctgctctcgcagacatttggtcctggccttctgaacttgtcaagaccaggcctgcccttcacccttgcaggggtcccaagttggtgttccctgctttgtgtctgggcagagctggcaagannnnnnnnnnnnnnnnnnnnnnnnnnnnnnnnnnnnnnnnnnnnnnnnnnnnnnnnnnnctgttctcaggaaataattttgtccgccacaacgtgagccacctgagcaggatatacccagctggtagaagaacagactcttccaactacagtcccgtggagatgtggaatgggggctgccagattggtacggaccggctgggctggagggaggttagaaagagaacccggccttgatgaaggggcccaaagccctggaggtcacgggagaggtctggggacctgagaaggtttggatgtggaccaagagctgagcatggaaattgcccggccagcaagtctgtctggtgtgcacgccagccatttgaattttgccatcagaaatggaacgtgtatttcagctgtgcttgcctggcattcatgacatcctaggttcaatcctctgcactgcggagatgggagtggtgtcacgcctgccatcccagcacttttaaggtagatgcaaggatgggtagggtgagtgggttaggtcttacttggctacatnnnnnnnnnnnnnnnnnnnnnntatgagaccctgactcaaaacccagcaaaacgggctggagagataaatgactcagtcagcaaaatgtctgccatacaaacatgaggccctgcgctgggattcctacccatgtaaagcaagaggagtgatgacatacatctgtagacacatctgtaatccctgcaccgagcaggcagagacatgctgctctctggagctagctcatggccagcccgcccagataaactggtgagctcggggttcagtagagnnnnnnnnnnnnnnnnnnnnnnnnngcaattgagaaagatgtcaggcattgacctctggcctccacatatgtgtaaagacaggcacacactcatgtgaacacacacttgtgttacacacacaaacacatagagcatgtagtcagtgtggtgggtcagttaggatgataggaaggcaggagacaccagaacatcttggatgctgcttcctggactacagcacactctgagcaggcggggccaggactctggggccagcccacagcttgcagctactctaatctaccaacagtggctctgaacttccaaaccccgggaccagaaatggatgtgtacctgggccgcttccaggacaacggagcctgcgggtatgtgctgaaacctgccttcctgagagaccccgacaccgccttcaacccccgtgccctgactcagggaccctggtgggcccagaagaggctccgtgtccgggtatgggcagacacagagggagggctgcctatgggggtccctcctgctcactgccatcccaggatgctcactgtccccacgtttccttaggtcatctctggacagcagctgccaaaagtcaacaagagtaagaattcaatcgtggatcccaaggtgatagtggaggtccacggcgtgggccaggacgtagccagccgtcagaccgcagtcattaccaataatggtacggtatgcgctggctgctttgggccaggctgctggtgctggcgaccttgctgttggtatagtgtttgtccttcctaggcttcaacccatggtgggacacagagtttgagtttgaagtggccgtgcccgaccttgccctcgtccgctttgtagtagaggactatgacgcctcctctaagaacgactttattggccagagcaccatcccctggaacagcctcaagcaaggtgagtattagaagcaggggggcagccaggagcagtgggaggagcctggcttctctcagcctgcccctcactacgccttgagtatcctctccgagtgaccagaactgtctgtccttcctgccagggtaccgccacgtccacctcttgtctaagaacggagaccagcatccatcagctaccctctttgtgaaaatctccctccaggactaagcctggggattgggtgagatccaccctgagtgggtcaagctgtgtccannnnnnnnnnnnnnnnagctttgtgtcgccgactgctgatgggagctttaggcctgga

SEQ ID NO: 1114 - DNA, 3816 bp, Cricetulus griseus
  misc_feature (184)..(205): n is a, c, g, or t
  misc_feature (2982)..(3055): n is a, c, g, or t
gggatgtttcgcttgtcggcggcgttgcagctgctgctgctagcggcaaccggggcccagaataaccacggtcaggtccaggttccgggggccaacattggacctttgctagggcaagctgaaggcggcagcccggcggggcagcagctgcttcagttatcgcagcagcagaagcagccgcctnnnnnnnnnnnnnnnnnnnnnnctgctttcccggcgggcgggcccccagcccggcggggcggagcggggcccggtgggactggcggaggctggaagctggcggaggaagagtcctgcagggaagacgtgacccgtgtgtgccccaagcacacctggagcaacaacctggcggtgctcgagtgcttgcaggacgtaagggagcccgagaatgaaatttcttcagactgcaatcatttgttgtggaattacaagctgaacctgactactgatcccaaatttgaatctgtggccagagaggtttgcaagtcaactatatcagagattaaagaatgtgctgaagaaccagttggtaaaggttacatggtttcttgcttggtggatcaccgaggcaacataactgaatatcagtgtcaccaatacattaccaaaatgacagctatcatcttcagtgattaccgattgatttgtggcttcatggatgactgcaaaaatgacatcaaccttttgaaatgtggaagtattcgccttggtgaaaaggatgcacattcacaaggtgaggtggtgtcctgtttggaaaaaggcctggtgaaagaagcagaagaaaaagagcccaagattcaagtttctgaactctgcaagaaagctattctccgtgtggctgagctgtcctcagatgactttcatttagaccggcatttgtattttgcttgccgagatgatcgggagcgcttttgtgaaaatacacaagctggtgaaggaagagtatataaatgcctttttaaccataaatttgaagaatccatgagtgaaaagtgtagagaagcattaactacacgccaaaagctcattgcccaggactataaagtcagttattcattggccaaatcctgtaagagtgacttgaagaaataccgatgtaatgtggaaaaccttcctcggtcccgggaagctaggctctcctaccttctgatgtgcctggagtcagctgtgcacagagggcgacaagtgagcagtgagtgccaaggggagatgttagattatcgacgtatgctgatggaagatttctctctgagccctgagatcatcctgagctgccgaggggagattgaacatcactgctctggattacatcgcaaagggcgaaccctccactgtctgatgaaagtaattcggggtgaaaaagggaaccttggaatgaactgccagcaggcgcttcagacactgattcaggagactgaccctggagcagattaccgcattgatcgagctttgaatgaagcttgtgaatctgtaatacagacagcctgcaaacacatacgatctggagacccaatgattctttcatgtttgatggaacatttatatacagagaaaatggtagaagactgtgaacaccgactcctagagctgcagtattttatctctcgggattggaagttggaccctgttttataccgaaagtgccagggagatgcttctcgcctttgccatacccatggttggaatgagaccagtgaacttatgccccctggagctgtgttttcctgcttatatagacatgcctaccgtacagaagaacagggaagaaggctttcacgagaatgccgagctgaagtacaaaggatcctacaccagcgtgccatggatgttaagctggatcctgccctccaggataagtgcctgatagaccttgggaaatggtgtagtgagaaaacagagactgggcaggagcttgagtgcctccaggatcatcttgatgacttagctgtggaatgcagagatatagtgggcaacctcaccgagttagagtctgaggatatccaaatagaagctttgctgatgagagcctgtgagcctataattcagaacttttgccacgatgtggcagacaaccagatagattctggggacctgatggagtgtctgatacagaacaaacaccagaaggacatgaatgagaagtgtgccattggagtcactcatttccagctggtacagatgaaggattttcgattctcttacaaattcaaaatggcctgcaaggaggatgtgttaaaactttgtcccaacataaagaagaaggttgatgtagtgatctgcctgagcaccactgtgcgaaacgatactctacaggaagccaaggaacaccgggtgtcactgaagtgccgcaagcaactccgtgtggaggagctagagatgacggaggacatccgtttggaaccagatttgtatgaagcctgcaagagtgacatcaggggctactgttctacagtgcaatatggaaatgctcagattattgaatgtctgaaagaaaacaagaagcagctgagtacccgttgccaccagaaagtatttaagcttcaggagacagagatgatggacccagaattagattatacactcatgcgagtctgcaagcagatgattaagaggttctgtccagaagcagattctaaaaccatgttacaatgtttgaagcaaaataaaaacagtgaattgatggatcccaaatgcaaacagatgataaccaagcgccaaatcacccagaacacagattaccgtttaaaccccgtgctaaggaaagcctgtaaagctgacattcctaaattctgtcacggtatcctgaccaaagcaaaggatgattcggaactagaaggccaagtcatctcctgcctcaagctgagatacgctgatcagcgcctgtcctcagactgtgaggaccagatccgcatcatcatccaggagtctgctctggattaccgcctggaccctcagctccagctgcactgttcagatgannnnnnnnnnnnnnnnnnnnnnnnnnnnnnnnnnnnnnnnnnnnnnnnnnnnnnnnnnnnnnnnnnnnnnnnnnacctgctcaagatcagaacagagctgtgtaaaaaggaagtgttaaacatgttgaaggagagtaaggcagacatttttgtggacccagttcttcacacagcgtgtgccttggacattaaacaccactgtgcagccatcacccctggccgagggcgtcagatgtcctgcctaatggaggccttggaagataagcgagtgaggttgcagccggagtgcaaaaagcgtctcaatgacagaattgaaatgtggagttacgcagccaaggtggccccagcagatggcttctctgatcttgccatgcaagtgatgacatctccctcaaagaactacatattatctgtgatcagtgggagcatctgcatattgttcctgattggcctgatgtgtggacggatcactaagcgtgtgacacgagagctcaaggacaggtagagctgcctgatcaccaaaggaactacctgcccagggcccagtttgtacagccttcctgtatagtgcaccctctcacttcgtccttctacgagtggcaccaacacccacwgtagagcagcatcaggtgccctctgcatcttcccatccagacttggccacatccgccgtgtcctcctcccacgctgccactgcagcattggcagctggctgctttggtggtagcctttgttggcgaagggtttacctgcctgtagacaattctgtcctaccaagagaactgccagtacttccagaaccgactcacctgacctgcaactcagattttttttt

SEQ ID NO: 1115 - DNA, 356 bp, Cricetulus longicaudatus
ttcacatcatgcttttatgttaaaatcttgcctgctatgacctatgcttggaggattacaagtgacctttaacggttgctgggaatgacttaaatatgttgatgaaatcagttcattggtaagatgtttcataggaaaaggtaaccttaaactaccaactgtgtttgaacagatgatgttttctacctcatgtgtccatattcattaaataaaagtatgtgctaaaagttcaggtctgaatataaatgaaatgggtttactttgtgcttacatgttaatctccacttggtcatcatttctcaatacttttgtgctattcctcaatgaactctcatgaacttctgtcttgttactag

SEQ ID NO: 1116 - DNA, 1046 bp, Mesocricetus auratus
  misc_feature (1028)..(1046): n is a, c, g, or t
cgaacggcgagcagcggcggcggcgcggagagtgcagcggaggtttttgctggtttcggaccccagcggccggatggtgaaatcctccctgcagcggatcctcaacagccactgcttcgccagagagaaggaaggggacaaacgcagcgccacgctccacgccagccgcaccatgccgctcctcagtcagcacagccgcggcggctgcagcagcgagagttctagggccgccctccattgctgtagtaacctgggtccggggcctcggtggtgctcctgatgtccctcacccacccctgaagatcccaggtgggcgagggaacagtcagcgggatcacagtctttcagctagcgtcctctactccgatgagcggctgaatgtgacagaggagccaactgctaacgacaagaccagggttctgagcatccagtccaggctcacggaggccaagcaggtcacctggagggcggtgtggaacggcggtggcctctacatcgagctcccagctgggccctcgcctgagggcagcaaggacagtttcgcagctctcctggagttcgcggaggagcagctccaggccgaccacgttttcatctgcttccccaagaaccgtgaggacagagccgccctactccgaaccttcagctttcttggctttgagattgtgagacccgggcatcccctcgtccccaagagacccgacgcttgcttcatggtctacacgctggagagagaggactaggtgccggccctgcccgtgtccctgtgcctctcccgggtttgtccacatgtcctgattgtgcagaataaacgctcactccattagcgggtgcttcttccgagctgaatgctgtgtttgtcacactcaagtgttggctttaattctaaataaaggtttctattttactgtttttattgctgtttaagatggtcaggtgacctgtgttagcgcagcctcctttgaagcctggcagagatagatagtgtcacctcccttggctcaaacccaataagtgatctcgctcannnnnnnnnnnnnnnnnnn

SEQ ID NO: 1117 - DNA, 314 bp, Cricetulus griseus
tctagagatgctgacgcgctgtgggtcgcccgcgccccacggaaccacacgatccagacggtgactaacctcactgggcagggcgcacgcactaggtgtctgtgggattagctgccggtgtggccaggtgtttgctccgccccctagttgttccgcggctgcgccctggactccccacgctggccactccttcgggggcgtggtcaatctaggtagtcactcccctccatgcttcgcttgggcctccgcgcgggtttgtgggtgttgtagtgcgcgtggtgctcgagccagaccgctgctgctggctgaaccag

SEQ ID NO: 1118 - DNA, 121 bp, Cricetulus griseus
aaccgagttcttttgccttcaaagtaccttcctgaggtcaggaaccaaccgtgtgtgtgctcctgccccagccgccttagagcacgtgttgcccgcaaggaaaccccactctccacgcctg

SEQ ID NO: 1119 - DNA, 4793 bp, Cricetinae gen. sp.
ctgggaggaaccggaaccagagaggatggccggggcgggctaccagcaccaccctccgggaggagcggccgttgggaccagcgcggtttccccaaccgctgcgggaccgggagaggattcatccgacagtgaagcggagcaggggggaccccagaagctgatccgcaaagtgtccacctctggacagatccggaccaagaccagtattaaggaagggcagctgctgaagcaaaccagctctttccaaaggtggaagaagagatacttcaaacttcgaggccgcacactttattatgccaaggactcaaagtccttgatatttgatgaagtcgacctctcagatgccagtgtcgctgaagcaagcacaaaaaatgcgaacaacagcttcacgataatcactccattccgaaggctgatgctgtgtgctgagaacaggaaggagatggaagactggatcagctctctgaagtcagtacagagcagagaaccctatgaggtggcccagtttaacgtggagcatttctcagggatgcataactggtacgcctgctcccatgcccggcccacattctgtaatgtgtgcagagagagcctctccggtgttacctcccacggcctgtcctgcgaagtgtgtaagttcaaggctcacaaaagatgtgcggtcagggcaaccaataactgcaaatggaccacactggcctccatcgggaaggatatcatagaggatgaggatggtgtcgccatgcctcaccaatggcttgaaggcaacttgcctgtgagtgccaagtgtgcagtctgtgacaaaacatgtggcagtgttctccgcctgcaagattggaaatgcctttggtgtaaagcaatggtacacaccgcctgcaaagatctgtaccatccggtctgtccacttggccagtgtaaagtgtctatcatacctccgattgcactaaatagcacagattctgatggtttctgtagagcgaccttttcattctgtgtcagccctctgttggtgtttgtcaattctaaaagtggagataaccagggagtaaagttccttcgtcgctttaaacagttgctcaacccggctcaggtgtttgatttaatgaatggaggacctcacttagggttaaggttatttcagaagtttgacaacttccgaattcttgtctgtggaggagatggaagtgtaggctgggttttgtcagagattgataaactgaacttgaacaaacagtgccagcttggggtattgcctttgggcacaggcaatgaccttgctcgagttcttggctggggaggttcctatgacgatgacacccaacttccgcagattctagagaagctggaacgagccagtaccaaaatgttggacaggtggagtataatgacgtatgaactcaaattgccagcgaaggcgtctctacttcctgaacccccagaagcatctggaggattttatatgacaatttatgaagactctgttgcgaatcaccttacgaaaatcctcaattccgatgagcatgcggtggtcatatcatctgccaagatactctgtgaaacagtgaaggacttcgttgccaaagtggagaaggcacaggacaaaacactggaaaatacagtagtagctgaagcggtggccaataaatgctcagtgctaaatgagaagctcgaacagctgctacaagccctgcacgcagacgctcaggccagtcgggtcccccctggggtcggccctgcgatccctgaagaagatgctgtagagtcctccagtgaagagtccttgggtgaaagcaaggaccagctcgtgaatgacattgcaaaaccctcctcccagaaagccgtaaagccccgggaaataatgctgcgggcaaacagtctaaagaaagcagtgaggcaagtcattgaagaagctggaaaagttatggatgagcagacggttcaaccctgtgaaccagttagtccgtcatgtgactatgatagcccagaagcagatgactctaaagacaatgataccaaagagtcaccagcagccaaatccacatctcaggctcctgaggcccaggcaattcgtggccatttccaaactgattctgtcgctggttcagctatggccaccaccaaagaaaatctccctgtgctcaacaccagaataatctgcccaggtttaagagcaggacttgccgcctcgattgctgggagttctatcatcaacaaaatgttgctggcaaacatcgacccttttggtgcaacaccgtttatcgacccagatcttgattcactagatggatactcagaaaaatgtgtcatgaacaattactttgggattggattagatgcaaaaatttcattagaatttaataataagagagaagaacaccctgaaaaatgcagaagccgaactaaaaacttgatgtggtatggggtccttgggactcgggagttgttacagagatcatacaaaaatctggaacaaagagttcaacttgagtgtgatgggcagtatattcctctacccagtttacaaggcatagcagtgttgaacatccctagctacgcaggaggcaccaacttctggggcggaaccaaagaggatgatatatttgctgcaccctcatttgatgacaagatcctggaagttgtcgccgtctttgacagtgtgcagatggcagtatcaagggtcattaagctgcagcatcaccggatagcacagtgccgcacggtaaagatcactatatttggtgatgagggagtccccgtgcaggtggatggtgaagcctgggttcagcctccagggatcatcaaaattgtgcacaaaaacagagctcagatgctaacaagagacagagcctttgagagcactctgaagtcttgggaagacaagcagaagtgtgactctggtaagccagttcttcggaccaacctgtacatccatcccgccgctgacctggcaacagaagaggtgtctcagatgcggctctgctcccaggcagcagaggaactcattactaggatttgtgacgcagccacgattcactgtctcctgggagcaggaactggctcatccgtaaatgcatgctctcatgccctgaacaaagccaacccccgcttcccggagagtctcacaagagacacggccactgaaatagccatcaacgtcaaggcgctgtataatgaaacagagtccttgctggttggcagggttcctttgcagttggaatctccccacgaagagcgggtgtccagtgccttacactctgtggaggtggagctgcagaagttaacggagatcccctggctttattacatcctccgccccaatgaggatgaggaacctcctatggattgcaccaaaagaaacagcaaaagcacagtctttcgtatcgtgccaaagtttaaaatggaaaaggctcagaaacagaaaacaagttcacagcctggacctggggataccgaaagtgggtcatatgaagcgaattctccagggaattaaagagcttgaaaggaaccctcccaacttggtctgaggtgtggtcataccggtgctatttcctggaagagaagtctcgggactcaatacagagttcttggaagcactggctgttctttcgatttactggtagataagcaccgctgaagcacctctctagatggattgtttgctgtgggtgaaagttttgatttgaggtattagaaaataagttttgtgccaaaaaaaaaacaacccaaaacccaatcccttccacaaagccattttattattgtgcaaacctgacatgctcgaaaatgcttgctgtagtgaagggttgggggagggggctaatgggggagacagttgccttgtttaaaggtggaattgcttgctcatcctcccttcttagaggtgggggccagcaggaggctcgttcctgtgtgctcctgcagctgtgttaacagtgtgcagctgaaacttctcaggcttggttagtgaaggctttggctccttcctagacacggttaggaggtgacgataggaattgtagtttgagtcttttcaccctaagttcccgttatccactggtcaaagaatacagtgagaccaacccatcacatactatgaatgaagcaaatgtcgtacacagtgttcctacccgagttgtctttctttttcttgcatgtcacaagaaatattgctgtagtgcttcagtagctttaatatctgttataatggaatttaatttattactacccaacttcccaagcactttctagctagttaagggcacttttcctcagtgtgaactctgaacatttgatctgtgccatgatcaaccaatgatatacatcttacacaaccaaatttatttgcctgtcccaagccataggtgtatgcactaagaggattgttgggtgttttcataagctttacatgttctcttgcctaacaaaacttactacaactttccaaacccaaatcctcgcattttgttcccagtttccttcattcaatttaataaccattttgagtttctgcttgaatttgtaagactgttgacacctaggaattgtcctaggcctcagctgagatttgcacctgaagcaattattgacatgaactccccaatggaagaaatttagttttgtttcttaagggctttttgtattattatctcacatacattttgataacctgtcaggtagacattattttccttttcttaaaccattatatgtcagtattgctcaatagaattatcaagtatttgaaagccaaaggtatagatgccaaaaaagtaaaaaaaaaaaaaactcgtgcc

SEQ ID NO: 1120 - DNA, 1421 bp, Mesocricetus auratus
cccctgcgccccgggcccgccaccctgggggtgctgctgggctccgactgcccgcatcctgccgtctgcgagggctgccagcggcccatctccgaccgcttcctgatgcgagtcaacgagtcgtcctggcacgaggagtgtttgcagtgcgcggcatgtcagcaagccctcaccaccagctgctacttccgggatcggaaactatactgcaaacaagactaccaacagctcttcgcggcgaaatgcagcggctgcatggagaagatcgcgcctacggagttcgtgatgcgggcgctcgagtgcgtgtaccacctgggctgcttctgctgctgtgtgtgtgagaggcagctgcgcaagggtgatgagttcgtgctcaaggagggccagctcttgtgcaagggcgactacgagaaggagaaggatcttctcagctccgtgagccctgacgagtctgactccgtgaagagtgaggacgaagacggagacatgaagccggcaaaggggcagggcagccagagtaagggcggtggggacgacgggaaggacccgagaaggcccaaacggccccggaccatcctcaccacgcagcagcggagagccttcaaggcttcttttgaggtctcctccaagccctgtcggaaggtccgggaaacgctggcagcagagacgggcctcagcgtgcgtgtggtccaggtctggtttcagaaccaaagagcaaagatgaagaagctggctcggcggcaccagcagcagcaggagcagcagaactcccagcggctgggccaagaggtcctgtcaagccgcatggagggcatgatggcttcctacacgccgctggcccctccgcagcagcagatcgtggccatggagcagagcccctgcggaagcagcgaccccttccagcagggcctcacgccaccccaaatgccaggtgaccacatgaacccctatgggaacgactccatcttccacgatatcgatagtgatacctccctcaccagcctcagcgactgcttcctcggctcctctgacgtgggctccctgcaggcccgcgtggggaaccccatcgaccggctctactccatgcagagctcctactttgcctcctgagagccagctgggccgcatggacgcttgggcctgggcctagggtgggaccacaggcctctgcagccagccggccccccagcccaccacccactcagactctacagacagccatacggtgccctcccctcggccagccggacctggctcaagtgcccactgggcacagccagacaggcagatgggtgcagcctgggcaggggttgtgtcctgcccacagagaccgcgtgactcctggggacccagagctctgggacagccactcacctcccagctctttgaccccatcacctcctctcccctccccatctctg

SEQ ID NO: 1121 - DNA, 2809 bp, Cricetulus griseus
  misc_feature (136)..(136): n is a, c, g, or t
  misc_feature (1197)..(1276): n is a, c, g, or t
tcagagaagttagggaggtcgagcagggaagggttggtagaaacctcgatcagatttcctttccgctcgtcctggtcgcttgggcccaggaggaacgtccctgcttgcgtctaggggcggacggtgaacgcgctgngcacggccccgccagggctggtagtttgcagaccgtccctgccgaggcccgctcgcccggcagccctgcggctcccgcggtggcggcagcggcggcggccccaggctcgatccaggccaggtagccgcgcctcaggctctgggggcgctgtgaccccgctcctggctgctcctgggacccccctgttccccagagcacggctgttggagagtgaccccgactgctgctgatggtgcctctgttgctcccctactagcaggagtgattcttcaccggaagtggactttggagaggggttcattagaccagaatggaagccaggcaaggaaatcagctgactcaggagccggagtgagagcgacacaccctccgccccagcctgcaccatgaacttgccttcaccttctgcacgttgagagccaagggaggggtacattgccagagagagatggctttctttactccctggaagttgtcctctcagaagctaggctttttcttggtgacttttggctttatatgggggatgatgcttctgcacttcaccatccagcagcggactcagcctgagagcagctccatgttgcgggagcaaatcctggatctcagcaaaaggtacatcaaagcactggcagaagaaaacagaaacgtggtggatggaccatacgctggcgtcatgacagcttatgatctgaagaaaacacttgctgtactactagataacatcttgcaacgcattggcaagctcgagtcgaaggtggacaatctcgtcaatggcacaggagcaaattctaccaactccaccacagctgtccccagcttggtatcgcttgaaaaaattagtgtggcagatatcattaatggagttcaagaaaaatgtgtattgcctcctatggatggctacccccactgcgaggggaaaatcaagtggatgaaagacatgtggcgctcggatccctgctacgcagactatggagtggacggcacctcctgctccttttttatttacctcagtgaggttgaaaattggtgtcctcgtttaccttggagagcaaaaaatnnnnnnnnnnnnnnnnnnnnnnnnnnnnnnnnnnnnnnnnnnnnnnnnnnnnnnnnnnnnnnnnnnnnnnnnnnnnnnnntgaggagttccggtggatgagacttcggatccggcgaatggctgatgcgtggatccaagcaatcaagtctctggcagagaaacaaaacctggaaaagagaaaacggaagaaaatccttgttcacctggggctcctgaccaaggaatctggcttcaagattgcagagacggcattcagtggtggccctcttggcgaactggttcagtggagtgacttaattacatctctctacctactgggccatgacatccggatctcggcttcactggctgagctaaaggagattatgaagaaggttgttggaaatcggtctggctgtcccactgtaggagacagaatcgttgagcttatttatattgatattgtgggacttgctcaatttaagaaaactctaggaccatcctgggttcactaccagtgcatgctccgagtgctagattcctttggaacagaacctgagttcaatcatgcaagttatgcccagtcgaaaggccacaagaccccctggggaaaatggaatctgaacccgcagcagttttacaccatgttccctcacaccccagataacagcttcctgggcttcgtggtcgagcagcacctgaactctagcgacatccaccacattaatgagatcaaaaggcagaaccagtcccttgtgtatggcaaagtggatagtttctggaagaataagaaaatctacttggatatcattcacacgtacatggaagttcatgccactgtttacggctccagcacaaagaacattcccagttacgtgaaaaatcatggcattctcagtgggcgtgacctgcagtttcttctccgggaaacaaagctgtttgttgggctgggattcccttatgagggtccagctcccctagaggccattgcaaatggatgtgctttcctgaaccccaagttcagccctcccaagagcagcaaaaatacagacttcttcattggcaagccgaccctgagagagctgacgtctcagcacccttatgcagaagtcttcatcggccggccacacgtctggaccgtggatctgaacaatcgagaggaagtagaggatgccgtgaaagccatcttaaaccagaagattgagccgtatatgccgtatgagttcacatgtgaagggatgctgcagagaatcaacgcgttcatagagaagcaggacttctgccatggccaggtgatgtggcctcccctgagcgccttgcaggtgaagctggctgagcctgggcagtcctgcaagcaagtgtgccaggagaaccagctcatctgtgagccatccttcttccagcacctcaacaaggaaaaggacttgctgaagtacagagtgacctgccaaagctcagaactgtacaaggacatcctggtgccatccttctaccccaagagcaagcactgtgtgctccaaggggatctcctgctcttcagttgtgccggggcccaccccacacaccagaggatctgcccctgccgggacttcatcaagggccaagtggccctatgcaaagactgcctatagca

SEQ ID NO: 1122 - DNA, 3883 bp, Cricetulus griseus
  misc_feature (2019)..(2098): n is a, c, g, or t
tcagagaagttagggaggtcgagcagggcaagggttggtagaaacctcgatcagatttcctttccgctcgtcctggtcgcttggacccaggaggaacgtccctgcttgtgtctaggggcggacggtgaacgcgctgcgcacggccccgccagggctggtagtttggagaccgcccctgccgaggtccgctcgcccgggagccctgcggctcccgcggtggcgggagcggcggcggccccaggctcgatccagcccagggagccgcgcctcaggctctgggggcgctgtgaccccgctcctggctgctcctgggacccccctgtcccccagagcacggctgttggagagtgaccccgactgctgctgatggtgcctctgttgctcccctactagcaggagtgattcttcaccggaagtggactttggagaggggttcattagaccagaatggaagccaggcaaggaaatcagctgactcaggagccggagtgagagcgacacaccctccgccccagcctgcaccatgaacttgccttcaccttctgcacgttgagagccaagggaggggtacattgccagagagagatggctttctttactccctggaagttgtcctctcagaagctaggctttttcttggtgacttttggctttatatgggggatgatgcttctgcacttcaccatccagcagcggactcagcctgagagcagctccatgttgcgggagcaaatcctggatctcagcaaaaggtacatcaaagcactggcagaagaaaacagaaacgtggtggatggaccatacgctggcgtcatgacagcttatgatctgaagaaaacacttgctgtactactagataacatcttgcaacgcattggcaagctcgagtcgaaggtggacaatctcgtcaatggcacaggagcaaattctaccaactccaccacagctgtccccagcttggtatcgcttgaaaaaattagtgtggcagttcaacaccccaactccataggatggtgctgcccacacttggaatgggtcttccctgtcagttaaacctctgtggaaacgccctcatagatacaaccagagttatatctccatggcaatcctaaatcatgccagactaacaactgaggattaaccaccacaatgacctaaggcttgacacccacaggaaggaaagacaaattggagctggaggagaggatgaatgtgctggcagctgaagagatggttcagtcaggaagatgcttgttaaacaagcatgaggacccgagttcaaaccccagaacacatgtaaaagagctgagtggagacagctcattggcctgcttcaggttctagcccagcgaaagatcctttctcaaaaaataaaatgcaccgcgcccacacacccccaaggcacagggaacattatagaagacgaagaaaggatgaggaagaggaggggtgccatgaaatgtgaccatccagatatggcatggcaatagaagccatggcagctgtggatactacactacactgtgccctccaactctctgtcatgggtaaaggaggtgcccatgaagccgccgttcctgtggagacactgatggttccaggagactatgccatttctttaatggtgtagccagtggggaccagttgggaaaagaggctcaaggggaaaggaagtgtggcaaaagagagtaaagggagtcaaatgtgatcacaatgcattgtctatgaaactgtcaaaaacaaagcaaaaaaactattggagagcagttggtgaagacacctgatgacaaaccctggcttcccacacagatatcattaatggagttcaagaaaaatgtgtattgcctcctatggatggctacccccactgcgaggggaaaatcaagtggatgaaagacatgtggcgctcggatccctgctacgcagactatggagtggacggcacctcctgctccttttttatttacctcagtgaggttgaaaattggtgtcctcgtttaccttggagagcaaaaaatnnnnnnnnnnnnnnnnnnnnnnnnnnnnnnnnnnnnnnnnnnnnnnnnnnnnnnnnnnnnnnnnnnnnnnnnnnnnnnnntgaggagttccggtggatgagacttcggatccggcgaatggctgatgcgtggatccaagcaatcaagtctctggcagagaaacaaaacctggaaaagagaaaacggaagaaaatccttgttcacctggggctcctgaccaaggaatctggcttcaagattgcagagacggcattcagtggtggccctcttggcgaactggttcagtggagtgacttaattacatctctctacctactgggccatgacatccggatctcggcttcactggctgagctaaaggagattatgaagaaggttgttggaaatcggtctggctgtcccactgtaggagacagaatcgttgagcttatttatattgatattgtgggacttgctcaatttaagaaaactctaggaccatcctgggttcactaccagtgcatgctccgagtgctagattcctttggaacagaacctgagttcaatcatgcaagttatgcccagtcgaaaggccacaagaccccctggggaaaatggaatctgaacccgcagcagttttacaccatgttccctcacaccccagataacagcttcctgggcttcgtggtcgagcagcacctgaactctagcgacatccaccacattaatgagatcaaaaggcagaaccagtcccttgtgtatggcaaagtggatagtttctggaagaataagaaaatctacttggatatcattcacacgtacatggaagttcatgccactgtttacggctccagcacaaagaacattcccagttacgtgaaaaatcatggcattctcagtgggcgtgacctgcagtttcttctccgggaaacaaagctgtttgttgggctgggattcccttatgagggtccagctcccctagaggccattgcaaatggatgtgctttcctgaaccccaagttcagccctcccaagagcagcaaaaatacagacttcttcattggcaagccgaccctgagagagctgacgtctcagcacccttatgcagaagtcttcatcggccggacacacgtctggaccgtggctctgaacaatcgagaggaagtagaggatgccgtgaaagccatcttaaaccagaagggatgctgcagatcggcactcggttctcatgcttacacagcaagcagccgagccatctcccccgtcttggcctcactctgggcagacgcctggaacaggaaagctcagcccaatcagcagagtcggcccgcagctccgctcaatccgcaactccgacccgcgcagcccgcggagctcccgccgccggtctgggcagcatgaggcgcgcggcgctctggctctggctctgcgcgctggcgctgcgcctgcagcctgtcctcccgattgagccgtatatgccgtatgagttcacatgtgaagggatgctgcagagaatcaacgcgttcatagagaagcaggacttctgccatggccaggtgatgtggcctcccctgagcgccttgcaggtgaagctggctgagcctgggcagtcctgcaagcaagtgtgccaggagaaccagctcatctgtgagccatccttcttccagcacctcaacaaggaaaaggacttgctgaagtacagagtgacctgccaaagctcagaactgtacaaggacatcctggtgccatccttctaccccaagagcaagcactgtgtgctccaaggggatctcctgctcttcagttgtgccggggcccaccccacacaccagaggatctgcccctgccgggacttcatcaagggccaagtggccctatgcaaagac

SEQ ID NO: 1123 - DNA, 2871 bp, Mesocricetus auratus
  misc_feature (62)..(62): n is a, c, g, or t
  misc_feature (1938)..(1955): n is a, c, g, or t
cggtcggggtgcgcaagtgggaggcctctccctcgggagcctgggagatccctgccgccagnaggggtcgtgccaccgccctcgcgggaaccccagctttgccccggagccttggcactttggtggtgctcgcagaccaaggcggtcgggatggatctgtcaccccgcaaccggccgctgctggagtcgtcgtcgctggacagcggcggctccctgagctcgctggactccagcgtcttctgcagcgagggcgaaggggaacccttggctctgggggactgcctcacggtcaacgtgggcggcagccgcttcgtgctctcgcagcaagctctgtcctgcttcccgcacacgcgcctgggcaagctggccgtggtggtggcctcctaccgccgcctgggagccctggctgccgcccccagccccctggagctctgcgatgatgccaacccggtggacaacgagtacttcttcgaccgcagctcccaggcgttccgctatgtcctgcactactaccgcacgggtcgcctgcacgtcatggagcagctgtgcgctctctccttccttcaggagatccagtattggggcatcgacgaactcagcatcgactcctgctgcagggacagatacttcagaagaaaggagctgagcgaaacgctggactttaagaaggacacagatgaccaggaaagtcaacatgagagtgaacaggacttctcccagggaccttgtcccacggtccgccaaaagctctgggacatcctggagaaacctgggtcttccacagcagccaggatctttggagtcatctccatcatttttgtggcagtgtccatcgtcaacatggccctgatgtcagctgagttaagctggctcaacctgcagctcctggagatcttggagtacgtgtgtatcagctggttcaccggggagttcatcctgcgcttcctgtgcgtgaaggacaggtgccgcttcctgcggaaggtgcccaacattatagacctccttgccatcttgccgttctacataactcttctggtggaaagcctgagcggcagccacaccacacaggagctggaaaacgtagggcgcctggttcaggttttgaggctcctcagggctcttcgcatgctaaagctgggaaggcattccacaggattgcgctcacttgggatgacgatcacccagtgctatgaagaagttggcctacttctcctctttctgtctgtggggatttctatattctcaacaatagaatactttgcggagcaaagcattcctgacacaaccttcacaagtgttccctgtgcatggtggtgggccacaacgtcaatgactacggtaggctatggggacattagaccagacaccaccacaggcaaaatcgtggccttcatgtgcattctgtcaggaatcttggtcttggccttgcctatcgccatcatcaacgatcgcttctctgcctgctacttcaccttgaaactcaaggaagctgccgtgagacagcgtgaagctctcaagaaactcaccaagaacatcgccactgactcgtatatcagtgttaacttgagagatgtctatgccaggagcatcatggagatgctccgattaaagggcagggagagagcaagtaccagaagcagtggtggagatgatttctggttttaaatttaccttctacttatttatagaacctatgcccatgtgactggactgctgaagccttgcttctgtggatgagtttcctgaacacttctcatcctcttcccggtgtattgattttctccgaatactaaacatctccttagcaactactgattattttgacacacctatcttcaacatagctaattaatacaaccaaaatcatttgggaaaagaaccacatgtctggattttcaaatattaattaatataatttcatacatcaaagtttaaagnnnnnnnnnnnnnnnnnntttcatacatcaaagtttaaagacccatgtgtcattgtttttaggttttcccacctttgcattttttttttactggaaattgaactgaacagcccagagtggggggggggaatgagtgaatgtttaaaaatatactgaacatcttttgggtatttagaaaatattctccaaatagattacctttttctctataaattaaagctgttgagtataacgataggctttgcaagcaaacactcaaccttggtggttatagagggtacctcatcttccatcaagtgctaatcactgggcccaaatggacagggctctgcctttcaccactccagttgcaagggacctcagactgctcagagtgcagtaggtgaggcttcaagtgcctagaaagcttcatcatcccagttaagtgcgatgtgtaaagaagaaagcagcatagtcatttgtgaaaagtagatggcttgtaaaatgtctcattacagatgaattatttaagttatgccttcaaaatcatgaaatcatgaatatggaaaagtgaagtcgttaagatcctaactttattcattgaaaagattggatagtctttttataagcgaaaatatgttgaaaggtatcgttagatgaacttgaagatctttttatttgttaaaaaatattgtggaaagctttctgattgtggaggtaaataacaaatgttcagactttgcaggtgctttgacagtgtttatggtaataatacgatgcctaaatgatgtggcatataattaaagccaaaagttttaaagctaagaaataaccctggttctaatataatagtaagtaatattttcaaaagtctaacaaaggattccctcattgcctactttcttgatgtatgcaataaagttcctaaagaaaataaaattggttctgggataga

SEQ ID NO: 1124 - DNA, 1900 bp, Mesocricetus auratus
  misc_feature (329)..(350): n is a, c, g, or t
  misc_feature (496)..(516): n is a, c, g, or t
  misc_feature (1172)..(1243): n is a, c, g, or t
ctcactctagccaggactgccgagggaaatcattgcaaaatgaagacggctttgattctgctcagcattttgggaatggcttgtgctttctcaatgaaaaatttccaccgcagggtgaaagctgaggactctgaggacaatggggtctttaaataccggccacgctattttctctacaagcatgcctacttctatccttctctaaagcggttttcagtccagggaggcagtgactcttctgaagaaaatggagacggtgatagttcagaggaagagggggaagaggagacttcaaatgaagaggaaaacaatgaagagtccgaggggannnnnnnnnnnnnnnnnnnnnntgagaacaccacactctctagtgtaacaactagctacggagctgagaccacaactggaacaggaaatatagggctagctgcgctccagctgcccaagaaggctggaaatgcagaaagcaaggctgcaaaaaagaaggaaagcgatnnnnnnnnnnnnnnnnnnnnngaaaatgaaaatgaagaagcggaagtagaagaaaacgagcaggtcaccaacggcaccagcacgaactccacagaggtgtacggtgggaacggcagtagcggaggatacaatggagaagaaggcgaggaacagagcgtcaccgaagcaggtgtagaaggaaccacagtgggcagggagcagatcagtgatggccccacgacagcagtccttatgaatgggtttcagtatacaaccccaccacctgaagcctatggcaccacctccccaccattcagaaaacccaccaccgttgagtactggggagaatatgaacaaacggggaacaatgagtacaatggtgagtatcaaatctatgacaatgagaatggggagcctcgtggggacaattaccgagcctatgaggatgaatacagctactacaaggggcgtggctatgaaggctatgatggccaagattactactaccaccagtgaagccccacaccgccggggagggggggaattacccattctgtcattgcatctggctaccatttattttcaaagttcaactcaggaaggtgcaatatatcaaatgtgcattttacaatgttgaatggtgctacagtcccagagcgatttctgcaaatgcttctatttgtaatggcttctttttnnnnnnnnnnnnnnnnnnnnnnnnnnnnnnnnnnnnnnnnnnnnnnnnnnnnnnnnnnnnnnnnnnnnnnnntggggctggatggaatgctttgaaatggtaactctacagtgtttgccctattgctaactgcccaaacatactctttgtacaagatagatcaaagagagatttagaaacgacactgtatacaataattgtgtattcctatatcatacccactatccaatactgtagtaggtttaattctcatcctcatgtatttatatggcctgtatgcacgggttttaccgtaaataaacatgcaattcttcaaatgtgttataactaagaaggaatggggaccatgggaaagcagagggctttaaggagggctgtacaagtcagctaaaaagcaggcttatttccatcagggtttaatactcagaggatctgaaaaccatctcagtgttctctcctcaataaatctgcatgactaaggtttgacaattgagggcagaatcagctatatacaccagggaataaaaacttcttagagttgccagatttaacaagcatagatccatggtgtgaaatgcccacttcagtttgaatttcagataaacaatgattggtttttaatgcaagtgttcccccccccatgaataattagtctctgtgaaatatctggaataaacttaacgctgaataaatgacatactttaatattcaactgtaaaaaaaaaaaaa

SEQ ID NO: 1125 - DNA, 1564 bp, Mesocricetus auratus
  misc_feature (527)..(596): n is a, c, g, or t
cacaagtgcagtgctgccacatctgcaggaaagcatgttgctagccacgtttaagctgtgtgctggaagctcctacagacatctgcggaacatgaaaggactgagacaccaagctgtgctggccattggccaggaactcaacagaagaacactgggagactccagccctggatggatcagtcaggttcggcgtcggagctctctgcttggttctcagctggaagcggcactctacagtgagcaggagctgtcctatatccagcagggagaggtggctatgcagaaggccttgagtatcctcagcaaccaggaaggctggaagaaagagaaccagcaggaaaacggggatgaggtgctgagtaaagtggtccctgatgtgggcaaggtatttcggctggaggtggtggtagaccagcccatggacagactctatgcagaacttgtggaccgcatggaggcaatgggagagtggaacccaaatgtcaaggagatcaaggtcctgcaaaagattgggaaagacacagtcnnnnnnnnnnnnnnnnnnnnnnnnnnnnnnnnnnnnnnnnnnnnnnnnnnnnnnnnnnnnnnnnnnnnnngtgccaagcgccgaggctccacctgtgtgctggcaggcatagccacacattttggggagatgcctgaacaaagcggtgttatcagagctgaacagggtcccacctgcatggtgcttcacccactggctgggagtccctcgaagactaaattcacttggctgctcagtattgacctcaaggggtggctgccgaaaagcatcatcaatcaggtcttatcacaaacccagatggagtttgccaaccacctgcgcaagcgcctggagtccagctctgcctctgaggcccggtgttaagactgtacccactacatcaacctgcatgccatcagcagcctcccgcaggaagcctgcaagtctgtttcaaatctccagttgatgactacgggaggggtagtacttatcagacactaggactgactggcgaaacatgaccatcaggaaattagcaatgaggctgagcagaagagagcctcagcctctcccacaagattagctgtgaagtgggctaagagatagacatgctaacacttttatgtaggcctgtgtatgctcacctaaaaaccctactcaaaacgcaagtagttagtgtgacaagggggggtgtttaggaactgttgtcttctgagctcaaagccactgcctgaagcagtgtgtgcacacagcaaggcttccccagggacttcagtgaccctctgttcctccataaaaggccaagaacatcaaaccactcacaaacagacccttccagagtacactccaagttctctctaaggagaaaggaaactaaatattacgttggcttccctacttattacatcacaataaagtaccacacatgaaatttcagcctatacttgtcaagtcctatggcacagaatctgtgctgggagccacagcttcatcagagctctggatcaagactgtgggttccaatttcctagttcattaaaggaacaaaacttcacattt

SEQ ID NO: 1126 - DNA, 1724 bp, Mesocricetus auratus
tggagcttctccgctccgcagcgggccatctgctgattgccatgtgggaacttgtggctctcctgctgctcaccctggcctatttcttttggtccaagtcaaagacgtgtggtgccaagtcgcccaagagcctcccattcctgccgcttgtgggcagcctgccgtttatccccagacatggccatccgcatgtcaacttcttcaagctgcaggaaaaatatggtcccatctattctcttcgtctgggttccacaacgacagtgatcatcggccaatatcagttggccaaggaagtgcttgtcaagaaaggaaaagaattctctggtcggccccacatggtgactctaggtctcttgtcggaccaaggaaaaggcatcgccttcgctgactctggtggctcctggcagctgcaccggaagctggcgctcagcagctttgccctgttcagggacggtaaccagaaactagagaagatcatatgtcagaaagccagctcgttgtgtgacttcctgctcacccacaatgaggagtccatagatctttccgaacctatcttcaactcaataaccaacatcatctgtatcatctgcttcggcatctcttatgagaacagggatccgatactggccaccattaagagctttacagaaggcatcctgaacagcctgggcaacgatcatctggtggacatattcccttggttgacgatttttcccaataaaactgtggacatgataaagaaaaatgttaaaattcgagatgaagttctaagtggaatattagaaaaatgcaaggagaaattcaacagtgactccatctccagcttgatggaccttctaatacaagccaagacaaatgcggacaacaacaacaccagtgaaggccagggttcaaatgcattttcagacatgcatatccttgccacaatagcagacatctttggcgctggcatagaaaccaccgcctctgtgttgagttggattattgcttttctgctgcataatcctgaagtgaagaagaagatccaaaaggagatcgaccagaatataggtttcagtcgcacgccaactttcaacgaccggaatcacctcctaatgctggaggccactatccgagaagtgcttcgtatcaggcctgtggcccccatgctcatcccccacagggcaaacagtgacatgagcattggtgagtttagcatccccaagttcacacccgtgatcatcaatttgtgggcactgcatcatagtgagaaggaatgggaccagccagatcggttcatgcctgagcgcttcctagacccaacgggaagccatcttatcacaccctcattaagctacctgccctttggagctggagcccgctcctgcatcggagaggttctggcccgccaggagctcttcctctttatggctcacctgctgcagaggtttgacctcgatgtcccagatgatgagcagccgccctgcctgaagggtaacgccaacgtggtctttttgatagaccccttcaaagtgaagatcacagtgcgccaggcatggaaggatgcccaggcagaggttaacacctggaggccataactaatgtcccctggtcctatattgtgcagctcacagcacaaaattagaggtgctactcctactgcctcctatagtcctcttccttcctgtcctgttttctggtttgcagcaatggagggtgatatgctaaattaaagattttccaat

SEQ ID NO: 1127 - DNA, 4119 bp, Cricetulus griseus
  misc_feature (1902)..(1923): n is a, c, g, or t
  misc_feature (3005)..(3035): n is a, c, g, or t
gcggcggagcgggaggggaaaggtacctgcagatgatgtccattgtctttggtatccaacatcttccgggctgatccatggtcactttccgggatggcagcaaggtgacttagctgaggatgaccctgactgaaaggctgcgtgagaagatatctcaggccttctacaaccatgggctgctctgtgcatcctaccctattcccatcatcctcttcacagggctctgcatcttagcctgctgctaccctctgctgaagctccccttgcctggaacaggacctgtggaattctctactcctgtgaaggactactcacccccgcctgtggactctgaccacaaacaaggagagcccagtgaacagccagagtggtatgtgggggccccagtggcatacatccaacagatatttgtgaagtcatcggtatctccctggcacaaaaatcttctggcagtagatgtgttccgattgcctctgtcccgggcattccaactggtggaggaaatccggaatcacgtactgagagacagctcagggaccaagagcctggaggaagtttgccttcaggtgaccgacttgctgccaggactcaggaaactccgaaacctacttcctgaacatggctgcctgctgctgtcccctggaaacttctggcagaatgactgggagcgattccatgctgaccctgacatcattgggactatccatcagcatgagcccaaaactctgcagacatcagccacactcaaagacctgctgtttggtgtgcctgggaagtacagtggggtgagcctctacacaaggaagaggacggtctcgtacaccatcaccctggtcttccagcgctaccatgccaagtttctgagcagcctacgtgcccggctcatgctcctgcaccctagccccaactgcagccttcgggccgagaacctggtccacgtgcacttcaaagaggagattggcattgcggagctcatccccctcgtgaccacctacattatcctgtttgcctacatctacttctccacacgtaagatcgacatggtcaagtctaagtggggactcgccctggcagctgtggtcacagtgcttagctctctgctcatgtctgtggggctctgcactctctttggcctgacacccacactcaatggcggtgagattttcccatacctggtggtggttattgggttagagaatgtgttggtgctcaccaagtcggttgtatcaaccccagtggacctcgaggtgaagcttcggattgcacaaggcttaagcagtgagagctggtccatcatgaagaacgtggcaactgaactgggcatcatcctcattggctatttcacccttgtgcctgctatccaggagttctgcctctttgctgttgtgggcctggtgtctgacttcttcctccagatgttctttttcaccactgtcctgtcgatcgacattcggcgaatggagctagcggacctgaacaagcgtctgccccccgagtcctgcctgccctcagctaagcctgtgggaaggccagcacgctatgagagacagctagctgttcggccggccatgccacacaccatcacactgcaaccgtcttccttccgaaacttgcggctccccaaaagactgcgtgtcatctacttcctggcccgaactcgcctggcacagcgcctcatcatggctggtaccgttgtttggattggcatcctggtatacacagacccagcagggctgcgtacctacctcgctgcccaggtgacagagcagagcccactgggtgagggctccctgggccccatgcctgtgcctagtggagtgctgcctgccagccgcccggaccctgccttctccatcttcccacctgacgctcctaaactgccagagaaccagacagtgccannnnnnnnnnnnnnnnnnnnnnctccagcagagggagtccatgacagccgagccccagaggtgacttgggggcctgaggatgaagagctgtggaggagactgtccttccgccactggcccaccctcttcaactactacaacatcacactggccaaaaggtacatcagcctgctgcctgtcatacctgtcacactgcgcctgaatccacaggaggccctggaggggcggcaacctcaggatggtcgcagtgcctgggccccacctgagtctttgcctgctggcctctgggaggctggacctaaggggccaggtggaacacaagcccatggcgacattaccttgtacaaggtggccgcacttggcctggcagcgggcatcgtccttgtgctgctgttgctctgcctctaccgggtgctgtgcccgcggaactatgggcagcccggtggtggtgcgggcaggcggaggcgcggagagctaccctgcgatgactacggctacgcgccgcctgagacggagatcgtgccgctggtgctgcgcgggcacctcatggacatcgagtgtctggctagcgatgggatgctgctagtgagctgctgcttggcgggccaagtctgcgtgtgggacgcacagaccggggactgcctcacgcgcatcccgcgcccagggtcgcgccgggacagctgtggaggcggagcttttgaaactcaggagaactgggaaaggctgtcggatggcggcaaaactagcccggaggagcctggggagagccctccgctgcgacaccgcccccgagggcctccacagcctgccctcttcggggaccagccagacctcacctgcttaatcgacaccaacttctcagtgcagctgcccccggagcccactcagcccgagcctcggcaccgggcgggctgcggccgcgccagggactctggctatgacttcagccgcctggtgcagcgtgtgtaccaggaggagggcctggccgctgtgcgcatgccggccctgcgcccgccctctccaggctccccgctgccccaggcttctcaagaagacggggctgcgcccgagaagggctcccctcctctggcctgggcccccagnnnnnnnnnnnnnnnnnnnnnnnnnnnnnnncaaggcaacctcatcgtggttggacgaagcagcggccggctggaggtgtgggacgccattgagggggtgctctgctgcagcaacgacgaggtctcctcgggcatcacagcccttgtcttcctggacaggaggattgtagctgctcggcttaatggttcccttgatttcttttccctggagacccacacttccctcagccctctgcagttcagagggaccccagggcgaggcagttctccttcctcatctgtgtacagcagcagcaacacagtggcctgccatctgactcacacagtgccctgcgcacaccaaaaacccatcacagccctgagagctgctgccgggcgcctggtgacagggagccaagaccatactctaagagtcttccgactagaggactcgtgttgcctttttaccctgcagggccactcaggggcaatcacaactgtgtacattgatcagaccatggtactggccagtggaggacaagatggagccatctgcctctgggatgtactcacaggtagccgggtcagccatacattcgctcaccgtggagatgtcacctccctcacctgtaccacttcctgtgtcattagcagtggtttggatgacctcatcaatatctgggaccgcagcacaggcatcaagctttactccattcagcaggatctgggctgtggtgcaagcttaggtgtcatctcagacaaccttctggtgactggcggccagggatgtgtgtccttttgggacctaaactacggggacctgttacagaccgtctacttgggcaagaacagtgaggcccagcctgcccggcagattctggtactggacaacgctgccattgtctgcaactttggcagtgagctcagcctagtgtatgtgccctctgtgctggagaaactggactgagggcaggttgaccatacaacccactcgcccccacccagagtggggcctgtgggcagcaattctttggacctagactggagacaagagctaggcatctcctttgcagctgtctctaaactgttgtctcctgactgtaatattaaacttttttaaaaaccaccaaaaaaaa

SEQ ID NO: 1128 - DNA, 834 bp, Cricetulus griseus
  misc_feature (814)..(834): n is a, c, g, or t
ggaagatggcggcggccgcggagctgaagctgctggagaagtctctgggactgaggccggggaataagtacagcgctcagggcgagcgacagattccagttctacaaacaaacaatggtccaagtctaacgggattggctaccattgccacccatctagtcaaacaagccagtaaagagcacctgctggggagcactgcagaagaaaaggccttggttcagcagtggttagagtacaggatcacccaagtggacggacactccagtaaagaagacacccacaccctgctgaaggatcttaattcttatcttgaagataaagtctaccttgcaggatataacatcaccttggcagatatcctactgtactacgggctccatcgctttatagttgacctgacagtgcaagaaaaggagaaatatcttaatgtgtctcgctggttttgccacattcagcattacccagacatcaggcaacatctgtctagtgttgtcttcatcaagaacagactgtatgctaactcccactagaagttcctgctgggcagcagcaagattagaagtgtaaaatgtattttggaccatggttctaatgtaaattaatgtgatgtcattgtttctttgttaatgttggtagaatttttaacatgtaaactcaagtctgaatgttttatttgtcccttagttgaaggtttgcagttttttaatgtaaaaattcaactgttattcaagcaaatcacgattagattataaattatctcatatttataggtgaaatttattttaataaaatttgcttatcagtggcagaaacnnnnnnnnnnnnnnnnnnnnn

SEQ ID NO: 1129 - DNA, 1321 bp, Mesocricetus auratus
  misc_feature (130)..(187): n is a, c, g, or t
gatttctgtctgtccaagtccaagcaccatccctgtcttaaccccaagcagaaagaatgaagcacattatcactccatatgaacacaccaatgacacagcaagaaacaattcagattgccctgatgtagnnnnnnnnnnnnnnnnnnnnnnnnnnnnnnnnnnnnnnnnnnnnnnnnnnnnnnnnnntgtcctcctggctgtggtcaagaataagaacctccagtgccccatgtactttttcatctgcagtttggccatttctgacatgttgggcagtctgtacaagatcttggaaaatatcctcatcatgttcagaaaccggggttacctccagcctcgtggcaactttgaaagcacagcagatgacatcattgactgcatgttcatcctctctttgctgggctctatcttcagcctgtctgtgattgctgctgaccgttacatcaccatcttccacgccctgcaataccacagcattgtgaccatgcgccgcaccatcatcaccctaacagttatctggatattctgcacagggagtggcatcgccatggttatcttctcccaccacgtccccacggtgctcaccttcacgtcactcttccctttgatgctggttttcatcctatgtctctacattcatatgttcttgcttgcccgctcccatgctagaaagatctctactcttcccagagccaacatgaaaggggccatcacactgactatccttcttggagtcttcatcttctgttgggccccctttatcctccatgtcctcttaatgaccttctgcccaaataacccttactgtgtttgctacatgtctctcttccagatcaatggcatgttgatcatgtgcaatgcagtcattgacccctttatatatgcctttcggagcccagagctcagggatgcattcaaaaagatgttttcctgccacaggtatcagtagactttttgatccctgatttaaataatgtaaagagaccaacacggcatgacagtctgacaagtgatgatgcatcttagcagcctttctttctttaatagatggagtcaatcaattaaactgactagtgtttagcatagctggctttctaatgaagtattactgcagctgcaaactttatattgtatctagagagatgaaatggtaggctaaatagacgtatcgagtacacatcaatacaaatgtgaggatttggggttaagcaagtatttgttcttctgtgggtacctggaaaactgtcctggaaggcctttccaggtcagaaaccatgacaaccaattctccaactaattaaatgtgttggttagattcct

SEQ ID NO: 1130 - DNA, 9046 bp, Mesocricetus auratus
  misc_feature (26)..(104): n is a, c, g, or t
  misc_feature (587)..(716): n is a, c, g, or t
  misc_feature (1073)..(1113): n is a, c, g, or t
  misc_feature (1169)..(1217): n is a, c, g, or t
  misc_feature (1253)..(1340): n is a, c, g, or t
  misc_feature (1600)..(1629): n is a, c, g, or t
  misc_feature (1669)..(1721): n is a, c, g, or t
  misc_feature (1873)..(1982): n is a, c, g, or t
  misc_feature (2049)..(2106): n is a, c, g, or t
  misc_feature (2489)..(2509): n is a, c, g, or t
  misc_feature (2598)..(2654): n is a, c, g, or t
  misc_feature (2690)..(2714): n is a, c, g, or t
  misc_feature (2956)..(3009): n is a, c, g, or t
  misc_feature (3083)..(3098): n is a, c, g, or t
  misc_feature (3149)..(3201): n is a, c, g, or t
  misc_feature (3247)..(3267): n is a, c, g, or t
  misc_feature (3578)..(3611): n is a, c, g, or t
  misc_feature (3618)..(3642): n is a, c, g, or t
  misc_feature (4012)..(4042): n is a, c, g, or t
  misc_feature (4606)..(4630): n is a, c, g, or t
  misc_feature (4912)..(4939): n is a, c, g, or t
  misc_feature (5062)..(5128): n is a, c, g, or t
  misc_feature (5159)..(5194): n is a, c, g, or t
  misc_feature (5239)..(5264): n is a, c, g, or t
  misc_feature (5367)..(5430): n is a, c, g, or t
  misc_feature (5486)..(5542): n is a, c, g, or t
  misc_feature (5785)..(5814): n is a, c, g, or t
  misc_feature (5834)..(5863): n is a, c, g, or t
  misc_feature (6156)..(6210): n is a, c, g, or t
  misc_feature (6219)..(6255): n is a, c, g, or t
  misc_feature (7151)..(7165): n is a, c, g, or t
  misc_feature (7390)..(7465): n is a, c, g, or t
  misc_feature (7486)..(7503): n is a, c, g, or t
  misc_feature (8685)..(8784): n is a, c, g, or t
  misc_feature (8852)..(8866): n is a, c, g, or t
  misc_feature (8892)..(8929): n is a, c, g, or t
gagctcaaatgtgccttgttccagannnnnnnnnnnnnnnnnnnnnnnnnnnnnnnnnnnnnnnnnnnnnnnnnnnnnnnnnnnnnnnnnnnnnnnnnnnnnnnttaaggttggggtgtctccgacgacgggcaacctttgggaagacccctcccacctaagacaggggttcaaggtcccccaaagacgggaaaaggagggtgaccctacttgacttaagccaggagtgcctcatttgaaaataaaaaggggtgaattgtgggaacaccagaccttgagcagagacccacttccccttctgcctgggagtaggcagctgtaagacaatgtttagtaaaaacatgtttactaaaaacgatacaatgcccggggcaataagttcctggaaaaggccttcccacggaaaccgccctaacctcgaccttgtccaaagactaaccgcaccttcaaaatccacacacatccacctctgggggcagagcagaaccagccagggtagaggagagagcagaagcttctctggtgggagcttttcttcggaggttttcttgaaccttttttggagcctgtttaaagttttctttacnnnnnnnnnnnnnnnnnnnnnnnnnnnnnnnnnnnnnnnnnnnnnnnnnnnnnnnnnnnnnnnnnnnnnnnnnnnnnnnnnnnnnnnnnnnnnnnnnnnnnnnnnnnnnnnnnnnnnnnnnnnnnnnnnnatggcagtgcttaacaaatggaagaaaaaccaggacaaagctcactctgtagttttagagagctttctaaaatgcatacacacacatatatgaagaggtaaatggagttgccctatgatagaagcataataccccaattagacagcacatgcttccaaaggaaaatctcaaaccagaaacaggctaccactttttgagttttaacaagtagggtcccttagaccccccaaaacattacagacttttgccaatcctatttgttttactccataactttgcagtaagaccctattgctggagatatcacatacttgagtcttagactatgaagaaaccaagttggcactcagctggaannnnnnnnnnnnnnnnnnnnnnnnnnnnnnnnnnnnnnnnntatgcatgctaacaaaggataaaagtaatcaccaatgtcactcagttgtgggcgtnnnnnnnnnnnnnnnnnnnnnnnnnnnnnnnnnnnnnnnnnnnnnnnnngtggtatgaattttatggaagtaaccaaccactttnnnnnnnnnnnnnnnnnnnnnnnnnnnnnnnnnnnnnnnnnnnnnnnnnnnnnnnnnnnnnnnnnnnnnnnnnnnnnnnnnnnnnnnnggaaaaaactacaactattattctgctaaatagacataacattcaaaatgactacttatgacttattgttacgcctatagatcagtgtatctttcaacccttattagagaaacttcttacagcagaggacaattaacccaaagaccctcaactggtcaaggcacagagactggagtgctcagtcttagatgggacatccatatcacacctctctcctcagggctaagggatctatgtggaagtgagggcacgaaggtttnnnnnnnnnnnnnnnnnnnnnnnnnnnnnngaaatgatttccacacgcatcagggcagatgtacatacgnnnnnnnnnnnnnnnnnnnnnnnnnnnnnnnnnnnnnnnnnnnnnnnnnnnnncaaaatcccggcatggaggaggggaggtgggtacacagtcccacccatggctgaggagatgtttagtcatgttctagagggatagaaacaatgcctttaaagtgatgacagccaaatcatacctgctgtaggaagcacagcttagagtaagnnnnnnnnnnnnnnnnnnnnnnnnnnnnnnnnnnnnnnnnnnnnnnnnnnnnnnnnnnnnnnnnnnnnnnnnnnnnnnnnnnnnnnnnnnnnnnnnnnnnnnnnnnnnnngttatcctttgctattctattggcatctgaatcccctcagtatctggagaattgtttaggccttaannnnnnnnnnnnnnnnnnnnnnnnnnnnnnnnnnnnnnnnnnnnnnnnnnnnnnnnnntttgcatccttcaccaatagaatctatcctgatgctgatcacagaccctccctctaggcgctatccctgaccttgatttatcagccaatagaactccttcttattgtaaaggtcacaggtactctactatgttgctagggactttagatgtagctcagcctaaaactttgttgtgatgactgtcatatggaaacccttttcaaaagttttcctatgcttaaagtgcaatgcatggtgtagtgacatatggtcacagggtccctgggctggctacatatctgcgtgaaatgctagtggatggatctcgctggaagacaggaggtgggatcaggataatgccaggatatcaaccatcaacatcatcaacaccacccaacaccacnnnnnnnnnnnnnnnnnnnnnccaccatcaacataattaaccatcatcattaaccatcatcaccaccactataatcattatcagcaccaccaccaccaccatcatcattnnnnnnnnnnnnnnnnnnnnnnnnnnnnnnnnnnnnnnnnnnnnnnnnnnnnnnnnnaatcaatggcaagctaaagtacaattccaccaacgnnnnnnnnnnnnnnnnnnnnnnnnntgtcagacttacttacagagaatggatgagggcatttggggcaggagattagtgaccataaagaagccgtgttggagggtctgcacccagctggaatgatggcgtctcccatggctgtgcagatgtagtccttcccctaattattcctgtcatatatactctagcctccctcagagatcctgaggccgtttgcaattagggtacaacaacgtgcagtgggtttggaggagtgatggagtgtnnnnnnnnnnnnnnnnnnnnnnnnnnnnnnnnnnnnnnnnnnnnnnnnnnnnnntcctgaagaaggtgaaaatctggcttggaggctagtcctgtgtaacactgttgtaccaagaaagcagacacctnnnnnnnnnnnnnnnntgacaagtgtcagaagagagaccagggctgagggtgtgactgtgcagaggnnnnnnnnnnnnnnnnnnnnnnnnnnnnnnnnnnnnnnnnnnnnnnnnnnnnnccgggtgacacttgcttcacatgtagcagcaacgaaaagctttccnnnnnnnnnnnnnnnnnnnnnaactgaattcaaacttgtggaaaaatataattctttcatacactttctggttcttagatttattttttttactaaagtcagtaaaaaaaagacaaagtctattaaaagaaaccaaggtcttctattatctcttcaaaagatgaaggatccatccatcttcttttttccaactatagggagaagagagagatttctgccccctctacttcagtcaacatagtcccccatgtagacactatagctgtttccagtccccacccaccagcaggcttttgagggatggtattagggagctggtaagacacttctannnnnnnnnnnnnnnnnnnnnnnnnnnnnnnnnngatctcnnnnnnnnnnnnnnnnnnnnnnnnntccatgacgtgattagtccaacagtacagtacacaggcaggataaaagcctgtgaccccgacagagtagggagggatggcaatggcactcagggcaaaggcagatgtgtggctggcaagaccctggcagtgcctgcccaggacgagggcactgggcaccacagcagcactggcccccaacacactgcggccctttgaagccataccgcagtactccagaaacaggtggctgaagatgctacagatcctgagggaggagggccaagagggcctgcacctggagatgcatgaggccttccgggagctggggcccattttcaggtgagggtctgctgggcctgtagctgagcatggacggagcttcctgggcnnnnnnnnnnnnnnnnnnnnnnnnnnnnnnnggctgctgcctccccagtaggcaccaggcaccccctccttaggaagacagggagggaccacaggaggttatgagcctgactcatggagaccatggttctccacatggacacagaaagcactgttcctcactgagaggacagagtcccaggagggctgacgtggagaggagtcaggcagacagtgggagagccctcctggagggaaagcaagggccaggagaggatgaggccagggagcacacagacagggctgtctgcagggtgctcagggggagggcattccacccacaggagggccctgttttcaccccataggtacagcatgggaagaacacaggttgtgtctgtgatgttgccagaggatgccgagaagctgcaccaggtggagagtatgcaccctcgtcggatgcacctggaaccttgggtagcccacagagaacaccgtggcctgagtcgtggagtgttcttgctgtgagtggtcactggggatgaggagggaggagagattggtggcccagacacaggttgcagatcctgcttgggtgggagtgtggaggccagtcnnnnnnnnnnnnnnnnnnnnnnnnngccacgcagaccctggacccgaggagaagagaggcggccgaggaatgccccgtcccaaatccctgctctgaatgggccttttcagcgtgtagttgcctcaggaaggggagccactgttcagggccatagctggtctctgccacagcctgatgcccatcaatacagtctcccttttgtaggggcaatttcacccacagaggtttgaggtagacagttctggggatgaagaagtggaaaataggatgttggagctcctgtgggctcaaagtcaaacgccgctcnnnnnnnnnnnnnnnnnnnnnnnnnnnntagctgcatacgtagctggagagctaagtaggaattcctggtgcttggggtggataggctgccacgaggtcaccagtgggtgtggagaagcctacacggggaagtcaggctgcacacaggcannnnnnnnnnnnnnnnnnnnnnnnnnnnnnnnnnnnnnnnnnnnnnnnnnnnnnnnnnnnnnnnnnngcaagtagccgagggacactggcagagaggnnnnnnnnnnnnnnnnnnnnnnnnnnnnnnnnnnnnatgtgcctctgagaaagcaggaagcctgtgtgtgtgcatgcatgnnnnnnnnnnnnnnnnnnnnnnnnnntaaatgtgtgaccacacatgttgcttacataggaaagtgtgtgttgtctgcatctgtgactctctgtgtgtctttccacctttgtactagtctgttggcttannnnnnnnnnnnnnnnnnnnnnnnnnnnnnnnnnnnnnnnnnnnnnnnnnnnnnnnnnnnnnnngcatatacatgtgcttatggccactgtcaattgttgcaggttttagcacactggannnnnnnnnnnnnnnnnnnnnnnnnnnnnnnnnnnnnnnnnnnnnnnnnnnnnnnnncgtcaatcactggagaatctccatgggaaccctgtgccctgggctgtggtttgtacatgttgtaagtggtcctctgctgtggcccctgccctagggaggacgagatcccttacctgagacagcagaggctggtgactcagagaccacacattggacagactgacagggttggtgagctcagctggggcttctcctctgtggggaggtggtataggccaggtgggcagagcttgacagcacagnnnnnnnnnnnnnnnnnnnnnnnnnnnnnnagtcctccttagactcagtnnnnnnnnnnnnnnnnnnnnnnnnnnnnnntgtagaaagaagtgtggacaggaccagcggagcctgcctctgagcctgacacgcctttcccaatttctttgagggttagaaagatggacacgggcctgggccaggcctatcctaggaggtatctgtgtagctctgttctgtgtcctgcagaaatgggcctgaatggcgcttcaaccgactgaggctcaacccacacgtgctgtccccaaaggccgttcagaagtttgtccccatggtggacatggtagcacgggacttcttggagtccctgaagaagaaggtgtttcagaatnnnnnnnnnnnnnnnnnnnnnnnnnnnnnnnnnnnnnnnnnnnnnnnnnnnnnnnaaggtgtgnnnnnnnnnnnnnnnnnnnnnnnnnnnnnnnnnnnnngggagttgtggggagggagacaggaagcagtttggaggccagggactgctttgtcccagggataccattttttcttcagccagcaactttgttctttttggggagcggctgggactccttggccatgacctgagccctgccagcctgacgttcatccatgccttgcattccgtgttcaagacgaccccacagctcatgttcttgcccaggagcctgactcgctggacaagcacccgggtgtggaaagagcattttgaggcctgggatgtcatctctgagtatggtgagggtcactgaggcagggggcaaagttcatctccttaccatccacccgtacttatggctacaccagggtcatctcaaatgacagcgactgctgcttcccgatcttttaatatattcctaccgattctgtggccgaactgacccagatacagtgggagaagagcagggattgtcgttgggcgcgagagggggactcacgacgggacagcgggagctgcctgccctcaagctcccacctcacatctccagtcaacagatgtatccggaaggtgcaccaggagctcagacttggcagccctcacacctacagtggcatcgtggcagaactaatgtcccagggagctttgcctctcgacgccatcagagccaactcaattgagctcaccgctgggagtgtagacacggtcaggccaccccggtggaatcccctgtgactccctgtttgtatcctccaaagcacttcctgtgagctgcattcccaggttgtttctgcctggagcctgttggccttccctgaaggccctacccagaggtgatggaagaggggaatcttcaggtgaaggcttaggcgcagtgcggagatcaagagagctcacgacagggctggaacnnnnnnnnnnnnnnntcacaaagctcatgggggtggctggctggctaaggcaagagacagggagacagatgacaccagtaggggtgagggccccataaggaagggtcatgcatcaggccatggatcagatgaatacgaattagcatgcccaggtggagcatgggggcaagctagggacctcagcaagagacttaagaggctgtttctgtaggctgagccataaggaggaattctggacannnnnnnnnnnnnnnnnnnnnnnnnnnnnnnnnnnnnnnnnnnnnnnnnnnnnnnnnnnnnnnnnnnnnnnnnnnnggcttgagcattgaggccagnnnnnnnnnnnnnnnnnntggcaatcagtcactggaaaaggcagatgtgagtggcagggtccctaagtgacaatgaaggcccaccccagtgggtaccagagcaggctctaagcatcagacccttcaggtgctgagactgtggccaggactgaaatggatttagggttatggttccaagagtcctatcctgctctggatatgcacttctcccagagaggggcatctttttgtagtaggggttcccttttgtggaggactagggacagtgtctgagacttctctggctcctgcagacaaccttccccctggtcatggctctctttgagctggctcggaacccagatgttcagcaggctgtgcggcaggagagcctggcagctgaggccagcgtggctgcaaatccccagagggctatgtcggatctgcccctgctgcgggctgtccttaaagagaccttgaggtgggtgccggctgccctttgcctgctgccttgctttcctgctctcttttctggggctggggaagcccttcatagctggggacagttctgctgtttcccgcctccaggctctatcctgttggtggctttttggagagaattctaagctcggacttggtgcttcagaactaccacgtccctgctggggtgagtgatcctcatatgcccccgattgccctgttctgtatcacctcaaagaggcagctgacctcgcccttggcatctgcccacagacattggtcctactttatctctactccatgggccgaaaccctgcagtatttccgaggcccgagcactacttgccccagcgctggctggagaggaatgggagtttccagcacctgaccttcggctttggggtgcgccagtgcctggggaagcgcctggctcaggtggagatgctcctcctgctgcaccatgtgagcagccctgggagggggcagtgggatgggggcgctgatggacagtatttgagctgaaaacacaggccttgatatccatctgggcttcctgtgtttagtgaggtctccagagcccggctaggccctcggggccccacaggaggtcccctttgccgcatggtggcagcactgagcggctcagcaggagctgggccagagctctgccctgctgaggaggtcggatggagctcccccctccctgtgttccaggtgctgaaatccttcagggtggagacnnnnnnnnnnnnnnnnnnnnnnnnnnnnnnnnnnnnnnnnnnnnnnnnnnnnnnnnnnnnnnnnnnnnnnnnnnnnnnnnnnnnnnnnnnnnnnnnnnnngcagctggggtcccagtcaggccagcagctccctcctgtcctgacacccaagggcgcacttctttgcnnnnnnnnnnnnnnnttgggcccacactgtcatccatcagnnnnnnnnnnnnnnnnnnnnnnnnnnnnnnnnnnnnnnaggagttgcaaggccagggaagggactgggatgatcttgcagctcacgagcagtccctgccgggtgatttcacccatcctttccaagagtcactccagccacctgtggccttccaaa

SEQ ID NO: 1131 - DNA, 752 bp, Mesocricetus auratus
cacgaggagtagcacactaccctgtacggctttgtctcagggcccgggaggttcactgttaagagatggccgggcaggcagacaaagatgtgaagtactacaccctggaagagattcagaagcacaaagacagcaagagcacctgggtgatcctgcaccacaaggtgtacgatctgaccaagtttttggaagagcaccctggtggggaagaggtactgagagagcaagcggggggcgatgccaccgagaactttgaggatgttgggcactctaccgacgcccgagaactgtccaaaaccttcatcatcggggagctccatccagatgacagatcaaagatagccaagccttcggaatctcttatcactactgtcgaatctaattccagttggtggactaactgggtgatcccagccgtctcagccctggctgtagccctgatgtaccgcctctacatgggcagaagactaacctgcttctccaaaccagggacgggggaaggactgccccagagaaggggagaaaagaagccagtgttaatcacttccgctgacagaaaccttcccctgaaaggtaagtaatatatctgtttccctttccttctgtgttcgttgaacaaataagaaactctttgtgctcttaaacttttcaaatgtgcctttttattcatcaactttattttgatgtttcttcactacgtaatttacttattgtaagctgatctttttaaaaatatatctggcttttaaaat

SEQ ID NO: 1132 - DNA, 1867 bp, Mesocricetus auratus
ccagcagggaggctctgggaccgtcttcagcccccagcaggcagacagctcctgtctctcacttccagggttggacttctaggccagcgatggctttcctgtggctcttctctttgtggctgctggtcccggggactcaaggtaccaaagatggggacatgcgtctggttaatggagcctcggccaatgagggccgcgtggagatcttctacagaggccagtgggggacagtgtgcgacaacctctggaacattttagatgccaatgtcgtttgccgggccctaggctacgagaatgccacccaggcgctgggcagagctgccttcgggccaggaaggggacctgtcatgctggacgaggtggagtgtacagggacggagccctcgctggccaattgcagctccctgggctggctgaagagccgctgcgggcacgagaaggacgcaggcgtggtctgctccaacgaaactgggggcgtccacatcctggacctctccggagacctcccaaatgcgttgggccagatctttgacagccagcagggctgtgacctgttcatccaggtgacggggcagggccacggggatctgacaatctgtgcccacaagctgattctgaacaccaacccggaggcccaggccctgtggcaagtggtgggtagcagcgtcatcatgagggtggacgcggagtgcatgcccgtggtcagagacttcctcaggtacttttactcccgaagaatcgaggtcaccatgtcttctgtcaagtgtttgcacaagctagcctctgcctacggggccacacagcttcaagactactgcgggcggctcttcgccaccctcctcccccaggaccccactttccgcacgcccctggaactctacgcctacgctcaggccaccagggactctgtgctggaagatctgtgtgtgcagttcctggcctggaactttgagcctctgacgcaggctgaggcctggctgagcgttcccaccgccctgctccaggctctcctctccaagagcgacctggcggtgtctagcgagctggacttgctgaaggcggtggatcagtggagcatggagagcagcgcctcccacgcggaggtagagcgcctgctggaacaggtccgcttccccatggtgctgccccaggagctgtttgagctgcagttcaacctgtccttgtacgagggtcaccgggagctgttccaaaggaagaccatggaggccctggagttccacaccgtgcctttccgagtactggccaagtaccgaggcctgaacctcaccgaggacacctaccagccccgactttacacctcctcaacctggagcaccttggtgacagagagttcctcgaggtcacgggcggcggtgcaagtgtatgggtatgcgcagtactatccatatggctatgattcaaggcggtggtactacccctaccagtccttccagaccccgcaacaccccagctttctcttcgtggacaagctgatctcctggtcagccacctacctccccactgtccagagctgctggaactacggcttctcttgcacccccgaggagctccccgtgctgggcctcaccaagtccagctactccgagcctgccatcggctatgaaaacaaagcgctgatgctctgcggagggtacagtgtggtggatgtcgccaacttcgcaggctctaaggctcctatccccagtgctctggataccaatagttccaagatttcgtctctctttccctgcagctcgggggccttcagcggcttccgcgtggtcatccgccccttctacctgactaactccactgacctggactaggtgggtccatctcactggtggggactcagacacccacgtgt

SEQ ID NO: 1133 - DNA, 1488 bp, Mesocricetus auratus
  misc_feature (1462)..(1483): n is a, c, g, or t
gaattccgcgttgggagtccgtgagcagcgccaaggcctgacttggagtttcctacccggggctactgtccctcccaagtgcccgctgccaccatgaacggtgaggagcagtactatgcggccacacagctctacaaggatccttgcgcattccagaggggcccggtgccagaattcagcgctaacccccctgcgtgcctgtacatgggccgccagcccccacctccgccgccaccccagttcgcaggagcattggggacactggagcagggaagtcccccggacatctccccgtacgaagtgcccccgctcgccgaagaccctgcggtggcgcacctccaccaccacctccctgctcaactcgggctcgcccacccgccctccgggcctttcccgaatggaacagagcctgggggcctggaagagcccagccgcggtcagctccctttcccgtggatgaaatccaccaaagctcatgcgtggaaaggccagtgggcaggcggcgcatacgcagtggaaccggaggagaacaagcggacccgtacagcctacacgcgggcgcagctgctggagctggagaaggaattcttatttaacaaatacatatcccgacctcgcagggtggagctggcagtgatgctgaacctgaccgagagacacatcaagatctggttccaaaaccgtcgcatgaagtggaagaaggaggaggataaaaagcgaagtagcgggaccgcgagtgggggagttggcggcgacgagccagaacaggatagtgcggtgacctctggcgaggagctgctggccctgccgccgccaccacctcccggtggtgctgtgcccccaggcgtccccgctgcagccagggagggccgcctgcctccgggccttagtgcgtcaccacagccctccagcatcgcgcctcggcgaccgcaagaacctcggtgaggacggcaggctgaaggtgacttccatgcgcgtgggcagctagatagggagggaatgatgaaacttaaccttgatgccacgcaagaaatcttgagggcacatgccagttgggtacggccgagagattctggcagacttgggggggaggggaaaaagaggcctggctcggaaaccttttgaggtggcgcctctgttggggacgtctctccctgcctccaagactctttccttggtcaaataaggagaactggactccacaggggcgaaaagggtacaaacttgagcattcgccgatgtccagcgggcaagccggtctgggtgcctttgtctgcccagaaacaacggctgggtcgaccattttaaggttaggaatcatgaaaatgaactgctagaggtttcaaagttgcggggacgcgtgtgcttcttcctgccggcccttcctcttcgcctgctccctcctttcctacttcccctcccctagattcttcccctctttagtaaaatatttcattacatnnnnnnnnnnnnnnnnnnnnnnaattc

SEQ ID NO: 1134 - DNA, 492 bp, Mesocricetus auratus
gaacgtgccatgtttgcttttgggaatctatctgagctgttcttatttccgttttcaaatactgccccatttttatgtgcctgtatttattagtggtttggtaatttgtatattagatggtatttcagtacttagatttattcatcaattctaatttttctttttcatgttttgaaggactcctgaatatattccaaaactgaacaatttcaactgagctgaagtactctgtttttctagaggtaccagttcagtttaggagagtcacagcagatcgtaagtgccctgtcaatcttggtagagggcttgaaaatctccaactgtctggggagatggggaccagaaaagactaagctccacacttgctccagaggctcctagtaacgtgggacataagccttgctgtgcactaatgtcctgtaaagtcagctttgtccaggggacaaaggccagagctttctctaggactgtgccggtttagggaactgcaag

SEQ ID NO: 1135 - DNA, 224 bp, Cricetulus griseus
gattcgagattgacagctcgcaaggtttgggccgaggacacgcctggaaaagtcgcaatgacgtcacaaagcccggaatttccgcgagaagttcggtgttgtttccctgtcccacctttcccggagcttccgaagccccgcctctccggtgacgtcagcaggtctcgccaggctataaaagcagtgttgcggcttccggcgcagattgagccagtcctcaagct

SEQ ID NO: 1136 - DNA, 2389 bp, Mesocricetus auratus
  misc_feature (322)..(350): n is a, c, g, or t
  misc_feature (501)..(521): n is a, c, g, or t
aagcccatccacagtaatggccacagccttacccagaaccctgggggagctgcagctgtatagaatattgcagaaagccaacctgctttcttactttggtgccttcattcaacaaggtggtgatgatgtccagcagctttgtgaagctggtgaagaagaatttttggaaatcatggcactcgtgggcatggcaagcaagccccttcacgttagaaggctacagaaggctttgagagactgggttacaaaccctggccttttcaaccagccgctgacttcccttcccgtcagtagcatacccatctataagttaccaaaaggnnnnnnnnnnnnnnnnnnnnnnnnnnnnnatagttacgaaaggaatagcagtgcgcgggaaccacatttaaaaatccctaagtgtgccgccaccacgtgtgtgcagagcttgggtcagggcaagtcagaggtggggagtttggcagtacagagtgtcagtgaatccagactctggcaagnnnnnnnnnnnnnnnnnnnnnagcacagcctctccccagcagacgtgggctccccggcgtcgccaaaggagagcagcgaggccctggatgctgccgccgcgctctctgtggctgagtgcgtggagcggatggcctccacactgcccaaaagtgacttgaatgaagtgaaagagctgctcaagaacaataagaagttggccaaaatgatcggtcacatcttcgagatgagtgacgaagacccacacaaagaagaggagattcgaaagtacagcgccatctatgggcgattcgactccaagagaaaggatggcaaacacctcacattgcatgagctcactgttaatgaagcagccgctcagctctgtgtgaaagacaatgccttgctgacgagaagagatgaactttttgccctggccaggcaggtttctcgagaagtcacctacaagtacacttacaggaccaccaggttaaaatgtggtgaaagagatgaattgtctccaaagagaattaaagtggaggacggatttccagacttccaggaacctgtgcaaacactcttccagcaggccagagccaagagtgaggagctcgcagccctgagttcacagcagactgaaaaggggatggcaaagcagatggagctcctgtgtgcccaggccagctatgagaggctgcagcaggagaggaggctgacggcggggctctacaggcagagctccggggaacacagcccggatggcctgccctctgatggctcagatggacaaggagaaagacctttgaatctccgaatgcctaatgtacagaacagacagccccatcattttgtggccgatggggagctaagcagactttactccagtgaggcgaagtcccactcatcagagaacctcgggattttaaaagactaccctcactctgcttttaccttggaaaagaaagttattaaaacagagcctgaagactcaagatagcctagattctcccactgtctctgaaaatggcaccagattcaaggataatgctccatcatagaataagccttaataaccagtgttgcctcattctgctcaaacagaccatagccaaagcataagaactcacagtagtctgtggaaaccaggacaaagcaacagccacagaagaagaaatcgagagagtgctgcaatgtaacaaacactgaccattaccttcctgtgtaagttgtttgtatggaaaggctcaatattgtaggcattcactatttaagaatgtacaatgtgtctgtgtaatttatagaagcaaatctaggtgttaagacctttggtctaatagatgtggagaccattctttttacttgaaattttgttgtctactttaagtgtatttacggtaaatgttactcatcaacatttaggacttttgagtcgtaaaaagaaagcttagcaatgtagttattggcaaggtgacagtggctggagagaaatggaaggcaaatactcagtttacaccaaggaaaagactgtgtacttaatacttgattaaaattgattttggttaataggaaatgtgtagccgtcactaaataatgccgctttcattggtttaatccatgcacgaattaaaaatggaataatatttccgagatgaggtaggctacatttatgacagctgctcaagatgtgagacagaagacttgaagtaagcaggctaacgtgtaagagccttgacttaaacattggtatttcagaggatgtcaagtaaattaaggcagagtaaattaaccctgaatgtttaagataaagatgccgtgggagaatgacatggaggctgtgttttgtttttagtcctgctttgaatcatggctgtaataaatatcggtcctagtctgttctgtgagaaaaaaaaaa

SEQ ID NO: 1137 - DNA, 849 bp, Cricetulus griseus
  misc_feature (217)..(290): n is a, c, g, or t
  misc_feature (498)..(548): n is a, c, g, or t
ggcacgaggcgggaggtgtaactggccaccgcgagagaagagaggacagtgaccgaggcgtccgagtctccataacctgggaagatggtgctgctgacaatgattgcccgcgtggccgacgggcttccgctggccgcttcgatgcaggaggacgaacagtcaggccgagaccttcagcagtatcagagtcaggctaaacaactctttcgaaaactgnnnnnnnnnnnnnnnnnnnnnnnnnnnnnnnnnnnnnnnnnnnnnnnnnnnnnnnnnnnnnnnnnnnnnnnnnngtgttacttagtcttgtgtgaagctgccttccctaagaagttggcctttgcctacctggaagacctgcactcggaatttgatgaacagcatgggaagaaggtgcctactgtgtctaggccctattccttcattgagtttgataccttcattcagaaaaccaagaaactctacattgatagtcgtgctcggagaaatctaggctccatnnnnnnnnnnnnnnnnnnnnnnnnnnnnnnnnnnnnnnnnnnnnnnnnnnnagtcttacagcggggggaagcactctcagcattggactcaaaggctaacaatttgtccagtctgtctaagaaataccgccaggatgcgaagtacctgaacatgcgttccacttacgccaaacttgcagcagtagctgtatttttcatcatgttgatagtgtatgtgcggttttggtggctgtgagatgtagtgagcctagtcactggtaagggagaatctagaacccggcaggtgtatgttttcaggaaactgagctcacagggctgtgtattagaacccaagtggaacttctgcctctaa

SEQ ID NO: 1138 - DNA, 1076 bp, Mesocricetus auratus
  misc_feature (8)..(8): n is a, c, g, or t
  misc_feature (17)..(17): n is a, c, g, or t
  misc_feature (19)..(19): n is a, c, g, or t
  misc_feature (25)..(25): n is a, c, g, or t
  misc_feature (45)..(45): n is a, c, g, or t
  misc_feature (57)..(57): n is a, c, g, or t
  misc_feature (85)..(85): n is a, c, g, or t
  misc_feature (107)..(107): n is a, c, g, or t
  misc_feature (324)..(324): n is a, c, g, or t
  misc_feature (378)..(378): n is a, c, g, or t
  misc_feature (384)..(384): n is a, c, g, or t
  misc_feature (836)..(836): n is a, c, g, or t
  misc_feature (838)..(838): n is a, c, g, or t
  misc_feature (855)..(855): n is a, c, g, or t
  misc_feature (875)..(875): n is a, c, g, or t
  misc_feature (900)..(900): n is a, c, g, or t
  misc_feature (902)..(902): n is a, c, g, or t
  misc_feature (914)..(914): n is a, c, g, or t
  misc_feature (920)..(920): n is a, c, g, or t
  misc_feature (927)..(927): n is a, c, g, or t
  misc_feature (935)..(937): n is a, c, g, or t
  misc_feature (943)..(943): n is a, c, g, or t
  misc_feature (948)..(948): n is a, c, g, or t
  misc_feature (956)..(956): n is a, c, g, or t
  misc_feature (958)..(958): n is a, c, g, or t
  misc_feature (966)..(966): n is a, c, g, or t
  misc_feature (976)..(976): n is a, c, g, or t
  misc_feature (994)..(995): n is a, c, g, or t
  misc_feature (998)..(998): n is a, c, g, or t
  misc_feature (1007)..(1007): n is a, c, g, or t
  misc_feature (1009)..(1009): n is a, c, g, or t
  misc_feature (1012)..(1012): n is a, c, g, or t
  misc_feature (1022)..(1022): n is a, c, g, or t
  misc_feature (1030)..(1031): n is a, c, g, or t
  misc_feature (1033)..(1034): n is a, c, g, or t
  misc_feature (1042)..(1042): n is a, c, g, or t
  misc_feature (1052)..(1052): n is a, c, g, or t
  misc_feature (1054)..(1054): n is a, c, g, or t
  misc_feature (1058)..(1058): n is a, c, g, or t
  misc_feature (1070)..(1070): n is a, c, g, or t
ggctaacnccatcctgncnatcgancaattcgaaggtctgctggncacccactgcangggggatctgctcttcttcctctgcgcnatgtatgcacccatctgcaccntcgacttccagcgcgaacccatcaagccctgcaagtctgtgtgcgagcgcgcccggcagggctgcgagcccattctcatcaagtaccgccactcgtggccggagagcctagcctgcgaggagctgccggtgtacgaccgtggtgtgtgcatctctccggaggccatcgtcaccgctgacggagcggactttcctatggattctagtactggacactnccggggggcaagcagtgaacgctgcaaatgcaagcctgtcagagccacacggangacctngttccggaacaactacaactatgtgatccgggctaaagttaaagaggtaaaggcaaagtgccatgacgtgactgctgtcgtggaggtaaaagagattctaaaggcatctctggtgaacatcccaagggataccgtcaacctctacaccacctctggatgcctctgccccccacttcatgttaatgaggaatacatcatcatgggttatgaagacgaggaacgctccaggctactcttggtcgagggcaccatcgttgagaagtggaaagatcgkmttggkrwgaargtcaagcgctgggatatgaaacttcgycatcttggactgggtaaaacggatgctagtgactccactcagaatcagaaggctggcaggaactctaatccccggccagcaggaagctaagtcctgaaatgcgaaagaccacacccattgactcccctactaagcagtngnatcgctggattagcaanggaaaatcgcattattccantattgtttactacagataccacgtngnatgagatgttanttctgnatcctcnccccctgnnntctatntggcntcagtctngntccgcaantctgcccatntcgtccttctcttccctnntcncacaggggnanctnctttcttctnggaggagnngnncctccccnccactattcntngttnttcccgctcctnctttgt

SEQ ID NO: 1139 - DNA, 215 bp, Mesocricetus auratus
ttgattgccctcatcctgtccacccctgtagcctccttgaacttctgtaatcttggtgactcctgtgtttcctttccttgtcactgtagtgactgaggcccagggtcacctgaaccccagcatggcatgcttgtctcagtctgccttctcaggcctgtggttccctagacctgttcacatagcatagcatctgataaaccagtgtgaccttctga

SEQ ID NO: 1140 - DNA, 191 bp, Mesocricetus auratus
gccagcactggtcctatggattgcgccctggaggaaagagaaacgctgaacgcttgggtgattctttccaagagatggacaaagaggtggatcagctggcagagcctcagcacctcgaatgcactgtccactggccccgctcgcccctcagggaccttcgaggagttctggaaagtctgattgaagaggaa

SEQ ID NO: 1141 - DNA, 338 bp, Mesocricetus auratus
gcagatgcatagttctacagtaataataataatagctgtattctggctctgagtttactgtgccatggttttttacatcactttaacttacattcctattattttacagtgaaacagaatatcttacactgtcagcagctacatctgtctagtattttcgtcgtctcatgattttcattcatctcatgatttcatcaaaaagtgacaagtgagtcacctgtaacacttaggtttgcataaagtcgctctttgttgtaaagacaatggcagtttgcctaatagttcagaacttgttctgttcactaagtaggctgtaaggtaagagccatacacatata

SEQ ID NO: 1142 - DNA, 243 bp, Mesocricetus auratus
aatttacctactttgttctcctagtttcttaaggaagatgaagtagttgtttttgagaccttccttttctaacaggcatttaaagtttatgtagttccacagatttatttttattattagtgaaatgtttgctgttttaatgacatagcttaatataaaaagacattatttattgatactgacccaggtttttctactaataccatttctttctgcatgaagaaattcactaggcgtcgattt

SEQ ID NO: 1143 - DNA, 264 bp, Mesocricetus auratus
  misc_feature (20)..(38): n is a, c, g, or t
gtaggcttcatcccagggannnnnnnnnnnnnnnnnnnacaaaaatccatcaatgtaatccaccactgaggtctgcaatcaataaatgggacctcctgaaactgagaagcttcggtaaggcaaaggaaacagtcagtaagacaaaaacgaccacccacagaatgggaaaagatcttcaccagccccacatctgacagaggactgatttccaaaatatacaaggagctcaagaagctagccaccaaaacaccaaacaatgaaatt

SEQ ID NO: 1144 - DNA, 145 bp, Mesocricetus auratus
tatctctatcgagggtgccaatgctgggattaggacatgtcttactctagtatgagtccagcttggctacaaacccctgcaaaccccagattaacgaaacgttattatgaggtaggctatacatctgtaggctatactctgctca

SEQ ID NO: 1145 - DNA, 381 bp, Mesocricetus auratus
aatttagatgacatatgtgtatttaaatacagacttgtgtgtattgtgggtttctttagttagtactatgattacttacaatctttttgccatccttagtgtttctcccgtatttgtctcctatacctaatgagaaccacgtttcccatttccctgagcacatcacactttaccctgctattcccctctctatggctccccatctccctttgctggccgtagtcctgttctactgtctttgtttctgaagttactatgggacacacactcacatctgaagatttgaagctaagaacctccagtaagagagaacattcaaatcattgtgggtctggtacctcactcaaatacaatctttctgggctattcatttatctgcaa

SEQ ID NO: 1146 - DNA, 412 bp, Mesocricetus auratus
cagaggttgtttgatttgagccaggctcccatgccaagctggccttgaactcctacccccaactcccaagagctgtgtttgcagatgtgccctaccaaatctagttttcttcttcctgtctctctttgattttcaccctgggagatttaactatttacccaggagttgtgtgttatagtcttccttctccccaagcctgatccccaaggggctgagtctctgccttctgagctgagtactggctgttcataaagcttcctggagattcacagtcagggctgggaacacttaaactagggtgagtgtggaaatgggtggcttggctctctgagcttgatctccctagctgtaaaatatggagctcatagaaactatatacatggctgggctgtggtggcgcacgctttaatcc

SEQ ID NO: 1147 - DNA, 224 bp, Mesocricetus auratus
ttctgtctctgtctgagtgcctctgaactctctgcctcctgaatgctggcatcaaaggcctgtaccaccacttcccaacctggccttgaactctcagcctcctgcccccctcattacccaagtacactactgcacccatcttggattgttaaaaactacttttaatttttctcctgtcatccctatattgatttaaaagtcctaaaggggctgaggaatgttgc

SEQ ID NO: 1148 - DNA, 3111 bp, Cricetulus griseus
  misc_feature (770)..(798): n is a, c, g, or t
  misc_feature (2543)..(2582): n is a, c, g, or t
atgtcactgaaaagcgagcacagggtgaacacctcagcactgcagaaaatcgctgcagacatgagcaatctaatagataacctcgacacccgggaactccactttgagggagaggaggtagagtttgacacatctcctggagaccccaaggctcaggaaaagtacatcccattctcttccatttacaacactcaaggatttaaggagcccaatatccagacctacctctccggctgtcctattaaagcccaagtactggaagtggagcgcttcacgtctacaaccagggtgccaagtatcaatctgtacactattgagttaacacatggggaattcacatggcaagtgaagaggaaattcaagcacttccaagagtttcatagagagctgctcaagtacaaagccttcatccgaatccccattcccacgaaaagacatacttttagaagacaaaatgtcaaagaagagccccgagagatgcccagtttgcctcgttcatcagaaaacaccatccaggaagaacagttctttggcaggaggaagcaactggaagattacttgacaaaaatactaaagatgcccatgtacagaaactatcatgccacgacagagttccttgatgtaagccagctgtctttcattcatgatttgggaccaaagggcctggaggggatgatcatgaaaagatctgggggacacaggataccaggtttgaattgctgtggccaaggaagagcctgctaccgatggtcaaaaaggtggttaatagnnnnnnnnnnnnnnnnnnnnnnnnnnnnnccagacagtggggccattgcctttgtcctccttgtagataaagaattcagaataaaagtgggaaggaaagaaacagaaacgaaatatggacttcgaatcgataatctttcaaggacactgattttaaaatgtaacagctaccgccacgctcgctggtggggaggagccatagaagaattcattcagaagcatggctcggacttcctcaaagaccatcgctttggttcctatgccgctgtccatgagaacatgttagctaaatggtacgtgaacgccaaaggttactttgaagatattgcaaatgcaatggaagaggcggcagaagagattttcatcactgattggtggttaagtccggaaatcttcctgaagcggccagtagtggaaggcaaccgctggaggctggactgcatcctcaaacggaaagcacaacaaggtgttcggattttcataatgctttacaaagaggtggaactagccctcgggatcaacagtgaatacagcaagcggactttgatgcggctgcaccccaacataaaggtgatgaggcacccagaccatgtgtcatccagtgtctatctgtgggctcatcatgagaagcttgtcatcatcgaccaatcggtggcttttgtgggtgggattgacctagcctatggaaggtgggatgacaatgaacacagactcacagacgtgggcagtgtgaagcgggtcacctcaggactgtctatgggctctctcgcagcagcaacaatggaatctatggaatccttaagcctcaaggataatcacagatctcataaaaatgaacccatcctgaagagtgtggatgatgtagaccccaagctgaaaggagtaggaaagccccggaaattctccaaattcagtctgtatcgacaactgcaccgtcgccatcttcacaactcggacagtgttagcagcattgacagcgcctccaacactggctccatccgaagtgtacagacgggtgtgggagagctgcatggggagaccaggttttggcatgggaaggattactgcaactttgtcttcaaggactgggtccaactggacaagccttttgctgatttcattgacaggtactccacccctcgaataccttggcatgatattggttctgtgcttcatgggaaggcagctcgagacgtggctcgtcacttcatccagcgctggaacttcacgaagattatgaagccaaaataccgctccctttcttaccctttcctgctcccaaagtctcaaagcactgcacatgagctgaggtatcaggtgccaggggcggtccccgccaaagtgcagttgctccgatctgctgctgattggtctgctggtataaagcaccacgaggagtcaatccactctgcctacatcaacgtaatagagaacagcaagcactacatctacattgaaaatcaatttttcataagctgtgctgacgataaagttgtgttcaacaaggtgggagatgctattgcacagagaatcctaaaagcccacagggaaggccagagataccgggtgtacatcgtgataccacggctgccgggattcgaaggcgacatctccacaggtggagggaacgctcttcaggcgataatgcacttcaactacaggaccatgtgcagaggggagaactccatccttggacaattaaagccagagcttggtaatcagtggataaattacatctctttttgtggtctgagaacacatgcagagcttgaagnnnnnnnnnnnnnnnnnnnnnnnnnnnnnnnnnnnnnnnngctaattgctgacgacaacacagttattattggctctgccaacatcaatgaccggagcatgctcgggaagcgagacagtgaaatggctgtcatagtgcaagacacagagacagtcccatcaataatggatggaaaagaataccaagctggctgctttgcccaaggacttcggctacagtgcttcaggcttgtccttggctatctttctgatccaagtgaggacctccaggatcctgtgagtgacaaattcttcaaggagatttgggtttcaacagcagctcgaaatgctaccatttatgataaggtgttccgttgccttccaaatgatgaagtgcacaatttaatgcagttgagagactttataagcaagcccatattagcaaaagatgatcccattcgtgctgaggaagaactgagaaagattcggggcttcttggtgcaattccccttttatttcttatctgaggaaaacctgctgccttctgtaggaaccaaagaagcaatagtgcccatggaggtttggacttaa

SEQ ID NO: 1149 - DNA, 2455 bp, Mesocricetus auratus
  misc_feature (1313)..(1327): n is a, c, g, or t
  misc_feature (1710)..(1752): n is a, c, g, or t
caggagcggacgcggcggcggcggtggtggtggcagccaggcgatgcgagagcagtccggactgtcaccacctttccttcttcgggctgtaagggcgccagacagaggccactggagcgaggccacgccggagacggcagcggcgggacccgggacgctagaccagccccgactcacctctgacggagcggacgtcaggtgaccgagcccacgccgctccccgcaggcgacaggcgacgcccccactcagctcggccgtccgctcttccctcctccggggacaaacttttctccaagcccttggatcaaacttgtgtcgcccagccggttccgcgtagagcgctcatcttcggcgagatgtccgagcgcaaagaaggcagaggcaaggggaagggcaagaagaaggaccggggatcccgcgggaagcccgctcccggcgagggcaacccgagtccagccttgcctccccgattgaaagagatgaaaatccaggagtcagctgcaggctccaagctagtgcttcggtgcgagaccagttccgaataccctgaactcagattcaaatggtttaagaacgggagtgagctgaacaaaagaactaaaccacagaacatcaagcttcagaaaaagccagggaagtcagaacttcgaattaacaaagcctcgctggctgattctggagagtatatgtgcaaagtgatcagcaagttaggaaatgacagcgcctctgccaacatcaccattgttgactcaaatgagttcatcactggcatgccagcctcaactgaaagagcatatgtgtcctcagagtctcccattaggatatcagtatcaacagaaggtgcaaatacttcctcatccacgtctacatccacgactgggaccagccatcttgtaaagtgtgcagagaaggagaagactttctgtgtgaatggtggcgaatgcttcatggtgaaagacttgtctaacccttcaagatatttgtgcaagtgccaacctggattcactggagccagatgtactgagaatgtgcccatgaaagtccaaacccaagaaaaagcggaggaactctaccagaagagagtgctgacaattactggcatctgtatcgccctgctggtggtcggcatcatgtgtgtggtggcctactgcaaaaccaagaaacagaggcaaaagcttcatgatcggcttcttcagagtcttagatcggaacggaacaacatggtgaacatagccaatgggcctcaccatccaaacccaccaccagagaccgtgcagctggtgaatcaatatgtatctaaaaacatcatctnnnnnnnnnnnnnnnttgagagagaagtggaaacctccttttccacaagtcactacacttccacagctcatcactccacgactgtcacccagactcctagtcacagttggagtaacgggcacacagaaagcatcgtttcagaaagtcactctgtaatcatgatgtcgtcagtagaaaacagtaggcacagcagccccgctgggggcccacgaggacgtcttcatggcctgggaggcctccagtgtaacagcttcctcaggcatgccagagaaacccctgactcgtaccgagactctcctcacagtgaaagacataaccttatagctgagctaaggagaaacaaggcttacagatccaaatgcatgcagatccagctgtcagcaactcatcttagatcnnnnnnnnnnnnnnnnnnnnnnnnnnnnnnnnnnnnnnnnnnngcctttaggaaggtatgtatcagccatgaccaccccaactcgtatgtcaccagtagatttccacacaccaagcacccctaaatcgcccccttcggaaatgtctccacctgtgtccagcatgacggtgtccatgccctccatggcagtcagcccatttgtggaagaagagaggcctctgcttcttgtgacgccaccaaggctccgggaaaagaagtatgatcacctccagcaactcaactcctttcatcacaaccctgcacatcagagtaccagcctcccccctagcccattgaggatagtggaggatgaggagtatgaaacgacccaggagtatgagccagttcaagagcctgttaagaaactcaccaacagccgacgggccaaaagaaccaagcccaatggccacattgccaataggttggaaatggacagcaacacaagttctttgagcagtaactcagaaagtgaaacagaagatgaaagagtgggtgaagatacaccattcctgggcatacagaaccccctggcagccactcttgaggcggctcctgccttcctgctggctgatgtcaggactggcccagcaggccgcttctcaacgcaggaagaattgcaagccaggctgtctagtgtaatcgctaaccaagaccctatcgctgtataaaacctaaataaacacatagattcacctgtaaaaaaaaaa

SEQ ID NO: 1150 - DNA, 501 bp, Cricetulus griseus
  misc_feature (11)..(26): n is a, c, g, or t
  misc_feature (28)..(60): n is a, c, g, or t
  misc_feature (86)..(104): n is a, c, g, or t
actatagggannnnnnnnnnnnnnnnannnnnnnnnnnnnnnnnnnnnnnnnnnnnnnnnaataagattgtttctaatttaaactnnnnnnnnnnnnnnnnnnngatttgtgatgcagaagttgacagatcatttaataggcaagacttttctgtgagactatttgaatattaagagcactgacctcaaacaaaactcatctctttcttatgggatcctgagttagtttatgatgtgaaagcaaattggtataaagcaagcctgatagctaaatcacactctggcttccaggcttgaatcctttcctcccccaccaggtctttcctgagtcaaaatgttgatacctgtgttatctccagaagcatatctttataagtctttagcaccgtaagctaaaccaattaaactataaagttagctggtctacctcgggttctgtgttttagcaacaaaaatgcatggatacacttggaatggtgcctctttaaatagtcactttaa

SEQ ID NO: 1151 - DNA, 567 bp, Cricetulus griseus
  misc_feature (562)..(562): n is a, c, g, or t
acttggcttcttcaccacttatttcttgcccctggccaccactcttaagagtaaagcaatggacctggcccaggcaggcagcacggtggagtccaagatttatgacacactccagtggcagatctggaccctcctgcctgggttctgcacaaggcccactgatgtggctgcctctttcaaaggcctggcacggacactgggcacagccattaatgagcgcccagacctgagggtcactgtgtgccaggccctacgcactctcatcaccaagggctgcgaagcagaggctgaccgtgctgaagtgagccgctttgctaagaacttcctgccaatcctcttcaacctgtatggacagcctgttgcagctggcgaggcggcagtccctcgccgtgctgtgttggaaaccatcaaaatttacctcaccataaccgagtctcagttggtgaacggcttcttggaaaaagccactgagaaagtgctcgatcctgccagctctgacttcaccaggttgtctgtcctggacctggttgtgggctttggctcctcacgcagatgaagccgncatca

SEQ ID NO: 1152 - DNA, 579 bp, Cricetulus griseus
gatatgaaggcaatcgaaccctacaaaaaattattagccatggaggatattatggggatggtttaaatgccattgttgtatttgctgtctgttttatgcctgaaagtggtcagcctaactatagatatctgatggacaatctctttaaatatgttattggcactttagagctgttggtagcagagaactacatgatcatttacttaaatggtgcgacaactcgaaggaaaatgcccagtctgggatggctgaggagatgctaccagcagattgatagacgattacgcaaaaacctgaagtctctaatcattgtccacccatcttggtttatccgaacacttttagctgttacaagaccatttatcagttcaaaattcagtcagaaaattagatacgtctttaatttggcagaactcgcggagcttgttcccatggagtatgttggcataccagagtgcatcaaacaagttgatcaagaacttaatggaaaacaagaaccaccaaacagtgagcagtatgttcggtgtcctgtccagatgagacaaagagcgcctgagaagtggggttgttgtgtgtcat

SEQ ID NO: 1153 - DNA, 135 bp, Cricetulus griseus
tcgacccacgcgttcgggtttttttaaatttattattatttcagacacctaagtttgaggtaacccttagccatgtttgtcaggccaaaaacatgaggaaaaaagggagtcacttgcagtattgagttagatttt

SEQ ID NO: 1154 - DNA, 299 bp, Cricetulus griseus
  misc_feature (85)..(101): n is a, c, g, or t
ggattttgtgttcatgtcaagcatccccataagatcattgtaatgtatttacaagtcttagaatgtgaacgtaaccaaaccctgnnnnnnnnnnnnnnnnnagtcgcttttttacatttcttctttagtcaggaaaacagaagcagaaataaagttagtttcatttttttctttccaaaataatgaaataagtttgttttggggcattttgtttttgttattttttaaccaaaaggtaaataatgcttatttctgctacctgttatcttggcttgactaattatttataatggagaact

SEQ ID NO: 1155 - DNA, 580 bp, Cricetulus griseus
ggattttgtttgtagctcacttctacagtgaggactagtctgtgctgtttttttagttttcagcattctagaatcacgttttctcaccaccctccaagctgcctccctaactaggcacttgggaggccttggtgtgggttctggaggatggccattctgagtgctgagacacttgttggagacctcaaaacacaagtgccttctccacggtgtgatacgggcttcagagaccagtggccaagattcctactcttcttaccagagcaattatatttcagtgaggaagtattcaggggccaggggagtctgtgtttcacgcaaatttatgtttgcaggaaaaaacttttcttaaaaaattaagatatttaaatttatgtaaaaatgttaggaaaagatatggcgagtgtatattaaactttattgcacggggcagagaagtcttaaaagagtaagtccttagtctctgtatccgctgtgcgttccctgtattttcatctgctgcttatttgtgaactgaaaccccagacaggcttgagggctgagggagggacagtgcagttaagtagggaatactcccgta

SEQ ID NO: 1156 - DNA, 131 bp, Cricetulus griseus
ctggcatggtctgctgatggccagactctgtttgccggttacacagacaacctggttcgagtgtggcaagtgactattggcacccgctaaaagtttatgacagagtcttagaaataaagtggctttctgaa

SEQ ID NO: 1157 - DNA, 446 bp, Cricetulus griseus
cttgctaggtagctaactaggaatgacatgggattttaaaatgtaaaagcctacccccagagacacatcttctccaataaggccacacacctcctaatcctgtccaagtggttccaccaactgaaggaacatgcattcaaacatatgagctttatgggggtcattcttgttcaaaccaccatagccatcttactgggaagggacccctagatttaaaaacaacgatatcatcattgactaacatgcttcaattagtagaaaatttaacagtagattctcctctcccccaaagaacagccctattgcttgttccatgcccgtttattaccttcagtcagaaatcagaatcgcttctgttctttagtgtcccccagacagtgctttgccagagcaatacattatcattcttgggtaggaactagcaagcactcttctcatttgtattt

SEQ ID NO: 1158 - DNA, 289 bp, Cricetulus griseus
actgcaaaacctactgtggaaatattctctgggagtgacgatgatgatgatgctaataaactttctaataaagcttataaagctcctaaatcaactcaaaaatgggatgggtcataggatgatgaagatgatggtgaaagaagtaaagagcgatctagagtacactcttctggggacagtggtggtgagtcagatgattttttacagtccttaatacgaccgataaaaacccagaaaaacacgccacttcctaacctacatagtgagattgaaaatgatgactccttcg

SEQ ID NO: 1159 - DNA, 463 bp, Cricetulus griseus
acaaactgaacactgtgattatggggttttgtaacttatcaaagctcttactgatagaaaaaatagacctgaattatgtataactttttagaaagtttaatctgatatcaaaatagtcactgaaagtacaattctgttgtaaagttgtacagaaagttgtagagagtccgttgtgatgtcaggacttaaggtgagatgctcgccattggcaccctgagtttggtaactcatggtaactttgcctgtggttgaggtcttattgatcagtatgggctgttgccactcaagttcatgaccacagatatctgcagtgtcttctcctgatgaaactcaaaaccaggaagtgaaattctttggctgataattgggctgtgacaccacaaaaaaggtcccgctcataccacatgtgtgactaaaccctttactacattagtgtgctcctgattagcatcttgtgaaaaca

SEQ ID NO: 1160 - DNA, 532 bp, Cricetulus griseus
  misc_feature (302)..(342): n is a, c, g, or t
aaggaggaagccactgttgtcgccgagagaatcctcacccccgccgctcgcgcgtggccatgtggaggctgctgacgcgcactcccgcgccgctcctgcgggtgcacgtttcagattcttgggcagcccttcccaccagtgctggtctgaagaccctcctcccagtgccaagttttgaagatatctccatccctgaaaggtccaagcttaagtttgttgaaagggtcccacttgtaccaaaagtaagaagagaacctaaaaatttgaaggacatacgaggaccttcaactgaagccactgannnnnnnnnnnnnnnnnnnnnnnnnnnnnnnnnnnnnnnnngttacctccactggggtcattttgaaatgatgcgcctgacaatcaaccgctctatggatcccaagaacatgtttgccaagtggcgagtaccggcccctttcaagcccgtcactctaaaaggtgtcgggcagcgcatggggggcggtaaaggtgccattgatcactacgtgacacctgtgaagactggcac

SEQ ID NO: 1161 - DNA, 543 bp, Cricetulus griseus
cggcggcgcctgacggagcagaagagacagcatggagttggagaggatcgtcagttcagccctccttgcctttgatcagacacacctcccagaggcggacctcagtggcttggatgaggtcatcttctcctatgtgcttggggtcctagaggacctgggcccctcaggcccctcagacgagaactttgatatggatgccttcacggagatgatggaggcttatgtgcctggctttggccacatccccagaggcatgataggggacatgatgcagaagctctccacacagctgagtgatgccaggaacaaagagaacctgcacccacagagctcctgtgtccaaggtcaggtgcccatttttccagagaccccgaggcaacttgaaaagctcaaagaagacaccaggtctccggctgccactgggggcacccaaaatgaggcagctggtgctgaggaagaacttctgccaggagtagatgtgctcttggaggtattccctacctgttctgtggaacaggcccagtgggcgttggccaaagcccg

SEQ ID NO: 1162 - DNA, 441 bp, Cricetulus griseus
ccattagtatttctgccaggagctgcacaaatagaagttaaagaataattctaagctgaaaggcttcctgtatcaaaccatctaacatttttcatagggctgttgaatagacataaaattgatttgattatctttccctctgtacacagagtatccaaatattactgtaccttaaggattcctacgaggtttccctgaaaagtaacttttcatgaggcaggaaggaagtagttgtagaatcattttctagttgttaaaatgagacaatcactttgttttctaacagatgtgaccggtgtaacttaaaaccctgaggtttggggggagattgcagtaggtttctaatgatgatgccctggctgataggctgttctctctcttttattttttggtctttaatccttttcttcctccttggtttcagatcccactgaagtgctg

SEQ ID NO: 1163 - DNA, 579 bp, Cricetulus griseus
cagaggattatagacagttcaggaaatcggtcctggcagatcaggggaaaagctttgctacttcatctcaccggaatactgaggaggaaggacccaaatataagtccaaagtttcactaaaaggcaatagagaaagtgatggatttagagaagaaaaaaattataaactgaaagagactggatacatagtggaaaggcctatcactgcaaaagataagcacaaggaagaagacaaaggttctgaaagaataacagtaaagaaagaaacacagtcacctgagcaggtaaagtctgaaaagctcaaagacctctttgattacagaccccctctacacaagaatctagatgcacgagaaaagtctatcttcagagaggagagcccgcttaggatcaaaatgatagccagtgattctcatcgtcctgaagtcaaactcaaaatggcacctgttcctcttgatgattctaacaggccagcttccttgactaaagacaggctacttgctattacgcttgtccattctgtcaagaaagagcaagaattccgatccatctttgaccacattaagttgcctcatgcca

SEQ ID NO: 1164 - DNA, 459 bp, Cricetulus griseus
atgcatgtgaccatttccttcagagcacctgtcattcagttacataggagtatacgcagtgctatttcaaatgcctgtgaaaggaacataggatgaatttcctcgtagatgtcagatcattgacaaaaaaaaaaagaagaaacaaccagcctcttgaacccacactagcagatactgtctatatggaaaggcaagcccgaggcgtcaggcccttcacatcatatcttttctggaagaggggccagattatgatcagcatcccttatcttcaagggtgctttcgcaaaggatctttgtttttaatgagaagtcctttccccaaacctgagcattgcagcacgaagcgtgtgtggcaaacccagctgtaggtgcttgctgtctgctggctggaagggtaaggctcattggccacatgcaagggcaggtggcacgtgcgcaaggttgggacactgtaatcac

SEQ ID NO: 1165 - DNA, 580 bp, Cricetulus griseus
  misc_feature (576)..(576): n is a, c, g, or t
gcatgccaaattggcaccacttgcagctatttatcaagaaattcaggaggccgaacaagccattgaagaattagagtcaatgtgtaaaactctacataaacaagacgaaaagcagttgcaagaacttgtatcagaagaaaggcaaatcattgatcaaaagatcaacacactgtatagtgagcttttggagcagctagtgccaaaggagaaatatgacaaaagtgatgttattttagaggtgacatctggaagaactactggaggtgatatctgccaacagtttacccgagaaatatttgatatgtaccagaattattcatactataaacactggaaatttgagctgctgaattacacaccagcagattatggtggactacatcatgcagctgccagaatttctggagacagtgtctataagcatttgaagtatgaaggtggaatccatagagttcagcgaatcccagatgtgggcctgtcgtcaaggatgcagcgtattcacacaggaacaatgtcagttattgtccttcttcagccagatgaggttgatgtgaaagtcgacccccaggatctgcngata

SEQ ID NO: 1166 - DNA, 244 bp, Cricetulus griseus
tgccatctccatggcctcacccatgtccatcccaaccaacaccatgcactacgggagctaggtgcctccagcagcaacaccactgcgcactgacagcaccaggaaaccaaatgaagtccacgcccagtgcagctggtggctgtcccccttgttctggagaagcgtgaacacccggtcacagccctctttgctatgggaacttggacacttttgtacacgatgtcgccgctgccctcaagtaacc

SEQ ID NO: 1167 - DNA, 498 bp, Cricetulus griseus
acctccttgcatcttagtttgcagagaacttgtaagtagctggccgccgcctcaggtgtttgaaccatgaatcttttactcctcctggccaccctgtgcttgggaacagccttggccactccaaaatttaatcaaacgtttaatgcgcaatggcacaagtggaagtccacatacagaaggctgtatggcacgaatgaggaagaatggaggagagcagtgtgggagaagaacatgaaaatgattgagctgcacaatggggaatacagcgaggggaagcatggctacaccatggagatgaacgcctttggtgacatgaccaatgaagagttccggcagttagtgaacggctataagcaccagaagcacaggaaggggaaggtgtttcaggagcctctgatgcttcagctccccaagtctgtggactggagagaaaaaggttgcgtgactcccgtgaagaatcagggacagtgtggttcttgttgggcttttagcgcttgt

SEQ ID NO: 1168 - DNA, 173 bp, Cricetulus griseus
  misc_feature (14)..(37): n is a, c, g, or t
tgccccccctcgtnnnnnnnnnnnnnnnnnnnnnnnngatgtggaatgtctggcagactcttgcatgaaacaggcaccctgaaagactgtccatcttctttagccatcattttcttgtgggtcctgaatgttcagtttatacaggatacagtcaagcataccatacaagagca

SEQ ID NO: 1169 - DNA, 567 bp, Cricetulus griseus
  misc_feature (57)..(91): n is a, c, g, or t
ctcctacatgaaacagaaaggaagcaccacctccaggcgttggtggggtggcacagnnnnnnnnnnnnnnnnnnnnnnnnnnnnnnnnnnntctgcctaactaaataaagtccaggtcctaatggtttcattgctgagtcctatgagaccttcaaagacttaacagcagtgtttttcaagctcctacatgaaacagaaaggaagcaccacctccaagctctttttgataggcctgatgctattgccctgatgctaaaacaagacaaacacacacacatattatagaacaacctctctgatggggataggatgcaaaaattctcagcaaagtacttgcaaatcaaattccaaatcacatcaaaacgatcattcgccctgatcaagttggctttattccagagatacagagtggttcaacataaacaagtctataaatataaaacatagtataaagggttaaggacagaaatcatgtgatcatttcagtaagatgtagaaaaggcttttgacattgctttatgaatagaaaggacatatctcaacataaaggttacatatgacaaacct

SEQ ID NO: 1170 - DNA, 580 bp, Cricetulus griseus
aatagaacttgatcacttgaaactcagacctattggtcctgattgaatctaactaagacaaccttagaaataagctattattttgcacagagcagcttgtaagacactcttctcaatgcagtacatattttgacagacctaaggattgccctataaacataacagcattttgagagcttgaagatttttccattgtggaagtcaatttctaaaatgccttaataggtctatgttgtaaattttttctttagtttttgtaagcatccaagatgatggggattcttttttcctggaaaagaattatcttaataaacataaaagactgttatattttgtgtagggcatcatggttatggggtcataagttaacctgctgcctggcaggctagtggacttctgtctgaggtgtctctattgcagtgatcggcagcctgagtagtttaactagtctcgtttcccagcagtaaactgtgtggcatttttattgctcatgcaataactagcttaatgctagtattatgacattttgaagtgttaattttgtttttaaacccttctagtaagtgaaatacagcctaat

SEQ ID NO: 1171 - DNA, 580 bp, Cricetulus griseus
  misc_feature (474)..(474): n is a, c, g, or t
ttgttttttaagcaatcaagttttcatttactctggaccacaaagctaatgctctaagagacctcagcttctttgtaagaagctcatggatcaccagaccaagaatgcagccgtcaactgggcctatgtatcatgtgagcgggggctgctggtggccccctgtgctgtctgcatgtatggaggggatggggatgtgatctcctgggggagtggttcagcaaatcatttttactggaattgtggggagcaaggggagacagatcccacacttcctatcacttaacagtcgcctgcagtagcagcaaagccttcagcagccacccagcacacactagtccttacaactttgcctttgttcatccatgggcccttttcagtaagtgaacaaggcctaagagtgtagttcagtggcatgtatgtgcctagcattacaaggccctcggttcagccctcaacagtgaacaaggaaacaanactttaaaatgtcttaagctaaatcatccaaagattgtgcttcttgtcctcaaatcctgtgactgggatcacccaacaacactgggatgtatttttcaatgaggtg

SEQ ID NO: 1172 - DNA, 564 bp, Cricetulus griseus
aagacaagaatagaagggggaagataaggggaggaaggaagagaaagaggaggaggaaatgggtaggggagaaggaacagagtgagaatgcaggcaggcaagcaggcagggtctattcacttctttctagtcaccatggtgacttcctatgcttgcagcatctatgagtttggcaagtcccagatataaagcagaagacagtagatgtgtggacagccaggcatctgatctgccaggcaacacttaccaaaacaaggcaagctcagacaaagcagtgccagagatgggagccccagtgtgccctgaggaacaggtcccaagggcttggtggggtcctcctccagggttgccagcaatggtctacacagtggatggtcatagtctttctggcccctgacccaggctctggcttccacagatagtttatccgaactccacttggtgtcccagagctcatgggagtgtgttccagctggctatccattcctgctctgagcactggctactctatgtctgtgtctgtaagctggcacaagttaagggtgctgcctggcagatccactt

SEQ ID NO: 1173 - DNA, 385 bp, Cricetulus griseus
  misc_feature (280)..(295): n is a, c, g, or t
agttcctttccaaaggccacctgtcggacgcagacgcactggagtgcaataacaactttcacctgttcggctccccggccaatgggacatcagtaggcaagagtttatccaaggtgtacgcaagacacaggaagctgtactccaaaaagcaccacagtcagacttcactgaaagtacaaactctggagcaagagaacgggtggaaaagcttatcccaggaacatttaaacggaaacgtcctttcccaactggaaaaggtgttctaccaccttccctcggnnnnnnnnnnnnnnnnggaagcagaagtgcggatgatatactttgctcatgtgttccctatcaacacagtatatgagggctatgtttacggtctgaagcatttgat

SEQ ID NO: 1174 - DNA, 365 bp, Cricetulus griseus
gaagtcagcaaaaaattatgtgtgtttagcacaccaataccagcaatgttattgaaagaggaacatcagagaaagccaagaagagaacataaagccttcggagaaacagtaggaacaggatccccagcacaaaaggatgtcaatcaacaagcacctctgaagcccatacccccaacctaggcacctaccctccatgtgacttttagttctcagatttctaccattacctttggaatattttccaacatttatttcctctatagcacaaccttcctaatgctgtaacattttaatgcagttcatcatgttgtgttgaccctcccccaaccaacaaccataaaatcattcttttgctactttgcaaa

SEQ ID NO: 1175 - DNA, 365 bp, Cricetulus griseus; identical to SEQ ID NO: 1174

SEQ ID NO: 1176 - DNA, 579 bp, Cricetulus griseus
  misc_feature (414)..(414): n is a, c, g, or t
ggaaatgttccctcaggttcagcacacagaagctgtggtccccagggtactgaggttcatctcatgtagacaaatttggtaatgtgcaacattttcccaggtagtactggatttgcaggcacgatgaggttatggagagcagtactgaggcttagtgctatgagagtccaggagaggtcattggtgaatgcccagcctcagctgaagtagctcaagaattgaagggaacatggagagaagctgatacttggcaacatgtttcagagtcccagaagaaagcccagggggctattggtgaaggtgaagcccagtttcagtggagaacccaacattttggagaagccagttccatgggataactgccaaggacagcaacagttagagtcaagtggagtagagccagctggagcttgngagacaagctgtgtgtgttgtggttgttagggccagagaagtgccactgccaagaccctcgggagtctacaagattgtgaatgggtcacagacatcaagcactgaacttgggaatttggttttgctttgagttgattgtgactctgccctgggtctcctctcttg

SEQ ID NO: 1177 - DNA, 432 bp, Cricetulus griseus
aagtttacgcacgctttctccagtgatctcacgaggactaagcagaccatatctggcattttggagaaaagcaaattttgcaaagacatgatggtgaagtatgaccccagactgcgagaaaggaagtatggagttgtagaaggcaagccgctaagcgagatgcgggccatggccagagccgctggggaagagtgtcccctgttcactccaccggagaggagagacactagagcaggtgaaagtacgtgcaaaggatttctttgattgtatttgtcaactaatcgtggatgagacaggccagagagaaatcgtcttccccggggctccaggcagctgtctggagagctgtttggcggaggtattccctgtaggaaaccgtttgcagttgcatcctgatggtggcacccctggtttagcagccagcatcttagt

SEQ ID NO: 1178 - DNA, 567 bp, Cricetulus griseus
gtgagagaccaggaactgttacaaaccacctctctgggagctggagatgaagtcagtttggattcttcaaccagagctgcttgtgagttttctgaggacgtaacaaatattgatctgcaccagtgcagtaataaagatttggaccccattgagaatcatgcaactggaagatatccagaaaaatgtcaggatatttctgtttcaaacttacatgtggagccatgtggcacagatattcatgccagctcgttacagcatgagaacagcagcttattactcactgaagacagaatgaatgtagaaaaggctgagttctataataaaagcaaacagtctggcttagccaggagccaacagaacagatgggctgaaagtaaagaaacatgtaatgataggcagattcccagcactgagaaaaaggtagatccaaatactgattccttctgtgggagaaaaaaatggaaaaatcagaaaagtctgtgtcctgagaattctagagctacccaggatgttccttggatgacactgaatagcagcattcagaaagtcaacgagtggttttccaaa

SEQ ID NO: 1179 - DNA, 580 bp, Cricetulus griseus
ccgtgtgggtgtacggagtgtgggaaagctttcagcacgagcacagaccttcttcagcactatatgggccttagcggggagtgcgggaaggccttcaaccgcaaggcccccttacccagcaccggggatccacagcggggagaagcctgacaaatgccaggggtgtggcagagccttcatcctccataacagaagccacaccggagagaaaccttttgtttgccaagaatgtggaaaagcttttcgagacaggccagggttcatccgacactacgtcatccacagcggggagaacccgtacgagtgctttgagtgggccaggccgtcaagcacaggtcctacctcctgtggcaccagcggacgcacactggggagtgcagcgagtgtgggaaagccttcctcgagagtgcggccctcatccaccacgccgtgatccacacgtgatccacacgggggagaagccctttgagtgccccgagtgcggcagatccttcaagcacaggccctacctcaagaggcaccagcgcatccacagcggggagaagccttacgtgtgcggcgagtgtggcagagccttcac

SEQ ID NO: 1180 - DNA, 578 bp, Cricetulus griseus
tgaaggtgggagccaccaccacctagctgtctacactcttttatttgactgtcagatcctgacacagatcccatgccacagactgtccagtcttccctcaccctccatgcttctcacctctctgctggtgactcacaagagtaagaagaaacagttctcacaaatgttaggagggaaggtagctccttccattttttttaaagatttctttattcatgtattttatgtatatagtgttctatcttctggcctacatacacacagacacatgagtaaaaattaaacgcctcctaaagattctgaattggaatcagaagctgtacaatgggcacaaacagagccttgactgatttcatgatgtttctcctgtcaggtccagtcttttccttgggaaatactctacccacagaccttgggtcactcccgatcattgttcacatgattttgcagcatttcctgggaatttagtgttgtcactgatttgtggccacaattttatagcccacactaatcatgtgttattaccaacctgtacaggcaggtatgtggctgaaaacagtgagcccatgaggtcgaca

SEQ ID NO: 1181 - DNA, 579 bp, Cricetulus griseus
tgcctacccatcagcacgtggcccatcccgcagacatcctgttgggctctcagttcctctacaccttcttctcgaagacccatggggacttgcacagcctggtgcgcagccgccgcggtattcccgagcccgaggctattgtgcttttccggcagatggctgctatggtggcacactgccaccaacatgggcttgtcttgcgtgacctcaagctgtgtcgctttgtcttcagcaaccgtgagaggacgaggctggtgctggagaacctggaggatgcttgtgtgataactggaccagacgactctctgtgggacaagcatgcatgccctgcctacgtgggaccagagatactcagctcccgaccatcctactctggcaaatcagctgatatctggagcctgggcgtggcactgttcactatgctggctggtcactatccgttccaagactctgagccggctttgctctttggcaagatccgtagagggacctttgccctgcctgaaggcctatcagccccagcccgatgcctgatccgatgtctccttcgaaaggaaccttcacagcgactagtggccc

SEQ ID NO: 1182 - DNA, 241 bp, Cricetulus griseus
  misc_feature (236)..(236): n is a, c, g, or t
tggcggcgtctgacgccgcgcgtctccctggcggcggtgtgtggtgacggcccgggtcagaatgacttcaacaagtaaggcgattgaattacaactacaagtgaagcagaatgcagaggaattgcaggacttcatgagggacttagagcactgggaaaatgacattaaacaaaaggacatggaactaagaagacaaagtggtgttcctgaagagaatttacctcctattcgaaatngggga

SEQ ID NO: 1183 - DNA, 418 bp, Cricetulus griseus
tgctgtggggaagagacagatttgtaaacctcagagtgaggttctgcctgccggaggccgctgtggtgcggagacccccgggcgaagccaccatcaccatgtctgaccaggaggcaaaaccttcaactgaggacttaggggataagaaggaaggagaatacattaaactcaaagttattggacaggatagcagtgaaatacatttcaaagtgaaaatgacaacacatctcaagaaactcaaagagtcatactgtcaaagacagggagttccaatgaattcactcaggtttctctttgaaggtcagagaattgctgataatcatactccaaaagaactgggaatggaggaagaagatgtgattgaagtttatcaggaacaaaccgggggtcattcgagggtttagataattctttttat

SEQ ID NO: 1184 - DNA, 579 bp, Cricetulus griseus
ttataaatcgaaatgacaccaaagaagatgtgtttgtacaccagactgccatcaagaagaacaatccacgcaagtatctgcgcagtgtgggagatggagagactgtagagtttgatgtggttgaaggagaaaagggcgctgaagcagctaatgtgactgggccagatggagttcctgtggaagggagccgttacgctgctgatcggcgccgctacaggcgcggctactatggcagacgccgtggacctccccgtaatgctggtgagattggagagatgaaggacggagtccctgaaggagcgcagctccaggttcatcggaatccaacttaccgcccaaggttccgcaggggacctgctcgcccacgacctgcccctgctattggagaggctgaagataaagagaatcagcaagcggccaatggtccaaaccagccgtctgctcgccgtggattccgacgcccctacaactatcgacgccgcccccgccccctgaacactgtttcacaagatggcaaagagaccaaggcaggtgatgcaccaactgagaaccccgctccagccgctgagcagagcagtg

SEQ ID NO: 1185 - DNA, 579 bp, Cricetulus griseus
ctccccttcttaagtccctacattctgctgggcccccactcctcgctgtatcagcagctcctccttctcagccccttgccaagaaaaaaggcgttaaacggaaagcagacaccaccacccctacacctacagccatgctggctcctggctccccagctagtccccctgggagtcttgagccaaaggcagcccggcttcctcctatgcgtagagagagtggccgtccaatcaaacccccacggaaagacttgcctgactcacagcagcaacatcagagctctaagaaaggcaagctgtcggaacagctgaagcactgcaacggtatcttgaaggagctgctctctaagaagcacgctgcctatgcctggcccttctataaacccgtggacgcttctgccctcggcctccacgactaccacgacatcattaagcaccccatggacctcagcactgtcaagcggaagatggagaatcgtgattaccgggacgcacaggagttcgctgctgacgtgcggctcatgttctccaactgctataagtacaatcctcctgaccatgatgttgtggtcatggcacgga

SEQ ID NO: 1186 - DNA, 579 bp, Cricetulus griseus
gaaggccattgttctttaagtgtagctaggggctgactcatatctcagggttttccatgtttgtgaagtggacagttctttgactaggatgtgacttactgtttcccatagtgatgcgaaaaccagcatggaatgacatggtttgaagctggtggaggattaggagcctcatgggcacactgtttctgtacggataagctgtgtctgggcataagatggaggcagaacagacactgcacaggagcaggttgccactctggggaggttctgttcagcaatctgtggttttgatatatatcaaaatcttgtgtaatcaaaagttttcaaagcttcacagtaaatttggacatacacactaaatttctaagaatccaccctcttgtcacactggtaagacataatttgaaaatgaaagcgacagctccatcattaagtgtgttccatgaggatcaggggatttggcttcagtgtctgcctttgccatatgtcatgtagggttctctgggccatggtcccttctctgtagctgatagtcctactctacagctgtcagtctttatcacaaatgccacagtatca

SEQ ID NO: 1187 - DNA, 579 bp, Cricetulus griseus
  misc_feature (518)..(539): n is a, c, g, or t
ttccccatgtcaacaagtggagagatttcacgtatcaatgttcctcctgaatcacttgttctgaatatgctggtgcatgtctcagtgactcaacaaaaagtactatcacagctgaaaacctctccgtctgttcctctcttctagtgagcactgcttcagggcttcatttgactatctcttgtgagttcacatatgggtatctttgtttaatagacatgcacacgcattgtaagttctatcttaaatgaaaactgcttttatgtggaaatgctcagccctcatgagaattgcctttgcacacgtgatctgaaccgtggagcctatcctcacgtagactgcttgagtgtggccatacaacattaaatctggtttctcgttgacaaaataaaaatcaaacaaggaaatgtactgcatgatagatttatttgctttatttggtgttaaaagtcttgttataactttacaattctgtggtatgactttataccaagaataggaacctgccacctatattagannnnnnnnnnnnnnnnnnnnnncacttaaatgacattcaagatgtaaaattttccttttaat

SEQ ID NO: 1188 - DNA, 173 bp, Cricetulus griseus
ataataaagttacagataaattattttgttttaaaatgcctaaaatttttctttaagtattctgagcagcagactttaaaaatatttcctgctaagtgtaaccatacagcttattccacaaaatgctatttaatgaaactgaaggttgttttggtttttggttttaggttttt

SEQ ID NO: 1189 - DNA, 426 bp, Cricetulus griseus
  misc_feature (60)..(107): n is a, c, g, or t
  misc_feature (118)..(140): n is a, c, g, or t
  misc_feature (151)..(165): n is a, c, g, or t
  misc_feature (167)..(187): n is a, c, g, or t
  misc_feature (190)..(247): n is a, c, g, or t
  misc_feature (275)..(347): n is a, c, g, or t
  misc_feature (392)..(415): n is a, c, g, or t
cgaaagacggaacgccgccgcgctccgggactacagcctgttgctggacttcgagactgnnnnnnnnnnnnnnnnnnnnnnnnnnnnnnnnnnnnnnnnnnnnnnnnagttccctatnnnnnnnnnnnnnnnnnnnnnnntctgcgcgggnnnnnnnnnnnnnnntnnnnnnnnnnnnnnnnnnnnnacnnnnnnnnnnnnnnnnnnnnnnnnnnnnnnnnnnnnnnnnnnnnnnnnnnnnnnnnnnccgcgtggagatcatagccaacgatcannnnnnnnnnnnnnnnnnnnnnnnnnnnnnnnnnnnnnnnnnnnnnnnnnnnnnnnnnnnnnnnnnnnnnnnntaaccagctcacctccaatcccgagaacacggatttcgacgcccnnnnnnnnnnnnnnnnnnnnnnnnatgacccttca

SEQ ID NO: 1190 - DNA, 284 bp, Cricetulus griseus
  misc_feature (34)..(62): n is a, c, g, or t
ggaaaggttgtttaaaatcctcaatgttgtcggnnnnnnnnnnnnnnnnnnnnnnnnnnnnnggagacgaatctgcattgacatactgcaccggatgaaggagctctgcaggcacatgagcatcttcgacagtgaggctcacgccaactataaaaaccaattgtctgtactccacgatgctggtcttcttcaagagtgcgtcccagtacatcaacagcatacagtcatctctcttccaaggtcctaactcccctacccaggtcccactggttcttctggaaaat

SEQ ID NO: 1191 - DNA, 579 bp, Cricetulus griseus
ctctcgccaaagccatccatgaaaggttcttcatcggcgttatggagcctcagctgatgcagacctccgagatggggatcctgtcgtcaaccgctctgctgcaccgcattgttcggcaagtgacctcggacgtcctgcttcaggaaatggtggtcttcatcctgggagaacagagggagccagaaactctgtcagagataagcaggcatcccctaagacataggttaatcgaacattgtgaccacatatctgacgagataagcataatgaccctgaggatgtttgagcatcttctacaaaaacccaacgagcacatcctttacaacttggtcctaagaaaccttgaagaaagaaactatacggaatacaaacctttatgcccggaagacaaggatgcagtggagaatgggctgatggcaggagccctagatctggaggaagatccattatttactgacatttcaccagataacactctgcctaaccaagaatggatcagttcaccccatgccagcccagaccatcccaaaaatgatggcaagacagaagtccataaaatcgtcaacagtttcctctgtg

SEQ ID NO: 1192 - DNA, 581 bp, Cricetulus griseus
acctcaacaacccatatgtccggaaggccctccacatccctgagaagctgcctcgctgggacatgtgcaacctcgtggtgaacctacagtaccgccgtctctatcaaagtatgaactcccagtacctgaagctgctcagctcacagaaataccagatcctactgtacaacggcgatgtggacatggcctgcaatttcatgggggatgagtggtttgtggattccctcaaccagaagatggaggtgcagcgtcggccctggctagtggactacggggagagcggagagcaggtagccggcttcgtgaaggagttctcacacattaccttcctcaccatcaagggcgctggacacatggtccccactgacaaacctcgagcagccttcaccatgttctctcgtttcctgaacaaagagccttactgaggggacctatggaagtctgcagtacctgatccagcctctcccagcctctctcagtggagagagatcctaccttatgcagaaagcccctgtggggcaggccctgctctaacactgtctctgacttctcagtcctgtgcatcccagcttaggcctcag

SEQ ID NO: 1193 - DNA, 514 bp, Cricetulus griseus
  misc_feature (268)..(289): n is a, c, g, or t
  misc_feature (378)..(417): n is a, c, g, or t
atgcagaaacacactttatagtaactatgcagaactatagccaaagttagtgtagaaataatatgaaactacagagcattcatgtctcaatgttgaatcagtttcattttaactctgaagttaatttcttagggcatcatttgggctagtttctgtgtaagtgtaaatactacaaaacttatttatactgttcttatttgttacattcatagatttttatgacatctggctaaaagcaaattattgcaaaactaaccaaaccactatnnnnnnnnnnnnnnnnnnnnnncaaaaatgacatttttatattaaattgtttggctctgacaaaaattaaaggagctgacactaataaaggaatatcgtgacttattttannnnnnnnnnnnnnnnnnnnnnnnnnnnnnnnnnnnnnnnaggggggcgccccccccgggggggcccccccttttttccccctttaagggggggaaatggccccccgggggaaaaagggggaaaaagtttttcgggg

SEQ ID NO: 1194 - DNA, 580 bp, Cricetulus griseus
  misc_feature (319)..(338): n is a, c, g, or t
tggcccagtttcagtttgaggatttgaatataaaaacaaaagccatttaaaacattacaaagaggtttttttttattttctttctctttaaattattgttgaaaagctcctttcaaagtcccggatagaatcaaggacctttaactctaagcgtgtgttccatagtaaagatttctgggctgttcactttggagaggatggtcctgaaacttaagagatggtcgtagtgtttgtgggtaataactccattgggccatacttgctttaatcagtgacaaaaacatgaaaatcaggccgggtgtgctggtacatacacatnnnnnnnnnnnnnnnnnnnntgacgtctctgaatttgaggccagcctgatcaacagaatgaaatctggggtgggggggtataagaaggaaagcataaaattcaggcatagaaaccaaagtgtgctttagaacctactgagtgtcttttgagattccaggccatccacctggagggtccttttcatgacggacttgatgtgggagcttggataccttggtacaatgttaagtcatgcaccgagatcctgagagttcatggacg

SEQ ID NO: 1195 - DNA, 580 bp, Cricetulus griseus
  misc_feature (4)..(4): n is a, c, g, or t
  misc_feature (514)..(567): n is a, c, g, or t
tggngaagaaataaatatggcattgaggctgagacctaaaggataagttgggatgggtggaataacactccagaacaaagactgtatttttaaaggtagtgaggagaaaagttatgttcatgcaacaaacataaaaggccagtatattttattgtaaatgtagtgggaagctgttgaagggttctgtgcgacagagtatatgacctattttatttgaacatctttgctggccagagaatgtgttctaaggtgtgactggaaacaaaataaaccatcctgagtgaggtgaactgttgttccaacttagagattataaggatttgtgcataacagatcagatgtgagagaggctgactcccagggtttgacttcagtaattgaatagtggggttctgctccctgacttgggaaagattgaaagtagaatggatttggagtgatgaatagaattctagttgtatttgtttgtaagggtaccttattctacaagtcatggagtgtggcaaaaaggtannnnnnnnnnnnnnnnnnnnnnnnnnnnnnnnnnnnnnnnnnnnnnnnnnnnnnaaatagatgatac

SEQ ID NO: 1196 - DNA, 481 bp, Cricetulus griseus
  misc_feature (97)..(97): n is a, c, g, or t
atcctgagtacagtcatcttggcaggagagggggcccttagtaacatagattgcccagagagggggcccttagtaacatagattgcccagggcctanacatcagagtgtggtaggagggagctggggtgacagatgagggtggcactgtggctgtggtcacacccatgtggcttctcaaagttactataccacctataccactccaggcccctctactagaagatcctctgctgaccaaggctcttcatgcctgagccagccaggggtcagggagagcgcttgttactgccagcaacagagcagggcttcccctggaaggaatgtgtgagccagagcagcaccagggagttctcccttggctctttgtgtcagaggctccttagtgagattagagcccttgtatttttgtacctttttatactgttaactgtggagaactgttgtgcttttttgtaacatgacctgttttctagaaaaaaa

SEQ ID NO: 1197 - DNA, 579 bp, Cricetulus griseus
  misc_feature (63)..(81): n is a, c, g, or t
ttaaacgggttggggctcccgggccgagggcagcccagggttttgttttattttattttatcnnnnnnnnnnnnnnnnnnnttggtaaggtttgtttttctggttgatggctcccaggggcggcctcctctccctctccaggacttctcagatttcgatgaacgggaatgaatcttctcgccggcttctcctaatcgatatctgtggagttccgagtctgtgtgggtaaaaccgtccagttgtgagttaccgagacagtgcttgcttgatcggaagatgtgcctggagagaggtcctgtgtctgtccagcttaacagtaccgcatttgtacctagcgcctggatgacagctcgggagtgagagagacaccattaagaacaaaagaaaaggattcttcagaacaacagttatggaagacagtaaacgtggagcgaattttcccagaatgaaaacaaatgtgaggtgtaaagatgatgaaaactttagaagaagaaagaggaagtgagatgcgaacaggagtcatgtggggacactggcctgctctgtcccctggtggtgaaacactgtatgtgttgtgta

SEQ ID NO: 1198 - DNA, 579 bp, Cricetulus griseus
tgccgaaatccaagcgggacaagaaagtttccttgacaaaaactgccaagaaaggcttggaactgaaacagaacctgatagaagagcttcggaaatgtgtggacacctacaagtacctctttatcttctctgtggccaacatgaggaacagcaagctaaaggacatccggaatgcctggaagcacagccggatgttctttggcaaaaacaaggtgatgatggtggccttaggtcgaagcccatctgacgaatacaaagacaacttgcatcaggtcagcaagaagttgagaggtgaagttgggctcctttttaccaaccgcacgaaggaggaggtgaacgagtggttcacaaagtatacagaaatggattttgctcgagctgggaacaaagcaactttaactgtgagcctggatccaggccccctggagcagttccctcattccatggagccacagctgaggcagctaggcttgcccactgcccttaagataggtgtggtgaccctgctatctgactacgaagtgtgcaaagagggggatgtgctgaccccagagcaggcccgtgtctagaagctttttg

SEQ ID NO: 1199 - DNA, 578 bp, Cricetulus griseus
ctgaacgcaggtcctcatgcttataagggaaaactaccacccaccggggcggtctctgcaacactttaaaaatatatacatatgtatatatctaacaagtatactcaccatgtgtgtgtatgtgtgtatgtggttgcggagggaaaccctggaggtctccgttgattactctctgccttacttcccacagtctttcactgaatctagagcttgccaatttggggcaaccctggtggctgggattagaaggcttcgtgaccacgacaagctttgtccatggctgctagggaactggattcaggtcctatgtttgtgcaaccatctcatcacaccctaaaactattttaacagccttcaatcacaaataccatgagtggggaagatgaccccttggtgaccaactggatcacttcctggtggatgcaggcagtgcctttttgattacagagaatagaaagcaagggagctaagggaatgttagagtcattgcccatcagaagacttgagaaagtctgaagacagggggaagatggcccacgacagacagtgagtaaatgcatttgttctgaggaatgggg

SEQ ID NO: 1200 - DNA, 352 bp, Cricetulus griseus
  misc_feature (241)..(279): n is a, c, g, or t
aaatcatccactctcaccatgtgcctgtgagatggaaattcccaggtagacttctgacaggccaactggtacattttgttattaaaaccacaaagctgaagacaggtgtagttagtggtacacacctataacctcagcacacagaactattcaagaaaatagttcaaggccagcttgggctacataatgagacattgcctcacaaaacaaaaactacaggtctgcaatttttaagtgtgtnnnnnnnnnnnnnnnnnnnnnnnnnnnnnnnnnnnnnnnagagtgtgagtgtggtctcttctaatatgcgtgtgagtctctaaacaatagtgtatgtgagcgctagctatct

SEQ ID NO: 1201 - DNA, 360 bp, Cricetulus griseus
gatgacatcagctccgtattcagacaccttctccgatgacatggccttcaagttagaccggagggacagcgacgagcgtctcgggacggaccggtacgaccgcctgcacagacatcgtcaccaccagcaccggcggtcccgaaacttgctaaaaactaaacatacggaaaaggagaaaaaccaggaagtctccaagtcgggatctgtgaaggaccggatatcgggaagttcaaagcgttcgttggaggggagcgatgactacgggaaggcgcagatatccaaaagcagcagcatggaatccaggtcatccaaactccacaaggagaagacacgcaaggaacgtgagttaaagtctggaca

SEQ ID NO: 1202 - DNA, 580 bp, Cricetulus griseus
aaaccccaaggaagtggcctagcatcccccaggccaggcctctctccccttgtgggccaaggcctactcaggttcaagggcctccaagactcgtctgtggcactagttctgttctgttatcaatgtagcttctcctgttcacatagtttgacctgaagttgtttgtgggctactcaagtttgtcccccatccttgaaaagttgggttgaaagtatttccccagggttggcaactgctgagagccaatcatcctaacacttgacattagacaaaagggcctttttgcaaagttgtcacttactcctgggctaccacttttctgggggagacctcacttgtcaccaacctgggatgagccacatctcctctaaagtgttttgggtgtccctaggggtgcagatggcctcctggggctgctgcatctgttacagcaaccctcctgcctgcttacctgttccctcattagttagcaatggaagcaagcagaggctgaggccccagctccctaaagtcagaatgttcctgccatgctcccactgcctataatcccctcctgtccacaccaagtctctgtatccct

SEQ ID NO: 1203 - DNA, 580 bp, Cricetulus griseus
tctgagcacagtcaagcctccactgtgtcccctcctgtaggcacttcaggggacaatgcgctgccgcatacctcagccaggacccatctgccccagtcaatgaagattatgcatgaaatcatgtacaaactggaagtgctctacgtcctgtgtgtgctgctgatggggcgtcaacgaaaccaggtccacaggatgattgctgagttcaagttgatcccaggactcaataatttgtttgacaaactgatttggaggaagcattcagcatctgcccttgtcctccatggtcacaaccagaactgtgactgtagcccggacattaccttgaagatccagtttttgaggcttctccagagtttcagtgaccaccatgagaacaagtacctgctgctcaacaatcaggagctaaatgaactcagtgccatctctctgaaagccaacatccctgagggggaagctgtcctcaacactgacaggagtttggtgtgtgatggcaagaggggcttactaactcggctgctgcaggtcatgaaaaaggagccagcagagtcttccttcaggttttggcaggcccgggctg

SEQ ID NO: 1204 - DNA, 466 bp, Cricetulus griseus
  misc_feature (241)..(294): n is a, c, g, or t
aaatcatccactctcaccatgtgcctgtgagatggaaattcccaggtagacttctgacaggccaactggtacattttgttattaaaaccacaaagctgaagacaggtgtagttagtggtacacacctataacctcagcacacagaactattcaagagaatagttcaaggccagcttgggctacataatgagacattgcctcacaaaacaaaaactacaggtctgcaatttttaagtgtgtnnnnnnnnnnnnnnnnnnnnnnnnnnnnnnnnnnnnnnnnnnnnnnnnnnnnnntttcaacctttactgtgtgtgcgctctcaacctttagtgtgtgtgtgcgctctcaacctttaaagtttatttttttccaagtggggaacattgtgaacaataaagggatgaacaggggcatacgccttcttagtgttcatctgtggggattctggggtgtgcgcatcacttg

SEQ ID NO: 1205 - DNA, 580 bp, Cricetulus griseus
  misc_feature (539)..(555): n is a, c, g, or t
attccagcattgcaatatgaggacatgaatagttgggatgagtgtaaattattaagtgcctttactactaagctgactcaccagcctgatacagggccttgccttatatatagccttgactagcctggaactcatactatagtcaagactgccttgattacatttatagttgccagttttagattaaaactaaaaagacatctcatagcagctttttaaaaatattacagttagcccttgctaacatagtggtatatgcctgtaatcaagcctgagtcatttgacaccctgtctcaaaacaaataaaatgagaatattacaattaagcctggaggtgtaatttggtgatttgtaaaatacatacatatttggaaatggtatgtgtaatagatcctcaaatgtaggtatgaatgaggacatattgcaatactctgataagaacagtcacaaaactagctaataattattaagcctttcttaagtgccctggacagtcctagagttttaaggtggaaatcattgccacctacttccatttnnnnnnnnnnnnnnnnncgtggtccaggcattccttatagcc

SEQ ID NO: 1206 - DNA, 366 bp, Cricetulus griseus
tcagcatcatcctgggagactccatctggggaggcatgtgcactccctgaggtggggacgggtgatgggggtgctgcagggggaggagcggctgtagctgttgttgttggaaaagacttctgattggctgctgctatagtggtggcggtggtggaagattctgtttttgtggaagagggattaatcttggagagtgagccacgacaggaggctgtgtaagaagcagggcgggcctgtgctctttcatccgtcccctcttagtgctctctctcctctggtctcccatcccacggcacatcatatagccttctggccttcctccccgtcgggaaccatattgcccctgtttatgctgccactctcttt

SEQ ID NO: 1207 - DNA, 551 bp, Cricetulus griseus
gaatgttgcttgtgggattataaattttattatatttgtgagggaagtgtttgagctgagcatgcatagtaaatttccaaagtgactagttttgtaaaagtttgatattttttgtattatgtttgtgtaactaaactgccattatccatgtttattgatttagaacaaactattcagtattaattttatttttatcatagtacctttgcagtaattgatagtaagaagtatatactatgttttattatctgctacacactgcctagattagtactttgcatgaatataatcatttcctgaattcaaaacagtattttaaaatttttgtttacattttactttgactttatgtatatgtcttacctgaatgtatgtatgttcacttcatgtgccctggggcctgagtaggtcaagaaagggcattaaaacaatagttgtaaaccactattgggtactggatactgaacctggagcaacagctgctcacctacatctccagccctaaaaaaaattgatttttatagggctgttttaagtgaaagctttattgc

SEQ ID NO: 1208 - DNA, 580 bp, Cricetulus griseus
ctttaaacatggacaccgcggattctggtcctggggaatcttcctcactgacgctccagggtcccaggacgatcgactcttcctgattaaaggtggaattttcctcggttctgcagcagcagcgggaatgctagccggatttgttacaacatttatcatttatctaataaagaaaagccctgaatggttcaataagggcactatgagcacatctgcctttccagagagtgggtcttcccttgctcttcgagccctgggctggggatctctttatgcctggtgtggggtcggcgtgatcagctttgcagtctggaaagctttgggagttcacagtatgcaagactttcgaagtaagatgcaatccatatttccaacaattcccaagaactccgagtcagctgttaagtgggaagaggcactggaatccaagtgagatggattcagagatggactccagacatacaggagcttcaaaaacaccatgtcagaaagggcttcggttgactcctctaggaacacgtgcagatggccgtgtaccccacggccacagccacagccatctgcctgcgtttatggtaca

SEQ ID NO: 1209 - DNA, 579 bp, Cricetulus griseus
ccgcggctgctcgggccggcggggtcggtcgtcgtcatggaatacctgtgggatgagatgaccctgaccttcgcccgcacgtccatgttccccttttttgacatcgcccactacctggtgtcggtgatggcgctgaagcagcggccaggggcagcagcagtggcatggattaatcccctgtccagctggttgagtgcaatgctccattgctttggtggaggaattttatcctgtataatgcttgcagagcctccgttgaagtttcttacaaaccacactaatattttactggcttcttcaatctggtatattgtatttttttgccctcgtgacctagtttcccagggctattcatatctacctattcaacttctggctgcgggaatgaaggaagtgaccagaacttggaaaatagtaggtggagtcacacatgctaatagctattacagaaatggctggatagtcatgatagctgctggatgggcccgaggggcaggtggtgttatcgtcacatcttgtgtagaattgctaaaaggagattggaaaccacaaagtgatgagtggctgaagttgtccttc

SEQ ID NO: 1210 - DNA, 568 bp, Cricetulus griseus
tcgctctccgggtcttgctacctcgcggaggacgctgcacagactttgccgccagtctcctagctctcctctccaagtccgccgcggcgaacatggcctcaggagttcaggttgcagatgaagtatgtcgcattttctatgatatgaaagttcggaaatgctcctcaccggaagaaatcaagaaaagaaagaaggctgtcattttttgtctcagtgcagacaaaaagtgcatagttgttgaagaaggcaaagagatcttggttggagatgttggtgataccataaccgatcctttcaagcattttgtgggaatgcttcctgagaaagattgtcgctacgctttgtacgatgcgagctttgagaccaaggagtccaggaaagaggagctgatgttcttcctgtgggcaccagaacaggcgcctctgaaaagcaaaatgatctatgcaagctcgaaggatgccatcaaaaagaaatttcaaggtataaagcatgaatatcaagcaaatgggccagaagatctcaaccggactagtattgctgaaaaactaggtggctccttaattgtagc

SEQ ID NO: 1211 - DNA, 505 bp, Cricetulus griseus
cactctcatctggtcctttattcctgtctctcttacctgtgttgagcagtctgaaatgcacagtggtctccatgggaagtagccttgctgccacaaagactcatccacagaagtcagaaatcaagtgttgcaagtagtttgcactaaaaaaaaaagattatcattatttgtcctcatcaccagaatctgccagcgcctgtggtgcccacaagtactcctgtcacagtctacactggaggacactcggaatcactgaatttaatcaccagaccagtcgcacagggaaaatgggaagggatctaatatgctggatgaattctaccaaagtcagccacagtggctgtcctcacaggatatcaaactgggcgtggtgtgaccgtccccagggcaccgaaggaaaagccatgcctgctgcggatagcgctctatacaaggggggctctttgccgcctgcgccctgagtcctcttagagccaggggctctccatacagcacatatggtagg

SEQ ID NO: 1212 - DNA, 579 bp, Cricetulus griseus
tgtctcggtgcccgagtgagtgatctcacccctcgcaccatgggcaagaaaggcaaagtcggcaagagccggcgggacaagttctatcacttggccaaggagaccggttatcgttcgcgctccgccttcaaactgatccagctcaatcgccgctttcagttcctgcaaaaagcccgggccttgctggacctgtgtgctgcgcccggaggatggttgcaggtggctgccaagtttatgcctgtatccagtcttattgtgggagtggacctggttccaatcaagcctcttcccaatgttgtgactcagcaggaagatatcacaacagagcgatgtaggcaggccctgaggaaggagctgaagacatggaaggttgatgttgtactcaatgatggggctcctaatgttggggctagttgggtccatgatgcttactcacaagctaacttgacactgatggcgctgcgtttggcttgtgattttttggcccgtggtggttgtttcatcacaaaagttttccgttcccgtgactatcagcccctgctatggatcttccagcagctgttccaccgtgtccaggcc

SEQ ID NO: 1213 - DNA, 578 bp, Cricetulus griseus
ttgcagtgccttcgctacattagaagaggaggcttgtacagagcttgtcccatacctcgcttatatactggataccctcgtcttcgccttcagtaaataccagcataagaacctgctcattctgtatgatgccatagggacactagcagattcagtgggacatcatttaaacaagccagaatatattcagatgctaatgcctcctctgatccaaaaatggaacatgttaaaggatgaagacaaagatctcttccctttacttgagtgcctctcatccgttgccacagccttgcagtctggcttccttccatattgtgaacctgtgtatcagcgttgtgtaaacctggtacagaagactctagcacaagctatgctaaacaatgctcaaccagaacaatatgaagctccagataaagactttatgattgtggctcttgacttactcagtggcctggctgaagggctgggaggtaacattgagcatctagtagccagaagtaacatcctaacactaatgtatcaatgcatgcaggataaaatgcccgaagttcggcagagttctttcgccttactagtga

SEQ ID NO: 1214 - DNA, 416 bp, Cricetulus griseus
  misc_feature (155)..(178): n is a, c, g, or t
  misc_feature (306)..(318): n is a, c, g, or t
  misc_feature (320)..(341): n is a, c, g, or t
acatctatatgatctgggattttgtttttattttgaaatgggagctttttgtttacaagttcattaaaaactaaaaactgtttctgtaaggaagtgaaatttttttaaacaacaaaatgccttgctgactcaacaagaagtatatcttcccccannnnnnnnnnnnnnnnnnnnnnnnagtcaaggtcttattttgtagctctgggtggcctggaactcattgtatagatcaagctggcctagaactctcatagatcctcctctgcctccctgaagtcctgggactaaaaaacatgagccaacacnnnnnnnnnnnnncnnnnnnnnnnnnnnnnnnnnnnttttccctaaatttttttttttgatagactacttcaagccatttgttatatatttctttgctgcaaaaaattttt

SEQ ID NO: 1215 - DNA, 578 bp, Cricetulus griseus
tttgaggagtatgagtggtgtgggcagaagcggatacgggccaccacactcctggaaggtggcttccgaggttccggcttcgtcatgtgcagtggcaaagaaaacccagacagtgatgctgacctggatgtggatggagatgacactctggagtatgggaaaccacaatacacagaggccgatgtcatcccttgcacaggagaagagcctggtgaagccaaagagagagaggcactccggggtgcagtcctaaatggtggcccccccagcacccgtatcacacctgagttctctaaatgggctagtgatgagatgccatccactagcaatggtgaaagcagcaagcaggaggccatgcagaagacctgcaagaacagtgacattgagaaaatcactgaagattccgctgtaactacatttgaggccctgaaagctcgtgtcaaggagcttgaacggcagctatctcggggggaccgatacaaatgcctcatttgcatggactcatactcgatgcccctaacgtcgatccagtgttggcatgtgcactgtgaagagtgctggctgcggactctgggtgc

SEQ ID NO: 1216 - DNA, 524 bp, Cricetulus griseus
acttgaggaggagctgcagtacggcctcactacaggagggatgggatcagagaacagtgctttaaagagctatacactgagagaaccaccattcaccttgccctctggacttgctgtttaccccgccatactgcaagatgggaaatgcgcctcggtgtttgtatataagagagaaaatgaagacaaggttaacaaagctgccaagcacttaaagacacttcgtcacccttgcttgctaagatttttatcttgtactgtggaagcagatggcattcatctcgtcactgagagagtgcagcccctggaagtggcgctggaaaccctgtctcctgcaaaagtctgtgctggaatctatgacgtattgctggctcttatcttcctccatgacagaggacacctgacacacaacaatgtctgcctgtcttctgtttttgtgagtgaagatgggcattggaagcttggaggcatggaaacagtgtgcaaagttcctcaggccacaccagagtttctcagaagcatccagt

SEQ ID NO: 1217 - DNA, 580 bp, Cricetulus griseus
acagcagttcgttgcattcccgaagctgctatagtggacaagggcatttggtcgcttagcgccctccgctcgagtgcccactgccgtcccgtcgagagcccgcgcaggaaccagcacctttgcagacatggagactgtggttcgacgatgcccattcttatctcgagtccctcaggcctttctgcagaaggcaggaaaatctctcttgttctatgctcagaactgccccaagatgatggaagttggggccaagccagcccctcgaaccctgtccacttcagcagcacactgccagcagatcagagaaacccctccagccaatgagaaagaaaaggctgccaaagctgcagtccagcaggctcctgacgaatcccagcagactccagatggcacacagctcccggctggacacccgtcacccactgcaagccagggctctgggagcaagtgccctttcctggctgcacagctgagccagacaggcagcaatgtcttccgcaaggccagtctggagcttcaggaggatgtgcaggatatgcatgctgtgaagaaagaggttgcccaaagcttaataaccccc

SEQ ID NO: 1218 - DNA, 578 bp, Cricetulus griseus
  misc_feature (448)..(467): n is a, c, g, or t
ccagttgaggatgcagaggagttgtgtaaagtccctggggacacaggtggtatggcttgtagtgcacagtgtctttcataccccacccccacccccatctggtttgttgctcgagctggccatagctgggtccacggggagagtggagcctgttgcctgtcagccgcttgctgtttgcagcctgattttgtggatgagcaacaagctttgtaaagaaatgatctggagagatctgttaaagcatttcgtaagtcaaactgctgcagtgacactgtagtacattttccattaactatggaatcactttctggcaaaactcagtacagggtttgtagcagttattatacaaaggttgctgttaatatgcttcatgttggtttaaaaaaatgaacaaggaataaagttgtccttttcttttgatgcatatacaatgagttacatgtgttannnnnnnnnnnnnnnnnnnnctccactgcaaaaagtctgaacgtgttattctttctctctcctcagcagacgctgctgatcctgttttttttcctgtacttttccctttagggagtctcattgtattgggt

SEQ ID NO: 1219 - DNA, 547 bp, Cricetulus griseus
cggctgaaggagctgcgtggactgaggcgttgggaggcccatctttggcgaggttggcccatgcttcggctcatggcaccgagcggcgtccgtcgtgagatcattcactgaagaccaaataagtagctatgctaaattctcacatggatgagtacagaaactctgataatggcagcacaggcaacagttcagaggtagcagtagaacatccagattttagtactgagattatgaacgttacagagatggagcaatcacccgatggttctcccagcgtgaatgcatctacagaagaaaatgatatggcaaatgctgtggaccttccagtgacagaaacagaaggaaacttccctccagaatttgaaaaattttggaaaacagtagaaactaatcctcaggattttacaggctgggtatattttgcttcagtacgtataacacgagaatcacttgacggctgccagaaaagcatttgacaaatttttcatacattacccatattgctatggttactggaaaaagtatgctgaccttgaaaaacgacatg

SEQ ID NO: 1220 - DNA, 567 bp, Cricetulus griseus
  misc_feature (357)..(392): n is a, c, g, or t
ttaccaagcctggcaaggtcagcgctggagaagaatctggcagatgctgcaatagaaataaatactaatgatagcctggagccagaactggagagctacaagtgtgagatagtatccgggtctctgaggattggcgctgtcagtgcaccagtgtacaatgcccaggagaagatgaaagtgcctgatgttctcttctatgacaacgttcagcacatgatagtgatggaagacatgctcaaagacttcgtcctcggagaacacttgctgttggtcggtaaccagggtgtaggaaaaaacaagatcatggaccggttccttcacctgctcaacagaccccgagaatacatccagctgcannnnnnnnnnnnnnnnnnnnnnnnnnnnnnnnnnnngcacaaggagagcagtagacctggagagactcacaagccctgggaacagcacagcccttagaagtctgagccgagtgatggcacctgagcctgcattgggtgctgtggtatggacagtaacctatgcagtgtatgctgcagaagtatggttcgttcatccttttgaaagctactc

SEQ ID NO: 1221 - DNA, 580 bp, Cricetulus griseus
  misc_feature (272)..(290): n is a, c, g, or t
cagcacatgtttgaagtactagctgccatggattaccgctctgttgtccttctgaatgaatgcagtaagaaggtcatagataatatccatggttgtccttctaaagtactgatcagcatactgcagtcctgtaaagccctccgataccaaaataaagatctcttcaagaggatagcagactatgtggctacaacttttgaaatttggaagttgaatcaagttatctttttcctcttgggatttgaaaaccttggttttcgaccttctgcttnnnnnnnnnnnnnnnnnnngaaagtaatggaggatcctgactctctaaacaaaaagaacattgtttctatccttcacgtgtattcttctctcaatcatgcccacaaggaccagaacagagagttcctagaagcaatggcaagtgctctgactgtttatcttcaccacatctcttccgaaaacctattgagtgctgtgtattcattttgcctgatgaattattttccccagaatctcattaaccagcttatcaaaaagaacatcatcaacgaactgctgacttcaggtgacacagagaagaatattccta

SEQ ID NO: 1222 - DNA, 271 bp, Cricetulus griseus
gtggagactatgcagaccgtctgtgttgctctgagcttacagggtgggaaagtagtgacatttagctcttttcctgctgcagtccaagccagggggaaatgctgatggtgagctaggaacagtttgaatgtggcacaggggcaggctatccatcctaagacccagctagatcctgaccattgctgctggcactgcttcctcttctcccacctcttcctctttctcctcttttttttaaaggaaggaacaatagctaggtaagatttttttt

SEQ ID NO: 1223 - DNA, 579 bp, Cricetulus griseus
tgagagcaacgcccgttattttcatgtggtcattgctggcccccaggattccccctttgagggagggacttttaaacttgaactattccttccagaagaatacccaatggcagcacctaaagtacgtttcatgaccaaaatttatcatcctaatgtagacaagttgggaagaatatgtttagatattttgaaagataagtggtccccagcactgcagattcgcacagttctgctatcaatccaagctttgttaagtgctcctaatccagatgatccgttagcaaatgatgtagccgagcagtggaagaccaatgaagcccaagccatagaaacagcgagagcatggactatgctatatgccatgaataatatttaagtcgatcagatcatcaagtgtacatcacttctcctgttctgccaagactcttcctttttttgtttgcatttaatggacacagtcttagaaacattacagaataaaagcccagacatcttcatctttggtgattacatgcacattagcaaatctatgtcttgtcctgattcactgttgtaaagcatgagcagaggctagaagta

SEQ ID NO: 1224 - DNA, 187 bp, Cricetulus griseus
gtgcagaggaggctgagggattcgagcccgtggtgagaggtttccgtacagtgtcttcgctttattcttctcctctgttttgaggtatgcgtccacccatgcccttgggcgtgatgtggcggatctgcccccgctgagggaccggggggcgcggcctcttgaaccgtcctttcagtgaccccaccgg

SEQ ID NO: 1225 - DNA, 580 bp, Cricetulus griseus
  misc_feature (578)..(578): n is a, c, g, or t
gcattcaagacccaggctaaggaacctggaacatacacgctgcgacagctacgggtcacactgggcccggtgtggtttgtccttgcacacatccaccccattgtacagtacgatgtgtactctcaggaacctcagctgcacgtggagccgctggctgatagccttttggctggcattcctcagaaagtcaagtttactgtcactactgggcattatacagtaaagaacggagacagcctccagctcagcaatgttgaagccatgctcatcttgtgtcaggcagagaacagggccgtggtctactctaactcaagagaagagtgttccactgcctcgctccggatccagtcctccgacaaggtcacgagtatcagtcttccctctgcacctgcataccatgtgatcgagtttgagctggaggttctgtctttaccttcagctccagcagttggtgaggatagcagtattctggggacaccagagccctacaggaagcagaaagacatgcagcaaactgactattgcatggtcaccacagatcacaaagtgtccattgattgcccgtggtctatctactnca

SEQ ID NO: 1226 - DNA, 457 bp, Cricetulus griseus
  misc_feature (71)..(86): n is a, c, g, or t
caactgtcctgtctgatcagcctggcctgcttggtcccaaggcactttttgttttcatggcattatctttnnnnnnnnnnnnnnnnatctggctacttcgtcatgcagataacatgccaaagaagagtgcagatgactttatagataagcatattgctgagctgatcttttacatggaagagcttacagcacacgtcaggaagtatgggcctgtaatgcagaggtactacgtgcagtacctctctggctttgacgctgtggtcctcaatgagctcgtgcagaatctatctgtttgccctgaatatgaatcaatcatcatgtcatcttttgttaacactatgacttccctaagtgtaaatcaagtcgaatatggggaagtatttgatttcacatggatgacattagattggtttatattacaggcatacactagtggctccaaagctttacttatcct

SEQ ID NO: 1227 - DNA, 580 bp, Cricetulus griseus
aactccccagcggcactggcaggcctgagacctcacagcgattacatcattggagccgacactgtcatgaatgagtctgaagacctgtttagccttatcgagacacacgaagcaaagcccctgaagctctacgtatacaacaccgacactgacaactgtcgagaagtgatcattacaccaaactctgcgtggggtggagaaggcagccttggatgtggcattggctatggttatttgcaccgaatacctacacgcccgtttgaagaaggaaagaaaatttcccttccaggacaaatgactggtacacccattactccccttaaggatgggtttacggaggtccagctgtcctcagttagtcccccatctttgtcaccaccaggaactgcaggaattgagcagagtctgtctggactttctattagctcagctccaccagctgtcagcagtgttctcagtacaggtgtaccaactggaccattgttgacacaagttaaccagtcccttgcttttgtgccaccagtgaccccagctactacattatcaagtctgatgcctttgccatcaaggatgcctaacc

SEQ ID NO: 1228 - DNA, 580 bp, Cricetulus griseus
ttctgtgctaagtggggttgcgaaactaccggggatgcttattggaaacccagctcctcctgggatctgataactgtcaagcggaactactcgcaacccctccaatgtagtccccatagttttggggactgggagcaaacttgcaaaggaactctttgcctccctttaagaattaacttcactaaccgagggaaggcaacctatacggcctggctaaccgggaaaacttggggtttaagatggcacatgacaggaacagatagaggagtcatattcaaggtccggttgctgatacagagccctactccacggacgatagggcctaatccagtccttagaaacctaggaaccccaaagctcccccaacctagagctctggctcgggccattaccccggttccaaccgccaccagccattccctcgccactgcctcccaagtagaaaatattccatctactagacagcgaatttttaatctggtcaggggagccttctctgcccttaaccaaaccaggccagagatgactaacccttgctggctatgccttgcttctacacccccctactatgaaagcatag

SEQ ID NO: 1229 - DNA, 579 bp, Cricetulus griseus
ctttgtgattagatataccatagtgactgacattctaaaacatttgtcatgttctagctggcctgtgagagtttgcagagcctgagcacacccctgctttccttggagaatgcatgaggactgtggtgcctgtcattttactgtgtgacttttctcagacaagaaatagggccctgaaagattggtcaactttgtggctcacaggcaatggtggtccttattctttactggcaggtatgagagctgggcctcttaagtgtgctaaaaagggatatgttcttgatagacctgatttgtcttggatttgaacttttgctgtctttttttgtttataaattccaatgttttcttgccttggtaatacatgagcttaagacatgtagtccaatatcagaagtacaggtgttgttagcataatttatccatacctgaatggttctacatctagtcctttttgccaaaaaagaatgtatcatttaaattcatggggttagcatatctccagtgccgatgaacatttgaacatgtgcacagtaacacttggtttgttctgtgttaatttagcatacatttttgtgc

SEQ ID NO: 1230 - DNA, 579 bp, Cricetulus griseus
agcgtctccagcagcagcaggacagcctgtgggctgagagactccagggtctcacacagcagcatcagactgcagtggagcagctgagaaagaagtatgaacaagataaagacgccttactaaaggagaaggagagtcttttccaggcccacatacgagacatgaatgaaaagaccttggagaagttggacgtgaagcagacagagctggaatcactatcttcggagctggcagaagcactgaaagcccgtgagcagctcgctgaggagctttctgttttgaggggtgatgcagagaaaatgaagcaggctttagaggccgagctggaggagcagaggcggcaccaccagcacgaggtcgacagcatgagtaaggaacaagaaataactgtccagagaaccgagaagaccctgaaagatgaactcaaccagctggggcttctcctgaaggagagagacgaacacctgatagagcagcaggctcgaatagacgatcttgaagctcatcttcacaagtctgctgaggagctgcagcaggccttggctaagctggacctcctacactcacatcagagcacca

SEQ ID NO: 1231 - DNA, 568 bp, Cricetulus griseus
  misc_feature (373)..(373): n is a, c, g, or t
aaactggagctcacacagctaatcctggctcctggctctatgaccttaaacttgttgacttctgctcttgaagggcaggaaggttgattttcaggaatcaagattggcagccagtggagagacacatgaaatatcaccagagtctacaaagcctcacccctttggattgctgacaaaggtttcttgtgctgacagagtacagtggaatgtttcccttgaaaagttgcactgtaaggagatggctcctaccaaagaaaagtcattttcaggattattttttaaaggtagaatacttgaagcatatttttctagagtgtgtagatggtgatggcccagctgagacatccacaccaagggctgggctggcatgtanaaagcacaagaagccacaagtagcacttctgtagactattctgcgcttgctctcctgctcagcttttggctgaaggttcgtttcttaaggggaacctgcttgtcatacatgttaatagtttgctttcctgctatggattatagaagccacttctggaccaaacaactaactatatgtgcaaacatgttttaccct

SEQ ID NO: 1232 - DNA, 579 bp, Cricetulus griseus
  misc_feature (160)..(182): n is a, c, g, or t
  misc_feature (249)..(269): n is a, c, g, or t
cttccccatgcgtcactcctgatactggttttgccttccctaccccacctctgcctggggctgcttgctggcattctaaatgcttgttcaagggcttaatttaagggtcacctatcaattctttcaattcttttttttaatttttaaatttttctttggnnnnnnnnnnnnnnnnnnnnnnnagacaaggtctcactctgtagaccagactggcctcaaattcacagagatctgcctgcctctgactcnnnnnnnnnnnnnnnnnnnnngtgcattgcatcactactatgcctggcatctatctgccaatctgatttttaactttcatcagctgggctctttccccgagtgtctaccaaatgactgctatgtgacttctctgatcttgaggaacttggaatgaagtatagcaaaatatcacaaattctaacagcaggcagtgagacacgtgctatgtcggtagggcacgtaatgctgtcttgtgtgagatacacgggataatcacagggttctccttcatcacaagcacacagtggtagctgggcctgttagacccttgctataaggcagacgagtcaa

SEQ ID NO: 1233 - DNA, 579 bp, Cricetulus griseus
  misc_feature (320)..(335): n is a, c, g, or t
  misc_feature (425)..(458): n is a, c, g, or t
aggagtcttaccctaatgtaagatggtggcccgtctagctgtggaacccaccgaaagctgagagtctctctcagccgtaaaggtcggactcgctgaagcagtcaggcccgcttctgaagagttatttcgccggctctcgttcattggtctcctgtgaggacgcggcagcgcgtggagtcggcgaagggaaaagcgaggcaaggcaggcgggtcttcagagttctacattttagctctcagtgctgaatttccttctcccttaaattattataaacctttgctgctgtataacaagcgtgaagatgtctcgcagtcctgannnnnnnnnnnnnnnngtggaatgccctctttgcatggagcccttggagatagacgatattaactttttcccttgcacctgtggctaccagatatgccgattttgnnnnnnnnnnnnnnnnnnnnnnnnnnnnnnnnnntgtcctgcctgtagaaagccatatccagaagacccagcagtttataaaccactttcccaggaagaattgcaaaggataaaaaatgagaaaaaacagatacaaaatgagagataacagaaaa

SEQ ID NO: 1234 - DNA, 581 bp, Cricetulus griseus
  misc_feature (535)..(535): n is a, c, g, or t
gaaaggaggagaggggacagagacctagaccctgagaaaagcagttacttgaactattgtgatacaggccacatctttggggactgtcttatgaggccatcaagtgcattttaagtgtgtttctagggatggtagtgggtggagaagagagtaagtaccttacagcctaccaagcctgtagagtaggggagcgaccatgtatgcttaaaccactaggggccaggcagcatctgagtgatgaacacctttgtcatttaagatggggagagcatgtagaggaagaaggaaggtgcctagaggagggtagtaagagggagaataaattgcttttcaccccaccatctattcagatctggagtggcatagattcagatggtatcagatgttggcatggtactgttttcttgttctatgttgaattgtgaagcactttgtcagaagggggaaggactttgtgttatcaatatatagttatttggttgtgtgtttctcttaatatgtccaaattactcactctggtgtcttttaacactanggattcatgttgggacagcgtagaagaaatatatgttcaggcaggt

SEQ ID NO: 1235 - DNA, 567 bp, Cricetulus griseus
agaactcagtaatggaaatttggaggttggagttcatattgctgacgttagtcattttatcaggccaggaaatgcgttggatcaagagtcagccagaagaggaacaactgtttatctttgtgaaaagaggattgacatggttccagagttgcttagctctaacttatgctccttacgatccaatgtggacaggttggcattttcctgtatttgggaaatgaatcataatgctgaaatcttaaaaacaagatttaccaaaagtgtaattaattcaaaggcttctcttacgtatgctgaagcacagatgagaattgattcagcagccatgaatgatgatattaccactagtctccgtggactaaataaactggccaaaattctaaaaaagggaaggattgaaaagggggctttgactctgtcttctccagaagttcgattccacatggacagtgaaactcatgatccaatatatctgcagaccaaggagctgagagaaacaaattccatggtggaagaatctatgttacttgcaaatatttctgttgcaaaaaaaattcatgaagaaat

SEQ ID NO: 1236 - DNA, 567 bp, Cricetulus griseus
tgttgaaaacatcccactccacgtgaatgcagacttgccgtcgtttggacgtgtcagagagtcattacctgtcaggtaccacttacagaataagacagacttggttcaagatgtggaaatttctgtggagcccagtgatgccttcatgttctcaggtctcaaacagattcgattacgcattctgcctggcaccaaacaggaaatgctgtataatttttatcctctgatggcggggtatcagcagctaccatcgctcaacatcaacttgcttggatttcccagcttcaccaaccagctactcatgcgctttttaccaaccagcatctttgtgaagccacagggtcgactcctggatgatgcatttattgctgctgcatgatgtccaagaccagcccttggtgttcttacaaaggagtcgagagagtacctaagagacccactgggacttgttgctttgatcatggggaaaaggtaatcctgcctattttttaatgggtatgataccagctatttttagaaactcctgctctaaatttttacacaatcaactttctcccatagtttggc

SEQ ID NO: 1237 - DNA, 578 bp, Cricetulus griseus
actgttaggatatttgttcggcagcaatagggcggcgacccccttctcagactcatggtactacccatcttaccctccatcctaccctggcacctggaatagtcgtgcctactcaccactgggtggaggtgcagggagctattctgcatcctccagcttgaatgcagactcaagaaccagaacagcatcaggatatggtggcaccagaagacggtaaaatagaaagttggaggcaaacattggatgcaaagtttctgacttgttatcaccatctctttaacatctggataatgggaatatccaaaagttgtgtgatgctttgtccttgtatagcttttcatgtcctgttgtttgtggtcaagagttgatatgtgacaaaatacttacattttgtatgttagtgtaacgtgcagttcaaagtgatggctactgtgggatgctgaaattactctgcttgtttctaaagcctgtgatgccagagggagcattaagaatgtaggatccctctcccagagactgagcacaggcagcttgagccgaggctcattccctcatagaaacagtaatcctctatttgg

SEQ ID NO: 1238 - DNA, 580 bp, Cricetulus griseus
tggccacgctgcgccggcttttcgccgctccgcggcacttaatggtctgtgagaaatccaacttcggccacgaaaagtctcgtcacaaacaacacgtggagactcattatcacaattacagggtttcatttcttattcctgaatgtgggctgctaccaaaagaactgaaaagcctggccatggaatttgggccctattactctgtgaagaatttacctcttcatgaactagttacacatgagttcatccacacatttgtaaagaaaggttcattctctgcactaacatacaatacaaatattgatgaagataatactgctgcccttctaccaaatgggaagttaattttatcactaaacaaagatacttatgaagaaactggacttcaaggtcatccatctcggtattctggcagaaaacctatgaagtttattatttccattgatttaatggacgttaacctggattctaagaagtatgaaagaataacttggtccttcaaagaaaagaaacctttgaagtttgattttcttttggcttggtatcagacaggtacagaagaatcaacaataatgtcata

SEQ ID NO: 1239 - DNA, 579 bp, Cricetulus griseus
ttgtcttgggcagaacatttctggacatatcccctgaagtgtgtcatattggcattcagattccctctgctttattcagcacagacataaaggccaatttcagtgtgatgcctcatcttgtagttgctgtgatttgtggcctatttcttaagcagggagttattaccatacctggccagtactgatgctagcagaaggaactgctgcagcaggtggcccattacctttataggtaatgataagctatacatggttaagggggggggggatctccaggttctgtaaggtgctgtcaccaaggacttgcacactcagccagcagtgtgaatcaacactgggtagaaaactcaacagatgtccttctgcacttcttcagggtgggaagctgccctctggctgttgtctttgccccatgcctgtaccttctcaatctgccattttttttcagcaccacactccctatctttctccggtcaccattgctctgtttccagaaaggtatacagaatctgtgacatttaggcataggcctgtaaggcacatatattattaaggggagagttcaggaaacattatgag

SEQ ID NO: 1240 - DNA, 187 bp, Cricetulus griseus
  misc_feature (3)..(3): n is a, c, g, or t
  misc_feature (10)..(10): n is a, c, g, or t
ggngataagnaactaactactcttccatctaagagatgcttagcacagattttcctaagaaaaatgggattttttttcctagtaagttatttgattagttactgtaaagaaatatagggaactgtgcttccttggattagacattgaaatggaaaatactgtgggaattttgatattcttgaaaaaa

SEQ ID NO: 1241 - DNA, 579 bp, Cricetulus griseus
tgcatccgttgtctgaagttcaaattctttttgtgatcaatactagtggccactatactatttgtttgcctaagtatttgtgtgctaacaaactggcatgctgtattgtgtattttatagtatattttaatggagcagaaaattatgactcagtatgcacttttgagctgtctcaaagaatatctgaacatatccactagtctgaattttgactttttcctttgattagtgataatagaatcacatttatagaaataaagtactctatattatggaatagtgtaaatgtaaggattttaccttttaacatcatatagtgtcctttatatggcttcaaaaatcctctgtgctcagggatgatacacctagagataatattctattggtattctaaaattggtgttctcagtgttaagaatcaaacatgtattatggcctaaactatcagatatactgttaagagctcaaaggctagatctagttacatagtcttgatccttcccagaacaagttttatcatagagataatttgaaaatcatgcacaagcaggaagtccaataattctactccacgggacc

SEQ ID NO: 1242 - DNA, 578 bp, Cricetulus griseus
gctcctttatattggcgaataaaagcacaaacataagagtgatacagcggaaaggacctgggtgtggttagttacactgctctgggtccatcctagttcctccatatactcattgaatcatcttagactatttgcctctctgaacattaattcatttatttgtaatatggagataactattttcaaattttattgtggcaaatagaagtgatgttttttttagtatttattgaaatgttttacataagcaggtattcagtaaatttcttttgagtgtcagacaagcagctcattgtctccaggaccctttgttttagaaagactgtacaatccatttcttagaaactcacttactctcctattacccaagaacaagtgcttgggggaaaggtccttatttgaacttgagccatggctgaattgaacctttctgcacttaagcttctctggcctttcacagtccagccttccaattccacttaccattgtgttctgagcctttaaaacagtacataatccgggcattggtggcgcacgcctttaatcccatcgctctggaggcatacgcggatggatct

SEQ ID NO: 1243 - DNA, 578 bp, Cricetulus griseus
  misc_feature (480)..(496): n is a, c, g, or t
ctcggtgcgtgaagctggcgcggcgcattctcccggcgttggcgctgtcgttcaggccttctcctcgcttggtgagcacagctaccaaacagaagaatggccagaacctggaagaggacttgggtcattgtgagccaaagacagagccaccctctgcaaacaagaccctcctggaagaaaaggtgaagctggaatatcagctgaaggagaccatggaaaaatacaaacgagctttggcagatactgagaatctacggcagaaaagccataatctggtggaggaagccaatttgtatggcatccacggtttctgcaatgacttgctggaggttgcagacatcctggataaggcaacccagattgtgccaaaggaggagatcagtaactacaaccctcacttgaagagcctatatgaagggcttgtgatgactgaagtccagattcagaaggtgttcacaaaacatggcttgctcatgctcnnnnnnnnnnnnnnnnngtgtgacccttacgaacatgaagccttgttccacacccctgtggaaaggaaagagccgggcactgtggcactagttagcata

SEQ ID NO: 1244 - DNA, 123 bp, Cricetulus griseus
attgtgttcaagggcaccactagtttttctgccattttagaagggagggagaactggctcactaaaaaaggctcaatatgatttcagttacaaaaagttcttaacctgtatttttttttgggg

SEQ ID NO: 1245 - DNA, 567 bp, Cricetulus griseus
attgaggaggcccagaaggaggccaaggaagttcctgtgcagttcttcgacagagatgatgatgatgaagatgggcctgatactgatttcctcacagtgaagcggcgtgatgtgtttgggttggatcttaaagagaatgaagcattatcgaaaaaggaaccttctaaatccagtgtcaagaaaaaattaacaaaagttgcagaagcgaaaaaaatagtgaagagaaattttaaagtgaataagaaaataacatttactgatgaaggggagctggttcagcagtggccacagattcagaaatctgctacgaacgatgtggaggaagaagatgacactggtggtatcaacttatacaaggcaaaggaaaggcttcaggaagaggacaagttcgacaaagaagagtataggaagaaaattaaggcaaagcatcgggaaagacgtctaaaagaaaaagaagccagaagagaagacaacaaaagacatacaaaggccagagatgaagaggaagcctttctggactggagtgatgaagaagatggtggatttgatccaagcacacttccagat

SEQ ID NO: 1246 - DNA, 580 bp, Cricetulus griseus
  misc_feature (570)..(570): n is a, c, g, or t
agacctgccgcatgttttccctgcctaccatccgggggcactagttgctaggagaattgacacactgagacatgaatgctgctaacacatttctggctgatctgcgcaacgctgacatctatgtgtcggatgctgaggaggaggatgagacttctctggaaagtgacctggattcagaagagctggcaggagtcaggacacattccagtcagaaggacaggaagtgcttgcagtctgctcaagtggatgacactaaagaggaagaaggagagaatccattgctggtaccactagaagaaaaggcagtgctgcaggaagagcaagctaacctgtggttctccaaggacggcttcagtgggattgaggatgatgctgatgaggccctggagatcagtcaggcaaagctgctgctcaagagtcgtcagaaggagccatctacaccacctagtagtctgaagactgaacagaaacaccccccgtgccagaatgaggtccctaaggagacagaggctgtctcatggacagaagctgtcattgaccctatgggggaggacaaagtcaacagctcanacagtgacag

SEQ ID NO: 1247 - DNA, 578 bp, Cricetulus griseus
  misc_feature (30)..(48): n is a, c, g, or t
atggctgttttgtttgtttgttgtttgttnnnnnnnnnnnnnnnnnnnaggtaacattagagaggattttgaggagaagacagatttaggaaagtagttgaaaactttggaatattttttctgactctagctgccaaatggccatcatatgcttttaatctttgttgccatatctgtctagatttgaattaagctactggtttattcccacagtttgatgcctctagatgttttggaaaccaaccccccctttgttgtcgttggcccagaggggccacttgaaaaatctgacttgagaggcagagagcataaataacattttgtggggagaaaattagttggctgcttgatgttaattatggcacagtaacattggaaaaggttgtgtctgtgtttttaagtttttctttattctgcttttttgctgctataagagttttctgaaatttatattttaaacttttcatgcactttactgtttctagtatcaaaatgtgatatttttaataaacaagaaattttccattatgtgaatgaaattttaaaagaaaatagcctatattttgtggctcactaat

SEQ ID NO: 1248 - DNA, 579 bp, Cricetulus griseus
cacgcaccgtgctgtgtgggacttgtgggcagcctgccgacaaggctgccagtggctcaagagcccaggtgggcggatccatctcctctggctcttctgcctccagtgtcacagtcactcgaagctaccgcagtgtggggggcagtgggggtggcagcttcggggacagcctagtcacccgctcctacctcctgggcaactccagtccccggacccagagctcccagaactgcagcatcatgtaatctgggacctgccaagcaggggtggggccagaggccacctgctcccacctcacctcatgcccacctcctgctctgcacctaatgggagcaggcctgaagccaaagaaaaaatttatttcctgcctttgggttttttttcttcttcttctatttttttttctaagagaagttattttctacagtggttttatactgaaggaaaaacacaagcaaaaaaaaaagtctctatctaaatcctaagcccttcccatactttccctgtttctgccttaaaatcaatgggcttctttctccaaggagcccagggaaaggactgcttttataacggctagtt

SEQ ID NO: 1249 - DNA, 578 bp, Cricetulus griseus
  misc_feature (296)..(327): n is a, c, g, or t
  misc_feature (432)..(451): n is a, c, g, or t
  misc_feature (456)..(456): n is a, c, g, or t
atttcttctttgtcaaaagtggcccctgtggccccttgtgaaaatgagtttgcagaggacagtgctaagactgctgtccctgtgccagagagggaagagcctccccaggctgctcccatgctgtgagcgaggaaccctcagcaaagactgaagattgcctgcccacagcagaacccagcagtgctgcggcagcccaggagcctgatgaaagttctgccagacaggctgagcctgcgcccaggacagaggaggtgcgggcacctgtgcttcagatggacagcagcgtctttctagannnnnnnnnnnnnnnnnnnnnnnnnnnnnnnngcttcttcgggaatgttgagcttatgcaggatctgccaccagcctcttcatcttgtccttccatgagcaggcgagaattccgaaaaatgcatttcagggccaaannnnnnnnnnnnnnnnnnnncgcanagatgtagagtggtgtcttcactgcttagtagttcactcaaacggcacagcaagtgttaagatttctgtatacatctccaagagaacatgtttgtaactgaacacaactgacatgaacgtca

SEQ ID NO: 1250 - DNA, 579 bp, Cricetulus griseus
  misc_feature (479)..(497): n is a, c, g, or t
tgccagggtcatggagaacgcatcagtcctaaagacagatgtaaaagttgcaatggaagaaagatagttcgagagaagaagattttagaagttcatattgataaaggcatgaaagatggtcagaagataacattccatggtgaaggagaccaagaaccaggactggaaccaggagatattatcattgtgttagaccagaaggaccatgctgtttttacacgacgaggagaagatcttttcatgtgtatggacatacagctggttgaagcattgtgcggcttccaaaagccaatatccactcttgacaaccgaaccatagtcatcacttctcatccaggtcagattgtcaagcatggagatataaaatgtgtgctaaatgaaggtatgccaatatatcgtcggccatatgaaaagggacgtcttatcattgagtttaaggtaaactttcctgaaaatggctttctctctcctgataagcnnnnnnnnnnnnnnnnnnnccttcctgaaaggaaggaagtggaagagactgatgaaatggatcaggtagaactggtggactttgatccaaatcaggaaaga

SEQ ID NO: 1251 - DNA, 580 bp, Cricetulus griseus
tgattgacaagtaccgggctttgatggatggcctttctcttgattctctgatgaactttgtcaaggattttaaatcccagctctttgttgagggcctggtacaagggaatgtcaccagcacggagtctatggatttcctgaagtatgttgttgacaagctgaacttcacgcccctggagcaggagatgcctgtgcagttccaggtggtgcagctgccaagtggccaccacttatgcaaagtcagagccctgaataaaggtgatgccaactctgaagtcactgtgtactaccagtcaggtaccaggagtctaaaagaatacactcttatggagctgcttgtgatgcacatggaagagccctgctttgatttccttcgaaccaagcagacccttgggtaccatgtctacccgacctgtaggaacacatctgggattctaggattctctgtaactgttgggagtcaggcaaccaaatacaactctgaaactgttgacaagaagatagaagagtttctctccagctttgaggagaagattgagaacctcactgaagaagcattcaatactcaggtcacagctct

SEQ ID NO: 1252 - DNA, 418 bp, Cricetulus griseus
gaaagtgctcataaggtaaaaacaaaatgcatgcatctctggcctgccaaaggcagtacttctaaagaagctattcgagaaaagtgtggctctaacttggtgtttggtgcaggaaatgttggccatcatacccagaacagcagcactggtacagtccctctgtgatgagtctcatgtggtccaagctggcattcaacatacgaagttgctgaggatggccttgagttctgatccttctgtgtgtacctcccaagtgttaggatgacagacacccaccatcatacccagcttctgtggtgctgacgatcagactcaggacttcatgcatgctatgatcgtgctctgccaactgagtgacatctttagttcaccgttgacatctttagcatgcaaaacacatcaatatatgccaaataaa

SEQ ID NO: 1253 - DNA, 578 bp, Cricetulus griseus
tcagaataactttttgtacaaattaccattttttttaaatctaggtatattcagcatgcagctttactttttccaagatcccttcaccatacaccttatcaaaacgggtaagaaagtctttgggttgtaatctgtctcaatgttctttttagccttttggaaatccatttcctttcacactctcgttaaaacactttctgggattttacagaaatcaagggaaacaagtgtttgctattttggttagaataaaagatcatcagtggaaatagaaaacaagtaatcctagagaaaggattagtataaccttgcttgttaaaagtccacttgcatgaactcagagaatttgaaaatagcttgcattgtgggtaaaataaaagtgcagaagtttctagggagaattcctggtgggagaacaatttaataattgagtgagaggtggagtatagtaaagcagcctggttggatgaagacttatatggtcagtgacaaagattgaagaaacacactcaaaccatggtggaatcagaatgtgaaattttgttaagacaaactctattttgtagattaatggaaag

SEQ ID NO: 1254 - DNA, 194 bp, Cricetulus griseus
cctcgccttttttttttcccggggaaagggaaactcttttgaaaaaaaacctttgttggtcaaacctaaccgggaatttaaccgggggtaagaaatggcccccagggccccgggggcccaaaaaccccggggggggtaaggggccccctttaaaggggggggccctttaaatggccccaaaggggaaatggttt

SEQ ID NO: 1255 - DNA, 389 bp, Cricetulus griseus
actgctgaactttgtactcctgtgaaaagtcaatctgatgaactttctaccaccagcaaagagatgattccatctaaaacttcagatccttccatcgatggcatggaaagcccaggagatttaaataaagttgtggtgcatggaccaaacactggacagcccagaagtttctctccaggtgattttagaactgatccgaacattgttcaccaaaccaagcaattagagagctgcaacggtgaaaagcctccttgtctggaaattctaacaaatgggtttgcaggtttacaaactgtaaatgctcatggatcatatgacctggacaatcatgactgattcaaatggattgaagcctcttatcacttgtggcactgaatgtggtttagatt

SEQ ID NO: 1256 - DNA, 569 bp, Cricetulus griseus
  misc_feature (464)..(484): n is a, c, g, or t
tgacagcaggaggcctaaaatgctcactagctggctttcttaaaaatttaattcccagcaagggtgcagcctccctctgcccatatttgactttaaatgaatgaactaggccgccctaagcactcgtgtaaaactgtcatccacccaggaggacggctgccctgctggaggcatttatctataatcctagcacttggacgacagaggcagaaacatcagactgggctacacagaaaaccctctttacaaaacaaaacacctgcatttgtcttggtacccatctgcccagggttgcatctctttttgggccaaccttggggagatgcccactagggctggctgaccaggcaggctttctcctaccaccttgacactctggcccagggatgggtataaagtagcgcatagtgagttccacctgagagtccacgggaaccctaccagcagccctgtcacacctaccnnnnnnnnnnnnnnnnnnnnnctgggcccacggttgagctgttcctgcaggctatacaccactgcattgttgccaggtacccggtatatgccaagggattctattc

SEQ ID NO: 1257 - DNA, 569 bp, Cricetulus griseus
tggctccatctgcatcacttaggaagtgatggcctgcggacggccccagggcacggccgtctacaaggtggctgagtatgcccggcgctttggggtgccggtaatagctgatggtggcatccaaaccgtgggccacgtggtcaaggccctggcacttggagcctccacagtgatgatgggctccctgctggctgccaccacggaggcccctggcgaatacttcttctcagatggggtgaggcttaagaagtaccggggcatgggctctctggacgccatggagaagagcagcagcagccagaaacgatacttcagtgagggggataaggtgaagattgcacagggtgtttcgggctccatccaagataaaggctccattcagaagtttgtgccctacctcatagcggggatccatcatggctgccaagatattggggcccagatcctgtctgtcctgcgatccatgatgtactcacgagagctcaagtttgagaagcggaccatgtcagcccagatagaaagcggcgtgcactgcttacactcttacgataagccgctgtactgaagac

SEQ ID NO: 1258 - DNA, 578 bp, Cricetulus griseus
  misc_feature (249)..(263): n is a, c, g, or t
agacaagtgtgctgatcatttccaattaaaataattttgacacagttgatttacaaaggccattgggaaaattcagagaggtggaaggaaaaacttagctttaaaacctgtgtgccattgtgagttacttgatcccgtaactcttgacgccttctctttataaatccaagcttggataccagtcctgggaacttctctgctaaagagtccctgactattcacataaaggccataattttcataccattnnnnnnnnnnnnnnntttttgatgagtttattttactgtttttgttgttgttgttgtttgtttaattcctggtgctctattgtcacctcctctgaccttttaatgtgtctgttgcagtttggggttaagactttttatcattactttttcatttacttggctgtacatttgcttttttcacaaacacctaagctgccctgctgcttgcaaggctacagggcctgggcaggctcccctcagcagcgattcaaccactgtgcgccttccctaccgtgcttgctctgtctcacactagtcacaatcttgttttaagtgccttttaattttgac

SEQ ID NO: 1259 - DNA, 361 bp, Cricetulus griseus
cagtggaggctctttgctgatgtcctcaacgatatagccatgttcttggagattatggctcccatgtaccccatctttttcaccatgactgtcagtatcagcaacctagccaagtgcattgtgggtgtggctggtggggccactcgagcggcactgaccatgcaccaggcccgaagaaacaacatggctgatgtatcatccaaggacagcagccaggagacagtggtgaacctagcaggactcctggtcatccttttgatgcttcctctggtatcagattgcccaagcctcagccttggatgcttcatcctcctgaccgctctccacatctatgccaactaccgggcagtccgagcccttg

SEQ ID NO: 1260 - DNA, 568 bp, Cricetulus griseus
  misc_feature (192)..(208): n is a, c, g, or t
  misc_feature (448)..(448): n is a, c, g, or t
cttccaaagcctccaagtcactggatgggaagcactgctgaaaatcccagccatagcagggagctgatggcagtgcacttgaaaacactcctcaaagttcagacttagattttagttttcaatgtgtatgttaaatatagattttccccaactccttggactctaaaaggaaatggatacaacagtggaaannnnnnnnnnnnnnnnntatgacaggagattaagtcacatacaagcagcttgtattatattttatattttgtaaatactgtataccatgtattatgtgtatattgttcatacatgagaggtacattatagttttgttatgaaagtatgtattttgccctgcagatgtggtgggtgttttgtatatatatagtggagctattttaagtgggtgcttaaagcacatggaagactgtttgcacaggtactgaattttttntaaggacagctgtcaaatctcaagttcaaaatctcaatgtgaaacagcctacttatatactactgaaggttaaatttggcacaatcactgtaaacatggaacttggctgtgtgtctctaa

SEQ ID NO: 1261 - DNA, 578 bp, Cricetulus griseus
  misc_feature (468)..(485): n is a, c, g, or t
gtagctggtactggggccgcttgagccggcaggaggcggtggcgctattgcagggccagcggcacggggtgttcctggtgcgggactcgagcaccagccccggggactatgtgctcagcgtttcggaaaactcgcgtgtctcccactacatcatcaacagcagcggcccgcgccctccagtgcctccgtcgcccgctcatcctccgccgggagtgagtccctcccggctccgaataggagatcaagaatttgattcattgcctgctttactggaattctacaaaatacactatttggacactacaacattgatagaaccagtttccagatccaggcagggtagtggagtgattctcaggcaggaggaggcagagtatgtgcgagccctttttgactttaatgggaatgatgaagaagatcttccctttaagaaaggagacatcctgagaatccgggataagcctgaannnnnnnnnnnnnnnnnntaggacagcgaatgaaagagggggatgattccagtcccttacgtggagaagtatagacctgcctccgcctcagtatcggctctgattggaggt

SEQ ID NO: 1262 - DNA, 580 bp, Cricetulus griseus
gggggggatctaataaaatcagaactacaacatttataagggggatatcctttcctaaaggggtaagaataattagaaacaaacatttttaagtcttaaataagggtatacttaaatccttggtttaaacttactttggatgctatcttcaacagacaatactgtactacattcaaaacaagctgttaaaattaactgggatagctgttctgctcaatgcagtctcactagcagccctggctggcctccaactcccatggctccccctctgcctcatgaatgctagggttatagtcaggtgccgccatcctcagttaacaccactttataacaagatgggcacagtaactttactattttagataactataaaatatttctacctgaatcagtaaaatattttacatgtattatattttttaaagatacactcatgtttttaaaaaatacattcattacagatagtgccaaagcgctttttgttctgttttgtactattcggtaattaattaagtatgtccgaaaatgtgggcgcacacacacgtgatgggagtttgggtgcacacatgctatggggtgc

SEQ ID NO: 1263 - DNA, 580 bp, Cricetulus griseus; identical to SEQ ID NO: 1262

SEQ ID NO: 1264 - DNA, 579 bp, Cricetulus griseus
ttttcgccgccggccaagatgaaccgattcttcgggaaagcaaagcccaaggctccgccgcctagcttgactgactgcattgggacggtggatagcagggcagaatccattgacaaaaaaatttcccggttggatgctgagctggtgaaatataaggaccaaatcaagaagatgagagagggccctgccaagaatatggtcaaacagaaagccctgagggttttaaagcaaaagcggatgtatgagcagcagcgagacaaccttgcccagcagtcctttaacatggagcaggctaattacaccattcagtcactgaaggacaccaagaccacggttgatgccatgaaattgggagtaaaggaaatgaagaaggcatacaaacaagtaaaagttgaccagattgaggatttacaagaccagctggaagatatgatggaagatgcaaatgaaatccaggaagcactgggtcgcagctacggcaccccagagttagatgaggatgacctggaagcatagttggatgcgttgggcgatgagcttctggctgatgaagatagttcttacttagacgaagcagca

SEQ ID NO: 1265 - DNA, 578 bp, Cricetulus griseus
ggattgcaaaagagtggtttccttcgccggtggtgtctcgttctccatcgctgacttcagagaccctttaaggagttggctggaggtcaccgcccttatcagagggggacgcctggtcacagaggctcagggatccacgcagtgtcctctccagccctccgcggtggcagacacccagcgctcctggaattgcatttcaggcgaccttgaactcaagagtgacgcctgggtatttaagttcctgcctgcaggaactttgtgggaatttcagtatatggaaattctgtgttgcagctgatgtgaatccagaggtctcagtatagtactgggaccaaactactgtgtcagccagctgaggactccagaatcccatgggtttctaaattacatttgcccaggagcaccatggcccatgctgtctttattcctgggttgtctcggggtactgctttgtggagattgacagccagcactttgcgtcacctcactctaaccagaaacacctcctagctcgtcagagcagcactgacagctgagacaggaaggtggacaagctccctgcccttcccctgcagact

SEQ ID NO: 1266 - DNA, 579 bp, Cricetulus griseus
gagcaggacatatatgggaaggaaatggagggcatttccttgcatgtccccttaaataaactggagtacaggagcactgtgaaacacagaacagagcaccccacccaggccaacctgaccttctgtacataattacaacacaagggtgtccaggagagaaaaaaacagccttggcccccagaaagacagtggggtgacaggcagggccccaagacaagaaaaggaacctagctccaccatctaagggaagcccactggagtgtaagaatctgtaactgctaactgccattgccaagagtcaccctgtgacaaaaggcaaattaagacagcaccccagaaggaattcgtaggagtgacagagacccaagctgggcctaattggacaaaagagtctccagacttggtcactgctaccctaggaaatacagctgtcccatgcactgtggctgtcctggccatgtagggatcagcagctggcaaggagtcaggggaatcaagccactttcctcagaaaagggaagcctgccaagggagctgggaagaatacccctgccaggcctgctcctgactgagggaaaa

SEQ ID NO: 1267 - DNA, 487 bp, Cricetulus griseus
tggtgaagagcagaataaagaagcgctgcaggatgtggaagatgaaaatcagtgagacataataaagccaacaagagaacacatctctgaccaccctccctccccaccctcccctggaagtccccattgtcactgagaaccaccaaatttgactttcacgtttggtctcagaatttaagttcctgccctgttgtttttctttctttttctttttctctcccctcccccttttttaaaacaaacaaacagttttcagaagttcttaaaggcaagagtgaatttctgtggattttactggtcccagcttttaggttctttacaacactaacaggactgcatagaggctttttcagcattactgtattgtctccagccacatgtggcaagatcatcagtagaaatggaaatgacatttgaaagacattagacttctaggtgatgcatctaagaaagattaatcacatgatagaggcatatgtgctgtcat

SEQ ID NO: 1268 - DNA, 542 bp, Cricetulus griseus
ggatgagcctgccaaagcggctctaaagggtgactctcgccagcagaagcagaagcgcgagacccaagatgaggcagaactcctcactgtccctgatggctggaaggaaccagctttctccaaagaggacaatcccagagggctcttggaggaaagcagctttgcaaccttgttcccgaaatacagagaggcttacctgaaggagtgctggcctttggtgcagaaagctttgaacgaacatcatgttaaagcaacactggacttgattgagggtagcatgactgtgtgtacgacgaagaagacttttgacccttacatcatcattagggccagagacctaataaaactcttggcgaggagcgtttcatttgaacaggcagtacggatacttcaggatgatgttgcatgtgacatcattaaaatcggttccctagtgagaaataaagagagatttgttaaaagaagacagcggcttattggtcccaaaggatctacattgaaggcattggaactcctaacaaactgttacgtcatggttcagg

SEQ ID NO: 1269 - DNA, 544 bp, Cricetulus griseus
  misc_feature (325)..(343): n is a, c, g, or t
tttcaatatgttcaatatgacttttcaatatgtgctggcttgaagtacaagaaagtgttagtgttctcttatcttgtattaaagcactttattggtaatggggaccactcaaaacaacagatacagttccttcttggttgctggctgacttgacccaagtcactgctcaaactctgttttcataatatgatggttttggtgtacttggcacaagacacaagtgtatgacttgtgagaaaaacaacaaacaaacgttacccgtttgcaaacaaactgtctctttgcaattgtctaatatatgcacagcagccagtagaattccccnnnnnnnnnnnnnnnnnnngcagaccatcttgattcaaaacatctatcgtaatccccaaaacagtgcacagacggctgacggctcacactgtaagtcccacagttggagaaatttttttaaacgatggtgttcaagagcccactcttaattgagacataacgctggctctgagctgctgacatagagctgttgcaaacaggacacggtgctggaaccgcg

SEQ ID NO: 1270 - DNA, 557 bp, Cricetulus griseus
  misc_feature (266)..(291): n is a, c, g, or t
acagtccagaaaaggacagaaaaaaacccagaaaaacaagccacttcctaacatagagagtgggaatgaagatgatgactccttcaaaattaagacagtggcccagaagaaggcagaaaagagggaacgcgagaaaaaaaagagagatgaagaaaaagcaaaattgcggaaactgaaagaaaaagaagagctagaaaaaggtaaaaaggaccagagtaaacagaaagaacctcagaagaaatctgaagaggaaggtttgaaactcnnnnnnnnnnnnnnnnnnnnnnnnnnctctgaagagaaaggagacattcctacagctgtagaagtagatgacaatgaaggagacaaaaagaaaaaagataggaagaaaaagaaaacagaaaaagatgaaaaagagaaagagaaaaagaaaggccctagcaaatctactgttaaagctatccaagaagctttggctaagcttaaagaggaggaggagagacaaaagatggaagaggaagaacggattaaacgtcttgaagagctagaagccaaacgaaaagaagatgaacgat

SEQ ID NO: 1271 - DNA, 567 bp, Cricetulus griseus
tcacgggctacagtatccatggattacatcatcacgggctgcagtatccatggattacatcatcacgggttgcagtatccatggattacatcatcacgggctgcagtatctatggattacatcatcaccggctgcaggatccatgggttacatcatcacgggctgcagctcaccctgggcttccagaaacccacagcagaaaaacaaattcattcctcaagctgaaggatcaaggctgaaatgttgacctctcagtgtctgccaagcttaagtactaagccaagaagcgtgtcatgtataacaagagtctgcacctgcagtgggctggagaccatcaaaatgcagttgcctcctgcccactgaacctctgaggtgaagaacaaagaagacttataggtgtcttatgtccaggaaagaccatgatgaactcacagctgcttctccctcaaactccactccacacagctccttcaagccaggtgtggtggaacacctctttaatccccgcactatcatgcagaggcaggtggatatctgagttcgaggccagcattgtctacagagtga

SEQ ID NO: 1272 - DNA, 483 bp, Cricetulus griseus
actatacaaaaacattttacgagagcatcctaactacgttgactgtaagaattttaggcttcttttgtataataaaatttctaaattctcataataacagaaaacttactaagaaaagaaaatcttttgttaggaaccttaattttttttttataaagagaggtcaaatattccctttcccccaatgcaaatttgtctccttaaaaaaaagatgcagcctacagttgtagttctcatctataatcctgacactcaggaggcagaggcaggagcatcagggattcaaggccagcctccctacctatcggttttgagggccccctagccacatattagaccctgtctcaaaaagtggaataaaacataaggtgcagtttattgacttacaggggaaaatataaagatcagcaaaagccacttgaaccatgttcagtggcaggttgtgcctctgcccagtgagtcagctacagttccctgacatgt

SEQ ID NO: 1273 - DNA, 578 bp, Cricetulus griseus
tttgcttcctactcaaatgatattttatatgggtatagttaaaataggcacatttgctagtggtttcagaatatttctgtagtcttgataaaaatagattccaatagtaggtattttggatagctatttaattagaggggtgacatacatttaaaaatctttagtaaaatctaaattattgattcacatattcaataatccatgatagtgaaattcagaagttaagccccaaaacattaatggccagtgtgccaaataaattctcatttataaatattttcttattttttagagagacataaacatctttatgtcaaacagaagtcctcctgttctgacttcacatgcaagacaatataagatagtgaaaaatagtttcacccaagcattccatcctctaccagaagcaaatgtaatttatgctagtagcatatcattacaagttaaaaatggaaatcaagttggagatttatacattatgcgagtactttatttcattgatgtactttaatctaaattttaaatgtctacccttgctatgtggatagaattgataaccttaacgcaaaagagaaaat

SEQ ID NO: 1274 - DNA, 151 bp, Cricetulus griseus
aacatattttagatggattgctagtattataaagaagataaataactttgtaatagatgactgactgctaaaatacaattaaacgcttgttcgttgaatacaaattccaataggggtcaagttttcatttcaacatgtccaaggatcttcg

SEQ ID NO: 1275 - DNA, 240 bp, Cricetulus griseus
atttctcatgttcattctagtttatattttcatttaaatctttaggttaagtttaagctttttaaaagttagttttgagaattgagacacaatactaatactgtaggaattggtgaggccttgacttaaagctttctttgtactgtgatttccttttgggtgtattttgctaagtgaaacttgttaaattttttgttaactaaatttttttcttaaaataaagactttttcacagtgaaa

SEQ ID NO: 1276 - DNA, 579 bp, Cricetulus griseus
ggagccggagccaggcggggccgcgggatcgccgagggagttcacagctctgtttttacgaagcttcactaccagagcactatgaatgttaatgacctcaaactcaggttgtccaaagctgggcaagagcacctgctgcggttttggaatgagttggaagaagcccaacagacagaactttatatggagctccaggccatgaactttgaagagttgaacttatttttccagaaggccattggaggatttgatcattcctctcaccaagaaaaggtggatacccgaatggagcctgtgccccgagaggtgttgggcagtgctaccagagatcaagaccagctgcaggcctgggagaatgaaggactttcccagatttctcggaacaaagtagcagttctccttctggctggagggcaggggacaagacttggagttgcttatcccaagggcatgtatgatgttggcttgccatcccacaagacactttttcagattcaagcagaacgtattctgaagctacagcggttagcggaaaagcagtatggcaacaagtgtgtcattccatggtatataatgacc

SEQ ID NO: 1277 - DNA, 430 bp, Cricetulus griseus
tttacatgaatgtatggtgaataaatttaaaaaagcatctattcgtaagcaacagacacttaatcacccagaagcttacaaaataattgaaaaagatgttatggaaggtgagtattttgtcaagttgttttataaatttacatttgtgttttatgtatcacaacctaagacctttgagattgatgcagggcacagttgcacttgctgtagttctgactggtttgtcagaacagacttcctaacttcttgtttccatgcttacaagctacctcttttccttcagtatagaggagcaattctcaacttgtgggttcctgcccctttggcaaacttctgtctccaaaaatatttatattatagttcatgacagtagcaaaattacagtcatgaagtaccaatataataattttatggatgggtcactacaaca

SEQ ID NO: 1278 - DNA, 314 bp, Cricetulus griseus
gagtgtggaatgcatgcctcgaccctgacactcagaaggtaatacagaaaaatgatgggtctgactacatgctggtcctttgttctccggttgtctgagtacacatgtacatgtgtggcttctttcaccatgcaatcgctgtgtaaacggctccctgtcctgcactcatttagctttagatagctttttctcttgggaaagtgaaaaaaattgagaaatgctttctaaaacatcatacatgtgtttagcagatttggtgtgtatccacatacatatgattttgtttgtttgtcttggttaggtttggtttggtg

SEQ ID NO: 1279 - DNA, 567 bp, Cricetulus griseus
actcccagggctgcttctgtgcaggctgctcacggcagattggcttctcctttgtacgacccaagctctgtgccttctctggcctgtattactgtgatttctgccatcaagatgatgcctcagtgattccagcgaggatcatccacaactgggacctcacaaagcgcccggtcggccggcaggccctgaagttcctggcacagatccgggcccagccccttatcaacctgcagctggtgaatgcctctctgtatgaacacgtggagcgcatgcatctcattggcaggagccgggaacagctgaaacttctgggggactacctgggcctgtgcagaagtggtgccctgaaggagctgagcaaaaggctaagccacaggaattatctcttggagtctcctcacaaattcagcgttgctgacctccatcatattgcatagggggtgtatgaaggattcctcaaagccctgattgagttcgcctcccagcatgtctaccactgtgacctgtgcacccagcgaggcttcatctgccagatctgccaccaccatgacatcatctttccctctg

SEQ ID NO: 1280 - DNA, 485 bp, Cricetulus griseus
  misc_feature (151)..(165): n is a, c, g, or t
acatctgtgctgtcagcaggcctgtttcccagagcaaattcaaggaagaaacaggtgattaaagtctacagtgaggatgagaccagcagggcgttagaagtacccattgacatcaccgcccgagatgtttgccagctcttgatcctgaagnnnnnnnnnnnnnnngacaacagctggactctttttgagtacctgtctcacacaggtgtagaaagaataatagaagaccatgagctggtgattgaagtgctgtctcactgggggatggaagaagaaaataaactctatcttaggaaaaattatgccaaatatgaattctttaagaacccaatgtatttctttccagagaacatggtgtcttttgcagctgagaccaatggtgacagatcccctacacaaatcctgcagatgtttttaagctcaagcacctatcctgaaatccatggcttcttacatgcaaaggaacagggaaagaagtcttggaa

SEQ ID NO: 1281 - DNA, 481 bp, Cricetulus griseus
  misc_feature (75)..(75): n is a, c, g, or t
ttcatcattagttattgttgctaatctcttactactttactatattgaactttatcacagatacgttaagtatangaaaaaacatagtatagataatgtttgggcagccactgggggaaatatcagaatgtatcctctacagatagaaggggactgctctaatttgggtaagtcactaactttaactcttcggtatgcatttccaccaaagggagttttatacctgctctggaaaatggaggtatcagccctcttactcccccacccccaccctggttgagttagccaaggctgtcctatccttcatcgagcctccttggaaatttaaattatatgagaacctaaaatagtgcccagcgtaggcagtctcctgccactgacttaaaatataaaattaaaaaaaaaatactttaagttgccactgagtcaccagtttgagtcccatgacaaagagaagaagctaaatgcaggaagctggtat

SEQ ID NO: 1282 - DNA, 131 bp, Cricetulus griseus
tttcattcccacagatgagagacacttgcaaagtgccagtgaggttagatcttttgccacttctctgattttactgatttgggtttttaaagggctgtttaaaaataaataaatgaaatgataaaaaaaaa

SEQ ID NO: 1283 - DNA, 530 bp, Cricetulus griseus
aattcaaacctctccaaagtatatggtcaaactaaagaagacaagaaccaacaccatctgaattgtgactggctgatattcccaggaaaaattagagatcactactccagcataagccccagtttcctgcttgctacgaagatgctgggtataaaggcttgggctgagtatgtagtggagtgggctgccaaggacccatatggcttccttacaacagttatcttggcccttacgccactgttcctagccagtgctgtactgtcctggaagttagccaagatgattgaagccagagagaaggagcaaaagaagaaacaaaaacgtcaagaaaacattgcaaaagctaaacgactaaaaaaggactgaaggagtgaacagactctgcaactagacaaaaatcatctggaaaattttgcagctttggaaggactcactaaggttccagtcaatttcatgatagtcttatttaacctgactgaatagaagagtcatgttctgacctcaatacaatagtaacttttaggtgtgga

SEQ ID NO: 1284 - DNA, 490 bp, Cricetulus griseus
  misc_feature (29)..(59): n is a, c, g, or t
caatgaaagccattgagagtcccaacaannnnnnnnnnnnnnnnnnnnnnnnnnnnnnngtggtgtacggcgtgttcagtattgcagaattcttttctgacctcttcttgtcctggttccccttctactacatgctgaagtgtggcttcctgttgtggtgcatggcccccagcccgtctaatggggcagagctgctctacaggcgcatcatccgtcctgtcttcctgaagcatgagtcccaggtagacagcgtggtgaaggacatgaaagacaaagccagagagaccgcagataccatcactaaagaagtcaagaaagctacggtgaacttactgggtgaagaaaagaagagcacctgagccctggctggaagctccccattccacttccttagagccccatgttacgctagggacagtggcatagtcgttgaataatgttgccttggaaacgttttgatgtattaaaaatggaatgtgttgtaagctgt

SEQ ID NO: 1285 - DNA, 571 bp, Cricetulus griseus
  misc_feature (24)..(61): n is a, c, g, or t
  misc_feature (69)..(142): n is a, c, g, or t
  misc_feature (158)..(339): n is a, c, g, or t
  misc_feature (341)..(371): n is a, c, g, or t
  misc_feature (382)..(405): n is a, c, g, or t
  misc_feature (411)..(441): n is a, c, g, or t
  misc_feature (490)..(531): n is a, c, g, or t
tcctcattagagtgacatcgtctnnnnnnnnnnnnnnnnnnnnnnnnnnnnnnnnnnnnnnatgcccannnnnnnnnnnnnnnnnnnnnnnnnnnnnnnnnnnnnnnnnnnnnnnnnnnnnnnnnnnnnnnnnnnnnnnnnnctttattgtgggagcnnnnnnnnnnnnnnnnnnnnnnnnnnnnnnnnnnnnnnnnnnnnnnnnnnnnnnnnnnnnnnnnnnnnnnnnnnnnnnnnnnnnnnnnnnnnnnnnnnnnnnnnnnnnnnnnnnnnnnnnnnnnnnnnnnnnnnnnnnnnnnnnnnnnnnnnnnnnnnnnnnnnnnnnnnnnnnnnnnnnnntnnnnnnnnnnnnnnnnnnnnnnnnnnnnnnntggccaataannnnnnnnnnnnnnnnnnnnnnnntgccannnnnnnnnnnnnnnnnnnnnnnnnnnnnnntaacactggtctggggcccgagaagacctctttcttccaagctttgggnnnnnnnnnnnnnnnnnnnnnnnnnnnnnnnnnnnnnnnnnntgatgtgcagctgataaaaactggagacatagtaggagcc

SEQ ID NO: 1286 - DNA, 580 bp, Cricetulus griseus
  misc_feature (343)..(361): n is a, c, g, or t
ctggttgccatggcaaatgctggtccacatgataatggcagccagtttttctttaccctgggtcgagcagatgaacttaacaataagcacaccatctttggaaaggtcacaggggatacagtctacaacatgctacgcctgacagaagtggacattgatgatgaagaaagaccccgcaatccacatagagtcaaaagctgtgaggttctgtttaatccttttgatgacatcattccaagagaaattaaaaggcccaaaaaagagaaaccggatgaagaaatcaagaaattgaagcctaaaggcacaaaaaactttagtttactttcttttggggaagaagctnnnnnnnnnnnnnnnnnnntgaaccgagtcagtcagagcatgaagggaagaagtaaaagcagccatgacctgcttaaagacgatccacacctaagttccgtgccagctgtggaaagtgaaaaggatgatgcaacaggagatttagaagatgatggagaagatgagagtgcagatcctgatgaatacattgatgatgatgaaaagaacctgatgagagaaagaattgcaaaaaggttaa

SEQ ID NO: 1287 - DNA, 580 bp, Cricetulus griseus
tttggacctgcatggtgggatagggacctggtaagacctatttattggaccagaccatgaagtacttacaagtacgtgctgttccttcacatatctgtgaaatttacttaacggtaaatttacttaatggaaatgtttgttttgtctgtgagactgaactagactacaagaatgagtaactgctctagatcttaaggtgaggaaggacagagctttgggaagagctggaggaggagcctgtcaggcataggcaggggtaacccttgttgaactacagtcagtctgtttggtttgctgttggtaaatgagcagtgtgatcttgcttgtgtttctctttttggcttttcatgttaaaagggggcatgtaaggctatcattgataaatagtttactgggaagcctttttggagaatacttacctaaatatcaacatttttctttttaaaataggcttttcatctcagcctagtgatgaggaatccagtagcgatgacaccagtcatgagcccagccctgtcccaagacgccgtcgcaacaagaagaagactgtttctgtctcatagcctgaggagccaccact

SEQ ID NO: 1288 - DNA, 515 bp, Cricetulus griseus
actggggaaagatgggtcaaagtcagagtggtggccatggtcctgggggtggcaagaaggatgacaaggacaagaaaaagaaatatgagcctcctgtcccaactagagtggggaaaaagaagaagaaaacaaagggaccggatgctgccagcaaactgccactggtaacacctcacactcagtgccgcctcaagttactgaagttagagagaataaaagattatcttctcatggaggaagagttcattagaaatcaggagcagatgaaaccattggaagaaaagcaagaggaggaaagatcgaaagtggatgatctcagggggacccccatgtctgtaggaaccttggaagagatcattgatgataatcccgccattgtgtccacatctgtgggctcggaacactacgtcagcatcctgtcatttgtggacaaggatcttctggagccatgctgttcaatcctgctcaaccacaaggtgcatgccgtgataggtgtgctaatggatgacacagac

SEQ ID NO: 1289 - DNA, 544 bp, Cricetulus griseus
atgtggtaggtgcccgccgttcttcctggcgtgttatctccagcatcgaacagaaaacagagaggaatgagaagaagcaacagatgggcaaagagtaccgtgagaagatagaggctgagctgcaggacatctgcaatgacgtactggagctgttggacaaatatctcattcccaatgctacacagccagaaagcaaggtgttctacttgaaaatgaaaggagactattttaggtatctttctgaggttgcatctggagacaataaacaaaccactgtgtcaaactcccagcaggcttaccaagaagcctttgaaattagtaagaaagaaatgcagcctacacacccaattcgacttggcctggcgctgaatttctcagtcttctactatgagattctaaactctcctgaaaaggcctgcagcctggccaaaacggcatttgatgaagcaattgctgaactggatacgctcaatgaagagtcttacaaagacagcaccctgatcatgcagctactcagggataatctcactttgtggacgtcaga

SEQ ID NO: 1290 - DNA, 499 bp, Cricetulus griseus
ttttatcttttatttcttatattttgtgcatatgtctctgtgtgtggtgtgcttacatgtatacatgcacatttgcatatgtgtgtgtgcacatatgtgtgtggaggaccgaggtccttggtcactctctatctaattgacagaggaggcatcttattgtcagagcttactacgttggctagtccatctaggcagcttgctttcgggaatcctctgtctctgggagtacaagaggacagccatacaagcttgcttatctcatgtgggtgctgggcatccatcctccagtctgcacacgtgtggaaagtgctttacccatggagacgccccaaaccctaaattcctgtcttgatacatcatttgccagttgtgtgacctgcagtaaattgttcagtctctacttcctcaactgcaaatgggaatacagtctcaaaggggcttgacagcacaaatcagtagctgtaaaggtgtctggagtaatataagcctcggaaatcta

SEQ ID NO: 1291 - DNA, 579 bp, Cricetulus griseus
  misc_feature (48)..(48): n is a, c, g, or t
aattgtactttattttacatatatgatgtcatgtaaaacttggcttanatagtatgtttcggggggattttctttcattttggtgttttctttttacacaaaaactaaagttgactacttgccattctttgatttaggatttaggaggtgagagaatcaagaaggcccttaagatgatctatctctaagaattgaggggcagtgggttttttttataaatttgttagtagctttcagcatcagggataacatggtgactgttctattttgcaaaaagtgctcgcatactttattctggaccaaaatgcacaaagttgaaagactgttagcccaagaactgtgcgctgtgtccttggtgcagcttacacacaaagtaatctagtcatcacccattcaccagggttcctagagccacactggcagtcaggaatgtctccacattgtttcagggcattttaaaggtcttcagattgtaggctagtcagtactcccaacacaaggaagaaaacctcaaaattaaccaatagtcatgcaacataatcacaagcacagttttaagaagagttattatttaatgtg

SEQ ID NO: 1292 - DNA, 437 bp, Cricetulus griseus
ttttccatagatgtgacatgtcctaccatcctttccagccccaccctcctccctgtaccagggctgtgatctctcaagggacctctgagtctgctggtctttcaagtgtgaggcaggagggaacagttgcccaagctggttggtgtaatccattgttttaagtcagctccccagtggctgggccaaggggaaggactaaagggaggggctggacacgtgaaagcctgggcaggggcaagagcatggatttaaggcttgacacgggattcagaaatagccccccacttttggggaagtcccaaaagacttttttttcttgcacagcacactttttccatcctcctggtccttaagcctaagtgtggactaaggatggggaaatgtgtcctgggttggacccatcagagcacaagagaaggtggctatcctggggtctc

SEQ ID NO: 1293 - DNA, 518 bp, Cricetulus griseus
ttgtttgttatgcatacagattatagttaaacttcccctttcacttaaaggaattcatacctctacattagcatgttcaaactgccaacatcactagtgttcttcatagactattaagtaaaataaaagtcccttgcatgcaaactctactatagaacgatggtccatcaccctgtgagatggttgctgatggacaggtagtgtccaccgtgggctaatggtggaatggatggagtgaggtttccactattccaggcagcacacagggttgttgttgcttgttttgttgttgaggagtgctacttggtttgggggttagaggtttgggcatttttgcttgtagctcttcatctagggataggaccctgtgagacccctgcccaccgtctactttggaatgctactgttgttggaattgttcatgcctcggttagggagctgtgttaagatttcatgggtgtaactagcctcacagcagaccttctggtcctttggctcttaggatctctccacccgct

SEQ ID NO: 1294 - DNA, 579 bp, Cricetulus griseus
  misc_feature (17)..(74): n is a, c, g, or t
  misc_feature (316)..(330): n is a, c, g, or t
  misc_feature (388)..(419): n is a, c, g, or t
  misc_feature (431)..(449): n is a, c, g, or t
  misc_feature (465)..(482): n is a, c, g, or t
gtatctccacactcgtnnnnnnnnnnnnnnnnnnnnnnnnnnnnnnnnnnnnnnnnnnnnnnnnnnnnnnnnnnactggggttcaaggaacgacagtatcatgaagccagaaaaagtgctccattacgattctttataaggcaggcggtttggttgacaggtgcgaggagtatcacctttgacctttggtgtcaagggttcccctttgagcagcaatgaatgatgaccggagctagaacagggctcggggcaggccagcgcaccaggactgcagaggttttggacaaccagatcctgatcacctactggacttctnnnnnnnnnnnnnnnaaagcaactttctagccatccatttaggaggctttttgtgtttgtttttacttttcannnnnnnnnnnnnnnnnnnnnnnnnnnnnnnnggcactcgctcnnnnnnnnnnnnnnnnnnnaaactcacagagatcnnnnnnnnnnnnnnnnnntagtgctgggatcaaaggcgtgtgccaccaacgcccggctcatttaggaggctattaattgagctactgatttccatacttgttcttccaaaaggca

SEQ ID NO: 1295 - DNA, 582 bp, Cricetulus griseus
  misc_feature (528)..(528): n is a, c, g, or t
aggagaagtccaattccaacccacactgagcttccggtgtttagagattctaagatgcctgagccagccaagtccgctcccgccccgaagaagggctccaagaaggccgtgaccaaggcccagaagaaggacggcaagaagcgcaagcgcagccgcaaggagagctactcggtgtacgtgtacaaggtgctgaagcaggttcacccggacaccggcatctcctccaaggccatgggcatcatgaactcgttcgtcaacgacatcttcgagcgcatcgcgggcgaggcttctcgcctggcgcattacaacaagcgctcgaccatcacgtcccgggagatccagacggctgtgcgcttgctgctgcccggggagctggccaagcatgcggtgtccgatggcaccaaagccgtcaccaagtacaccagctccaagtgaaaaggacgtcccacgaggagtagacctgatgatgtcttttctaccactcatcagtgctggacgttgtttcatttggcaattgagacaatgganataggtgatactagaagactagtggctgtattttcaaaacttgaggaacaactc

SEQ ID NO: 1296 - DNA, 475 bp, Cricetulus griseus
gtatatagatggaaattgatggtagacagatacttaagtgggcagctcagcttctgagtatcagtttctgtcatttccttattataggttagaaaaatctggagtcaggggtgaaatataactgtagagcttaaacacctcaaacccagcatacacaaaggaatattaccctttttcctcccgtgtttcttctcttggggagtgacatgatggttccgagaagtcatctaaaccctaattctgataagtggttacctgtctactctgcggtggtacttttgactagcctggatattaagtctgtccagtcccactccacaagtgttgactgttcattgagctttgttgggtattaggttcctgactctaaaaaggccccatctaattcatatattaataatagcactatacatttatagatgatacatgtttcctggtgtcacctttaacatcatttgccgaatcgttctgacac

SEQ ID NO: 1297 - DNA, 176 bp, Cricetulus griseus
tataacgttactttcacttaccaggggtcgtatatttggcgttatccgcggtctctcctcaccttcgttagctccgcaccccacgccgtcctcggcccatctgtcactaccttctttaccacctggttacagtgctaagcacggttcactcttccacgccattccccagttccctc

SEQ ID NO: 1298 - DNA, 474 bp, Cricetulus griseus
aaccttgaggggccctctgaccaggagaccaagttggatcttatcagtaaaggagaggaaccaagaggaggaagagaggaatccggggtaccagctcgcagctctccacccagcagcaaaaaccactctatcaaggctatacttaagaatatctcagtcctggctttgtccgtctgcttcattttcactgtcaccattgggttgttccctgctgtgactactgaggttgaatccagcattgccggcaccagtgcctggaagagctactacttcattcctgtggcttgtttcttaaatttcaatgtctttgactggctaggccggagtctcacagctatttgcatgtggcctggtaaggatagcctctggttgccagttttggtgggctccaagatcgtgtttattcccctgcttttgctatgcaaagtgaaacatcgctactacttgcgttccatctttacccacgacgcctgg

SEQ ID NO: 1299 - DNA, 579 bp, Cricetulus griseus
aggaggaggagcaggaggaggagggggaggaggagctatattatgaagggacaatgccagaagtgtgtgtgcttgtgctgtctccacgctactggcctgtcacctcggtctgccacatgctcagttctacggcacgcctgccctcatatctgagggggactttaaaccactactccaacttctacaacaagagtcagacccatgccagagaggaagatccaaatcggcaacttcagtggacctggcaaggccgggctgagctgcagtttggggaccagaccctgcatgtgtccacagtgcagatgtggctgctgctacatttcaaccacctaaaggtggtgtctgttgagagcctgctggcgctctcagagctccctccagatgtgcttaatcacgcaattgggcctctcacctcatcaagaggccccttggaccttcaggagcagagagataaaccacgaggagtgctcaagattcgacatgacagtgaggaacccacaccatgaagggcattgtgcggctcatcccacctcacaagtacccgaaagctgaggatgaagagggccggaacttgtagaa

SEQ ID NO: 1300 - DNA, 479 bp, Cricetulus griseus
  misc_feature (327)..(344): n is a, c, g, or t
cattgaactttgcatcaagagaaggctttccgaaataaccctttacagcagctgtatgtactgaggtctttatgggaagatggcttgcatttttgagatgatcacaacacactgtgcagaagcggacagatgttccatggtgtttggttcccctttcttctctctcctgctcactcagccctacagcagtagctcatctctctgaggctggaaagccttgctccttgcagtgacatcctcccacgcctggttgtggtagtggctgtgctatacacagcatcaggcttactggtttgttgctcttctgagcctttttattcacttacnnnnnnnnnnnnnnnnnnatatctattataaagaggtacaataaacagcttctcatggatacctgagtggttgatttacctgcccaggagatctcagtaatacctagggctgggtgattcatggccacccttctgtgaatgggtaccatggac

SEQ ID NO: 1301 - DNA, 534 bp, Cricetulus griseus
ccctgatcttgttctgcccaattttgacatgctttatagccatgtgaaacaactcctctcgaatgagctactcctaacccagatggagaagagtgccctcatggaagccctggttctcattagcaaccagtttaagaattacgagcgacagaagctattcttagaagagctgatggcaccaatggtcaacatctggctttctgaagaaatgtgcagagtgctcaaagacattgatgccttcattgcctatgttggagccgatctgaaaggctgtgacccagctgtggaggatccatgttgcgcaaaccgtgctcgaataaccttttgtgtgcacagcattctgggggttttgagacgaactagctggccttccgacatagaagaagccagagcaggggggtttttggtgggttacacacccagtggaaatccaatcttccgtaacccctgcacagagcaggtcctgagacttctggacaatttgctggcccttgtaagaacccacaatactttatatgcaccataaatgctagc

SEQ ID NO: 1302 - DNA, 508 bp, Cricetulus griseus
tggcccatgaaagagtaccacgcaaactcaaatgtacttttacatcccccaagactctagagcatgaaggtcgtcattatgaatgtgatgtccttcctttcatggaaattgggtcagtggctcataagtattatcttctaaatatccggctaccagtgaatgagaagaagaaaatcaatgttgggattggggagataaaggatattcgattggtgggaatccaccaaaatggaggcttcactaaagtgtggtttgctatgaagaccttcctcacacccagtatcttcatcattatggtgtggtattggaggaggatctccatgatgtccagacccccagtgctactggaaaaagtcatttttgcccttgggatttccatgacctttatcaatatccctgtggaatggctttccattggatttgactggacctggatgctgttatttggcgacatccgacagggcattttctatgcaatgcttgtttctttctggatcatcttctgtgg

SEQ ID NO: 1303 - DNA, 499 bp, Cricetulus griseus
acggcacgcctgctggaaagccggggagccctcacctggtggccccggccaccaggtgcactggctcccactccctcattcacaagcttttctggaattctcagtatctgcacttttggggttgtttttttttgtttgtttgtgcgtttgtttattgagagcatctatcccaagctcgaagcttactgaggaatgcatccaaacgccttagtgattgcctccatttgtctcccctttacaaagcagtaatgtgctcatccgttggtgggttcgtgctttcgttgattcattttgtaaatgattcttgagctcctgatgcaaccgtttgcaaacacctttctgacccaaggccggctttcccttttactcctgctttatttactctgcaggggtgtgagtcagaattatgtatgggtcgttgttcattcactcgataggccttacgggcttaaagctgctggaaggtcaaatgctcaagtcaagcacatactatgaatct

SEQ ID NO: 1304 - DNA, 527 bp, Cricetulus griseus
gtcgacccacgcgttccgaaccaatataccgaagtcagggagcctggctgacccttcattgatatgcattctatacttttatcaacccagtcatcttgttcctgtgtctgctgtagaagggaactttttgttaaaccatagagattatcatggtatacatgctgtgaacatgtatatgtacaagttgtaatgtattctgtgttgtaggcatattatttaatttcaccacttcatcacttttgtacagtggccaagcagacacctcagactccagcatttacattaagtgcatttgtatattttaggccactggatccaaattttatattggcagttattgacggcaaaagcaatatattgtaacagaatgtataaatatttttgataaaacagtctatattttataaaaagttattataacactaaaactgtacctcaaaagtctcacaaataatttgatcaaatactctaacatcttcacaagatccgcctggggctttttatctttcttaccatatgccctttta

SEQ ID NO: 1305 - DNA, 580 bp, Cricetulus griseus
tctcatcgggaatagcacaactcctggagaagcaccaggtcagggatctgacagacttccactgggtccgccaactgaagtatcacctgggttcatctcacttgaactccaacagtcccttgcagtgtcttaagactattgcatctgctgagccctctctgtcaccagctgcatgctggatagatgtgcttggccggtctttcatatataattatgagtacctggggcccaaactggggcctctacccagcctgatgcatgaacgggaagtgttggttctcttattggccctggaggaggtagcctgtgggaccctactgggccgggatggtttgggaaagacagaaatggtgactagcttggcatggaccctatgccgccagctggtaatgatgccctgcttgccccagatagaattccgatgtctgagcaattacctgaatggtgcccttcagggtggggcctggctgctgttggagaatattcaccaactacctgctagctagctctctgcactgggccagcgtctggatgagctacaccatctttatgccccattgtgtcagaagccttccaaaac

SEQ ID NO: 1306 - DNA, 436 bp, Cricetulus griseus
atttaagaagccaccccctaaggcaggtacctcaaagctattggcagaacgaattccccaaacagctaattctactgggtcatttgaattaagaatcaatggttatgggtagctaggggctagaagaatcatctgtgattaacaaggttccagaactactaagctgaaacctttgctttactgggatactccatgctgctcagcaggagctgagaaattagtggtgattacaaagagaccatcatctttagctgaagtcttcaggaaagtctggagacttggccaaggttgtatcctgtgctggcagccaaacttggtagtgtaagatccacccgggtggtgctagtttataacatgtgaaggggtcatggagagcagttgaagcttgcaatgtgtaccacagtagggctccatgcaaacagcccacgataggcta

SEQ ID NO: 1307 - DNA, 578 bp, Cricetulus griseus
  misc_feature (561)..(561): n is a, c, g, or t
  misc_feature (577)..(577): n is a, c, g, or t
agtcagcttttaatagcatatcggcggagagagagaagctgaagcagctgatggagctggaggtctcctcttctccttctgctcaggtcgtcggtctgaagcatgccctgtcatctgaaaactccggggatgaaagccgagccctggtgcaccagctctccaacgagagcaggctgtctatcacggactccctttctgagttttttgatgcccaggaagttctgctatctcctagctcttcagaaaatgagatttctgatgacgattcatatgtcagtgacataagtgacaatctgtccttagacaacctcagtaatgatttagacaatgaaagacagaccttatggcctgttctggagagtggtggggaagccaggtccaaaaggcggacctgcttgcccgcacagggtcccaacaccagcagtgtcagcttgtggaccatcctgcggaacaacattgggaaggacctgtccaaggtggccatgcccgtggagctgaatgagcccctgaacacactgcagcggctctgtgaggagctggagtacagcgagcttctggacnaggctgcgcgcatccnc

SEQ ID NO: 1308 - DNA, 579 bp, Cricetulus griseus
ttgcattaaagctttacaaagttttaaactaattatttttgtagttacttctaccaaatagcctttccttttcaataacattccttagtatttttatagtgaagtgcattttatttgtggctgatgagctgggattggataaatactacaagtggatgctttgggaattacgcactttgaaaagcatccacagtttactccttagttggctatggacttgatgaaattaaatggtgagcctttataacgcattctaagatgaggagattgttagtgatgagatctaaaaatacacacagatttggcttttctattgtttacaacaatattcagcttaagtatttattctggctgagtgtgatttaaattagacatttcaccagtgtagtttactgtgtggataaagaactacttcagccttagcaagtggatttggcagtatgttttttacaaagaacttttcttctcttgtacatagactatatataagtactatttatgagtataagaaagcatagtcctattttctgtaactgaataaacttgactattgatttatataagctgattcaacaaagt

SEQ ID NO: 1309 - DNA, 579 bp, Cricetulus griseus
  misc_feature (59)..(76): n is a, c, g, or t
ctgcaagcttttaaaagtacttttttacttcttagatttaaaaaattacaattacttgnnnnnnnnnnnnnnnnnntattggttaaaaacactggctgctcttgaagaggacccagttcccattcccagcacccatgtggtgaccaacaatgcctgtaactccagttccagggggtaccacaccctcttctggcctccatgaataccaggcttacacatgggacatataaatacttgcaagcaaaatacccacacataaataatacaattttaaaaataacaattattcattatgtgtgtgtggttggtgatgggagcatgctgtgggcttgtgaaagtcagagaacaacttgcaagatttaattttctccaccttacaggtcctagagattgtacacaggttgtctgctggaaaggcattgattgttttgtttttagagtgtgtctatggcactctcttaagactcttctggcattctccctgtagcaaaatggaccactacgttaaaatgcttgcttgtgcaaggtctacagctagtgaatgatggtgtcagtgcttgggaactccaccactagctc

SEQ ID NO: 1310 - DNA, 132 bp, Cricetulus griseus
ctaggtccaaaagttgtttcaaaagaaattccagtggagtctattagaagaggtttctaagatcatcaagatagcaccggtgatctggggaacaattatttcatggcctaaatgaattattggaattccagg

SEQ ID NO: 1311 - DNA, 578 bp, Cricetulus griseus
gcccatctgtaccgtggcatcttccctgtgctgtgtaaggatgcggtacaggatgcctgggctgaggatgtagacctccgtgtgaatttggccatgaatgttggcaaggcccgaggcttcttcaagacgggggatgtggtcattgtactgactgggtggcgccctggctctggctacaccaacaccatgcgtgtcgtgcctgtgccttgatggccctctggagcccctcttctagcccctgtcccatcccctcccccatcccatccattaagccagcaacgcttgtagtgctcactctgggccatactgtggcgctggtgggctgggacacccaggaaaatttactggctttgaaatatggactagagcccagctgtctcatggccctacccaagctagggatgaaggaagaatgcagaattgtaaaccctctgcctttatcacaaaagggcagcaacacctctgtgtgttttgctcctgtagaaagttgcccagaggactcccagccctgggagacagcaagagtgtaagggcttaggacatggggcccaggtccctgtgtgtagataacccttgac

SEQ ID NO: 1312 - DNA, 568 bp, Cricetulus griseus
  misc_feature (44)..(75): n is a, c, g, or t
acgtgtgaacagggagacggcgtgggtccctatggctgggagtnnnnnnnnnnnnnnnnnnnnnnnnnnnnnnnnatcagcgatggggctttaaggctcaccactgagttcgtcaagaggcctgggggtcagcacggaggggattggagctggagagtgaccgtaaaacctcacgcctcaggtacctcttccctcccttaggtgtccctgttcttctacgtggtaacggatggccaagaagtcctactaccagaagttggagccaaaggacagttgaagttcattagtggacactccagtgaacttggtgacttccgccttacacttctgccaccaaccattccatgagacactgtccctaagcatggcatctacaatgtcttctggtcctccaacccatggctgccactgctcacagacatggtaaagaatactctaaacagctggtttcatcaccggcccccaggggcctctcccgaacgctaccttggcttgcctggatctctgaagtgggaggagagacgccctagtgggcaaagacagttcttgatacagcaggtgacactga

SEQ ID NO: 1313 - DNA, 567 bp, Cricetulus griseus
  misc_feature (504)..(504): n is a, c, g, or t
gatttaagcacattcctcgattccagcaaagccctacaacatgaccgagatgagcttcctgaacagcgaagtgttggctggggacttgatgtcccccttcgaccagtcgggtttgggggctgaagaaagcctaaggctcttatatgactacctggaggtggccaagcacttcaaacctcatgggttctccagcgacaaggctaaagcgggctcctccgaatggctggctgtggatgggttggtcagtgcctcatacaccggcaaggaggatgcattctccgggacagactggatgttggagaaaatggatcttaaagagtttgactttgatgctctgtttcgaatggatgacctggataccatgccagatgagcttttggccacgttggatgacacatgtgatctttttgcccctctagtccaagagactaacaaggagcccatgacagtgaacccaattggccatctcccacatagtgcaacaaaaatagaccaagttgcccnctttgcattcttgcaacctttttcctgttccccaagggggcctgtctttcacttcagaatatt

SEQ ID NO: 1314 - DNA, 556 bp, Cricetulus griseus
  misc_feature (5)..(24): n is a, c, g, or t
cagannnnnnnnnnnnnnnnnnnncatgacatgaacaaagttctggatctggaaatgaagggtgacatcgagaagtgcctcactgcccttgtgaaatgttccaccagcaccccagctttctttgctgagaaactttatgaagccatgaagggagctggaactcgccataaggcattgatcaggattatggtctcccgttctgaaatcgacatgaatgaaatcaaagcattttacctgaagaagtatggaatctctctttgccaagccatcctggatgaaaccaaaggagactatgaaaagatcttggtggctctgtgtgatggcaactagatgtccccgctgctcagaagcactgtgatgagagcatctcttagctgttgctttcctctatcacacaagcttaagtaagagggttgctttagcagataacaagctaattacccactttgaataatataacatatgaataagttttacatcatacctctgtacaatagagaaataattgttttattatgttttccccagattataaatccctataagcaagttactc

SEQ ID NO: 1315 - DNA, 580 bp, Cricetulus griseus
  misc_feature (433)..(451): n is a, c, g, or t
  misc_feature (504)..(532): n is a, c, g, or t
agatgagaaaggatatagagtgggagggagcaatacccgctctttaaggactcaaggagatgatggatagcaaatactgtgtaggctgtaaatgggcaccacaatactattttccttcagttcctattgttttctccatcatttcataggtaccatcttgttcaggaggcaatatgattcctaaaaatatgctggttaaaggtgtcctacctaagtttaaaatctagcttttctacttactaactccacaacatccagaaaaattccttaactattatgtttttcagttttctaacctgcaaattgtaaaactaatagcaaaattgtagatttttattttaatattctaatatgtataaaatactcatactgagccgggcattggtggcgcatgcctttaaaaccagcacatgggaggcagaggcagcagacnnnnnnnnnnnnnnnnnnnccctggtctacagagggagttccaggacagcctccaaaacaatacagagaatnnnnnnnnnnnnnnnnnnnnnnnnnnnnnactactcatattgggtctgacacatagtaaacattaaacagcatcacc

SEQ ID NO: 1316 - DNA, 580 bp, Cricetulus griseus; identical to SEQ ID NO: 1315
  misc_feature (433)..(451): n is a, c, g, or t
  misc_feature (504)..(532): n is a, c, g, or t

SEQ ID NO: 1317 - DNA, 579 bp, Cricetulus griseus
ggtgatgcagatgctgctgaacggcctctactacatccacaggaacaagatcctgcacagggacatgaaggcggccaacgtgctcatcacccgggatggggtcttgaagctggcagattttgggctggcccgtgccttcagcctagccaagaacagccagcccaaccgctataccaaccgagtggtgacattgtggtaccggcccccagagctgttgctcggagagcgggactacggcccacccattgacctgtggggtgctgggtgcatcatggcagagatgtggactcgcagccctatcatgcagggcaacacggagcagcaccagcttgccctcatcagccagctctgtggctccatcaccccagaggtgtggccaaacgtagacaagtatgagctgtttgaaaagctagaactggtcaaaggccaaaagcggaaggtgaaggaccggctgaaggcctatgtacgtgacccctatgctctggacctcattgacaagctgctggtgctggaccctgcacaacgaattgacagtgacgacgccctcaaccatgacttcttctggtcagaccccatgcc

SEQ ID NO: 1318 - DNA, 494 bp, Cricetulus griseus
  misc_feature (65)..(82): n is a, c, g, or t
gtctccctactctgccgggctatataataaactagtcaacatgtctcattttaaagctttctctnnnnnnnnnnnnnnnnnntaaaaacctaacagaccagctccgaaattatgacatgagatccttattagtcatgaatgcttggcctaccttaagctcatttttggtgagcccttttaactttaattaacctgtatctctttatcaaccttttgccttgcgcctttttccttttcttctgtatatctgactttcactgcttcttttgtctggctggctggaggctgcctggcttatgggctcagccatgtccctctgcttattctctcctccttagtctttactctctttctgcctgccagcctctcctagcctttctttgcctaacgattgggtgttcagctttttactaaacccatcaggtgcctggggcaggcaagacgaggaccttgccctgggctggaagcaaccacccttaaatgcagaaatgacg

SEQ ID NO: 1319 - DNA, 579 bp, Cricetulus griseus
aattggggagaaagtggagaaaggaatgtgtttgaggcgctttctgagctcataattttaacagctagccattgtttacacggaaaggaaattagaagtcaactcaatgagaaggtggcccagctgtatgcagatttggatggaggttttagccatgctgcctggctgttgccaggttggctgcctctgcctatcttcagacgcagggacagagcccatcgggaaatcaagaatattttctacaaagccatcaagaaacgcaggcagtcagaagaaaaagttgatgacattctccaaacgttactagactccacatacaaggatgggaaccctctgacagatgacgaaatagcagggatgctcatcggcctgctactcgcagggcagcacacctcctccaccaccagtgcctggatgggcttcttcttggccagagataaaccacttcaagaaaagtgcttcttagaacagaaagcagtgtgttgcgaggacctgcctcccttaacttatgagcagctgaaggatctgaatttacttgatcgatgcataaaagaaacattaagactgagacctccaata

SEQ ID NO: 1320 - DNA, 379 bp, Cricetulus griseus
gctcctgttccagcggcacaatgtgatccaccagcaaggagggacgccaataaggcccccgtaagtcttataaaatatataggtttatgatagttaagactgagctaacagctagtcattggccaagcagcattgtacctaatacaagtttctgtgtattcatttgggccctaactcaggcaggcagctgacgtaaagcgcacacgtggcggtggggctcggcagcttttggcagaaagatttatcgcaacatgtctacttgtgggactcctaacaatgggagcaggggctgtccctaacagttttagctggctcttgggaacctattcctcatactgtattgccttgccacccttaaggggcttacacttattgccac

SEQ ID NO: 1321 - DNA, 579 bp, Cricetulus griseus
cgataacagcccttgttcaatagcttttgctaaggccagagaagctgtcagggagattacaggtctgttcccttccccgaccacgttcccactcactattgacctatctattcatacctgacaactctgctgcatgcccgtctgcatctccatattcaaactccagagtagggcagtccacagagccctataatagagaaaattttccggtaatgggaaaagaggttgtcaaagaaagaatatgccctattttcacctttttcccctcttggaagtcaaggtccgatcagagagtcatctagaaagtcctattggccctttcatctgagaggcaacctcccctttcaagccaaaatctgagatccaatgtagggaagggctggggattgctatccagtatcagaaagtctaagtaaataaaggacaagactataaacaacaaaaaagctgccatttgaagcaagccagggtaacatgtgcctatgatgctccattctgaaggcagaagcaggagatccacgtctgaggtcagcctgggctacatagtgaaatgtggtcacacacatacaaaaaggactg

SEQ ID NO: 1322 - DNA, 448 bp, Cricetulus griseus
agacctggcagtgcagcaacgatatcttcctctacaagtaacattgtgcccccaagacaccagaaacctgcaggggccccagcaacaaaaaagaaacagcaacagaagaagaagaaaggaggcaaaagtggctggtgaagacagtgtacttgttgcaggctattgttatccagtgtcagtgacattgggaacataataaaggtaacacagcaagaagcacagagctccctcctccatccccatagtccagaaatgattccttatacttcaaatgggaaaacatcctcctcaaactgcctaatcagatttggcctacttgtaccaaatagctttacgaatactgaagatgactgagcattaaagcacgttatctaaggttcaccaagattcaaatggaaagtgtttgtcctgctccaactagtgaagatatgtgcgcctattcaagtct

SEQ ID NO: 1323 - DNA, 299 bp, Cricetulus griseus
acacataagaaaaggagtgagattaatagagtaccagaatgggaaaagctttgtattcaaaataaagtgccaggaagccaaatagagacttgacatggtcagcactgtgggaaacccagacagccatgagcacacaggtagtctatagcaaaggaagagtttccagaggaatagttctgaaatctgaatgaccatgagaatcagctggaagctttaacatttaaatactatcccagccacccataagtggtgaagcacatggcccctacaaagaaaacctgcattccacctgtaatgga

SEQ ID NO: 1324 - DNA, 510 bp, Cricetulus griseus
  misc_feature (6)..(6): n is a, c, g, or t
  misc_feature (304)..(337): n is a, c, g, or t
catggnaaaagacaatagatgagccccccatatccgctgacttgctggaacattgcagtttctctcaagtggtgtttaacagtgtggagaagttctatattcctggaggagatgtcatgtgctattacaccttcacccaacagttcgtccctcgtcgcaaggactggattggcatctttaaagtggggtggaagacaacccgagagtattataccttcatgtgggttgctttgcccagtgacctaaacaaggaatcaaccaagcagcaagaagtccagttcaaagcctactatctgcccaaggnnnnnnnnnnnnnnnnnnnnnnnnnnnnnnnnnnaggtggtgtggtccggggagcaagtatccccttccagttccgtccagaaactgaggaggacatagtggttgttaccactaagggaaaggtggaagagatagagcaacacattaacgagcttctacgggaaaaccacgagctgaaagacagctgtgccagcctccagaatcata

SEQ ID NO: 1325 - DNA, 570 bp, Cricetulus griseus
attggttctggatgtcagatatttgctgtgtctctcattgttattattgttgccatgatagaggatttatatacagagaggggatcaatgctcagtaccgccatatttgtctatgctgctacatctccagtgaatgggtattttggaggaagtctgtatgccagacaaggaggaaggagatggataaagcagatgtttattggggcattccttattccagctatggtctgtggcactgccttcttcatcaactttatagccatttattatcatgcctctagagccattccttttggaacaatggtggccgtttgttgcatctgtttttttgttattcttcctctaaatcttgttggtacaatacttggccgaaatctgtcaggtcagcccaacttcccctgtcgtgtcaatgctgtgcctggtcctatcccagacaaaatatggtttatggatcctgcatttatcgttcgcctgctagcaattttaccatttggctccatcttcattgaaaatgacttcatcgtaacatctttctgggcatacaagacccacttatgtctatggctttat

SEQ ID NO: 1326 - DNA, 579 bp, Cricetulus griseus
  misc_feature (331)..(348): n is a, c, g, or t
tttcatgagggtgttgtttgaggccaggatttggaacctgatttataacatgaccttatactttacaagatacccaatccatctgataaagtttgtataagtaagaaagccatttcgaatgtcttgccatgcttttacaggagacagagcacatggtcaggggttgcagctagggaggaccgtgatgccaggggcttctgtgagatgcacttgtagcgactgacgagagtcagtgagactgaagaatagagtgcacagtgaacaaattaaagcaaaattaagaagcaaaacacgcagggcattggtggcacatgcctttaatccaagagannnnnnnnnnnnnnnnnngcttcaggaattagagctgagttttcatcctctctagaactcagtctccattttcttttcttctagaattgtttatgaaaatgtaatgggatgttgaaagcaaacaggaaaaaaaatctcctgtaataaacagatgtttaaccttttacactacatcacagtcttcaagagttgagtccaggtgaaatgcggaagcagactccaaagcaaatttggtggaaggagctaggc

SEQ ID NO: 1327 - DNA, 580 bp, Cricetulus griseus
tcactcatgtcccatgctctttgctacagctgaagccatggaagcccaccacaagagccattatgctttccactgcccccactgtgactttgcctgctccaataagcacttgttccgcaagcataagaaacaaggccacccaggcagtgaagagctacggtgtaccttctgcccctttgccaccttcaacccagtagcctaccaggaccacgttggcaagatgcatgctcatgagaagatccaccagtgccctgagtgcaactttgccactgcccacaagagggtgcttatccgacacatgctgctgcatactggtgagatggcttccagccttatgatgatgatgtaaatggtggtgacggtgatgactggcatgagcttttgctgtgtaccaagcatcacacaaagggcatttcatacattgtttcacttgacctcaagtttatgtgcacaactctagtatcccaagtttacaaggatataaggcataagttgagtgtcattcaacaaatgaagtagtcaagtcagtttctgaatccatgcactccgatttcagaacctgtgttctaacactaactag

SEQ ID NO: 1328 - DNA, 580 bp, Cricetulus griseus
ccgtccccttccttcccttgagttgatttcttccttccagccaaagcgaaaagcattctcttcaccccaggaagaagaagaagctggattcacaggacgcaggatgaattctaagatgcaggtgtattcaggttccaagtgtgcctatctccccaaaatgatgaccttgcaccagcagtgtatccgggtgcttaaaaacaatattgactctatctttgaagtgggaggagtcccctattcagttcttgagcctgtcttggagaggtgtacacctgatcagctctatcgaatagaggagtgcaatcacgtattaattgaggaaacagatcagttatggaaagttcactgtcaccgagactttaaggaggaaagaccagaagagtatgaatcctggcgggagatgtatctgcggcttcaggatgcccgagagcagcggctgcgcctgctaacaaacaacatccggtctgcacatgccaataagccgaaaggacgacaagcaaagatggcatttgtcaactctgtggccaaaccacctcgagatgtccgacgaaggcaagagaagtttggaaccggaggagca

SEQ ID NO: 1329 - DNA, 579 bp, Cricetulus griseus
  misc_feature (441)..(441): n is a, c, g, or t
  misc_feature (578)..(578): n is a, c, g, or t
tgcagtggctccagagcccgggcgggcgatctgcggctgccgcacggcactgtggccaccccggtgttcatgcctgtggggacacaggccaccatgaagggcatcacggcggagcagctgcacggcctgggttgccgcctctgcctgggcaacacctaccacctggggctgaggccgggcccggagctgatccagaaggcccgcggcctccacggcttcatggactggccgcacaacctcctcacggacagtggcggcttccagatggtgtccctgttctccctgtccgaggtgacggaagagggcgtccgcttccgctcgccctacgacggccaagagatgctgttgagcccggagaggtccgtgcagatccagaacgccctgggctctgacatcatcatgcagttggatgacgtggtgagcagcacagtgacaggcccncgagtggaggaggccatgcacaggtcagtccgctggctagacaggtgcattgcagcccatcagcgtgaggacaagcagaacctctttgccatcatccagggtggactgaatgccgatctgcggaccacttgcctgana

SEQ ID NO: 1330 - DNA, 579 bp, Cricetulus griseus
  misc_feature (171)..(188): n is a, c, g, or t
atggaacatgtgacggagggtgcctgggagtccctgcaggtgccgctgcatcctcgtgtgctgagcgcgctgcgcgagctgggattcccacacatgaccccggtgcagtctgccacaatccctctgttcatgaaaaacaaagatgtcgctgcagaagctgtaacaggtagnnnnnnnnnnnnnnnnnntgtcatccccattgtggagattcttctgagaagggaagagaagttaaagaagagccaggtgggagccattgtcatcacccccactcgggaactggccattcagatcgatgaggtcctgtcacacttcacgaagcacttcccacagttcagccagattttgtggattggaggccggaaccctggagaagatgtagagaggttcaagcagcacggtgggaacatcattgtggcaaccccaggccgcctggaggacatgttccggaggaagtctgagggcctggacctagccagctgtgtgaagagcttggatgtcctggtgttggatgaggcagacagacttcttgacatgggctttgaagcaagcataaacacaatcctggagtttttgcca

SEQ ID NO: 1331 - DNA, 211 bp, Cricetulus griseus
tccgaaacatccagtttgaggcctttcacgtgttcaaggtgtttgtggccaaccccaacaagacacagcccatcctagacatcctcctcaagaaccagaccaaactcattgagttcctcagcaagtttcagaacgacaggacggaggacgagcagttcaatgatgagaagacctatttagtcaaacagatcagggatttgaagagaccagc

SEQ ID NO: 1332 - DNA, 578 bp, Cricetulus griseus
tggctggtagggaggtgcattaggatcctcatcccgcagaggcgtgtactctcctacagtgtcctggttcagaggcgtggtctcgggcacactctggttggggtactcaggaggtgggagaggagccttctcttcctgcaagatgagtggcatgctagaagagggtgggggcttggagtcatccagctcatctgcaaagatgataggcacccccttcttgataaaggtggcctggtcctcaagggtcagcttgcccttccgcttcttgcgatagcagatcatagcaatgattccagcaatgagcaggatggctgcaaccacaacagctggaatgactgtgtgcagataaacatcatcctcactgctcttctcaaggtccctgtctggaacctctgtggctggtgctgctgaggttccaggagacggtggtgccacagggataaattgtaagtgccgacaactgccagcgcctgtcacagcaatactcactgccttaaagtcaggctccagatcattggagaaagcaggccgaggtttcccattttcatcagcaatcctgcggctcagccctatgatct

SEQ ID NO: 1333 - DNA, 578 bp, Cricetulus griseus
ttcagaattcagaatatggagatgacagcatcaaaaaagcccaaaatgtaatcaactgtttccccaagcagtggtttgtgaatctgaaaggagaaagaactatttctcagttagaaaatttttgccggtatcttgtacatttagcagatacaatttatagaaatagtattgggtgctctgacgtggaaaaaagaaatgcaagagaaaacataaaacagatagtaaagcttcttgcaagtgttcgggctttggatcatgctgtgtctgttgcaagtgaccacaatgtgaaagaacttaagtctctgattgaaggaaaatagatctgagaccgaaaagtgtttgctttgctaccattcccagtgtgtaaattttgtatatatgtaaagtttcttaaactgtaagataactgcttaaatacaaaaacattatattaatactgagtccttaaatgtgatttcttcagaacgaaaggaattcagattatttctaggagtctatgaatgttttccttactgcctgtcatattttgtttatggaagtattttgtatcggcattaaattaacttgggttaagtgtc

SEQ ID NO: 1334 - DNA, 578 bp, Cricetulus griseus
tccctgagctcggccggccatggcggcggtgaagagcctaaaccctaaagccgaggtggcccgggcgcaggcagcgttggccgtgaacatcagcgcggcacggggcctgcaggatgtactgaggaccaacttggggccgaagggcaccatgaagatgcttgtttctggtgctggagacatcaagcttactaaagatggcaatgtgctgcttcacgaaatgcaaattcaacacccaacagcttctttaatagcaaaagtagctacagcccaggatgacataactggtgatggtactacatccaatgtccttatcattggggagctgctaaaacaggcagatctctacatttctgagggtcttcatcccaggataataactgaaggttttgaagctgcaaaggaaaaggcactccagtttttggaacaagtcaaagtaagcagagagatggacagagaaacactcatcgatgtggccagaacatctcttcgaactaaagttcatgctgaactcgcagatgtcttaacagatgctgtagtggattccgttttgtccattaagataacaaatgaacccattg

SEQ ID NO: 1335 - DNA, 579 bp, Cricetulus griseus
  misc_feature (537)..(537): n is a, c, g, or t
agcagccctgccaacaaacttgcattctgccttgatgtcaacagttgtcacaatgcccaacgtgggtaacaaagttatggtttctgagggacagtccgctgctcaatctaatgcccggcctcagttcattacacctgtctttatcaattcatcttcaattattcaagttatgaaaggatcacagccaagcacaattcctgcaaccccattgacaaccaacagtggcctgatgcctccctccgtcgcagttgttggacctttacacatacctcaaaacataaaattttcttcagctcctgtagcacctaatgttccctccagcagtcctgctccaaacatacagacaggccggccgttggtccttatctcacgtgccactcctgttcagctgccttcccctccttgtacatcctctccagtcggcgctcctaattcttctatccagcaagtaaaagaattaaatccagatgaggctagtcctcacatgaacccctcatcagatcagatcactctggtttcttcacaggccatcacagnagtttcttcccttttgaccaataggccaagctcccttgtcat

SEQ ID NO: 1336 - DNA, 338 bp, Cricetulus griseus
ctgtgagagaaacaaggccagcactacagagccaatctgtgtgtgacatgcatgcaaaataccaatggctaaaatgaatctacaatgccagaatggaataggagctggttttaagtggagagacagtgactggaagtgcctgggagatttcatctgggtaagctccataaaccgatctcagaatatttcataaaaatctcattggattatttgttcataatttgtgagcttttgtgcttatgttatgtttttaaaaggggatatccaaactttcttggtgggaggtgggtgtggtggtggtacatacctgtgataccaacacttaagattcaaaggca

SEQ ID NO: 1337 - DNA, 579 bp, Cricetulus griseus
acctgtgtgcttctctgtatcctgtcccaggtattctgcagctgtgtctgtccttcctcaattctgaccagtcacgctcaagcatcccactgacctgctgggtgccagccccactcagcaagctgacgttcaaagggagggaagttgagcttgctttaatgtagaagtctgcacaccatccccagctgtctctgatcttctgccatggcttgccctaaaactcagcttgcctctccaagcagcctagactgaacaagtttttacaggcgcaggaggagagaacactgggagaaaagcagttatgtgccctatcatggaggaagtcggggcattcttaaaagagtagtaatttcccacaattgacttgaaaagtcttttacttcacaaattaaggttctctgtggcccacttcgtctctgtggctccgtagttgttcggaattcctgttaactttgaagctcaccctagagttgtaaaaagaacaaaggtgatcaggctgaggaatctgccgaggtggacagtttgccacactgcagtctgtgcctcgcttgagttattttaaaaagcgaaactagattt

SEQ ID NO: 1338 - DNA, 498 bp, Cricetulus griseus
gtgcctgcgctgtggagtgaggtgaaccgttatggccagaacggcgacttcacccgtgccctcaagaccgtcaacaagatattgcagattaacaaggatgatgtaactgccctgcactgtaaagttgtttgccttatccagaatggaagtttcaaagaagccttgaatgtcatcaacactcacaccaaagtgttagccaataactctctctcctttgagaaggcatattgcgagtacaggctgaacagaattgaaaatgccttgaagacaatagaaagtgccaaccagcagacagacaaactaaaggagctttatggacaagtgctgtaccgcttggaacgatatgacgagtgcttggctgtgtacagagatcttgtccggaactcccatgatgattatgatgaggagaggaaaacaaacctttctgcagttgttgcagcacaaagcaattgggaaaaagtggttccagagaacttgggtctccaagaaggcacatga

SEQ ID NO: 1339 - DNA, 578 bp, Cricetulus griseus
tgggcttttagaaacacacatactcttgttgaagacctcaccttttaatcctttcaaatagtgccacactctgttgtcttagcattcaaatatatgagcctatggggccattcctattccagccaccacagaatgtcttcacatctttacacatttaagatctaacttcttttcagagtgctttattgcatgctgattctacagtgtaatttatcccctatttgtgtaaactgtttaggttttgttataaacaatggtgcgatggacatgggcatccatacaagttgtcaacatttgtccgtttatctgtgaggtaggttttttagagtgaggatagaaagccctttctttatgaagctgatctgttggaaggtaaaagataaataaatgcatgaaaatactaggtgtcagagaatgtgactgtccctctgtcctttgctctgcctcatccactaggttctcattctacatgtacataaatccccagcattggcatccatttcccctcatcttaaatttgtgcttcctctgtagtgagcagggctggggagaagtcttgtttcctagcttccttttgg

SEQ ID NO: 1340 - DNA, 509 bp, Cricetulus griseus
  misc_feature (300)..(319): n is a, c, g, or t
tattgtacttgatgaaattcatgaaaggaatctacagtcagatgttttaatgaccattattaaagatcttctcaattttcgatctgacctgaaagtaatattaatgagtgcaacattgaatgctgagaaattttcagaatattttggtgactgtcctatgatacatatacctggttttacttttccagttgtggaatatcttttggaagatatcattgaaaaaataagatatattccagaacaaaaagaacatagatcccagttcaagaggggtttcatgcagggccatgtaaatagacnnnnnnnnnnnnnnnnnnnnggctatctataaagagcgctggccagtttatataaaggaacttcgaacaagatactctgcaagtaccgtagatgttttggaaaggatggatgatgataaagttgatctgaatttgattgctgcccttattcgatacattgttttggaagaagaggatggtgcaatactggtctttctaccaggctgggac

SEQ ID NO: 1341 - DNA, 579 bp, Cricetulus griseus
ctttcctcgcggatcgaagagactctagctacagcttgtggctggaagggagacggaggccgcagctcagggaaagtgaagctgcagtagtggtggtaggaagatgtcgggcgaagacgagcagcaggagcaaactatcgccgaggacctggtcgtgaccaagtataagatggggggcgacatcgccaaccgggtactccgatctttggtggaagcctccagctcaagtgtatcagtgctgagcctgtgtgagaaaggcgatgccatgataatggaagagacagggaaaatcttcaagaaggaaaaggaaatgaagaaaggtgttgccttccctaccagcatttccgtaaataactgtgtgtgtcacttctcccctttgaagagtgaccaggactatatactcaaggaaggtgacttggtaaaaattgaccttggggtccatgtggatggcttcattgctaatgtggctcacacttttgtaattggtgtggctcatgggacccacgtaacaggccggatagcagatgtcattaaggcagctcatctttgtgccgaagctgccttacgactggtcaaacc

SEQ ID NO: 1342 - DNA, 579 bp, Cricetulus griseus
  misc_feature (510)..(552): n is a, c, g, or t
taacgttaactgtattgcattcttctcttccctaaaatacaagactgtgctctcatagtatttcagagtctgttagttacatgccattgattttcatatctaagaaagtaatggaaagtcatatttcttcccaccaaatagttcataaagtttcatcattgcggtctcccccaagtgttcctaattactttggaaataccctgtcattcttttggcttgggcatggtcccagtggtacctctgactacattgcttactgtgtcaaactgacctcttgccacaattctgaagccagttacagatttacctggtgcctccgttgaacaagtgaatgacagaaccctggagtactgatctgatcacagtgtttatataatggggccagctttgtgatcttacagagtagatgcttctgtcttcctagtagggcagcctgaattagtcacagccattctgagtagtggggagagctatattatctcttggatccaacttaaatatacctcactnnnnnnnnnnnnnnnnnnnnnnnnnnnnnnnnnnnnnnnnnnnttgtctgtacaatcataaactttttgt

SEQ ID NO: 1343 - DNA, 568 bp, Cricetulus griseus
  misc_feature (551)..(551): n is a, c, g, or t
ccctacccccagggactcacttactctttgcccagactgggaagattgaacgcctccctctggagggaaacaccatgaagaagacagaagccaaggcctttttccatatccctgcaaaagtcatcattggactggcctttgactgtgtggacaaggtggtttactggacagacatcagtgagccttccattgggagagccagcctacatggtggagagccaaccaccatcattcgacaagatcttggaagccctgaaggcattgcccttgaccatctcggccgcaacatcttctggacagactctcagctagatcggatagaagttgcaagaatggatggcacacagcgaagagtgctgtttgacacgggtttggtgaaccccagaggcattgtgacagactccgtaggagggaacctttattggacagattggaacagagaaaatcccaaaattgaaacttcttacatggatggcaccaaccggaggattctcgcacaggacaacttgggcctgcctaatggcctgacctttgatgcattctcgtctcanctctgctgggtggatgc

SEQ ID NO: 1344 - DNA, 511 bp, Cricetulus griseus
tcgacccacagcgttccggaaagaatacattcctggaaacaaggaatttttgggggaaagggaaatacaaagacctttacctttcctaaaggatgggagactgggaaaaatgacgccaaacccaaaggacaccatgctaagggcttataaaggagacacgtctcagaactgggaaaaaggctgtcttgtgcttttgaaataaactgtcactctcaagcagcctgtcaatgctaaatgttaggacttctgtctctgctggagacacaacctggtgcatgtcagcgtttattgtttggcagctttctcatcactccctgactccgtttacctttactccgcatcccattctcttactgcctatctgaaggattggatgggcagagtatacgtggcggtggttggtcttccccgtatgttgtccatttaattccatagcactgattttttctgaatgtgctctgccctgggaaaatggacacatattcctcacaatgggaataactaattactt

SEQ ID NO: 1345 - DNA, 507 bp, Cricetulus griseus
cgccaccagaagtccatgtcaacctctggccaccccattaaagttgcactgccaaccatcaaagatggctctgaagcttaccggcctggtacaactcatagagcgcctgctgcttctccatctgctcacagcatcagtgcctccactccagacaggacccgtttcccccgagggagctccagccgaagcactttccatggggaacagctccgatagcgacgcagtgcggcttataacggcccccctgcctccccatcccatgaaccgggagcgttcgcacatgccagaagggggacctcaacggggataataagcaaaatcacttccaagttcgtacgcagggatccaagtgaaggcgaatccagcggcagaagcgacacagccagtacatcaggggagccaaaagagagagaaaaggaagagggcaaagactccaagcctcgttctctgcgattcacgtggagcatgaagaccaccagttccatggaccccatcgacatgatgaga

SEQ ID NO: 1346 - DNA, 178 bp, Cricetulus griseus
ggaagcggtgtccccgccaaagagttgcagggggtctgacactgcgacgcgagcgctgtgtttggtctcagatcatcatcacgatgcctctcagatgttccaaggatttaatttaatgcaagtggggatctaggcctatcagctacaagggggacactgcatcaaaaatatttaaggg

SEQ ID NO: 1347 - DNA, 128 bp, Cricetulus griseus
gtggatttatttttaatctgttagatgaatatatccaaaaagcagtgttgccagtctatctgctcagcccgggtctgttgtcaattttatcaatgactggattgagaaatgtcaatagcaagtcaatc

SEQ ID NO: 1348 - DNA, 466 bp, Cricetulus griseus
  misc_feature (35)..(56): n is a, c, g, or t
  misc_feature (137)..(187): n is a, c, g, or t
tgggggtgcatgcctttagccccagcacttaggtnnnnnnnnnnnnnnnnnnnnnntgagttcaaagccagcctggttagcatattgagttccaggacagtcagaactacatgagagggacccttcgaaagaaagannnnnnnnnnnnnnnnnnnnnnnnnnnnnnnnnnnnnnnnnnnnnnnnnnngaaagaaaggaaagaaaagaaaaaaagaagaaacaagaaaataaacacaacatcaagcaaacagaaactaacccaaccatatagccagggagctgggttactgagtagaaaagaaaagcccaggacaccaactcacagcaaagcaccaaccacatgttcatacatttcatttagattaaggctgtcatgacaccctgaagtcaggaatcataatctccagtttttaattgacatattcaaaagcacacactccggccaatatataatgatcccagaggc

SEQ ID NO: 1349 - DNA, 579 bp, Cricetulus griseus
atcttgcgactgcgttcatggcgttccctgtcaaggcagtgattgttcccgggaacggaggcggggatgtagccacccaaggctggtacggctgggtgagaaagaggctagagcagattcctggtttccattgtttggctaaaaacatgcctgacccaatcacagcccgagagagcatctggctgcccttcatggagacagagctgcactgtgatgagaagaccatcatcataggccacagctccggggccattgcggctatgaggtatgcagagacacatcaggtttatggtcttgtattggtgtctgcatacacatcagacttgggagatgaaaacgagcgtgcaagtgggtactttagccgcccctggcagtgggagaagatcaaggccaactgccctcacattgtacagtttggctccactgatgaccccttccttccctggaaggaacaagcagaagtggcagataggctgaacgccaaattgtacaaattcgacaaccgtggtcactttcagaacacagagtttcatgaactgattagtgtggtgaagtctatgctaaaagtgccataatagt

SEQ ID NO: 1350 - DNA, 289 bp, Cricetulus griseus
tggaggggttttgcttctgcttggtggcatggtctgcccagggctatctggaagatcgctggggcttataatgccactcaccattccactgcagggctcactctgaacagatctggcaatggaacgactctcaaaactggcagagggagctgacacatacacatctgctgaatacaagtggagtctcctggacataccgtactgggggacttttgggcgtctgcccaccaccttttggagggagactcggcccctgcagaaaactcaacagccttatgcctgggtgatt

SEQ ID NO: 1351 - DNA, 497 bp, Cricetulus griseus
gcctacatactcactcccagcatttgggaggccaaaggcaggtagagcccccataagtacaaggccatcatttattacatgattccaggacagtcagggctacacagtgagatcctgtctctcagtacaagacaaaaaaactaaatgtggtttccaaaaaatttgttacatttaattcctgccaaatctctaaattacagaattgaggtaaaattgaaggcttgggaaattagtactcaggtgaccatggtgtatgatcttgactttcttcatcctgtaaatacatacttgaaaaacactgtgtaaggcagcatgctgtgaggtttttctgtctgttacgtatgttttatgaacaaaggatgctgggcccctcccaaattttgagtacctaccatgctgaacacctcctctgccttgagacttagaggaggaaacaaacaagaatctgttggagcttgtcttcaagggaagaaaaccctaggcttgtaaatagttgc

SEQ ID NO: 1352 - DNA, 579 bp, Cricetulus griseus
tctggtcacaaacccaacagcggatgagttctcaagctttatcactgctgtttctggtgatgtcacatctcctgcagtcacacccacctttggcatacatggatttcatactggccaccacactgagctcttttgatatatcactgatggcatagagtccctaatggatggagagggctgacttctccccagctgcagtatcaggcaaaagaagtgtcttggaagcctttaaaagttcagttgtgggtttttgtctgttttttcatggcccacctgcatcggcctcatgagagtgccagagttgctggctcatgtcctcatgcccatctctgagtgtttcaagtgagctcttttattcagacctaatgaagaactggtgggccaagacactacttatggcactcccataatcccacttgacccaaggcacctactttgtgcctgctgtcactctctgggtggtctccttgccatcttctctgaagctgaccagtggcagaagactggtctaaagtctcaagtcacaaactaaaatgtgatacatggcctggctgtggtggctcacgcctgtaatctcaa

SEQ ID NO: 1353 - DNA, 455 bp, Cricetulus griseus
aattagacatgagtaatttctgtatgaagacaggccagccatacatgaataactccaataaaaaaggatgaatagagctagctgggctttgtataacaattacaatgtttaacagttgtatagcagtgtttaacgatttataagcactttaatgtgtgtcttcgtaagttttccttgcaggaatgccatgagcttttagtacaagtgtcattacccaaccttaaacatgagtacacagagaaccaggaaatcatacagttctctcattttccagccaccagtaggtagctcttcagtcccaaccttctcaccaagtcacttgttagcagacactgaaccctttctcagtagaatctggggcttggtagtacttaatttggaacattcataaggattttgtagtaacattgaaagtggcctgatccttaatagatttggacaggttggaagatatt

SEQ ID NO: 1354 - DNA, 578 bp, Cricetulus griseus
  misc_feature (296)..(296): n is a, c, g, or t
  misc_feature (542)..(542): n is a, c, g, or t
tgggggggtggggggggaacctgtaaaacaatcttatcaatggaataatcctcaagtaactttgtgttaaaagcaatgagtcaataaatttgaatttttaaagatgtcaaaaaaacacaattaacaaaagatagcctgaagctagaggagagcagccagtgctcacgattaagaaattcccaccactcacaactatctgtaacttcagtttcatgaatctgacaccctcagacatacatgctgacaaaacaccaatacagataaaatataaataaattataaaaacaaaaaattancctattcaacacataattttagcaaagtatattcagttgaaatcacacaaaatgtctccccccttgcaagaaaaaaaaccagtggcaattttcaaacacccttatttacaccttagattaagtttgctaataaaaaacacttccaataaatcctggagattctaaaaaatcgtcagtctgtctaacctcatgactcaagccttgtttccctttccactccaccctcttaccgtcacaatttcacanttacaatccgtacccgtagtctctcattccttggga

SEQ ID NO: 1355 - DNA, 579 bp, Cricetulus griseus
tcatcattgtcttcaacctgaatgacgtggcatccttggaacataccaagcagtggctcgctgatgcactcaaggaaaatgacccatccaacgtacttctcttccttgtgggttccaagaaggacctgagtactcctgctcagtgttccctaatggagaaggatgccctcaaggtggcccaagagattaaggctgagtattgggcagtgtcctccctcactggtgagaatgtccgggaattcttcttccgtgtggcagcattgacctttgaggccaatgtcctggctgagcttgagaagtcgggggctcggcgcattggagatgttgttcgcatcaacagtgatgacaaaaacctctatctaactgccagcaagaaaaagaccacatgttgtccctgaagagtgaggattatccagaaactgcccattcctggggtactgtgccaccccaacttcagaattcaacccctggacgtttgcactgacttttcagaccaaagagcttccccttgaaagcagcgcccccagagtgtaactgggaccatgctagtctcttcctgcccatggcaccatgccaaag

SEQ ID NO: 1356 - DNA, 554 bp, Cricetulus griseus
  misc_feature (378)..(393): n is a, c, g, or t
agcatgaggagaaaacggggatctgagttcactctgttaacaactttaatccatttgcgaggaaagaacacgtaaacatatctcagcatttttgcattaaggacttaagttttcaacacaggaaccttggcggatacaattaaaccttagttcattctattaaagaaatactaatgaagaactaaaactcccaagcccaaccaagtacaggacttttcttgagtttttacagtgttacaatatgccccaaaacagtgtgaagaattctgctttaacagatcgttgtaacaatacacaagacacataataataaattttaacttacatattaggataaaatgaatatagcattcaaaccagcaatttctttgagatagnnnnnnnnnnnnnnnntaatttttggtcttctaagtttttccttaagtgaatagatatttagttggctgtgtttctgggtatatgtataagtctggaagaaacagggaattgaaatagtgaaatgctgcttaagaaatacctgttagtctttagcagcaagtataaaactaagatct

SEQ ID NO: 1357 - DNA, 411 bp, Cricetulus griseus
cacttcgacaggtacgtcagacacaaggtcagaaggtaaaaggatgtcaaacagaattgaaatatctgaagcaaaataaggagaaagcttgtgagattcgtgaccagattactagtaaggaagcccagttagcatcttcacaggaaattgtcaagtcctatgatatatgtaacttgagccattgaagatatcgtctgaaagtaaattgaacacaacctctctaaaataatgagacttgacaatgaaattaaagccttggatagtcgaaagaaacaaatggcagaaagataacagtgagttataacagaaaatggaaaaggtttttcaagggactgatgagcaactgaatgacttgtaccacaatcaccagataacagtgatggagaaagaacggcgcttggtattactgtc

SEQ ID NO: 1358 - DNA, 231 bp, Cricetulus griseus
tgcatataaaaatagaaagtaaaaaattggcccataatgttactacctgcagttcacaaccccatgcagttttgaaagatgtttcttaatgctgattccatacacagtacagccttgctttaagtttccatctttgcaacttcaccaaagagggtggagcactttttcagatatgcgataactttccattgacttacaaggcacattctatctttactgttctaaaattca

SEQ ID NO: 1359 - DNA, 579 bp, Cricetulus griseus
agaatggctgtgctgtctgtgagacagagcggtgtgaaggcactgtaggctttggaggaagtcctgatgaagttggggagaccaccctggacgccatgatcatggatggcgccaccatgaatgtgggagcagtgggagacctcagaagaattaaaaatgccatcggagtggcacggagagtcctggaccacacaacacacacgcttttagtaggggactcagccaccaactttgctgaaagcatggggtttaccgttgaagatttgtctaccaccacctcaaaaagtcttcattcagagtgggcttctaagaattgccagccaaatttttggagaagagttacaccagatccttcaaaatactgtggaccctataaaccatctggtagcttggagtgggctatttctgcccacaaacaagtggatatccataatcatgatactattggcatggttgtaatccataagacgggacatgttgctgcgggcacatccacaaatggtttaaaattcaaaatacctggtcgtgtaggagactcaccaatacctggagccggggcctatgctgaagacatgattg

SEQ ID NO: 1360 - DNA, 444 bp, Cricetulus griseus
ttgtggagtctccgacgacggctgcgtcgccgccagctcggcatccttgaacgctgccgagccgccgacgccgcagacatggagcccgagccgcagcccgagcaggtcacgctgctggtgaagagtcccaaccagcgtcaccgggacttggagctaagtggcgaccgcagttggagtgtgagccgccttaaggcccacttgagccgagtctaccccgagcgcccgcgcccggaggaccagaggctaatttattctgggaagctgctgttggatcaccagtgtctccgagacttgcttccaaaggaaaagcgacatgttttgcaccttgtgtgtaatgtgaagaatccctcaaaaatgctagaagccaaaacaaagggtgctgaatccacagagcagccagctaacactgatcaggcacagcatcctcaggcacagcatccgggg

SEQ ID NO: 1361 - DNA, 579 bp, Cricetulus griseus
accaccaagcgtgtgctgtacgtgggtgggctggcagaagaggtggacgacaaggttcttcatgctgcttttatcccttttggagacatcacagatattcagattcctctggattatgaaacagaaaagcaccgaggatttgcttttgttgaatttgagttggcagaagatgctgcagcagctatcgacaacatgaatgaatctgaactctttggacggacaattcgtgtcaatttggccaaaccaatgagaattaaagagggctcttccagaccagtttggtcagatgatgactggttgaagaagttttctgggaagactctagaagagaataaagaagaagaagggcccgaacctcccaaagcagaaacccaagagggagagcccactacaaaaaaagcacgggcaaatcctcatgtgtacatggacatcaagattgggaacaagccagctggccgcattcaaatgctcctacgatctgatgttgtacccatgacagcagagaatttgccgtgcctgtgcacccaccaaaggggtttggcttcaatgggagcagctttcaccgcatcatcccccatt

SEQ ID NO: 1362 - DNA, 380 bp, Cricetulus griseus
tactccacaccaagcaaaacaggctgtgcactgtatccatgccattttctcaaataaagaagtccagcttgcacagatttttgagccactcagtaggagtctgaatgctgatgtaccagagcaacttataactccgttagtttcacttggccacatttccatgttatcaccagatcagtttgcttctccaatgaaatctgtggtggcaaactttattgttaaagatcttctgatgaatgacaggtcaacaggtgagaagaatggaaaattatggtctcccgatgaggaagtttctcctgaagtactagcaaaggtacaggcaattaaacttctggtaaagtggctgttgggtatgaaaaacaaccacgctaaatctgcca

SEQ ID NO: 1363 - DNA, 578 bp, Cricetulus griseus
ctgggcctgcagtgtctgctgctgtgctgacgagtccgagtcactctcattgtcctgaggactggggatactgggggacgtgctgcgattgtcctggtcgatgtctttcgggtcactgctgccctcatcgttcacactgcgactgtgcgaactctccccctcaccttcagagggagagttggggcggctgatctcctgggtctttgtcttcttggaggtggtcctatcaggctcctctgtgtcagaggccaccttctcccgctggcgcttggtgctcttcagaggggaagcagcctcttctttcgccttcttggctgacttcttcaccgtttctgctttgctgtcattgctggaagtgctagcagcactgggggagttccggccactggaccggatgtcttcattgataggtgaggcgcggccatcaagactggcgggctgcttcttccgaccactgcgtagtgtagacatcgagccccgactccgccgtgttctcatgctatgcttcccactgagcccatcgtcctcctccttgacaggcttgaacattaagggctggggggccacatgcttctcga

SEQ ID NO: 1364 - DNA, 505 bp, Cricetulus griseus
gtccgcccacgcgttccgggggaataacacaggagcagcaaaataagagataccataatacagggagccattataggtttaaagagaaatcaggcgctagggaaatgtctgtagatctacaatgatgacaccaactaacaatctaagcaacagaggagaggctaccttaaatgccctcccctgataatgagattgatgactgacttatatcccatcctacagccttcatccagcagctggtggaagtggaagcagacacccacagctaaacactgaactgaactggaatagttgcagaggaggaggtcaagacagctggtgaaacccacagaaacagctgatctgaacaaggggaaactcttggttcccagattgatagctgggatatcagcatgggactgatccagaccccatgaacgtgggtactagtgaggagaccttggaagtctatggggccttttgtagtagatcagtacttatcccaagcataggaatagactttggg

SEQ ID NO: 1365 - DNA, 578 bp, Cricetulus griseus
  misc_feature (222)..(245): n is a, c, g, or t
caggagccactgtcctcaattgcttccatgatatcttgtcagggaagctgagaggtggctctcctggggtccccgtgaacggactcatttcagaagagaatgtgagtctccttgctgcagctctgcggatacagaacatgatcagcagtggcaggagatggctccgagagcagcagcacaggaggtggcgacttcactgcttgaaactgcaacccctctccnnnnnnnnnnnnnnnnnnnnnnnntcaaggagacagactccaaaagctgtggatgtccttgccaaggagataggattgcttgcagatgaaattgaaatctatggcaagaccaaagccaaagtccgtttgtccctgctggagaggttaaaggatcaaaaagatggaaaatacgtcttggttgctgggatcacgcccaccccacttggagaagggaagagtacagtcaccatcggactggtacaggcactgacagcccacctgaacgtcaactcctttgcctgtctgaggcaaccttcccacggacccactttcggagtgaaaggaggagctgcaggtggtggatatgcccaggtcatc

SEQ ID NO: 1366 - DNA, 153 bp, Cricetulus griseus
  misc_feature (81)..(102): n is a, c, g, or t
atatatcatggtatggttattacttgaatagaggagattggaatgttgtgtgagatgatgaatcctgcaaaaatgcttccnnnnnnnnnnnnnnnnnnnnnnttcatgagtattttgttggtctcgtttataataattactggtgggaatggg

SEQ ID NO: 1367 - DNA, 131 bp, Cricetulus griseus
tgcattcgaggaaaactaaataccacaagtttgcagtttaagaactctgtagtttctgaagatgtagcagaaactggcattgaagagttgctgaaaaatttcaagaagagagatgagatgatgagacggac

SEQ ID NO: 1368 - DNA, 578 bp, Cricetulus griseus
catcatggtccaccttacaacctttctcagcagagcataccatgggggccacctaaccatccgccttgctttgggtggctgcgccaaccggcccttttaccgcattgtggctgctcacaacaagtgccccagggatggccgctttgtggagcagttaggctcctacgatccactgcccaacagtaatggagaaaaactggttgccctcaacctggaccggatccggcattggattggctgtggggctcacctctctaagcctatggagaaacttctgggtctttctgggttttaccccctgcatccgatgatgatcacaaatgctgagagacttcgaaggaagagagctcgagaagtcctcttagcatctcagaaaacagaatcggagcctggagaaacagaagcaagctgacttcagtgtacacagttgtggctgcaaggtcaagggccttcacaactcttgcatagaactttttgttgggtttgaggatcaataaatggagttttccaagtctcagtcttccagcacagcctgagcaggggtcagacagatttgttatctgatgttagagctgggt

SEQ ID NO: 1369 - DNA, 418 bp, Cricetulus griseus
ttgtggctttttatctttcttacgatatgcctttttacaaatcatgacttcacttggctggaattttttaagtttttgtttgtttttacttttttcctcctagcttatcacttcattttcctcaatttagtatcattgatgatcctgtgcttatcatgttagggccattatacctcacgaataacaagttggtaactaaccacacttgaattaaccacgcagtcacagtcagctcatctcttaaaactgtccaaatttgagtctaataagaaccctaaaagcacaatgatacatgaagagttgagcttaaaacagccttgctgagatacattggcatgtttttattgtaccatgagaacaattaaaattgttcagagatattttatattacctttccaattcattataatttttctcc

SEQ ID NO: 1370 - DNA, 579 bp, Cricetulus griseus
tcttgtaaaaatacctcttataaactaaatgtagctgacaggtgtaggggacaccataaccaggcctgctagggtgacataggaaggtttaagtgtgaggagcacgcacatggaagctccttcttccttttcatcttcggcttgctgtacttacttctgccctgctggctggctaggttgctctgtaagtaaggcctttccctaataaattcccttatatttttacctgactccgtattggtaattcccacattagaggctaaaattagatgtatattttccatttctttctttttctttcctctctctcttttctcccccccccccactcactttttttcaatgaaaactttaaatgagaagcttgtgctactggatgtctgggacatattaatttatggtaacattacctttttgtggggagggtgttgtttgtttttgggggaaggatcttgcttataagcccaagttagcttagaacttgaaatcctgtctcatccttccaattgctaggatcattggcatgttccacctggctgtttgttgcattcaaaaagtccatttgattgatacagcctt

SEQ ID NO: 1371 - DNA, 579 bp, Cricetulus griseus
tagaaaaacgtcaacaattgtggtaaatgttgcctgtacctgagggtttttgtttgtttgtttgaaccctttttgtgctctttgagataggatgtgcagaagggatgtagtattcatctggtatgggaggtttgcgctaaagagtaggtggcattttgggtgaatatgaggattacaaaggcttttatgcatgttcaaagacacagtcagtcaatgaacctgaacagatgggcactaatcaaaaatggtagttctttaccccagtctacctcctaaagctcctgatatggtttctaccctcattttttcatttgtgaatgatacgatcagaatatactaaatggtaggataatgcaacatgtattgtttgcagccttctttgtgtgttggaggataaaatttagcttgaatctcagccttattttccccaacatcaggttgacttgaacaaagatgcttttgcttcttcttttgtaaaatagcaaaaatatcagtatttatgattaaatgaagtacagtatgtgaagcacttatgacaagtgttaaaaatatggtattagtgaaaaaatatggcagctg

SEQ ID NO: 1372 - DNA, 579 bp, Cricetulus griseus
cattcaaggcctacctggatgtggatattaccctctcctcagaagctttccacaactacatgaatgctgcaatggtgcatgtcaacagagccctcaaactcatcattcgtctcttcctggtagaagatctggttgactccttgaagctggctgtctccatgtggctgatgacctatgttggtgctgtttttaatgggatcacccttctgattcttgccgagctgcttgttttcagcgtcccaattgtctatgagaagtacaagacgcagattgatcattatgttgggattgcccgggatcagaccaagtcaattgttgaaaagatccaagcaaagcttcccggaatcgccaaaaaaaaggcagaataagcacatggaaaccagaagtgcaacagttactaaaacgccatttaatagttataacatcgtcacttgtaccatgaaggaacttgctcagtgtcagcttgagcctggctccaagctgtctgttctttttaatctggtgttctctcccctgcttttccctttaccctcaggtccaagcacaagatgtgttagactcgaaaaaaagaactggtct

SEQ ID NO: 1373 - DNA, 466 bp, Cricetulus griseus
  misc_feature (92)..(119): n is a, c, g, or t
gagatgctgagtcagcgctgtagcgccatgactcctggccgtttgctttgtctttctacaaggatgtctgcgcagaagtaggtcaggctccnnnnnnnnnnnnnnnnnnnnnnnnnnnnttgtgcacatctcaggagtatgctccatcgcagcccagaagtgtctagggaccagacacaggggaaaggaggccctggccatgcaccttacgattccttcggcagggagagtggccatgcccactaatccttactgcctgcctggcaccagtccttccttttggcttacaaaggctgtgatttctctggcctggctctggccgctctctctgtcccttggcgtctcacatacagatcacttcctttccttgctctcaactgagcagactcggctaacttttgtaggcacttctgctccaaagcagcagcttgctctagtgggcttgtttaaaatcttgatccgaaac

SEQ ID NO: 1374 - DNA, 539 bp, Cricetulus griseus
  misc_feature (170)..(170): n is a, c, g, or t
cgctttggcaaaaaaaacaagaccaaaaaaggcaaaaaggggggcctcctctcgcacagggtggacctccaaacccaactttttttttgggggaaaattcttccccgcaggcatgccaagctatcaagtactatctccaactgaatattatgaggagactggtgccttantggttggccctggagcaagaactggtcttggagccccagtacggttaatggctccaacccctgtcttaataagttctgcagcagcacaagctgcagcagccgcagcagctggaggaactgcaaatagtcttacaggcagcacaaatggtttgtttcggccaattggcactcagccaccacagcagccgcagcaacaacaaccaagctctaacctgcagtctaattcattttatgggagcagctctttgactaatagctcccaaagtagctctttgttttctcacggacctggccaacctggatacgcatctcttggctttagaagtggtagctctttgggagctgctataggctcatccctcattggat

SEQ ID NO: 1375 - DNA, 577 bp, Cricetulus griseus
tgctattccaaaaataagaagaacaagagatgtcaattgcactccttagatacacacaaacctaaacctttgggaggatgttggatggatgtatgggaactaatgtcccaggaatgcagggatgaagtagttttaattgactccaggtgtcttttagaaacactagaaacatatctgcgaaagcacaggttttgcactgattgcaaaaataaagttctccgagcgtacaatatcctcattggtgaacttgactgcagcaaagagaagggctactgcgctgcactttatgaggggctgcggtgctgtccacacgatcgacacatacatgtttgctgtgaaacagacttcattgcgcatctcctgggccgtgctgagccatagttcgcaagagggcgaagagaacggcatgctaagacaatagatatagctcaagaagaagttctgacctgcttggggattcatctttatgaacgattgcatcggatctggcaaaaactgcgggccgaagagcaaacgtggcagatgctcttctatcttggtgttgatgctttacgtaaaagctttgagatgactgtgg

SEQ ID NO: 1376 - DNA, 579 bp, Cricetulus griseus
  misc_feature (62)..(77): n is a, c, g, or t
  misc_feature (526)..(526): n is a, c, g, or t
agtgggacgagcgattgcggttaccgagcatgctgtaccgatgtctgggaattgccacgtgnnnnnnnnnnnnnnnngaaggaaaccaaagtcgtgtggaccccgaggcacccatcccgagagctggcaagcagggcgtgatgcccgggtgaatgaaatgtgtcccggagccaccatacacgacgtggaaggctgttttctgcgccacattacgtagaaattgtgttcatcacacgataaattgccggatgagcctatcgaggttcttcctaaataaactgaatctgaaaaactaaagtaaaggtgttttgcaccagcattcagaagacaacagtgttaaactaatgtgttagcttgctagtgggataaatcctacagttattgacagcatctggctaccgtgcttcactcagagcaaatagtcagccttgaacttctgagatcaatcaatcctcctgcatactgtgcatgataccagtgagatagcacgcccagacttcctcctcagagaaactattatcatcangagatggaggctgtggagtctgagctgtgacagatgctctcctagtgacctac

SEQ ID NO: 1377 - DNA, 290 bp, Cricetulus griseus
  misc_feature (102)..(116): n is a, c, g, or t
attccatgagtcaagtagttactgtcagtgttccatgccgccagtgttgtggttattcttttaatgtccaaccacctgaaaaacagagtagggagggaaggnnnnnnnnnnnnnnncgtttcaggttgagagaaaccatcaaggcccttgaacaggtcctgagctgtgggagggattgaaggaagttcatggcaaactaagattctgtagacattgctcacccgtgcctgctttgtcagtgaactgtaatgtgactctgagccagacaaatttagtatgtttgctgccaa

SEQ ID NO: 1378 - DNA, 544 bp, Cricetulus griseus
  misc_feature (308)..(325): n is a, c, g, or t
tttgccacagtgacacgtggtccattagcacaaaatgggacaatcccagaaaataaacaatccatgcatctcaaaggctttccctgtagtgttttatcactccatttagttactgctgtcagtctctctcgaggaggcctgctttgtagggggcccataggtgtctatatgatccgctaggcacaggaaaaggcataggagacacagacttagaactgtgtgtgcttttaagcacacacacacacctcacagatgagagacgacctgtggccacacagttttcagtcgttgagtagcccgctttttcnnnnnnnnnnnnnnnnnntcagtgggaacctggataagcaaacatccgtggggaataccgttctgcactactgcagcatgtacggcaagccggagtgcctgaagctgctgcttaagagcaagcctactgtggacattggtgagtgcggccgttctcagactctccacgggcctgagacggcatatgcatcatacttcatgtgttgcttccagtatcccagacaattaaccgactttg

SEQ ID NO: 1379 - DNA, 229 bp, Cricetulus griseus
  misc_feature (147)..(147): n is a, c, g, or t
catctggggacctgagaggccatacccctttcccttacttttctggtttgtttggttggctttcttttcttctttgttttgttttgcacttcaatggatggtggaacccggtctggtcagctctgcccttgggttccggtgcactangccaaggcggcctctctggggcttctgcggttcaaggaatcactttttaaaagataaggagaaatttaaggggttttaattt

SEQ ID NO: 1380 - DNA, 579 bp, Cricetulus griseus
gggggatttgagctgccgatctccaagtgggggtgagcatgctcccagcgaagacagtggcaaagacagggactcggacgaagctgtgtttctcactgcctgaggcttccctttggagttccaaagtaaaagacagaagcacttccaaattaaagggacagtgcaattcataacaaaaaaatatctcaagaaatggcacgttccatcaagaaccataaaatacagctggggaagcttctcttctttagctcttctacaggggcaaattgttctcttttccttgaagctactgagaaaatcatctatttcagtttttccctccaagaaatcctcggcaatattatcagactcttcctcagcttcatgtgcagctactttcaatcttgcctgtagggcacttgcactacaactctcactgagttcatgtagtctttgcatcttcttttcaaaggtagacttcatttgtataagtaattcatacttatctaaaacggtttgccttttggtttccaagctgtgctccaaaaggagattttttcttgctaatgcctcaatacttcttactaaggcctccttgtc

SEQ ID NO: 1381 - DNA, 427 bp, Cricetulus griseus
  misc_feature (49)..(68): n is a, c, g, or t
ccgcaagtgtacctcaatggcgagtttgtggggggctgtgacatccttnnnnnnnnnnnnnnnnnnnnggacctggtggaggaactgaaaaagctgggaatccgctctgccctgatagatgagaagaaccaagactcaaagtgagggctccaggtcctcgctgagcagagtgccctcttcatcacattcgctgccagaaaagccttaccgagtcatgtcctgtgctgtgggtgcttgcactgggcctccagccttgcaagcaggcagtggttttacttggcctttggctcagaatcccctatggtgaacttccttgtaaccactgccctgtaaattggcattgtaatccggtgttgctgtgacccaaatttgttcttatattgtcttttattctctgcctgggtcaagagtcattcctgactcttgt

SEQ ID NO: 1382 - DNA, 580 bp, Cricetulus griseus
ttgcggcccatgcggttgactacatccaggatggcttcggattcccgggacggtgggaccatgtgtgcgctggagtttgcagtgcatatgacctgtcagagctgtgtggacgcggtgcacaagaccctgaaaggggtggcaggtgtgcagagtgtataagtgcaattggagaaccaaatggtgttggtgcagaccactcttcccatccaggaggtgcaagcgctcctggaaagcacaggaaggcaggctgtactcaagggcatgggcagcggccagttacagaatctgggagctgcagtagccattgtggagagctctaacaccatacgtggggtggtccgattcctacagctgacctctgaactctgcctgattgaggggaccattgatggcctggagcctgggctgcatggattccacgtccatcagtatggggatctcacaagggattgcaatagctgtggggaccattttaaccctgatggaacatctcatgggagccctcaggatactgaccggcaccggggagatctcggcaacatcctggctgatgctgatggccgagccaccttccggatag

SEQ ID NO: 1383 - DNA, 579 bp, Cricetulus griseus
  misc_feature (192)..(282): n is a, c, g, or t
  misc_feature (470)..(470): n is a, c, g, or t
  misc_feature (551)..(551): n is a, c, g, or t
ttgtggactcctgtagcaaacatgaatgggaggaggctgcagtttggtgttgcggtgttagatgacaaactgtacgtggttggagggcgcgacggactgaagactttgaacactgtagaatgctacaaccccaaaactaaaacctgggagtgtgatgccgcctatgtccacacataggcatggtcttggtgnnnnnnnnnnnnnnnnnnnnnnnnnnnnnnnnnnnnnnnnnnnnnnnnnnnnnnnnnnnnnnnnnnnnnnnnnnnnnnnnnnnnnnnnnnnccagtggaattttgttgccactatgtccacccccaggagcacagtaggtgtggcagtactaagtggaaaactttatgcagttggtggtcgcgatgggagttcttgtctcaagtcagtagaatgctttgatcctcacactaataaatggacaccgtgtgcccagatgtcaaaaaggagaggtggcgtangagtgacaacatggaacggactgctgtatgctattggaggacacgatgctcccacatccaacttgacttccagactttcanactgtgtggagagatatgatccccaaac

SEQ ID NO: 1384 - DNA, 293 bp, Cricetulus griseus
ctgatgccttctgctacaacacaccaggatccttcacatgccaatgcaaacctggatatcagggggatggcttccaatgtgttcctggagaggtggggaaaacgcgatgtcaactggagcgagagcacattcttggagcatcaggcgtggcaaatgcccaacagcccaggctgctggggatgtatgtaccccagtgtgatgagtatggacactatgaacccacccagtgccaccatggcactggctactgctggtgtgtggacagagatggtcgggaactggaaggtacccgt

SEQ ID NO: 1385 - DNA, 579 bp, Cricetulus griseus
  misc_feature (560)..(560): n is a, c, g, or t
acattgtatcttttctttttaatttcagttttactaaagtgttttatatatgttaaaattcatacacctaaatgtataatcgagtgaatttttgaagactatttactgttttgtatagcttttgccataaactacttttagaacattgtgattataacagtaagttccttcatactcattctgtttctaccacctgtagacagctatgaatccatgatctatagatttacctttcttgtacattttatgtaagtttcaaggctcattcatgtatatgtttctttgtaattgctggatagtgtctcatatactgttatgctgcatttttgttaattcattcagcatttgatggacatttagatcagttccaatttttggctattgtggattgtgttgctacaaacacatatatacaaatctttgcacattctaattttttattgggttagtgtttttagcttatcttttcaaacaaataaatattgcctacagggaaattcttaaagaagatgaaactggatcacttaaggctacgatagaggatattctttttaaggcanagagaaaaagagtgtttga

SEQ ID NO: 1386 - DNA, 546 bp, Cricetulus griseus
  misc_feature (353)..(383): n is a, c, g, or t
gggtgaagaaggagcgggtcctcgccactcgctctcactccgtcgctcgctctctcgggcaacatggcgggcgtggaggaggcagcgtcctttgggagccacctgaatggcgacctcgatccggacgacagggaggaggggacgtgcagcgcggctgaggaagctgccaagaagaagagacggaagaagaagaagggcaaaggggctgtgtcagcagtgcaacaagaacctgataaagagtcaggcgcctcagtggatgagatagcaggacagttggaaagacaagcactggatgagaaagagagagatgatgatgatgaagatggagatggtgatggtgacggtgcagctgnnnnnnnnnnnnnnnnnnnnnnnnnnnnnnngaggaccaaaggttcaaacagaccctccctcagttccaatatgtgacctgtatcctaatggtgtgtttcccaaaggacaagagtgtgaatacccacccacacaagatgggcgaacagctgcttggagaactacaagtgaagaaaagaaagcattagatcaggc

SEQ ID NO: 1387 - DNA, 410 bp, Cricetulus griseus
  misc_feature (8)..(25): n is a, c, g, or t
gaggaatnnnnnnnnnnnnnnnnnngtggggcaagtccacacattgagaatttgctccatattcttagcttaatattaccattctttttaataacctcgtgcacagcttgtttcttcaacagaagacttgcagacttatagtccgctggctcaagtctagaatggaggctggccccccacaagtgcccaccgtatgtttctggaatgaatggatgcatcctccttgatgtgaagccataaagagacctttgctgtgaccttaacacagagatcatcatccactctggatatagactgtgcaggctccatgaatgggaaagggaccccacctcacataaaggacaatctgatttgctttgcctaaatgttgaactctgcgttgcgaatgcaagataaggatggggggaggt

SEQ ID NO: 1388 - DNA, 251 bp, Cricetulus griseus
gtcgacccacgcgggcgtgtgattccgtctttgcggtgggagtcatggccactcgtcgagctctgcacttcgtcttcaaagtggggaaccgcttccagacggtgcatttctttctagatgtcctggggatgcaggttctacgccatgaggaatttgaagaaggctgggggggctgcatgtaatgggccttatgatgggaaatggagtaaaacaatggtgggatttgcgcctgaggatgatcattttgttgc

SEQ ID NO: 1389 - DNA, 313 bp, Cricetulus griseus
gaaactggccaggcttctacttacccattccctatttcagccagtcccaggaccctgtatcccaagaggtggcttcctgccattttaatcttggtatagtataaccatttagtggttggtggcaaaaatcggggtaggggtatatacctctatattatatatcaacttacatatatacatatatttttaggtgtggggggagatgggtgtggctacctccacctgctttcacatgcaaaaggcctagagagctgcttgacttcatacagggtcatcatgaggagccacatggcccagttcccaacctggcatg

SEQ ID NO: 1390 - DNA, 578 bp, Cricetulus griseus
  misc_feature (341)..(341): n is a, c, g, or t
gcagtcttatcttctgggaacagagaaagtgttgtgtaatgagaacagaactctcagctgtgtagctggaatagtgatgggcaaacagaaatcacttgctttatgtccacttttttgagtggtgcttaaatataaagtcacaacctgaattgagtcattgctttctgagggaatcatgtcttttctctaatttctctttcaggatgcaaagaatatttcagaagcaacgttttaagacttaaatgtttggtttcggtaccagataattgctaacctgttactgataatttacccatgtacgcttgtcatttttccctttgttatcttaaggtctgccctantagtggctcctttctctatcatgttgacctcttttgaaagtttcccaggccataagagaggcatgaagaaaattcccactcaagactaagttccattatgtgttttgtaagtgattaactaaaactataccatccccagttattgacacaaattcagtcacattctgaatattgtttgttcaccttccataataggtgacatggacatatcattgtaaataacactaaacagttagg

SEQ ID NO: 1391 - DNA, 482 bp, Cricetulus griseus
tgatccactgtgtgggtgattggaactgagcccaagtcctgtggaagagcaagtgctctaaaccactcaacaatttccttaagttctcattatttcacccctcctcctgccaaaaccttctccagcagattctagccgcgcagcaggacagcacctggaaatggctgtttccaggtgttctatagtgtcttgatgctgtggcatccgtgtatcttcaggagggagatatttcccccatccccacacccccgagtattctcctgatcagtgttagttatgttattctgttattctgagagtaagccttgtacctgtatgcagatgttggaattgtacatcagggtttgttgggctctgtacccagccccaacaataggtgtagggtttaccctcacatttgatgtcctttcttgcctgcccttggaaacatgttggtaacatgaaatgaaacaaggcatgccattaggtacaaaatactcaat

SEQ ID NO: 1392 - DNA, 544 bp, Cricetulus griseus
  misc_feature (232)..(299): n is a, c, g, or t
acttcaccagaaaacagtttctgaagttgaaatactactcagtcatccttcagtccaggataagaatgaaaattgctcttacagcttacaaacgatatctttgggccacagtgactattcagaggcgttggcgtgcatgtttaagaagcaaacaagatcaacaaagatttaagatgctgaaatcttcagcccttataatccagtgtatgttcagaaggtggaagcgacgcannnnnnnnnnnnnnnnnnnnnnnnnnnnnnnnnnnnnnnnnnnnnnnnnnnnnnnnnnnnnnnnnnnncaagcaagagaaagatccgctgttgtgatacagtcatggtatagaaggcacaggcaagtgcagaaatatactcatattaagtcttgtgttgtagccatccaaagaagatttcggtgctgtcaagcgccaaagttatacaagatacggaaagtcgctgtcctgactctccagaagccctatagggcctaccggaaggggaagctagcacgccccggctattttcagaaacaagctgctggctttct

SEQ ID NO: 1393 - DNA, 186 bp, Cricetulus griseus
gctgagatgtagctcactggcagagtacttagcacacataaggtcctgaatttgatttcaagtattttgaaaacaggaataaaaaataccagcatatgtctaaacttaatattttggctttgcttttctgcctaacaaagcaaatgggccttggggggtgctctgcttgtccctgtggagagaggc

SEQ ID NO: 1394 - DNA, 392 bp, Cricetulus griseus
  misc_feature (329)..(356): n is a, c, g, or t
ggaggcccaaagcggagggaagtggggagtcggagagacccatccggagtcctatcggcggagacccctgtgcggtccggagggggcggcggccccgactctgacccgcgccggggggtgggccatggcggaaatcatcgacctggggcgggagatcgagcaactgcggcgctgcgagctcatcaaagagagcgaagtcaaggccctttgcgcgaaggccagagagatcttggtagaagatagcaacgtgcagagggtggactcgccattcacagtatgtggtgacattcatggacaattctatgacctcaaggagcttttcatattannnnnnnnnnnnnnnnnnnnnnnnnnnntcttcatgggagactttgtggaccgtggtttctaca

SEQ ID NO: 1395 - DNA, 492 bp, Cricetulus griseus
  misc_feature (101)..(120): n is a, c, g, or t
ggaggtggatttttttttgagcctggaggaaacaaaacccctttaatgaaggctttactgatggagtgaacaattttttattccacaaagtcaaaattttnnnnnnnnnnnnnnnnnnnnttgccgggggggccggggtttttttgcccagggggcggggtaaattttttttcctaaaaaaaaaatattaaataaggaggggaaaaccttttttttctaaacctgtggggggtgggggaaaaatcttccttgtgatagggtttatcgctaatctagtgcctttttccctcactgatttttgatttttcctctcggtctttatgtttcacattgttttttgttgtgaagcgttttaaaatttcgttgggcttcttcggtcggagtacctgttggttactttgcatgccttctatattttcgttcttcgatcttattgtcacagcatttcttaattctcgttctctttcattgtcctttcttaccgctttattt

SEQ ID NO: 1396 - DNA, 581 bp, Cricetulus griseus
aggacacagagcaaggctcaaaggttcagtgatgctttggatactgtaaggtgttatcctctactgtttcacattctcaggcacaaactccgatgcccgattgtagctcacagcccttctgtgttcatgatgacattgtgctgcagcgctttgagtgaccagccacagaaatgtaggacagagttccacagaaagtaggcatttcggagcccccagctcctgcttccatcctggatggctcattttagcagtcattagattcacgttgacaatttctgtaattcacaggctaggaatgtagctcagtttgtagagtgcttgcctgaaatgcatgatccgtgtggattcagttcccagagccgcataaaactgggtgtggtggtacacacctgtgatcccagaggcaggaggactagaaattaaaggccttcctccgctacaaagtgaatttagggccagcctgggctgcaggagtccttgactaaaacaaaacaaacatcagcgacgaagagtgcagcccctataacttctctttttttattactgggtattggcttcatctataaattaaatttgggcat

SEQ ID NO: 1397 - DNA, 481 bp, Cricetulus griseus
gactctcgggcagccacatgtttcccgacaggatctcgccacattggacgtgaccaagttgacaccactttcccatgaaggtatcagcagacaagctacaattaatattggtacaattggtcatgtagctcatgggaagtccactgtgggggaggctatttctggagttcacaccgtcagattcaaaaatgaactggaaagaaacattaccatcaagcttggatatgctaatgctaagatttataaacttgatgacccaagttgtcctagaccagaatgttacaggtcctgtggaagtagtacaccagatgagtttcctacagacattccagggaccaaagggaacttcaaattactcaggcatgtttcctttggtgactgtcctggacatgacattttgatggctacgatgctgaacggtgcaccagtgatggatgcagctcttctgttgatagctggcaatgaatcatgccctcaacct

SEQ ID NO: 1398 - DNA, 581 bp, Cricetulus griseus
ggagccctgtgtgtgtggcagtgtgatacaccccctgaggcctgaagctgaaaccccctaaggctggaaggcagacctacttcagagggagaaggaagaataagaggaggaggagggggaggatgaagaggagggagaccgagggaccactatccgagggaagaccatgccagctgaacaggagaaggctgggaaagtgaagtactcacggctggccaagtacttcttgaataaagaaggggactttaacaacctaacggccgctgcctatcataagaagactcatcttttggtcacgggttttgcttctggaatcttccatctgcatgagctcccagagttcaacctcatccactccctgagtatctccgatcagagggttgcttcggttgccatcaacagctctggggactggatcgcctttggctgctcacgcctgggccatctgctggtgtgggaatggcagagtgaatcctatatactcaagcaacagggccacttcaacagcatggtatcactggcctactctcctgatgggcagtatatcgtcactggtggggacaatggcaaggtcaaggtgt

SEQ ID NO: 1399 - DNA, 581 bp, Cricetulus griseus; identical to SEQ ID NO: 1398

SEQ ID NO: 1400 - DNA, 300 bp, Cricetulus griseus
gcatccccgggctacgaccatacccatggctggatcagatgagcttcctaccacatatggcctatacctacccaacgggagcagctacctttgctgacatgcagcaaaggaggaaataccatcggaaacaatgctttcagggagaagggggtgatggagcacaagactacatgccaggcctagacgacatgacagactccgattcctgtctgtctcgaaagaagataaagaagacagaaagtggcatgtatgcatgtgacttatgtgacaagacattccagaaaagcatgtcccttctgc

SEQ ID NO: 1401 - DNA, 578 bp, Cricetulus griseus
gcagctagtggtggtcatctgtaactcataccttcaagtatctggtggcctctgtcctgcacacgggtgcatgcacaaacatacacacatacatgtactcagggcatcagattccagagagctggagctacaagaagttgtgagttgcccagtgtgggtactgaaaccaaacttgggtttctgcaagaggagtgcatacttttaaccactgagccgtctcttcaacctggtggaaattcttgacatgaactggacatgatggtacatgcttgtaatcccagtacttggaaagtagagaaaaagaggatctggagttcaaggccagcttgggctacataaggctgtgtcttagaaaacaaaaataaagtattcacagaaacttctgaaagacaagttatatgtctttcaaaggacatatgaaggcagttttgatggtccaatttgctaggcatttccgacacccgtctgcctttactgaagaacctgggaaagctgtctgcccttggtctctgttgaaactatatccggctataaattgcaactgcaggatttctggggatttatttgcttctcttttc

SEQ ID NO: 1402 - DNA, 248 bp, Cricetulus griseus
  misc_feature (187)..(187): n is a, c, g, or t
  misc_feature (190)..(190): n is a, c, g, or t
ggggggaggaaagggagaaaggaaagagggagggaggagggcatgaaagaaagattctgattccccctttaatttgctaatttaaaactataactagccctctgctgcaacctgctgacagactggagaattgcaaatgataaaatcgtacttgcagcaagaattttacagttattgttcattcttnaanatccccacctcatttggcttccattaattttaccacaacaatgaatccccaccttgac

SEQ ID NO: 1403 - DNA, 578 bp, Cricetulus griseus
  misc_feature (329)..(346): n is a, c, g, or t
agcaggaggaagaagaaatggagacagatactcgctcgtctctgggacagtcagcatcagagaccgaagaggacaccgtgtccatatctaaaaaagagaaaaatcgcaagcgtcgtaaccgaaagaagaagaaaaagccccagcgggggcgggcagcatcttcagagagctctggggaccgagagaaagaatcagctcgttctcgaggctctgactcccctgctgctgatgttgagattgaatatgtgactgaagaacctgaaatctatgagcccaacttcatcttcttcaagaggatttttgaggctttcaagctcactgatgatgtnnnnnnnnnnnnnnnnnnggagccagagaaacttgacaaaatggagaactctgcagtccctaagaagaagggctttgaggaggagcacaaggacagtgatgatgacagcagtgatgatgaacaggaaaagaagccagaagcccctaagctgtccaagaagaagttgcgccgaatgaatcgctttactgtggcggaactcaagcagctggtggctcggcctgatgttgtaaagatgcacgacgtgactgca

SEQ ID NO: 1404 - DNA, 579 bp, Cricetulus griseus
acttgctcttctacttccgggtacccttcatttatggccacaaatacgacttcacgtccagtcggcacacagtggtgcacctcgcttgcatctgccactcatcccactacgtcaagcgtctgctggagaccctcttcgtgcaccgcttgtgtcacggaaccatgcccttgcgaaacatcttcaaaaactgcacctactactggggctttgctgcatggatggcctattacatcaaccaccctctctacacaccccctacctacggagcccagcaggttaagttggcgctgaccatctttgtgatctgccagcttggcaacttctccatccacatggctcttcgggaccttcggccagctgggtccaaaaccaggaagatcccatatcccaccaagaaccccttcacctggctatttctgttggtgtcctgtcccaactacacttacgaggtggggtcctggattggctttgccatcatgacgcagtgtgttccagtggccctcttctccttggtgggcttcacccagatgaccatctgggccaagggcaagcaccgcagctacctgaaggagttccgtg

SEQ ID NO: 1405 - DNA, 580 bp, Cricetulus griseus
  misc_feature (261)..(275): n is a, c, g, or t
caagatgtcaccactcatgccaagatcatggctgacaacccatcttgggatggcgagaagacaattatcatcacctgcagcttcaccccaggctcctgcacactgacagcctacaagttgacccccagtggctatgagtggggccgacagaacactgacaaaggcaacaaccccaaaggctacctgccctcacactatgagagggtccagatgctcctctcagaccgattcctcggcttctttatggttcctgcccagtcnnnnnnnnnnnnnnnctttatgggtgttcggcatgatccaaacatgaaatatgagctgcagctggcaaaccccaaggaattctatcatgaggtccataggccctcccacttcctcaactttgccctcctgcaggagggtgaggtctactctgcagacagagaggacctctacgcctagttattttcttgcttccttctgcttcggattccccaaaggctggagcccatagacaagctgctgacattcagcagcctggccccttttgtgttttgtgtttgtgttgttgatagactgtaatcctgaacaaaatgtaataaat

SEQ ID NO: 1406 - DNA, 581 bp, Cricetulus griseus
tgatgtcaatgaaggtggaccatcatataaattaccatataatgtcagtgaggatccctggctagctgcatacaacttcttgcagaagaatgatttgaatcccatgtttttggatcaggtggctaaatttattattgataacacaaaaggtgaaacgttgggacttgggaataccagtttttcagacccatttacaggtggtggtcgctatgttccaagaacttcaggaccttccaacacagtgcaggcagcagatcctttcacaggtgctggtcgttacatgccaagttctgcaggtatgggcacctccatggctggagtcgatccatttacaggaagtagtgcctaccgatcagcagcatctaaaacagtgaatatttatttccccaaaaaagaagctcttacctttgaccaagcaaaccctatacaaatattaggaaaactgaaggaacttaatggaactgcgccggaagacaagaagctcactgaagatgacttggtacttcttgaaaagatactgtctctaatttgtgataattcttcagaaaagcccacagcccagcaactttaaattttgtgga

SEQ ID NO: 1407 - DNA, 548 bp, Cricetulus griseus
  misc_feature (469)..(469): n is a, c, g, or t
agaaaattttcccattttcatcatttttatttttctacttaatagaatttttcaatataatatttgaagcaaactgtaaatctgttaatctctttgaggtagatatttttgaacatttattcatcttattgaagtcttttaaaaggtattagcatgtaatcgtacataataatgaacttcattatggcattcatagacgtacataatgtattttgattatattcacacaaataccttgttatctccctcctcctaattttcttccttttcccaactgcccctctcttctgtttggttcttgtttttgggggtgagtgtgtggcatgcatgtgcatgtgtgagttgaggtttgtttacagaaccatggacagcttatattaactttaccactgaagaaaatgtccccatctatcattaactttgtgcaaatccttggggagctatgtagaccccgatcttttcccccttncacaatgaaggtgttgatgagctgagtctgtggagatctttgcgggtaatcacagctgcctgtagttcaataggggaat

SEQ ID NO: 1408 - DNA, 348 bp, Cricetulus griseus
  misc_feature (3)..(15): n is a, c, g, or t
ccnnnnnnnnnnnnnagccctgccctcccccttgtcccgggatcgctccgtcgcacccaccatgatggaagacgacggacagccccggactctatatgtaggtaacctttccagagatgtgacagaagtccttatactccaggtggggggggagatcggaccctgtaaaagctgtaaaatgataacagagcatacaagcaatgatccatattgctttgtggaattttatgaacacagagatgcagctgctgcattagctgctatgaatgggagaaaaattttgggaaaggaggtcaaagtaaactgggcaacaacaccaagtagccagaaaaaagatactttcaatca

SEQ ID NO: 1409 - DNA, 354 bp, Cricetulus griseus
attcattttctacagtgttctggttggtaaagcttcagcaaccgccagtggagactggaacacaaccatagcctgctttgtagccatattaattggcctgtgccttacgttactactactcgccatcttcaagaaggcgctggcgggtctgcccatctccatcacctttgggctggttttctactttgccacagactatctcgtgcagccctttatggaccatcttgcattccatcaattttacatctaacatacctgcagttagaacccatggatgtttcttctttgatcattaaatacctcgagaggacataggggactttcctgtgtcgtcatctaacgaagtcatgactc

SEQ ID NO: 1410 - DNA, 580 bp, Cricetulus griseus
cttgtgtcttcccaatgtgatcgggcagaactgtgatcagtgtgcacccaatacctggcagctggccagtgggaccggctgtgagtcatgcaactgcaatgctgcacattcctttgggccatcctgcaatgagttcaccgggcagggggagtgcatgccgggcttcggaggccggacctgcagcgagtgccaagagctcttctggggagaccccgatgtggaatgccgagcctgtgactgtgatcccaggggtattgagacaccacagtgtgaccagtccacgggccagtgtgtctgtgtggagggtgttgagggtccccgctgtgacaagtgcaccagagggtactcgggggtcttccctgactgcacaccctgccaccagtgctttgctctctgggatgtcatcattggtgagctgaccaacaggacccacaaattcctggagaaagccaaagctttgaaaatcagtggtgtgattggtccgtatcgggagaccgtggactctgtggagaagaaagtcatgagataaaagacatcctggctaagagcccagcatcagaaccactgaaaaacattggca

SEQ ID NO: 1411 - DNA, 373 bp, Cricetulus griseus
gatcgagcgccggggcatggaggaggtgggcatctaccgagtatccggagtggccacagacatccaggcactgaaggcggcctttgatgtcaataataaggatgtgtcggtgatgatgagcgagatggatgtgaacgccattgctggcacgctgaagctctacttccgtgagctgcccgagcccctcttcactgatgagttctaccctaacttcgcagagggcatcactctttcagaccctgttgcaaaggagagctgcatgctcaacttgctgctgcccctcccaaaagccaacctagtgaccttccttttccttctggaccacttgaaaagggtggctgataaggagacagtgaacaagatgtcccttcac

SEQ ID NO: 1412 - DNA, 600 bp, Cricetulus griseus
  misc_feature (395)..(412): n is a, c, g, or t
  misc_feature (540)..(540): n is a, c, g, or t
tcgacccacgcgctccggaaacccaaaaggaagtagttttggaaagtgaagaaatgagccaaaccaataaggacaaaatggaatacgaagaacaaaaagtctcagatgagctcatgagcgaaagtgactccagcagtctcagcagcactgacgccggcttgttcaccaatgatgagggaagacaaggggacgatgaacagagcgattggttctatgagaaggagtcagggggagcctgtggtattgctggagttgtgccctggtgggaaaaggaagaccctgcagagctagacagagacctacctgaccccgtgtttgaaagcatcctcagtggttctttccccctcatgtcacatcctggcagaagaggtttccaagctagactcagttgcctnnnnnnnnnnnnnnnnnngaatattaaaaaatctggaggggctccaccttcaatggctgcaaactggaccagtgagattcccctataaaccaaatcttctattgctaataaattagttacgttttgaacacctggggaatggcatntcgaggaccctggctcctgtcctcttccctgggagaatacactgaagtgcgagcctcttt

SEQ ID NO: 1413 - DNA, 581 bp, Cricetulus griseus
ggcatctgcgctctgtgacagacattctaaattgtttgaagaacctgaagatcccagcaacaggtcttttttttctgaaatcatctcctctatttctgatgtaaaattcagccatagtggtcgctatatgatgactagagactattggggaggcaaaatttgggacttgaatatggaaaacaggcctgtggagacataccaggtacatgaatacctcagaagtaaactttgctcactctatgaaaatgactgcatatttgacaaatttgaatgttgttggaatgggtctgacagtgttgtcatgactggatcctacaataatttcttcagaatgttcgacaggaacacaaagcgggatataactctagaagcatcacgagaaaacaataagcctcgcacagttttgaagccacgcaaagtctgtgcgagcggcaagcgaaagaaagatgaaataagtgttgacagcctagacttcaacaagaaaatccttcatacagcctggcaccccaaggaaaacatcattgctgtagcaactacaaacaatctgtacatatttcaagacaaagtgaattaagctggca

SEQ ID NO: 1414 - DNA, 580 bp, Cricetulus griseus
gaaagctctggtttccacctggacctgctgctcattgtagccatgggtggtatctgtgccctctttggccttccttggttggctgctgccactgtccgctctgtcactcatgccaatgccctcactgtcatgagcaaggctgtggcgcctggggacaaacccaagattcaagaggtcaaggaacagcgtgtgacagggctgctggtggccctgcttgtgggcctctccatggtcattggagacctactacgacaaatccccctggctgtactgtttggcattttcttatacatgggagttacttcccttaatggaatccaattctacgagcggttgcacctgctgctcatgccacccaaacaccacccagatgttacctatgtcaagaaggttcggaccatacggatgcacctgttcaccgccttgcagttgctctgcctggccctactctgggcagtcatgtccacagccgcctccctggccttccccttcatcctcatcctcacagtgcctctgcgcatggtggtacttacccgcatcttcaccgagcgagaaatgaaatgtctggatgctaatgaag

SEQ ID NO: 1415 - DNA, 392 bp, Cricetulus griseus
cactaaatatatttataagtcatctttgtctggaacccattgggaaaaaaacaggtgcaaagggagggggtagggaacaggaggggaggcttaaaagttccaatcattcacacaaaataaaaacatcttctgatagcagcactgaatcatccggctgtgccgagcaaaccgtcctggtcagctgctgaccgactgtcccaacaggagtctcaaagccctgctcctcgctgatccatccggggaatccgggtaggagtgggattgttgttcatcctggtcttggcagatatgttaaatactgcaacattaacgagtcccgggcaagtatgaggtcagtgttgggttatttatctggaaatgtaggtgtatgtcccaaaaggggagcggggtgg

SEQ ID NO: 1416 - DNA, 189 bp, Cricetulus griseus
ggacctcatgaagagcaatcagggctcttaacctctgagccatctctgcagccccctaaagtcatctttttgaattaaatgccctttatctaaaaagtccaattgcgtcgacattaaacattatggttacccttactaagatacaaattttagtgtccaaatattttattctgtaaacccatgctggcg

SEQ ID NO: 1417 - DNA, 580 bp, Cricetulus griseus
gctcgcccagcctacccctgtctagccgggcttcggccgaggtccctgccggctggcgagcccagcgagggcacgatcgggagtccaactttcagaagagagactccccagcaagcccgcttggagggtcccccccggctgctcacctcgtgggccagacggcccttgcaaggggcagcagcagcacccccacctcgcaggctctgtaccctgacttctctcctcccgagggcctggaggagctcctgtctgctccccctcctgacctaggggcccagcgacaccacggctggaaccccaaggattgctccgagaacatcgacgtcaaggaaggggggctgtgctttgagcggcgccccgtggcccaaagcactgatggagtccggggaaagagggggtactccaggggcctgcatgcctgggagatcatctggcccctggagcatatgggcacacacgccgtggtgggcgtgggcaccgccctcgtcccgctgcagggtgaccactatgcggggcccttgggcagcaacatcgatttctggggctgggattttgggcggcgatattgcgtcatcctagt

SEQ ID NO: 1418 - DNA, 459 bp, Cricetulus griseus
gtttaaaagttaaatttggtaagttcttctatgtgaatatcttctactgaaaagtaattattgtttttatttagctcatatttctgaacatccaaatcagcaacccagccacaaaatacagatcaccatgggttctactgaatctcggggggattacatgggctcaagtatcctcatgggtatcttcagcaatgctgatcttaagcttcaggatgaatggaaagtaaatctatataacaccctggattcaagcatgactgataaaagtgagatttttgtgcatggagatttgaagtgggatattttccaagtaatgatatcaagatcaaccacaccagacctgataaaaatatgaatgaagctccaggaatttttcacacaacagtttgataccagcaaacgagctctatcaacctggggacctgttccttttcttccacccaagacaatgactaacac

SEQ ID NO: 1419 - DNA, 194 bp, Cricetulus griseus
acaatttaaggatagtgatctctctcatgtgcagaacaaaagtgcctttttatgtggagtcatgaagacttacaggcagagagagaaacaagggaccaaagtagcggactccagtaaaggaccagatgagtcaaagattaaggtatgtgtttgagaactttctgtagctttaagtgtgtgtgttttgcttgtgg

SEQ ID NO: 1420 - DNA, 555 bp, Cricetulus griseus
ggtgtggagaattaattctgtttttaaactactgattgaatgtcatggctaaggcaaagatgatgttcctgtaatgcaataaatacattgagataactgtatatttatttccagacaccagatggatattggttttcaaagttaactctttttccttattagttttaaaaagtatcaaccttgtatttcacaaattatagtaacacttttagttatcaaaatgatacaggtaatgcctcttggttttgtgtaatattccagtgatatatggttcaaagtaacagccattgcatatgttttacttatgtcagtacatattctccctaaaggaatatgcatagtctttgtttacatgaattcaaatacttgggggaattgcctacaaatgccttattactaacgtgtgcggccttctgtgtgttaatacttactcataaagacctgttctttccacctgctctaatgatttcgagtagtagtagatacactattttgaatagcagtaatctttgaaaggaaatctattttacagagctacttatgttctagctggct

SEQ ID NO: 1421 - DNA, 568 bp, Cricetulus griseus
aaacccgggagctacaccgtgaaggtgccaactttgactccatctacatctgccccagcacctttgcctgtgcgcagcttgccacaggggctgcctgctgcctcgtggaagctgtgctttcaggacaggtgtggagtggcattgcaatagtgcgtcctccaggacaccacgcagaaccagatgctgcttgtggtttctgctttttcaactctgtagctgtggctgctcgacatgctcaagccattgctgggcgtgccctgcggatcctgatcgtggactgggatgttcatcatggtaatggaactcagcacatgtttgaagatgaccccagtgtattatatgtgtccgtgcaccggtatgaccatggcactttcttccccatgggggatgagggtgccagtagccaagtaggccgagctgccggtataggcttcactgtcaatgtgccctggaatgggccccgcatgggtgatgctgactacctgactgcctggcatcgtctggtactttccatcgcctatgagtttaacccggaactggtactggtttcagctgggtttgatgctgc

SEQ ID NO: 1422 - DNA, 580 bp, Cricetulus griseus
ttgacagggaaggtaagtgagtttgctttgaattttccgattctaatgccctgtgttatggcgaattcaatgttatgacaaatactttgactcactggtaatgaagccaaataacaggaggcctccctgcttggaagctgtgttcgcagggactaaacggtgttgccatgactaccagcctctggccagctattttgtctgatgtttcttaatgtcagccattgtttattacctgttcagtttttccagtgttgcgtattttgcccagcataagtacctgtaattgtgttcatttagatctatattttctagtatttcattgccagagttacctttgtagctgagtcactatttaaagtgttatttgtcatgcatcatttattacaaataaaaagcattgcatttttggttagatgtttttcttccttttagattgagtttgtaaaattggactcacagcaataaatgactacctttctatttgaggggttctctatattcaattgtatagacaagcattcttgctcaaaattcagacttcccaggatttaaacctataagtatagattaatggacaaga

SEQ ID NO: 1423 - DNA, 581 bp, Cricetulus griseus
ataggcagaatggagttcctggaaacagctcttggcatagaacctgccctatgggtactcaagatgacaggtggacagcaggcctgggtaggagtccatgaaatagaaggataaccaacatcttattaaactggttctgcctatattggcagcccaacaggggccttcagtgtctgcctaagcatgtctctgggcatttgttttgagcatacctacccttagtacaggacagagctatgtttaaaggccttgcttcagggccctgaagaattccagggttcctgatgtgccctgaattcttgtatcatgaactccctgctccatctccagcaccttagattctgcttccacccctgccagcagagtccacccctggtgaccagagtggcctccttggctgaattttgtggcagctcagccctttgccttttcaggctatggttcccatgtagcctgggatttggcctcctcagtcacccaggggtgctagccagctgcccctcccactagcagacatgtgaagggtggtccataagccggggggctggtgctaagaattacatatccattacgtcttctgc

SEQ ID NO: 1424 - DNA, 235 bp, Cricetulus griseus
ataagtaatttccacagagcacagagcaactgctaaggtataaacaacccccaggcaacctgaccattgcctgtactatttgctcttctgttgattacatggcaattagttcgaggccaccctggtctacagagctagttccaggatagctaggttgttacatagagaaaccttgccttgaaaaacaaattcttaataccgggcccactggagacagcctataaggcaaaggtgt

SEQ ID NO: 1425 - DNA, 578 bp, Cricetulus griseus
agggagagctgggacaatagctcaatcaataaataagtgcctgtttcctcagaaccgtactttcccatgcacagatgcacacacgcaaacatatatatacacacatcagaaaaatacaccaatacaaagaaagaaatcaggatatcacgggagtaatctaggtaatatttacaaattaaaaatacataggtttcgagggaataaagctactctgatactaccactgtggatacatgtcactatatatttctccaaatatattgtgtggacaatgtaaactgggtgacaacgatgtatcaatgtgggttcactgactgtaatacatttctttcttttcttttttggtctgttgagacagggtctctctcggctgtgctagaactcaccatgtagagcaaactgatttcaaactcacaaagatctgcctatgtctgcctcccaagtgctaggattaaaggcatgagccatcacgcctggctgcaatatatttcttcttctggtgggaggtactgatgataagagaatgtatgggaataggaaggaaatgagaaatttccataactactttttaattttgc

SEQ ID NO: 1426 - DNA, 580 bp, Cricetulus griseus
aggcttgtgctggtggatttttataagtttggcacagactatgaagactctaaggctaagaaagaacactgtgaaattttcattgtataggcattttataaatacactcatctttgctgtgctggcttctatagtgtttatggtgtgggcgacaaagaccttcaggattgcaaaatgccaatcagactggatggagctctgggttgatgatgcattttggagctttctcttttcactcatccttattgtgataatgttcttatggaggccatcagcgaataatcagaggtatgccttcatgcccttgatagatgattctgatgatgaagttgaggaattcatggtaacatctgaaaatttaactgaaggaataaaactaagagcttcaaaaacagtttcaaacggaacagctaaacctacttgtgataattttgatgaagatttgaagtgggtggaagaaaatattccctcttcattcacagacgtagctctccccgtcttagtggactcagatgaggaaattatgaccagatctgaaatagctgaaaagatgttctcttcagaaagataatgtgactgg

SEQ ID NO: 1427 - DNA, 432 bp, Cricetulus griseus
ttgttggagcgcggccgggcagcagctcgtgtggtactcgggggccatcgcctcggcgctcccctcagaggaagcctcctcctcctcctccaccatctcctcctcgggcccagatgctcttcaactcggtgctccgccagccccaggggggcgtcccgcggcacggatggtcttcacattatcctctgcagtcccttctcagtggttatcagtgcaactgtaatgatgagcacacatcttacggagaaacaggagtccctgttcctccttttggatgcactttctgtacagctcccactatggagcatatattagcagtggccaatgaagaaggcttcgccagattggataacacagaatcacaaaccagcagaaagacatgcttcaaggagtggatggctcactggaatgctgtctttgacctggcctggg

SEQ ID NO: 1428 - DNA, 580 bp, Cricetulus griseus
tatcatcatggccaccaactgcgagaattgtgggcatcggactaatgaggtgaagtccggaggagcggtagagcccttgggtaccaagattaccctccacatcacagatccctcagacatgaccagagacctcctcaagtctgagacgtggggtgtggaaatcccagagctagagtttgaactgggaatggctgtccttgggggcaaattcaccactctggaagggcttctgaaagacatcagagaactgaacccattcacactgggcgatagctcaaatcctgaccagtcggagaaactgcaggagtttagccagaagttggatcagatcatcgagggcaagatgaaggcccactttactatggacgatccagcaggaaacagttacctgcagaatgtgtatgcccctgaagatgatccggagatgaaggtagagcggtaccagcgtacctttgaccaaaatgaggagctcgggctcaatgacatgaagacagagggctatgaggcatgcctggccccacagcggtagcagtgcacagctcacaggccagcttcagtgccaccagcaccacaggcgtat

SEQ ID NO: 1429 - DNA, 418 bp, Cricetulus griseus
cgcctccatgtaccggttcttcaccaccggctaaaacaaagagatgcgagtcatccttgtccggggaggagttggacaccaagcccgtctgggggaactacggcagacgggctttgttactgagtgaagatgaggaggatacaaagagagttgcccgaagtgcaaaggacaagaggtttgaggagctgaccaaccttatacgaaccatccgtaatgccatgaagattcgagatgtcaccaagtgtctagaagagtttgagctcctgggaaaagcatatgggaaagccaagagtattgtggataaggagggtgtcccccgattctatatccgaatcctggctgacctggaggactatcttaatgagctgtgggaagataaggaagggaaaaagaagatgaacaagaacaatgccaaggc

SEQ ID NO: 1430 - DNA, 506 bp, Cricetulus griseus
aactagagttacagagtgagccaccatggggtgctgtgtattgaacctcggtcctctacaagagtagcaagtgggcctggagaaatggctcagccgttaaagactaagttcacaaccaaaaatataagtgtcaagtgtttttaactgacagccatttcatcagcccctgttggtgatattctaaatgtacttttataaataatttctgtgaaaaacaaaacctattcaaaagaaaacaatgtctcattatttttgctgatagactattctattctcctcagggaacaccgcctgtggccgggcacaggtggaggctgcctaccattaagggatcccacacagtgcattggttcttgctctgtgactggcctgaggcaccacagtttgttctgtgggtacttcagcaatagtagctgtcgctgtcatggcttcatgggcactgctaaaatctgctttatcgaatcacctaatttcatcacagagtatcacacttcgatgaaaacttt

SEQ ID NO: 1431 - DNA, 580 bp, Cricetulus griseus
gtttcttggtgtgtaatttttctctgatgggaggagttcaaactggcagcactttggttaaggcaggagggggcagggactgtgaaactctgttgacgagtgggcagatgaaaacacggagagggctgaatgtctagccaggaacactcagcatttaatgatgacaccagctcattagcatgaagtgaagcagaactttgtgtggtgatcagacagacacaggcaaggcaaggcttattgattcttcgtttatatgtgggatccttgattgaatcatgaaccagaaatgggactgatggggaaatttgcgtcagatctgtagacttgtttgcacaattatatcaatgttaaccctctggtttctattgtcatgccctggttatgtaggatattcacattttggaaggcgacttgaaggaaacatgagaattttgtatgctatttttacagcttatttttataagtctaagatcattttaagacaaagtttataaggatatgaggcacaaatggtcatcatattatttctgggcagagggggtataaagaagtgagaagactgtttatatcagagaacagt

SEQ ID NO: 1432 - DNA, 554 bp, Cricetulus griseus
  misc_feature (217)..(236): n is a, c, g, or t
tataagtcaaatgaactctttcctttccaagttgctttggtcatggtgttccatcacagccatagaaaccccaactaagacagcaaggaagcatttctcacccctcctcctgggctcattggtgtccgccactacacctgcttaagaagagtgaaccgcttagattgttgacgttttcctagaaagctcaccagcatatgggtctttaaaatttgcnnnnnnnnnnnnnnnnnnnnacatagggcttcattctatagcccaggctagcctcaaattcaagaatccttttgccgcagattggggttacagtgctagaattacggcagtttttcaaagttggtgatagcaataaattcaagatttgtgtggattgtcaaccttaatctgtcctggagcagtgtcttcatttcctagtcactacctgtgtggatgacgtttctgagcaagcgacaggagcagacctaggtcaagagctattctttttttctcagtccatacagcagccacctaagtttcggtggaaaactggagggccaggtgtttgcactctgtag

SEQ ID NO: 1433 - DNA, 578 bp, Cricetulus griseus
ttcagttagcagatttatacgagccaaggggacgcatgaccttagcagacattgagcggattgctcccctggaagaaggaatgctgcccttcaacttggctgagacccagaggcagaaagcctcaggggatgcagctcgaccctttcttctccagctcgctgagccagcctacaggtttggtctgggttctattgctggagctgttggagccactgctgtgtatcctattgaccttgtaaagactcggatgcagaaccaacggtcaaccggctcgtttgtgggggagctcatgtataaaaacagctttgactgttttaagaaagtgctccgctatgaaggcttctttggactgtacagaggtttgctgccgcagttactgggagtcgccccggagaaggccataaaacttacagtgaatgattttgtgagagataaatttatgcacaaagatggctcggtcccactttcggcagagattttggctggaggctgtgcaggaggctcccaagtgattttcacaaatcctttagagatcgtcaagatccgcttgcaagtggctggagagatcaccactggc

SEQ ID NO: 1434 - DNA, 544 bp, Cricetulus griseus
  misc_feature (22)..(87): n is a, c, g, or t
  misc_feature (102)..(162): n is a, c, g, or t
  misc_feature (183)..(241): n is a, c, g, or t
  misc_feature (263)..(308): n is a, c, g, or t
  misc_feature (310)..(326): n is a, c, g, or t
  misc_feature (344)..(416): n is a, c, g, or t
  misc_feature (425)..(479): n is a, c, g, or t
aatgtctacgcttctatgtttnnnnnnnnnnnnnnnnnnnnnnnnnnnnnnnnnnnnnnnnnnnnnnnnnnnnnnnnnnnnnnnnnntatgtattcaaatcnnnnnnnnnnnnnnnnnnnnnnnnnnnnnnnnnnnnnnnnnnnnnnnnnnnnnnnnnnnnntagtgtcaaacacttacggannnnnnnnnnnnnnnnnnnnnnnnnnnnnnnnnnnnnnnnnnnnnnnnnnnnnnnnnnnatactcctacctctaacctgannnnnnnnnnnnnnnnnnnnnnnnnnnnnnnnnnnnnnnnnnnnnntnnnnnnnnnnnnnnnnngctatagcaactttatgnnnnnnnnnnnnnnnnnnnnnnnnnnnnnnnnnnnnnnnnnnnnnnnnnnnnnnnnnnnnnnnnnnnnnnnnnattagttannnnnnnnnnnnnnnnnnnnnnnnnnnnnnnnnnnnnnnnnnnnnnnnnnnnnnncgactacaacaaaaaactttatatttctatactaattattctacaaactcttctaatcccaacat

SEQ ID NO: 1435 - DNA, 566 bp, Cricetulus griseus
aaggctacttccctggagaagactccctctgtagcaaccattcttctgacattgtgcggctttattgtcacctccagagttcacactttagacccaggaagtagatgacaaatgagtaaaaatgaaaaaattaggactgtgattttattgttaggctgtgttcatagttatcttcagcctcatgtggtccatggaccacagattagacacgccagctggacagcgaccctcgtctctgtgttttgctttgatttctccatgataaaatgaaaatgaaacattgccactcctgtgtcatcccttcactaagagaactttcacactcatgggccttttgtcccccagagcaccagatgtaacgtgaaccctactccatccacaatggaaatttggcaacacgctgccctcatccctgtagaaatgccgtggctccctagatagttctaggaagaactgcagtttcctatattttgtactagtcagctcttaattaagcacttgaatggagagaagcagtggtgcgcataatccaaaatcagtggatgccattttctggtgaatcaccc

SEQ ID NO: 1436 - DNA, 99 bp, Cricetulus griseus
atcgcagaggatgaggagacacccgctagggaaaatgcaaaacgggttaagcgtatactagagctaacatccaagccactggacaacgaacattcaggc

SEQ ID NO: 1437 - DNA, 600 bp, Cricetulus griseus
  misc_feature (34)..(77): n is a, c, g, or t
gtcgacccacgcgttcgggggggggcgggcgggnnnnnnnnnnnnnnnnnnnnnnnnnnnnnnnnnnnnnnnnnnnngagacagagagacagaaacagatccctgagtagcctgtttgtttaataatgggagatagaatataaagggggggaatctggatagaaggggaggtggggaggaattgggagtagagggagggaaactataatctgaatatactatatgagagaaagatccattttgaccagaagagaaggacagaaaggaggaggaaaagtaacagaagacaaccttatggtcaaccagagcgcaacctcaatctccagctgttttcctcctctgatcttctaatccttcacatgttcttcctttctatggccagagaccaacaaagatgcttcttatagtaaagtctcatctgcaaatccaaattcagcaaataactaagccatattttaaaatgctattcaagaaaagtccatgatgaacaacctttagaaaaggtaagcatccttctaaaagaggatggagccacatatgcatttcttttctttaaatgttggcttctcaccatgtgtaaagctcgatgacgggcatggt

SEQ ID NO: 1438 - DNA, 600 bp, Cricetulus griseus
  misc_feature (5)..(5): n is a, c, g, or t
  misc_feature (19)..(19): n is a, c, g, or t
  misc_feature (24)..(24): n is a, c, g, or t
  misc_feature (33)..(33): n is a, c, g, or t
  misc_feature (41)..(41): n is a, c, g, or t
  misc_feature (54)..(54): n is a, c, g, or t
gtcgnaccccatcgccgtncaggnaggaatggnagtcgtgnagcacccaatggnataatggaagcatgaggcaagggtaggcagtaagatccgggcaagaaaaggataagagcaaggaactgcacgctattaaggaacgttatctgggtggcaccaaaacacggcgccgaacaaggcatctcaatgcccgaaagtttgtctttgagtgggaagcatctgaagatacctccattgactacaaccctctgtacaaagagcggcaccaggtgcatttgttggggcgaggcttcattgcaggcattgacctaaagcagcagaaacgagaacagtcacgtttctatggagacctaatggaaaacaagcgcaccctggaagaaaaggagcaagaggaggcaagactccgtaaactccgtaagaaggaagccaagcaacgctgggatgaccgccattggtcccagaagacgttagatgagatgacagacagggactggaggatcttccgggaagactatagcatcaccaccaaaggtggcaagatccccaatcccatccgggcctggaaagattcatctctgcccccacatattttggaagtcattg

SEQ ID NO: 1439 - DNA, 580 bp, Cricetulus griseus
  misc_feature (151)..(169): n is a, c, g, or t
taagtgtgtctaatgagaatgtcttacagatccaaatccacctacagacttgtttcaacaagttgttgtttcaacaacaagctacaccttggctgcccactagaaacacaaggttagccctgacctctcctaggtatttcttgccagtatnnnnnnnnnnnnnnnnnnnttaaagggtcaaaggtaatagagcaaatgtcatcccaaggatcaaagtcagagaaagcagcttaaattctttgaccaaatcaactagagtagaaagctgatttactttgcaagacctagagtagaaaaacacataggaagggtttcttcattctctcttcaaacttgtggttcactgactctcggttcctggaccaaggtgtgagttgctaataaatggggtacaatgaggtgatgtgggaagtatgaggacaagggagccataattgagtcccaatgccagtaacagtgcatctccagattcattgatcaggcacaaattctttctaatgggtggagaaactcctaggcactcaaccatgtctcctgcatgtggctatggtacatagccattcttgcaccattccaactc

SEQ ID NO: 1440 - DNA, 567 bp, Cricetulus griseus
caagtggattgctgggaattgaacctgggtcatttggaagacagctcttaactgcctagctatccttccagcccctcttttgttttgaatcaatttgtgtctagcactgtgccctataactattaactgtgtatgtagtccattcactggctgaagtattctgcacagtattatagttttctgttgcataatgaagagttggtgatgcagcacagtagtagagaacctgttcagcatttgtgaatccctagacccaaacatagaaaaagattgtaatggggagaggggcagagggaaggaagagacaaacagctcaacccctcttcattctgacatttcagcgagagcaatgatggaatcaacatgtcccggctcattatcaatcaactaaaatggctggataggattgtggatagcaaggtaggtttgggggctttatcaattttaagttttttgttttgctttttacagctgggcgtaccatcgtatgcctataatcccatcacttaagaggcaaatgcaggctggattccgtcagctctatgccagcctggtctgcctagcgag

SEQ ID NO: 1441 - DNA, 483 bp, Cricetulus griseus
agtttggcaaaagtcaaacattatcacacctttttaaatacttggtctttttctcaagaagtaccagtcacttaaatatataggtagaaaagttctgaatgtttgggaaataaaaactaggttttggggatttttgttttgttttcttgtggtgagcgatcttagtatgttaccttagcactttccttaccaggtttttaatgtaagaaagatagctccaattatgtctctgatttcctggaaagtcgtaatgggactagcttgaagtaaaatatgaagcctttggccagatgccactaaagacaactgttttattaggtacggggtattggggacattgcaataattctgcattttccacttttgccttctgatatagagcttcacataataaattcctagctaggctggaacttcataagtagcacaagctggccctgaactgacaatgctcctgcatgtgctcaaaaagcaaaaaaaggt

SEQ ID NO: 1442 - DNA, 578 bp, Cricetulus griseus
aggccaatgacctatttgaaagcgggaacatgacacaggtgcaggtgtcactgcttgcgctggcaggaaaggccaataccaaggggctgcagagaggtgtggacattggagtcaaatactcagagaaacaagaaaggaactttgatgatgccaccatgatagccggccagtgcgtcattgagctgcatatgggcaccaacaaatgtgccagccaatctggcatgacggcttacggtaccagacggcatctctatgaccccaaaaaccacatcctgcctcccatggaccactgcaccatcagcctccatatgggtaccaacaagtgtgccagccaagtgggcatgacatctccaggtactcaaatgcaaccctatcacatcataccggacaccgtctagcgtgacaactttaccctgtccctacaaatggtctattatcaggcgtgcctccaacatggccagacccattatctgttaccgctacacatccgaatattttgtatttcgccactttttcccccattttttattttatccagcccccaattttccgtttttatccccccttttcactatacc

SEQ ID NO: 1443 - DNA, 580 bp, Cricetulus griseus
  misc_feature (117)..(138): n is a, c, g, or t
  misc_feature (170)..(195): n is a, c, g, or t
  misc_feature (198)..(252): n is a, c, g, or t
  misc_feature (279)..(300): n is a, c, g, or t
  misc_feature (317)..(350): n is a, c, g, or t
  misc_feature (361)..(379): n is a, c, g, or t
  misc_feature (400)..(427): n is a, c, g, or t
  misc_feature (439)..(458): n is a, c, g, or t
ccaccgctaattcatatcccacatggagaaacgaaaagactcatatcatcatcgttgtcattggacacgtacattcaggcaatgccaccacaatccggccaccgtgatctacaaatnnnnnnnnnnnnnnnnnnnnnncatctaaaagtttgagaaagacgctgccgaannnnnnnnnnnnnnnnnnnnnnnnnnctnnnnnnnnnnnnnnnnnnnnnnnnnnnnnnnnnnnnnnnnnnnnnnnnnnnnnnnacctgcggaaatttgagaccagcctannnnnnnnnnnnnnnnnnnnnngccccaggacacatacnnnnnnnnnnnnnnnnnnnnnnnnnnnnnnnnnnggctgactgannnnnnnnnnnnnnnnnnnatggagccggtgaatccgacnnnnnnnnnnnnnnnnnnnnnnnnnnnnatgagcatgccnnnnnnnnnnnnnnnnnnnnagtgaaacatctaattgctggagataacaaaatggattccaccgagccaccttacagccaaagtagatgcgaggaaattgtgaaagaagccagcacctacattaataaaattggctacaacc

SEQ ID NO: 1444 - DNA, 600 bp, Cricetulus griseus
  misc_feature (27)..(80): n is a, c, g, or t
  misc_feature (464)..(485): n is a, c, g, or t
catcgtatggacatggaatcgcgctcnnnnnnnnnnnnnnnnnnnnnnnnnnnnnnnnnnnnnnnnnnnnnnnnnnnnnncgcgtccgaagatggataatcactccacatgttggggaagttgatttggtttggtcctgatgttccctcaccaaaaatcattttgagccatcatctcagacttctgtgaacactgtaaaagcccacagttttcaggccttgctatcactctgttggaatctgtgccttcgagaacatgttttagaatggcctgactgtattgtgcctaaaaactgtgtgttagtgatgaaaagaaatctactctccgtgaaaaagtattcaaaggttgaaggtggaagtgagtataaaattggcttttcacatcttttcaaaacttactttctgttctttttgtgtgtgattattttcctacatctatttttaataaaaaatgaaagtgtgttnnnnnnnnnnnnnnnnnnnnnncaatttgacaataattattttgttttctctaagacttagtaaagtgaaaacttttataacatacttaaaatgttagttgggatgatttttttttaaatctttacttatttattta

SEQ ID NO: 1445 - DNA, 579 bp, Cricetulus griseus
caccagatctagtgacttaatatgtgaatgtttttattgcagatgaaaccgaatttagaaactttattgtttggcttgaggaccagaaaatcagacactacaagattgaagacagaggtaacttgagaaacatccacagcagtgactggcccaagttctttgagaaggtaatgaattaggaagtaaaaggaagcatgaagtagagttgaaaattcctgtgttctttcaagatactatagtaagcggtataagtaaggctaatttcatggatttcaaatttttgctcttttgatttttaaagcaagttatctctttccaccaagccttcagtatttaggttaaacatcattttctaaatggcacaatattccttaatagggctgcctactctaatttttatacatgtgttggtatgtttgttgagtgtccacagaaaccagaagaatgtatcagagctcctggagctggagttatattaagacacaaaaaatgcaagaatatacttttgagtgcttgtctttgttacttctctattgctataaagagacaccatgactgagaaaacttataaaaggaagc

SEQ ID NO: 1446 - DNA, 579 bp, Cricetulus griseus
  misc_feature (195)..(223): n is a, c, g, or t
atcccgggtctggaacccatcacctacgaggggaagatgcacttcgtccccgggctggctcggccgatcttcccgccgtgggatcgcggctggaaggatccacggtaccaccgcacggccccgatccccgagcagcctctgtacaaggagcagccctgctacatattccaccggcgctgccgactccttgagggnnnnnnnnnnnnnnnnnnnnnnnnnnnnnccaagttaatagaaggccttcccaagaaagtgcttagtcttgttgatgatccaaggaatcacatagagaaccaagaagaacgtgttctaaacatcatctctcatgcccgtctctggcactctcctgaggacatccccaagagagagacctactgcccagtcattgtgaacagcctcatacagctgtgtaagtcccagattttcaagcacccttctctggcaaggcggatgtctgcccaaaactactccttagccaccacctggaatcgagagtctcttctccttcaagtccgaagtagtaatggtaccatactgagtaccaaggaccctctgcccaccattgcctccagagaggaa

SEQ ID NO: 1447 - DNA, 567 bp, Cricetulus griseus
caaaattaaccattgtttcctgcagcctgtcaaaaacctggggctgaacccacagggatgtcaacattaatgtcacaggaacaaacattcctgtgccacctaaaaggcacccatgcaaaattaccatgctcaggccaaccgttaggttaaaaaagtcagggggttcaaagggatgaaactggggagcaagtgcaaaaactgaaaacccccgtgtgcccctcgaaacagtgtcccctaagggtaacaccatgctctggcactggcatcccactgtgccaaaaaccccaatggctttgccatatagcaagtccagggctttgctgccagtcgtctgtacttcttaaacctgaccctggaggaaaaacagggaaattttttaaacccattgctaaccactgaattctgctctatgttaaattaaaaaaactttccaaaagccataaccctgaaggttggcctgcgaacacgcacacccgggtgcgtgcatgcacacttgcccacacccacacacgagacttaaagctgatacaaaaaacaggcgtggtccttttaactcaagcccaagaa

SEQ ID NO: 1448 - DNA, 578 bp, Cricetulus griseus
aaagagctggtggaattgggtgaccatggggatgtgggcatcggtggacgctatgggggacttccctgcggagaagcgaatcttcggggcggtgttgctcttttcctggaccgtgtatctgtgggagaccttcctagcacagcggcagagaaggatatacaaaacaacaactcgggtaccagtagaattagaacagatcatggattcggacacatttgagaaatctcgactgtatcaactggataaaagtacattcagcttctggtcaggactctattcagtggtggaaagcactcttattcttctctttggaggaatcccttacctctggagactttctggacgggtctgtgattctgctggctttgggccagaatatgagatcattcattctttggtgttccttctgttggccacactctacagtgctctgactggcttgccatggagtatgtataatacttttgtgatagaagaaaaacacggcttcaatcaccagactttggagttttttatgaaagacacactcaaaaaatttgctgggactcaatgcatcttattacctgtgtcttcccttc

SEQ ID NO: 1449 - DNA, 458 bp, Cricetulus griseus
gcgaccccggggtcttcaccgagctcattaaaggattcggttgccgaggagtgcaagtagaagaaatatggagcttagaacctgagaattttgaaaagttaaagccagttcatgggttaatttttcttttcaagtggcaaccgggagaagaacctgcaggctctgtggttcaggactccagacttgaaacaatattttttgccaagcaggtaattaataacgcttgtgccacgcaggctattgtaagtgtgttactgaactgtacccatcgagatgtccacttaggagagacattgtcagaatttaaagaattttcccaaagttttgatgcagctatgaaggggttggcattgagcaactcagatgtgattcgacaagtgcacaacagttttgccagacagcatatgtttgaatttgatacaaagacatcagccaaagaagaagatgcttttcacttt

SEQ ID NO: 1450 - DNA, 579 bp, Cricetulus griseus
ccaaagagtatatggaaccgacagtggaattccaacgtagggcaaaggaaagccctttgaccaaacctgaagagcctgcagcttctattatgaacgcaaattccctgatttggttgtgaaggctagtggccttgcagctgggaaaggcgtgattgttgcaaagaacaaagaggaggcctgcaaagctgtacaggagatcatgcaagaaaagtcttttggagcggctggagaaacagtggttgtggaagagtttctggacggggaagaagtgtcttgtctatgtttcactgatgggaagacagtggccccaatgcccccagcacaggaccataagcgattgctggatggagaccagggccccaacacagggggaatgggagcctattgcccaacaccccaagttcctacagatttgttactaaaaattaagaacactattcttcagagaacagtagatggcatgcggcaggagggtgcgccttacacaggaattctctacgctggtataatgctgactaaagatggcccaaaagttttggagtttaattgccgttttggtgatccagaatgccaagtaat

SEQ ID NO: 1451 - DNA, 569 bp, Cricetulus griseus
  misc_feature (385)..(403): n is a, c, g, or t
ccccagtaccatcccctctttcgcagagggaggctcccctgccatcctcggagcctgacgcccaccagaaggcccagactgcgctgcagcagcaccttcaccacaagcgcagcctattcttggaacaggcccatgatgcctccttccctgctcccacagagcctcaggctcctggctggtgggccccaccaggctcacctgccccacggcctcctgacaaaccatccaaggagaagaagaagaagccccctaccccagctggaggtcctgtgggagctgagaaaaccacccctgggatcaaacccagtgtccgaaagcccattcagatcaagaagtccaggtcccgggacatgcagcctgtcttcctgcctcttcggcagattgnnnnnnnnnnnnnnnnnnnccaaccctcagaggaagtacaggcacctccacctgcccagctctctgccctgcctcctgcctcccagggtgctgcctcccagagctctgctgcccctcttcccccagaaccttctcttgcgctatttgcacctagtccctccggggacagcctgctgccccctact

SEQ ID NO: 1452 - DNA, 577 bp, Cricetulus griseus
cctaaggctgaaagatcagcttttcatcatgtcttgtttatttgaggttcatatctgcaaactctgagccttcacagatggcttcattctgaaaaataaaaggggaaattgggtcaggacaagctagtttgcacctactgtggctggaccaaccaacactgttcatctcgtgacaccagaggacatggggtgatgtgaggggggttaagcctgtagcctgagcttgggatatactgtccaaggacaactccatcctggaccagcagctggctagggccagaagatggactggaatccaagctttctgcaagacaaacttatagagtatgagttaggaatgaaagtgtcttcacccactcttggcccattcattttgataggcagagatgaaagagtttggaatttggagtcagaaaaatttagatttccacttccatatctgcctaagtgtaccactgctggcctctcctgcatagtaagaaaatgaaatggataatgcttgcttgagtttgcttcaaccaagaagcctatgtatggtttgaggtctgatggatatttctgtacaagtaataaatct

SEQ ID NO: 1453 - DNA, 406 bp, Cricetulus griseus
  misc_feature (98)..(98): n is a, c, g, or t
  misc_feature (112)..(112): n is a, c, g, or t
  misc_feature (148)..(148): n is a, c, g, or t
  misc_feature (295)..(319): n is a, c, g, or t
  misc_feature (321)..(340): n is a, c, g, or t
cgacccacgcgtgccgatcacttccttcatgtttacagagacatgggaaatgccatttttagagcctctcagccctttctaaagctggccttacgtgnaagagcaccattgnaaggatacatcagagagtgtgtgttagaaactcttnctgctttttttctgtacacaccagactttgtgtacacactgtatggtcccaaagaaagccagagagatgctgactgtggtgcctgtcagcacaccagtgtctgcttggcgctgggccccgcccccgtgctgtcccatgagatgactnnnnnnnnnnnnnnnnnnnnnnnnnannnnnnnnnnnnnnnnnnnncgcgcgccctcgcgcgatcggaaactccccccgtgtatggttcccatcgccaggttctgcggagtc

SEQ ID NO: 1454 - DNA, 267 bp, Cricetulus griseus
  misc_feature (76)..(92): n is a, c, g, or t
tggctcgagaaacctgggaagtcctactgttgtttcttctgcaaatcaatgacattcttctggctccaccaactgnnnnnnnnnnnnnnnnngataatctatcagagaagctgattggtgcactctttgaagtttggttactagcttgcacccggtgcttcccaacacctccttattggaagacagctaaggagatggtggctaactggaggcaccaccctgcagtggtggaacagtggagcaaggttatctgtgcactcacttcca

SEQ ID NO: 1455 - DNA, 444 bp, Cricetulus griseus
  misc_feature (4)..(33): n is a, c, g, or t
  misc_feature (61)..(98): n is a, c, g, or t
  misc_feature (100)..(114): n is a, c, g, or t
  misc_feature (151)..(178): n is a, c, g, or t
  misc_feature (206)..(260): n is a, c, g, or t
  misc_feature (262)..(274): n is a, c, g, or t
  misc_feature (390)..(411): n is a, c, g, or t
ccgnnnnnnnnnnnnnnnnnnnnnnnnnnnnnnatagtaagcatcaacaaaagactgtatnnnnnnnnnnnnnnnnnnnnnnnnnnnnnnnnnnnnnngnnnnnnnnnnnnnnnacaaataggtctatgaacatttcaaccacaaactagnnnnnnnnnnnnnnnnnnnnnnnnnnnnccactgccaatcaaattaggcctttctnnnnnnnnnnnnnnnnnnnnnnnnnnnnnnnnnnnnnnnnnnnnnnnnnnnnnnncnnnnnnnnnnnnntgacaaaaagtagccccaatgactattttacttcaaaggcatgaagctatcgatactaatatcctacccccctctgccctcatctcagcactagcgggagcatgaggaggcctatnnnnnnnnnnnnnnnnnnnnnngctagcttactcatcgcatcggccccataggct

SEQ ID NO: 1456 - DNA, 466 bp, Cricetulus griseus
tccaagatgtcgaagcgaggacgtggtgggtcctccggagcgaaattccggatttccctgggtctccccgttggagctgtgatcaactgtgctgacaatacaggtgccaaaaatttgtatatcatctctgtgaagggcatcaagggacgactgaacagacttcctgctgctggcgtgggcgacatggtgatggccacagttaagaaaggcaaacccgaactaaggaaaaaggtccatccagcagtggtaattcgacaacgaaagtcgtatcgaagaaaagatggggtgtttctttattttgaagacaatgcaggggtcatagtaaacaacaaaggcgagatgaaaggctctgctatcacaggtccagttgcaaaagaatgtgcagacttgtggcccaggattgcatccaatgcaggcagcattgcatgattctccagtgtatttgtaaaatatattcattaaaaag

SEQ ID NO: 1457 - DNA, 600 bp, Cricetulus griseus
  misc_feature (591)..(591): n is a, c, g, or t
tcgacaccacgcgtccgcagtaattttttaggctatagaatttaaatattgtaactaactatacttataaattatttaagagtgttttaagaataattttgactgcaaaataatgtcaatagagagtattaatatttgtaaactttgaaatttagagtcagaaaattcttttaatattttagtcctttatgtaataagtaatacctaatatattgcatggtattttagccattcataaaagctgtattgtgtatgcctctttatctagagagtgagcaggggcaaaatggagggaaggaaattaattactggtctccatgagagattgggtgtaggacccatgcagatacaaaacttccttgatgtctcataaaataaagtagtacaatatttgcatatagcttacatatatccttccccttgtttacttcctacatttctttatttcttaagattcataatgctgtataaatacctgttaagccgttgttggataataatgacagaaaacatctatacatgtttggaataattttttcatgaatgttttcaatctataccttgaatctaaggatttagaatctacagtangtaaagtgg

SEQ ID NO: 1458 - DNA, 579 bp, Cricetulus griseus
gagcagagtggctgatgccaacatggcctgtcggaagctggctgtggcccaccccatcctgctactgaggcacttgcctatgattgcagccctcctgcacggccgcacacacctgaactttcaggagttccggcagcagaaccacctggccttcttcctgcatgtgctgggcatcttggagctgctgcagccgcgtgtcttccagagcgagcaccagggggcgctgtgggactgcctgcgctcttttatccgcctgctcctgaactaccgaaagtcctcccgccacctggccccttttatcagcaagtttgtgcagttcatccacaagtacgtggcctgcagtgcaccagcagccgtgaccttcctgcagaagcacgcggagccgctccatgacctgtcctttgacaacagtgacctggagatgctgaagtctttactggcggggctcagcctgcccagccgggacgggagaactgaccaatgcctggatgaggaaggggaagatgagcgatcagccggctccctacccctggtcagtgtctccctctccactccactgactgtagctgacgaggctcc

SEQ ID NO: 1459 - DNA, 567 bp, Cricetulus griseus
gatctgtcctgcaataaactcagtactcttccgtcggatttctgtggtctcacacacctggtgaagctggacctgagcaagaacaagctgcagcagctgcccgcagactttggccgcctggtcaaccttcagcatttggatctcctcaacaacaagctggtcaccctgcctgtcagctttgctcagctcaagaatctgaagtggctggatctgaaagacaatcccctggatcctgtcctggctaaagtggcaggagattgcctggatgagaagcaatgtaagcagtgtgcaaacaaggtgttacagcacatgaaggccgtgcaggcggatcaagaacgagagcggcagcgccggctggaagtggaacgagaggcggaaaagaagcgagaggccaagcagcaagctaaggaagcaaaggaacgggagctgcggaagcgggagaaggcagaggagaaggagcgccggcgaaaggagtacgatgcccataaagcttcgaagcgagagcaggagaagaagcccaagaaggaaacaaatcaggccccaaaatctaagtctggctctcgtcct

SEQ ID NO: 1460 - DNA, 210 bp, Cricetulus griseus
cgcctgccaatgtgatgcatggactatggagtggcggggactaaggatcatggcatacgagccccatatgcatagggacaacctactgacgtcgaaaggattcttgactatagtcggtattgcaccacgatatgcctaccgctgtgcagctgcttgcgacactgatataagaaaaacaaatgggctgatgatttgaagactagatctggg

SEQ ID NO: 1461 - DNA, 569 bp, Cricetulus griseus
  misc_feature (8)..(30): n is a, c, g, or t
  misc_feature (475)..(491): n is a, c, g, or t
cgagggcnnnnnnnnnnnnnnnnnnnnnnnaagggatggcctataaaaaatttggggttaatcattaaaagggaaaggggggtaagggggatttttattaaggaaagttctcggggggggaaaggtggaaaataaattatatggggggtaaactaacctcggggaggagtaattaggatttatagggaatatagggcggtaataaggatgttagtccctcctaaaaaaagggtaaaattggatcatgaaaatagggaaatggaaattattaattttccaattaaatcgcttgacgggggaagggctaggacatttagcctccctaaaaataaaaatagggctttaaggggaaaagctgtttgcaaaccccgggctataataataggccggtgggggatcccttcttgccttgttccaccaaaacaaattactcgaaaaaatgtaccaccttgcccgatctttacgggggaggctnnnnnnnnnnnnnnnnnggctggaaccatatacacccgcaaacactatcgccctgtgactgacggagcgattggcacaaaataaccccacgtccg

SEQ ID NO: 1462 - DNA, 200 bp, Cricetulus griseus
  misc_feature (23)..(43): n is a, c, g, or t
  misc_feature (45)..(87): n is a, c, g, or t
  misc_feature (164)..(199): n is a, c, g, or t
agcggacgccaccggagtggacnnnnnnnnnnnnnnnnnnnnncnnnnnnnnnnnnnnnnnnnnnnnnnnnnnnnnnnnnnnnnnnncttcctgcgagaaactgacatcccctaaattcgataggtatgtattcaaatcctatcgaaattcctggcgctgcacnnnnnnnnnnnnnnnnnnnnnnnnnnnnnnnnnnnnt

SEQ ID NO: 1463 - DNA, 582 bp, Cricetulus griseus
  misc_feature (3)..(31): n is a, c, g, or t
  misc_feature (35)..(74): n is a, c, g, or t
  misc_feature (87)..(154): n is a, c, g, or t
  misc_feature (156)..(197): n is a, c, g, or t
  misc_feature (199)..(216): n is a, c, g, or t
  misc_feature (257)..(316): n is a, c, g, or t
  misc_feature (319)..(341): n is a, c, g, or t
  misc_feature (343)..(371): n is a, c, g, or t
  misc_feature (401)..(462): n is a, c, g, or t
cannnnnnnnnnnnnnnnnnnnnnnnnnnnntctnnnnnnnnnnnnnnnnnnnnnnnnnnnnnnnnnnnnnnnntatacattacacnnnnnnnnnnnnnnnnnnnnnnnnnnnnnnnnnnnnnnnnnnnnnnnnnnnnnnnnnnnnnnnnnnnntnnnnnnnnnnnnnnnnnnnnnnnnnnnnnnnnnnnnnnnnnnannnnnnnnnnnnnnnnnnacgaggagtttattacggttcatacactatagtagaacctnnnnnnnnnnnnnnnnnnnnnnnnnnnnnnnnnnnnnnnnnnnnnnnnnnnnnnnnnnnnctnnnnnnnnnnnnnnnnnnnnnnncnnnnnnnnnnnnnnnnnnnnnnnnnnnnncatctatcccttatataggtaccactctannnnnnnnnnnnnnnnnnnnnnnnnnnnnnnnnnnnnnnnnnnnnnnnnnnnnnnnnnnnnntccatttcatcctaccattcattatcgctgccctagcaatggtccatcttctattcctacatgaaaccgggtctaataacccatcacgcctagattctgacccagataaaactccatttc

SEQ ID NO: 1464 - DNA, 479 bp, Cricetulus griseus
  misc_feature (392)..(478): n is a, c, g, or t
tacttcaaatccaaaccagtagagactccacctgaacaaaatggcagcattgccccgcagcccaacagcagattgaaggaagctataaatacaagtaaagatcaggaaagcaagtaccaagccagccacccaaatctcagaaggctgcatgatgaagacccaacccccaaagggcctgcttctgctgtgactgctgaggtttacccaaagaactcaagtcttcgagcctatcatcaaaagatcgacaacaacctagatgagctgtccatgggattgggccgactcaaggacatagccttaggaatgcagacggaaattgaggagcaggatgacattcttgaccggctaacaaccaaagtggacaagttagatgtcaatataaaaagcacagnnnnnnnnnnnnnnnnnnnnnnnnnnnnnnnnnnnnnnnnnnnnnnnnnnnnnnnnnnnnnnnnnnnnnnnnnnnnnnnnnnnnnnng

SEQ ID NO: 1465 - DNA, 523 bp, Cricetulus griseus
cggccacaagacagagttcccattcaactgccctctcttgaagtgctgtcagagcatgaagggaacagagatcaaggtggtgttaaagataatgagagcagctcctccattatatttgctgaactcacctcagaagaagaaaaagctcttggcaaacctgacattaaaaatgagaataacaacctggtgagctacactgctgacttagtgatcaggaacagcagtgaatttgagtcgtccgttgaactccaacgaagtgggctgactgatttgtctatcagaccagttgtcaagcatcagctgccacttgggcataactcggacttggaaggaaattttacatcctcggatgagtcttttgaaggcattctgaacttgctggaacagacagaggttcggtaccacctgatgttgcacatccagatgcagctgtgtgagctctccctgtgggactggataagtgacaggaacaaccggcgccaggattacgtggatgaagccgctcgtccctacgccatggcca

SEQ ID NO: 1466 - DNA, 578 bp, Cricetulus griseus
acacttgcatgacttcctgaagctccttcacattgacaagagaagagagtacctttatcaactccaggagtttttggtgacagataacagtaggaattggcgctttcgtgctgaattggcagaacagctgattttacttctagaattgtatagtcccagagatgtttatgattacctgcgtcctattgctctgaatctgtgtgcagacaaggtctcttcagtccgttggatttcctacaagttggtcagtgaaatggtgaagaaactccacacagcaacacccccaacatttggagtagacctcatcaatgagctggtggagaatttcggcaggtgtccgatatggtctggtcggcaagcgttcgtctttgtgtgccagactgtcattgaagacgactgcctccccatggacgagtttgctgtgcacctgatgccacatttgctgaccttggcaaatgatagggttccaaatgtcagattgctgcttgcaaaaacactgcgccagactctactagagaaagactacttcctggcctctgtcaactgtcatcatgaggctcgggagcacaccatgatgg

SEQ ID NO: 1467 - DNA, 521 bp, Cricetulus griseus
  misc_feature (22)..(78): n is a, c, g, or t
  misc_feature (101)..(160): n is a, c, g, or t
  misc_feature (182)..(236): n is a, c, g, or t
  misc_feature (261)..(343): n is a, c, g, or t
  misc_feature (359)..(396): n is a, c, g, or t
  misc_feature (423)..(444): n is a, c, g, or t
acacacattcgataggtatgtnnnnnnnnnnnnnnnnnnnnnnnnnnnnnnnnnnnnnnnnnnnnnnnnnnnnnnnnnccctacttgtagtagtgtcaaannnnnnnnnnnnnnnnnnnnnnnnnnnnnnnnnnnnnnnnnnnnnnnnnnnnnnnnnnnnccatctctcatactcctacctnnnnnnnnnnnnnnnnnnnnnnnnnnnnnnnnnnnnnnnnnnnnnnnnnnnnnnnttcttaatcaatactttagctatannnnnnnnnnnnnnnnnnnnnnnnnnnnnnnnnnnnnnnnnnnnnnnnnnnnnnnnnnnnnnnnnnnnnnnnnnnnnnnnnnnattagccatctgaccnnnnnnnnnnnnnnnnnnnnnnnnnnnnnnnnnnnnnncaaaagaaacccactactacaaaaaannnnnnnnnnnnnnnnnnnnnnctctacaaactcttctaatcccaacatccctcagcaaacgagcctacactattttatattctacctgaagccccact

SEQ ID NO: 1468 - DNA, 567 bp, Cricetulus griseus
  misc_feature (384)..(384): n is a, c, g, or t
  misc_feature (440)..(440): n is a, c, g, or t
gatttcttgagtttgatcaagagttccaggccagccagggctacacagagaagccctgtctcaaacaaacgaaggaaaagaaatcctgtgataaacgatgtgcctcctcccccacccctctttcttgcccctctctcccctcacacctcttccttctctcttccctttagcaggctctaattacaaatccaagtctgtcctctctctctccttcagcatttccagtgctgggttacatttcaccagacccaacatagattccttttagcaaatgaatggcaaaacaaacaatccataaagaaagggggcaggatttgggagattgtatcctaaatttctggtctgccattaaatccctctgtgcttccatcaagaaaaacgtanttctgccaggtgggcaagatgaacctgggtaacaactatttgaaaaggagtaactngaggggtgatctaattattcttttatcaggaaaaacttgggagtcagatatggggggcgaaaccctaaatgatcagagaaagggtggagaaagcgaccagggactttctcctcttcttccttgatcc

SEQ ID NO: 1469 - DNA, 579 bp, Cricetulus griseus
cagacagctggaacgtgatgtgtgtgagctcgtccggcgggttaccggcctgcgggacgaggcggatcccaacttccaactggccttggactttgcctggtccaacttcagatttcatcggttcttggatgtcaacagtcacaaagtagaaaaaacaatagaagggatttatgaaaagttcaccattcattctgatctcagcaaagctgctagttggaagagattaactacagagtttctaaatgcatcacttcccagcgtagagaaaataaagacagatgcgcattattccatactgtcactccttctgtgtctgtctgattctccttcaaacagcagctatgtggaaacaccaagaaacaaagaagtggaaaagaaagatgattttgactggggaaaatacttgatggaaggtgaagaaattggccttggtccaaatgccgattcaccgaactggtctgaagacagtgatgatgaagatacacaacagcccttaagccgagaagactctgggatacaggtagacaggaccccactagacgaacaagaccacagcagaaaaggggggtctcaagtctg

SEQ ID NO: 1470 - DNA, 567 bp, Cricetulus griseus
ggggtggtgcacacctttaatcctggcactgggtaggcagaggcagaagaatttctgtgagtttgaggacagcaaggactacacagagaaactatgtctcaaataaaacaacacaaacaaaaatcaaacaaacaagagctctgaaaagaaatctgaattccccaagtctcatgctaacactgtacttcgaggcaggctacgtgcacactggggacaggggagtcattcatcaggtgcaattggaaccttcctgaaaacaagcaaggagtactgcagtcatcatgactgtcttctgtctgtctgctgtatgcacaagcttctctttattgcagatatgtcttggcaggaggactccgtggcaggcagcaaactgcagccctctttacacacagcctgattaccatttctatgtctgcactgcacatgctggcattataaatcacatgctcgctgtcatgcacaataaccaaacagttacctaacagctaagagtattacaaatggattgaactaatctttgaatatatgctccaataattaaattctgtatgattttctacctttaaa

SEQ ID NO: 1471 - DNA, 567 bp, Cricetulus griseus
  misc_feature (342)..(359): n is a, c, g, or t
cacccataaattctattttaatggcatctctcatctacctatggctttggccctcccatcctctaagctaccacgctcgcacacttgctgctgttgcccttggctccctcactggaagccacctgtagacttctctgctgccgccaatgggccgcaagtaccccacaatcagtcttgatctgcattgggcttctctaggtccctacccagaatagactcatttgtctggcgcctttgtaatgctacccctttgttgaattacaaaagcaatttccaccaacttttttctcccctaagcggctattccttttctggtcatttaaataaacaaatacagagaannnnnnnnnnnnnnnnnnttctgtatcatgacacccagttaaaactctggaacggttagtgctaacagtatcagcagccctcctaatcccagtgctgtatgtccagggttcagcagacctacataggaaatatttcaagaggaaacaaacaaaaaaagatatggatctgtactgagcatgttcggatttcatttatagacaccattacctaagcagtacggcatag

SEQ ID NO: 1472 - DNA, 577 bp, Cricetulus griseus
aggtaggcaggcttccagaggcttctgtgtggtcacctgtgctatatcaacccaggtttccaagcagagtttcctaatgggagcagcagctgtatcttagagactccaatgtgaaatacacctgtgtgcctgctcccagtgttccctgcagcctggcccctctctggtgtttggttaaagatataaagcagtcttttcagaggctctgaaggactgctgtttctttgagctaattacctcaccagaggtggggggtgtggactgattgctcctgagccgtgtgctgtctaggacgtggattgaactgttagctccaaaggctcccgggagaggtagccatgcccaccagagctctgcacaggcctgagctgtccatgggggagtacacagaagggaatgaggagagaagaactggcagatgcccagtagcatgcacttctggacccctttgagacggactgtctctggcagagctatgggacaaaggaatcaggaaggtcaagactttccatggctcccagcatttagctttgggagacagcactcacagcctgtgcatctgcctctaccatgttgt

SEQ ID NO: 1473 - DNA, 609 bp, Cricetulus griseus
  misc_feature (16)..(16): n is a, c, g, or t
  misc_feature (36)..(36): n is a, c, g, or t
  misc_feature (47)..(47): n is a, c, g, or t
  misc_feature (54)..(54): n is a, c, g, or t
  misc_feature (59)..(59): n is a, c, g, or t
  misc_feature (90)..(126): n is a, c, g, or t
  misc_feature (145)..(163): n is a, c, g, or t
  misc_feature (189)..(266): n is a, c, g, or t
  misc_feature (271)..(347): n is a, c, g, or t
  misc_feature (353)..(459): n is a, c, g, or t
  misc_feature (461)..(507): n is a, c, g, or t
ttttagacataactgncacagtgaagtcgccgcgtnaatacgaactncactctnagggncgaaattgaggtaccgaggcccccccttcgnnnnnnnnnnnnnnnnnnnnnnnnnnnnnnnnnnnnncattgtacgagagggtacnnnnnnnnnnnnnnnnnnncccattgtacaaaaagggctccgatnnnnnnnnnnnnnnnnnnnnnnnnnnnnnnnnnnnnnnnnnnnnnnnnnnnnnnnnnnnnnnnnnnnnnnnnnnnnnnagtannnnnnnnnnnnnnnnnnnnnnnnnnnnnnnnnnnnnnnnnnnnnnnnnnnnnnnnnnnnnnnnnnnnnnnnnnnnnaacacnnnnnnnnnnnnnnnnnnnnnnnnnnnnnnnnnnnnnnnnnnnnnnnnnnnnnnnnnnnnnnnnnnnnnnnnnnnnnnnnnnnnnnnnnnnnnnnnnnnnnnnnnnnannnnnnnnnnnnnnnnnnnnnnnnnnnnnnnnnnnnnnnnnnnnnnntttttccatctcagacggaatctatggatctacattctttatagcaacaggttttcacggtctccatgtaatcattggaacatcattccttacagtatgctt

SEQ ID NO: 1474 - DNA, 578 bp, Cricetulus griseus
  misc_feature (400)..(414): n is a, c, g, or t
  misc_feature (462)..(479): n is a, c, g, or t
acacgcacgctcacactttttatttgccataatgaaccgtccagcccctgtggaaatctcttatgagaacatgcgttttctgataactcacaaccctaccaatgctactctcaacaagttcacagaggaacttaagaagtatggagtgacaactttggttcgagtttgtgatgctacatatgataaagctccagttgaaaaagaaggaatccacgttctagattggccgtttgatgatggagctccaccccctaatcaaatagtagatgattggctaaacctgttaaaaaccaaatttcgtgaagagccaggttgctgtgttgcagtgcattgtgtggcaggattgggaagggctcctgtgctggttgcacttgcgttgattgaatgtggaatgaagtannnnnnnnnnnnnnngtttataagacaaaaaagaaggggagcattcaattccaaacagctgcnnnnnnnnnnnnnnnnnngacctaagatgcgattacgcttcagagataccaatgggcattgctgtgttcagtagaagtagagaaatgctgactggatcgtggcgctagacggaactc

SEQ ID NO: 1475 - DNA, 96 bp, Cricetulus griseus
gaagatccctgggctgagatgggattgtccagtgggtggggcagagggtatcttctcacgaaatgaactctgtatggaaattgtcccttttctgac

SEQ ID NO: 1476 - DNA, 522 bp, Cricetulus griseus
  misc_feature (273)..(296): n is a, c, g, or t
ccagcgcagcctgggccaccaagcgccggtcagcgggcgccgagaaatggaccaattttgacaagatgtagtgctgcagcgtgcgtgatcagacatgttcagtcatggcatccgaactttgtaagacgatctctgtggccaggcttgaaaagcacaagaatttgttcttaaattataggaatttgcaccatttcccattggagttattgaaagatgaagggctgcaacatctggagaggctctatatgaaaagaaactcactcacaaccttgnnnnnnnnnnnnnnnnnnnnnnnnccaaaccttgtggaactgtaccttcattcaaataacatagttgtggttccagaagccatcgggtcccttgtaaaactccagtgtttggatctcagtgacaatgccttagagattgtttgcccggaaattggtcgtctgagagcattacgtcatcttcgattagctaacaaccaactacaattcctacctccagaggttggcgatttgaaggagctgcagacactag

SEQ ID NO: 1477 - DNA, 300 bp, Cricetulus griseus
gttgtataagatcctgtcttaaaaaaagaagaaaaataggaggaaaaaaatctatatgatttttctctacagagacttggatatgcggtattctctgccttttctcttgcccagtggctgtaatcacctaaattgtattctctaatctcttgatcatgagtaaatcaatctcttgttggtagtaattggcctgcattagacctcatctactgtttcttcccactcctctgtggcagaagaacaaggccaagtaatgacctgccctgtgcttgtataatgctgccaacactgtggtgtcct

SEQ ID NO: 1478 - DNA, 579 bp, Cricetulus griseus
  misc_feature (483)..(483): n is a, c, g, or t
cccgaccacctcggtgccggatcctagagctgccgctggaagcagaggcttgtgaggggaggcggagagaaaaggggtgcgggaaatttaaaaagatgggaaaggcgcttcccattttccttagcccctttcctgttgatttctggagcaacgctcctttcttctcggacgaagagaatgaagaccctgctttatttaacagtcatcttaggggaagtgccatcgttcttccagaagggagatctggccccagatcttggattctgagaccagtgcgagatccccgctttgcgccctgtccgccctggagctggatttgtcatcagtttagaatagcttggctacgatgtgtggtgtggatggatggacgggcctcgcaagtgcaaacaggacaatccaggttacctggcaaagcaaccaccagtgcaacagctctccaagatgaagcctaggtcactcactgacatggctaaaagcatctangaagtctggatcattgtggtgcctctctccagaaaatggtgacaaaaatggaaatcaaccagcacatcaggatccttgttccttctgtggcaggac

SEQ ID NO: 1479 - DNA, 376 bp, Cricetulus griseus
cctggagtccccacagaaaccattaaggacatgatgtttcagctgctccgaggtctggacttccttcattctcaccgcgtagtgcatcgtgacctaaagccacagaacattctggtgaccagcagcggacaaatcaaactggctgactttggccttgcccgcatctatagttttcaaatggcccttacctcagtggtcgtcacactgtggtaccgagccccagaagtcttgctccagtccagctacgccacccccgtggacctttggagtgtcggctgtatattcgcagaaatgtttcgaagaaagcctctgtttcgtggaagttcagacgtggatcaactaggaaaaatcttggatgtgattggacttccgggag

SEQ ID NO: 1480 - DNA, 349 bp, Cricetulus griseus
agagtatccctttctggggaatgggctcacaaagtccattcgtacactagggataaatactattccactactgaaggccccatagactgcccaggcctcctcactgacacctgggctagattttaatcttttgattttatcttaaattataccagtactgaacaaatgtactcgtattgtatgtattgagagtgtgtaaacagttccttctatacataaattggcaggtatccttttaaataccttttcacaggctttaagaatttgtgattaaagcttggctgtggtggcacacgctttttttttctcattaaattagaaacaagcttgttttacatgtcaatcctag

SEQ ID NO: 1481 - DNA, 421 bp, Cricetulus griseus
  misc_feature (343)..(371): n is a, c, g, or t
gaaccactgctacaaggtccatgaccgaaatgctactgtagataagctggaggacttcatcaacaatatcaacagtgtcttggagtccttgtatattgagataaagaaaggaatcacggaagatgatgggagacccatttatgctctggtgaatctttctacaacttcagtttccaaaatggccacggattttgccgagaacgagctggacctgtttagaaaggctttggaactgattgttgactcagaaactggctttgcctcttctacaaacattttgaacctggttgatcaactcaaaggcaaaaagatgaggaagaaggaagcggagcaggtgctgcannnnnnnnnnnnnnnnnnnnnnnnnnnnnacaaggagggggagttcaccttgcatggccgggccatcttggagatggag

SEQ ID NO: 1482 - DNA, 498 bp, Cricetulus griseus
attgttggcaaaaatatcctgacagtagagtgtaatgatacaacattttcctggtttgagctaagttggggaagaatgatctatcctagtatgataaagtcagtgtgattcagttagttggtctgagccaatagggccacttgtgtgctcttggtgataatatgttgccattattttttttaatcctggccttgtcaagtttcacctattattttttaaatcttgcataaaagagaattacaatttgttttagaaaatttaaaaataatggtagtagtagttaatttttaactttccaagtatgtcagagtaatagagaatttatctttatgaatgggttacattgttctacagttttgacacagtggtatttaagcctgtatatgctaaatgtctctgagtccctttgaaccaaaaatgtttccttttttttagattttctttttgttggctccacttgaggttgggtgcatagttgactgcaacataccatgagca

SEQ ID NO: 1483 - DNA, 367 bp, Cricetulus griseus
agtaacccttgtggagcgtatgcagagagaacttgggaaactgaggcaacagttgcctgagaacttcgaggatgtggcaatgtatatctctcaggagtggggccatcaggatcctagtaagagagctctctcaagggaaatggtgcaagatagttatgagaacgtgggcacactagagtcttgcattcctggtcaggaggtcataagcacccaggtggaacaaggagggaagccgtgggaccctagtgtgcagagctgcaagggaggcaggagccccatagacccagttccaggggtagacaagtttgacaacccagagagaagtgttgattctgtttctcctgaaagtgcccatcctccggtactg

SEQ ID NO: 1484 - DNA, 227 bp, Cricetulus griseus
ctttgtctctcatttcattatcttactctccctctctctagcactcactatctccgtctctgtgtatctctgtctctgagtctctgtgtatctctgtgtatgtctctacaccctgggtgggagtctataattctccctgctcttcaatgtggtgatttcccttcctctctgggctgcttaacactcatttcacacagctctgctggatcaccacatccttacccatt

SEQ ID NO: 1485 - DNA, 227 bp, Cricetulus griseus; identical to SEQ ID NO: 1484

SEQ ID NO: 1486 - DNA, 103 bp, Cricetulus griseus
ctaggtgaaaagtccccgaggtgtgccagctgggtcccacagcttgcggtggtgcttctccagggactcaggtgtgtgcacagcaggggtactcggcggtccg

SEQ ID NO: 1487 - DNA, 475 bp, Cricetulus griseus
gccatccacatcatcgacttcgggctggccaaggagtacatcgaccccgagaccaagaagcacatcccgtaccgcgagcacaagagcctgacgggcacggcgcgctacatgagcatcaacacacacctgggcaaggagcagagccgcagggacgacctggaggcgctgggccacatgttcatgtacttcctgcgcggcagcctgccttggcaagggctcaaggccgacacgctgaaggagcgctaccagaagatcggtgacaccaagcgcgccacgcccattgaggcactgtgtgagagctttccggaggagatggccacctatttgcgctatgtacggcgcctggacttcttcgagaagccagactatgactacctgaggaagctcttcaccgacctcttcgaccgcagcggctatgtgttcgactacgagtacgactgggccgggaagcccctgcggcgcctgcggctccatc

SEQ ID NO: 1488 - DNA, 362 bp, Cricetulus griseus
ttcacagcttgcaagaagtaaagccttatcatatggagtatgttaggccttcgatggatatttttgtagtagtatagagtagtgcagtaactatgactgctttcttgtaacatttatggatgtgtatccacatatttgatggacataatattatgataagttcttatttttaattaaatttactattaggtgactgtttgagaacagtatatactctgtgtgaatcactcttgattgacgttttcattaaacccttgttgctaggatgccatctatgactgtcattgtaagaccatcagaaatattccttctctatgttttgggggcctgtaggagagtctggaatcctgttctactgcagt

SEQ ID NO: 1489 - DNA, 442 bp, Cricetulus griseus
gaatcgacagtgacttgttttataacagtagtaagcatttactgaacttgaatcttttctttcatcacccattagaactgcatggtgtgtgtacttattcctattcttatttacctattataaactgaggcccagacattttgcccactctctctaagatcaccagtgtaatgagttataaagttgggattgtggttggttcctatgtccagtgcctcgagcatctattatggtgtctctggtcacatttttatcactcctttgtattgttttggtcccttggtggttgtgcagttgagaagtgactgacagggttcatgttgcatgttgcagcagcgttacctctactgaggctgtctaactgcactagatgcagcagtgtcagattgctgctctgtctggctgggaagcctgtggttctaaaactcctgggcggagctaa

SEQ ID NO: 1490 - DNA, 548 bp, Cricetulus griseus
acccttgaggaaacccagggccaggtgggccctgagggaagagccacagtgtggtcagcacgaggctagtgacctgggtgcaaagatggccagagacacaggggaagcctggccgccaaagccgtccccacctgacacacaccctctcaagaccccagaggacagcggcctatagaaacccagcgagaaggttgccctggaaagtggcgaggaggggctggtccccgatggtgaaacgggcaagaagacgtacaaatgcgaacagtgtggcaagggcttcagctggcgctcgcacctggtgacacaccggcgcacacacacgggtgagaagccctacacctgcaccgactgcgggaagcgcttcggccgcagctcacacctcatccagcaccagatcatccacacaggcgaaaagccctacacttgcccttcgtgttggaagagcttcagccatcactccacgctgatccagcaccagcgtatccacactggtgagaagccctacgtgtgcgaccgctgcgccaagcgtttcacccgccgctcggacc

SEQ ID NO: 1491 - DNA, 527 bp, Cricetulus griseus
  misc_feature (14)..(14): n is a, c, g, or t
ggacatgccacagnatgaatggtttcttctcagctcccatataccactaaagggcattgaaccaggatccctgcgtgttcgagcacgatactctatggaaaaaatcatgccagaagaagagtacagtgaatttaaagagcttatactacaaaaggaacttcatgtagtctatgctttatcacatgtatgtggacaagaccgaacactactagccagcatcctactgaagatttttcttcatgaaaagcttgaatcgttgttgttatgcacactaaatgacagagagataagtatggaagatgaagccactaccctatttcgagctacaacacttgctagtaccttgatggagcagtatatgaaagccactgccacacaatttgttcaccatgctttgaaagactccattttaaagataatggaaagcaaacagtcatgtgagttaagtccatcaaagttagaaaagaatgaagatgtgaacactaatttagcacacctattgaacatactttcagagcttgtggaga

SEQ ID NO: 1492 - DNA, 560 bp, Cricetulus griseus
  misc_feature (131)..(155): n is a, c, g, or t
tatagaacttcgaaaaggagaaactgatattggcagaaagaatactagagtacgacttgtatttcgtgtgcacatcccacagcccagtggaaaagttctttctctgcagatagcatctattcctgttgagnnnnnnnnnnnnnnnnnnnnnnnnntccctcatattgagaagtacagtatcaacagttgctctgtcaatggaggccatgaaatgattgtgactggatctaattttcttccagaatccaaaataatttttcttgaaaaaggacaagatggaagacctcattgggaggctgaaggaaaaataatcagggaaaaatgtcaaggggctcacattgtccttgaagttcctccctatcataacccagcagttacagctgcagtgcaggtgcacttttatctttgcaatggcaagaggaaaaaaagccagtctcaacgttttacttacacaccagttttgatgaagcaagaacaaagagaagatactgatttgtcttcagttccatccttacctgtgcctcattctgcccagacccagaggccttcctcagttacag

SEQ ID NO: 1493 - DNA, 464 bp, Cricetulus griseus
  misc_feature (29)..(29): n is a, c, g, or t
  misc_feature (45)..(45): n is a, c, g, or t
  misc_feature (96)..(97): n is a, c, g, or t
  misc_feature (143)..(143): n is a, c, g, or t
  misc_feature (147)..(147): n is a, c, g, or t
  misc_feature (158)..(158): n is a, c, g, or t
  misc_feature (169)..(169): n is a, c, g, or t
  misc_feature (177)..(177): n is a, c, g, or t
  misc_feature (205)..(205): n is a, c, g, or t
  misc_feature (225)..(225): n is a, c, g, or t
  misc_feature (312)..(312): n is a, c, g, or t
  misc_feature (331)..(331): n is a, c, g, or t
  misc_feature (351)..(351): n is a, c, g, or t
  misc_feature (361)..(361): n is a, c, g, or t
  misc_feature (369)..(369): n is a, c, g, or t
  misc_feature (389)..(389): n is a, c, g, or t
  misc_feature (399)..(399): n is a, c, g, or t
  misc_feature (406)..(406): n is a, c, g, or t
  misc_feature (413)..(413): n is a, c, g, or t
  misc_feature (443)..(443): n is a, c, g, or t
  misc_feature (451)..(451): n is a, c, g, or t
  misc_feature (453)..(453): n is a, c, g, or t
cacttgtctcctacgggaaacagcacggngacatgcttggttacnatttgtatagcagtcgccctggcagacattctcagtgagcctaccatgcanncacccatttgtgtggggttgtatgcacagtggggaagtgggaagtntttnttactcaaganactagaagatnaaatgaanacttttgcaagacagcagattgagcccnttttccagttctcatggctnattgtgttcctgaccctgctgctgtgtggggggctgggcctagtgtttgcttttacagtacgatacaaatttcgacatagcagtttnattgagttgcctggctctnttatatatattcttaattgncatttacttnggtggacngagggaaggacagagttggnactgggcctnggccctnagtaccngactggcgagacacattggctacctggagntcctcttnanactgatgttcg

SEQ ID NO: 1494 - DNA, 580 bp, Cricetulus griseus
  misc_feature (15)..(15): n is a, c, g, or t
  misc_feature (384)..(384): n is a, c, g, or t
gagaaagatcccagnatttatcgcttttaggaataggctgaataattctctccactttgcacaagtgcgcactgaacggatgctgttagaccttctacttgaagcaaacatatcaactagcttggcagaaagtatcaaatcaatgaatctgagaccagaggaagatgatgttccatgggaagatttgagagacaacagagacttggatgttttctttagctgggatccaaaggacaggaatgtttctgaagagcataagaaactctccttggaggaggagaccatgtggttaagaattcgcaccttaacgctgaggctcatcagtggacttccgagtcttacccaccctgtggagccaaagaactcagagaagacctccgagantggtgtgtcctcccggattgacattcttcgtttgctcctccaacagctagaagtggccgtggagacggggaagcgatttattgagaaggaaattcagtatcccttccttgggcctgtccccaccaggatgggcaggttcttcagctctggttgctgtcagtgccaggtccgctcctttcatcttgtcagtgatgtg

SEQ ID NO: 1495 - DNA, 342 bp, Cricetulus griseus
  misc_feature (100)..(100): n is a, c, g, or t
  misc_feature (195)..(195): n is a, c, g, or t
  misc_feature (225)..(225): n is a, c, g, or t
  misc_feature (287)..(287): n is a, c, g, or t
  misc_feature (292)..(292): n is a, c, g, or t
  misc_feature (300)..(300): n is a, c, g, or t
  misc_feature (302)..(302): n is a, c, g, or t
  misc_feature (334)..(334): n is a, c, g, or t
  misc_feature (336)..(336): n is a, c, g, or t
accccaaatcctgacgcatgttatcgaagggtttgtgatccaggagggggcggagcctttcccggtgggacgctcgtccctgctggtggggaatctcaanaagtaagtatgcacaggggttcttgcctgagaagcttccccagcaggatcataccaccaccactgactcagagatggaggagccctatctgcaanaatccaaagaggagggcacccccctcaaantcaagtgtgagctctgtggacgggtggattttgcctacaagttcaagcgttctaagcgcttntgttncatggttngngcaaaaaggtataatgtgggatgcaccaaacnantgggac

SEQ ID NO: 1496 - DNA, 362 bp, Cricetulus griseus
  misc_feature (23)..(23): n is a, c, g, or t
  misc_feature (82)..(82): n is a, c, g, or t
  misc_feature (229)..(229): n is a, c, g, or t
  misc_feature (312)..(312): n is a, c, g, or t
  misc_feature (339)..(339): n is a, c, g, or t
  misc_feature (342)..(342): n is a, c, g, or t
  misc_feature (344)..(344): n is a, c, g, or t
cactgggagtttgccctcagggnatcaggacaagtaccgctaccggtaccccaaaggcgagtcctatgaagacttggtgcancgactagagcctgtcattatggaactggagagacaggagaatgtgctggtcatttgccaccaggctgtgatgcgctgcctgctggcctacttccttgacaaggcagctgaagagctgccctacctcaaatgtcccttgcacacagtnctgaagctcacacctgtagcttacggttgtaaagtggagtccatattcctgaatgtggcagctgtgaacacacaccgagacangcctcagaatgtaaacatatccaggcnttnantaggaagcccttgttaca

SEQ ID NO: 1497 - DNA, 579 bp, Cricetulus griseus
  misc_feature (66)..(66): n is a, c, g, or t
  misc_feature (165)..(165): n is a, c, g, or t
  misc_feature (286)..(286): n is a, c, g, or t
  misc_feature (566)..(566): n is a, c, g, or t
gcgcggtggtcgttagaggaggacagcgcaccgcatcctacctgctcgcaggccctcggcgtctancacccgccggcggcacatctcgtcatgtcaggcactgcttggctttagttcctcactcctccgcccacccgcctacccgaagccgcgcccaccgcccanagccagagggatggtggtagtcaccgggcgggagccagacagccgtcactgggacggtgccatgtccagctccgaagccgaagacgacttcctggagcccgccactcctacggccacgcangcggggcacgggctgcccctgctgccccaggagcatttcaggaagggaaccttgtgggtcccaagctaacctggacagtcctcgcttcccaccaagcctttgttgacttgcagattaatcaatcactatagattgagcaggagaggaatggagcacggtagacagtgagattcactctcagcagtagagctcctgcatagcatgtgaagtccctgaatgagaagaaaggaatgagcaccatgatgccccgatgcatttgaaagcagctattggtctctgntcacaactgtttc

SEQ ID NO: 1498 - DNA, 579 bp, Cricetulus griseus
  misc_feature (506)..(506): n is a, c, g, or t
ccacggctggtgtctggaattttgatggctctaaaccaaactctccctcatccctttgtctcccacttttctgaaagagtttacacaagcaagaaaatcacagcaccaaaaacctgtcagccatggcattggaatagaagctttactgaagcatccgttggtatcaggggttcccctgtggacccaactgagaccactcatattagaggttgtgagaggaaaaaaacctagcctagttctgtcatccacagttgtccttgtgtttgccctcccagtatggagcaactgtgtcagcagatcacattacagaaattgtgctttacagaaaccaataagtctgttgctgttaccacttcagcgaggacagtaaatgatgttgtgtctggtcagcctgtctcctcttgtcattgctgttctatagagtttcatcccgttctgcttgactgaccattaacctcatcctgtcgggacttacgtaagcatggacagcataactttctgctcangccagaccctcctttctcagcaaggaaccgtggagagtgggaacctgcattttatttcagtgtccccttcagt

SEQ ID NO: 1499 - DNA, 565 bp, Cricetulus griseus
gcccagaaagtggaagtttgtgcaggggaagtgtcctgggggctgggggttgggagcttgggagtgtccgattgaggccaggatggcaaaatgaagaagctggaagctggattgtcttgggtgcacatggtttctgtccgtctgcctggctccccacccccactttgggcttacaactgccattggaagagcttggatgtgggctgtcgttccccagattttccaaggtactcactacctgccaggaaactggaggggctcctgagggacattgaggaccatggctttccgagatactattgaagaccatacttggcctttgagtcccactctaaccctgacaattctagacctctcttccagtgtccttgtgagccatttgggttttgtctccttagtcatgagggtcacagcaagcaaggatgactgatacatgaccttcaccttgggcctccccagacttacactggggttgaggagagcaaggagacactgcctcttcaaggcccccaggaggtctcctcccagccatgttctttgtccatggacttgctctccaagcatg

SEQ ID NO: 1500 - DNA, 580 bp, Cricetulus griseus
  misc_feature (432)..(432): n is a, c, g, or t
  misc_feature (544)..(544): n is a, c, g, or t
gctctactcttttggtgtgactttttaaatgctccttaaatgacatcctcacgttaactcttttctagaagacagctttacaaggatctagaaggaccaaattcggggctccagaactctccagcgaccagcttagcagatcatacagtcttcaggagctgaaaattcctaagtctggtcttcaccgtgatttggaactttccagtctcagaaaagttgaccaagggactgcacaggactgagtccatatggaagaagaactacctggtttctatggagaaagtggcaagaaggaaaaaaaataaagcagacctcttagaaaataagattccttcatatgaggtgccagtacaggctaccctgtcatcattgaaaatgctagatgtggggaagtggccaatcttttccctttgttctgaggaagaacttcantcgattcgtcaggcttgtgtctttggcagtgctggcaatgaagttttatacaccacagtcgatgatgagatttttgtacttggcacaaactgcagtggctgtctggggatangtgatattcaaagcaccattgagcctcggagactga

SEQ ID NO: 1501 - DNA, 512 bp, Cricetulus griseus
  misc_feature (107)..(107): n is a, c, g, or t
  misc_feature (356)..(356): n is a, c, g, or t
  misc_feature (410)..(410): n is a, c, g, or t
  misc_feature (472)..(472): n is a, c, g, or t
  misc_feature (487)..(487): n is a, c, g, or t
gtgtgtgggggtggtggtggtggtgatttttactatgtaatgattgccattaaatactatacactgagttccgcaatgcagaatgattgtcagttttaggtcagggnacagtgggcgtctgagccaagtcagatctaacttaatgcaggacaatttctattgaactattaattttcaatgtttcaatcttggtaagtttagaatttctttagcaacttttgtttccacctgacagtacttaccttaattaccatacaacctgttaaagttttgtatgtatcagttgaagggtggattcaggaggacagctgttttctgctctaggacaatagcataaacaatgtagaagacattanatacatttcacaaactaaagaaccatcaaaaaataccaagtaataataaatcanggtagaaacagttgcgtattgagacctgttagatcataataattttataatttgatgtattncaagtttattaaatntctaagtgtattaatactactggtt

SEQ ID NO: 1502 - DNA, 462 bp, Cricetulus griseus
  misc_feature (414)..(414): n is a, c, g, or t
  misc_feature (419)..(419): n is a, c, g, or t
  misc_feature (430)..(430): n is a, c, g, or t
aaatttgcctgttcctatgtgcgaccgtcggtttatgaggagcgaccatttgaccaagcacgcccggcgccacctgtcagccaagaagctcccaaactggcaaatggaagtgagcaagttaaatgctctatcaccagccccggcttctgcacaatgactgacgggccacggatgaggaagagtcagaactaactttggtcagtcaggagccagcggtggtgtcacaaatgcttctgcagctctgtggtcctccagcgggcctactgcagaagccccgggctgaggggaaggccagcctgggttagatgacaagtgcttcagccacaggcaggtcacagaagggcaggtttcgtttctttccacgtaaagagatgaggaagcttttcttccttggatggttgtgaaaggtttgangtgangtcattcacanacttgcagtcatgttccacactgggtactttg

SEQ ID NO: 1503 - DNA, 578 bp, Cricetulus griseus
  misc_feature (366)..(366): n is a, c, g, or t
  misc_feature (368)..(368): n is a, c, g, or t
  misc_feature (480)..(480): n is a, c, g, or t
  misc_feature (532)..(548): n is a, c, g, or t
ggagcccattagcagattctaacaggctttgatttgaacattacaatataacctctacctggcctctcctggctccctgctgagggctttatattgctggtaactcttgcctttacttcttcacatttctctccaggtgtgaggcaaaaacttgacttccttttctccctactcctggctgttattttaatagaactaccaatgtacttatggggtcccctaggtagacctaactgtcaagtgcctcagctgccatatctaatgactgacccagcagtaaaagtcagatttggttgtcactccatcttcctaaatggcagttatggttactttgggagggagagcaacactgaacaggcagctcanancaggtaccctgacagcaggagttccagaaatggccttggctctctggtcagaaattgtcaggaaggggtgctggtttctcagctctactcaaacatgcaccccagattgtangctacacatgggggtgggaactaaaactctagttcaagccttaacccactcnnnnnnnnnnnnnnnnngatggatctctaggtcacgatagcaatggg

SEQ ID NO: 1504 - DNA, 569 bp, Cricetulus griseus
  misc_feature (49)..(70): n is a, c, g, or t
  misc_feature (126)..(126): n is a, c, g, or t
  misc_feature (554)..(554): n is a, c, g, or t
  misc_feature (566)..(566): n is a, c, g, or t
acgactacactcattagggcgatattgggtaccgggtccccccctcgannnnnnnnnnnnnnnnnnnnnngcgctgcagcgagctcgcgagtacaacgcgcgcctgttcggtctggcgcagcgcancgcccgagcgttgctggactacggcgtcaccgccgacgcgcgcgctctgctggcgggacagcgccacctgctgacggcccaggatgagaacggagacacgccactgcacctggccattatccatgggcagactggagtcattgagcagatagcccatgtcatctgtcatgcccagtaccttggggtcatcaacctcactaaccacctgcaccagacacctctgcacctagcagtaatcactgggcagacaagggtggtgagcttcctgctgcaggtgggtgcagaccccacactgctggatcgacatggagactcggctgtgcacctggctctgcgggcaggtgctgaagccctaagcctgttgcaggtgctgttgcatagtggggcccatgctgtgccccaaatattgcacatgcctgattttgcangactatatccantac

SEQ ID NO: 1505 - DNA, 487 bp, Cricetulus griseus
  misc_feature (34)..(34): n is a, c, g, or t
  misc_feature (85)..(85): n is a, c, g, or t
  misc_feature (111)..(111): n is a, c, g, or t
  misc_feature (115)..(115): n is a, c, g, or t
  misc_feature (117)..(117): n is a, c, g, or t
  misc_feature (141)..(141): n is a, c, g, or t
  misc_feature (153)..(153): n is a, c, g, or t
  misc_feature (312)..(312): n is a, c, g, or t
  misc_feature (331)..(331): n is a, c, g, or t
  misc_feature (357)..(357): n is a, c, g, or t
  misc_feature (375)..(375): n is a, c, g, or t
  misc_feature (414)..(414): n is a, c, g, or t
ggaagggtctttgcttgcagccggggacttttangccttttaaaaacatttccatcatgtctgacactcaagaagctatcagccnactcctgggatatgaacctttatganaacnangagtctgtgcctatgatagaaggnggcctaagaagngagtctgagcatctccaagtcactattggagccaccgtacctactggctttgagcaaacagctgcagatgaagtgagagagaaactgcagtcgtcatgcagaatcagcaaagaccggggcaagatatattttgatatttcagtggaaagtctggctcangttcattgtctgagatcanttgataacttgtttgtggttgttcangagtttaaagattaccanttcaaaaatacaaaggaagaagttctaaaggactttgangaattggctggaaagctcccatggtctgaccctttaaaagtctggcaaattaacaccactttctagaagaaga

SEQ ID NO: 1506 - DNA, 525 bp, Cricetulus griseus
  misc_feature (230)..(272): n is a, c, g, or t
  misc_feature (401)..(401): n is a, c, g, or t
  misc_feature (507)..(507): n is a, c, g, or t
cagcaaggcccccaatgcatccaacctgaaaattgtacggatggacagaactgcaggatgtgtgactggaggagaagaaatttatcttctctgtgacaaggttcagaaagatgacatccagattcggttttatgaggaggaagagaatggtgggttttgggaaggatttggagacttttcccccacggatgttcacagacagtttgccattgtcttcaaaactccaaagnnnnnnnnnnnnnnnnnnnnnnnnnnnnnnnnnnnnnnnnnnnagcttcggaggaaatcggatttggaaactagtgaaccgaaacccttcctctactatcctgaaatcaaagacaaagaggaagtccagaggaaacgccagaagctcatgcccaacttctcggacagtttcngcggtggcagtggagccggagcgggcggtggaggcatgttccgtagtggcggtggtggagggagtacccggaagtcctggcccagggtatggcttctcgcactacngatttcctccttacagtg

SEQ ID NO: 1507 - DNA, 569 bp, Cricetulus griseus
  misc_feature (525)..(525): n is a, c, g, or t
  misc_feature (546)..(546): n is a, c, g, or t
aagaaacagctgagtcaggctgctcagaggtctggactcccagcagtaactatttggggaacaaaaagatgagggctttatcatcccctaccaggtgaaagataaaattgcagaagccagacaacaccaaaagtagtgcaactggagttatgcaaccatccctcactccagcaaacggtgaagacttggtaggtaggacgctgtggaagttaaaggagatgtggcttatttggtagtgtggctagcatgcagaagccctggattggattcccagtatgacataaaccagcttatctatcatctcagcacttgggagatggaaagcaggaggacgagaagtttaaggtcatccttaaatacatagcaattctgaggccaacctgagttacataaaacctatctcaacaaaaagaatcacattgaagaagggtcccttgtagctccatcagattggctcatgccagcaggtggcggtgagggcataaactgagtggctttttcctgagtcactaaatcacgtgtggnaacatctgcctgcccgctcangtctgctcatggcatttggcagt

SEQ ID NO: 1508 - DNA, 412 bp, Cricetulus griseus
  misc_feature (150)..(150): n is a, c, g, or t
  misc_feature (236)..(236): n is a, c, g, or t
  misc_feature (299)..(299): n is a, c, g, or t
  misc_feature (305)..(305): n is a, c, g, or t
  misc_feature (338)..(338): n is a, c, g, or t
  misc_feature (341)..(341): n is a, c, g, or t
  misc_feature (390)..(390): n is a, c, g, or t
tggacaggtttcctgtgaacttgtttctccaaaactcaatagagcaacagaaggtattctgttttttaaccttgaactttctcagatggctgctccagcttttgaacccggcaggcagtccgatctcctggtgaagctgaatcgactctnggaaaggtgtctaagaaattcaaagtgtatagatactgaatctctctgtgttgttgctggtgaaaaggtttggcagatccgtgtanacctacatttattaaatcatgatggaaatattattgacgccgccagtattgctgcaatcgtanccttgngtcacttccgaagaccggatgtctctgtccaanganaggaagtaacactgttcactcctgaagagcgggaccctgtgccactgancattcaccacatgcccctctgt

SEQ ID NO: 1509 - DNA, 186 bp, Cricetulus griseus
  misc_feature (108)..(108): n is a, c, g, or t
accttcacaactccttagaggagatcaacagtactgtagtgggataccagagacagagtaaccttaaatttgaggggatgaacgagacactcagtaacctgacacagnagactcagcctgatggaaagtgatgtggctgcactgaacaaggcagaaaaaaagagcaaacctgacctccagcaggaa

SEQ ID NO: 1510 - DNA, 563 bp, Cricetulus griseus
  misc_feature (3)..(3): n is a, c, g, or t
tgnatcagatcctactctcctcgttcgtgcgcctcgctcgctctttccggcaaccatgtctgacaaacccgatatggctgagatcgagaaattcgataagtcgaaattgaagaagacagaaacgcaagagaaaaatcctctgccttcaaaagaaacgattgaacaggagaagcaagctggcgaatcgtaatgaggcgagcgccgccaatatgcactgtacattccacaagcattgccttcttattttacttcttttagctgtttaactttgtaagatgcaaagaggttggatcaagtttaaatgactgtgctgcccctttcacatcaaagaatcagaactactgaccaggaaggcctcccctgcctctcccacccatctgtcggtctggctggcagggagggaaaagaacttgcatgttggtgaaagaaaaagctgggtgggaggtggtgaaatacagaaaaaaattcaagatggtccaaggtgtcctgcaggatgtaaaatgcagtttgatcagagtgccattttttttgttcaaatgattttaattattggaatgcacaat

SEQ ID NO: 1511 - DNA, 545 bp, Cricetulus griseus
  misc_feature (534)..(534): n is a, c, g, or t
gttgatgctgggaaaagtactctgatgggccatatgctttatcttctgggtaatgtaaacaaaagaactatgcataagtatgaacaagaatctaaaaaggctggcaaggcttcctttgcatatgcatgggtcttggatgagactggagaagaaagggaaaggggagtaacaatggatgttggcatgacaaagtttgaaaccacaaccaaagttattacattaatggatgctccaggccataaggatttcattcctaacatgatcactggagcagcccaggcggatgtagctgttttagttgttgatgccagcagaggagagtttgaagctggatttgagactggaggacagactcgagagcatggccttttagtacgatctcttggagtgacacagcttgctgttgctgtcaataaaatggatcaggtaaattggcaacaagaaagatttcaagagattactggaaaacttgggcactttcttaagcaagcaggttttaaggagagtgatgtagcttttatccctacgagtggnctcagtggtga

SEQ ID NO: 1512 - DNA, 548 bp, Cricetulus griseus
  misc_feature (4)..(4): n is a, c, g, or t
  misc_feature (529)..(529): n is a, c, g, or t
tagnatggagtggcaccacgtgccaaaatgaaccaacagcgttcaaggaggtttagagcatcaaaggaaggaatggaagcagcagttgagaagcagcgagtcagagaagaaatacttgcaaaaggtggctttcttcctccagaagaaataaaagaaagatttgacagcaactgtattacaccaggaactgagttcatggacaatcttgctaaatgccttcgctattacatagctgatcgtttaaataatgaccctgggtggaaaaatttgacagttatattatctgatgctagtgcacctggtgaaggagaacacaaaatcatggattatattagaagacaaagagcccagcctaaccatgacccaaatactcatcattgtttatgtggagctgatgctgatctcattatgcttggtcttgctacacatgaacctaacttcaccataatcagagaagaattcaaaccaaacaaacccaaaccatgtgctctttgtaatcagtttggacatgaggttaaggattgtgaangtttgccaagagaaaagaa

SEQ ID NO: 1513 - DNA, 564 bp, Cricetulus griseus
  misc_feature (524)..(524): n is a, c, g, or t
agtgagcagttgtaagctgcctactgcaagattaggaaaggcacagatgacttgggcagtaccaaagtgtcaaactgtaaatgctttgtaattagatgactttagttaatatagaatgttttcatggaaaatattcagattgatgggactgtattcttttggtttaaatacttctactttcttgattgattgtcatcttgacctaagtaatagcttgagtagccttttaggaattacttgtaaaatagccttgtaaatagagcatctaaccatacataccctttccagcctcctagaaaggaggtatactggttcatctttcataaatgtaaatattccagcctgtggcatataggtgtatcctatggtgttctttcagcaaagtgtttattgtgcttttttatgtgtatagttaaactctgtgaacagcgtgccaaatcagtgtgcagctgtctttgtggagatgaggattatagggattagatccagggtcttgtgcaagctacagtccacacctagcatanatagcttttagtgaagtcttcaatagcagctgttttacct

SEQ ID NO: 1514 - DNA, 578 bp, Cricetulus griseus
  misc_feature (387)..(387): n is a, c, g, or t
  misc_feature (403)..(403): n is a, c, g, or t
  misc_feature (562)..(562): n is a, c, g, or t
gtcctgaacggagcctccttcccggccatggggctcctgtcggacccggtgcgccggcgcgcgctcgcccgcttcgtcttgcgcctcaacactccgctctgcgtgctgagctacgtggctggcatcacctggtttttggcgctggctttcccgcccctaacccagcgcacttacatgtctgagaacgccatgggctccaccatggtggaggagcagtttgtaggtggagaccgcgctcgaagctttgcccgggacttcgctgcacaccgtaggaagtcgggggctctgccagtggcctggctggagcggtcgatgcgatccgtagggctggaggtctacactcagagcttctcccgcaaactgccctttccggatgagacccacgancgctatatggtgtcangtaccaatgtgtatggcatcctgcgggccccacgtgctgccagcaccgagtctctggtacttactgtaccctgtggtccagactctacaaatagccaggctgtggggctgctgttggcacttgctgcccatttccgagggcagatttactgggccaaanatataatctttctggt

SEQ ID NO: 1515 - DNA, 302 bp, Cricetulus griseus
  misc_feature (159)..(159): n is a, c, g, or t
  misc_feature (190)..(190): n is a, c, g, or t
  misc_feature (213)..(213): n is a, c, g, or t
  misc_feature (227)..(227): n is a, c, g, or t
  misc_feature (250)..(250): n is a, c, g, or t
  misc_feature (279)..(279): n is a, c, g, or t
  misc_feature (300)..(300): n is a, c, g, or t
gggggggggtggggatggatgtggtcatcatcctggttttaaaaaataaaaattagaaaaggaaatcaaagtcaattgtctaagtttaaaaaaggggactgtccctgatcctcacaggtcagggacacctccaaaggcactcgaaaggccagaacacangattgacttaggcaggcgaggaggcctgganagctgggcacaggaggctagganttggggagggaaanaaagcaggccgggcccctctctnttaaggctgcagggttttggctccaggancaagcccacaggtgtggcccnta

SEQ ID NO: 1516 - DNA, 525 bp, Cricetulus griseus
  misc_feature (93)..(93): n is a, c, g, or t
  misc_feature (334)..(334): n is a, c, g, or t
agggagaggtgccctcactcgccctgtactgaccaaggagcagctggacaaccaattggatgcctacatgtcgaaaactaaaggacacctggntgctgagttggatgcctacatggcacagacagatcctgaaactaatgattgaagcctgcctgcctgcccgcctgttagactcttgttaaagtcaccacatctataaaaagaaaaaaaaataatcttgagaaaacatgagaagaaacctgattgatgctggaaggacctatcacaataggctgtggacttacctgccaccagttggcacatttagtctgttccgtctactttttgatactgngttatatgaaaccctattttcctttgatttggttgagtttgttttgttgtttatccagtcacccagacttctgtttgaacaggaatgcattggccttgtgagtgaacatttttccagcctctgcctcacctgtcatatactctgacattttaatatttcctttgttcatctttatgatcccaaaaaaggtc

SEQ ID NO: 1517 - DNA, 567 bp, Cricetulus griseus
  misc_feature (10)..(10): n is a, c, g, or t
  misc_feature (47)..(47): n is a, c, g, or t
  misc_feature (409)..(409): n is a, c, g, or t
  misc_feature (546)..(546): n is a, c, g, or t
aatccatggncagttaagcacaatatattttttagtttgaagctcantgcttgcctcatacaaaagttcaaggacccattttccatcaggggttggtatggtaccatgaacatgtctttacacacatcttggtctgtattgaataacaactctcacaattcttactgaagcaattcagtctaaatactcaagtctcatctataaattgtagataatgattactacatcatggagtacttgtgcatcctgcatgaaataagttacttgaggctgatgtattcctttaataatgtaaaaagaatattgaattcagttcaggaccattacaagattttttttgattactttcagcttgggtgaagctttaaattcttagttaaattccttttctaaagcactcatttattgnctattatttttctagttatctaggtgcattggggaattaaaatcatcatttaaaaatcatcccatggatatcacaagctcataaattgttagatgctaatgggaaagccaagaatctgctccaacttattattgtangcatgcacagatctacctttg

SEQ ID NO: 1518 - DNA, 580 bp, Cricetulus griseus
  misc_feature (554)..(554): n is a, c, g, or t
acaccaccttttccttgcatgctctgctggttgaccactacatacaaggggcattttatccacgaggaggttccagtgagattgccttccatatcatccctttgattcagcgggccgggggcgctgtcctcactagggccactgtacagagtgtgctactggactccactgggagagcctgtggtgtcagtgtgaagaagggacaagagctggtgaatatctattgccccgtggtcatctccaatgcaggaatgttcaatacctaccagcacttagtgccggagagtgcccgctgtctgccagatgtgaagaagcagctggcaatggtacggcctggcatgagcatgctctcaattttcatttgcctgaaaggcaccaaggaggacctgaagcttcagtccaccaactactatgtttattttgacacagacatggacaaagcgatgcaacactatgtctctatgcccaaggaaaaagctccagaacacattcccctttcttttcattgcctctccatcaaccaaggacccaacctggggaggaccgattcccanaccgatccacaatgactgtgctggtg

SEQ ID NO: 1519 - DNA, 220 bp, Cricetulus griseus
  misc_feature (194)..(194): n is a, c, g, or t
  misc_feature (197)..(197): n is a, c, g, or t
  misc_feature (200)..(200): n is a, c, g, or t
  misc_feature (212)..(212): n is a, c, g, or t
gttcccggtctcggttgccggacccgccttccctccctcggtttccccttgccgacctacgcctttggcttctcctctcgcgtttccgccggtccgcttacccgctggccgcctcctgacaagcgggagggttacggtgtggacccagagaagccgaggcgccaggcggctgccaccccctctccccacttgcnctngcnacttcggggcgncttctttc

SEQ ID NO: 1520 - DNA, 580 bp, Cricetulus griseus
catgcagcaactgaaccagctgggcgcgcaggtggagcactttctggctcagctctctgaatttgccaccaccaatcagatcagtcttggccccctcaaaagcatcatgaaaagcctcctcctggttccgaatggtgcactgaagaagggcctcactgccgagcaggtgcgggctgatctcctgactctaggtcttagtgaggagaaagccacttacttttctgaaaagtggaagcagaatgccccaacccttgcacagtgggccataggtcagaccctgatgattaaccagctggttgatatggagtggcgatttggagtgacatctggaagcagtgaattagagaaagtgggaagcatatttttacagttaaagttggtggttaagaaaggaaaacaaatggaaaatgtgtatatagaattaacgttgcctcagttctacagtttcctacatgagatggagcgagtcagagcaagcatggagtgcctcagctgatcctgtttcttgttcccttgttcctgcctcttccctcagggctgcttcagggaccccaccacctcaccttggaagcccgggtgc

SEQ ID NO: 1521 - DNA, 578 bp, Cricetulus griseus
  misc_feature (522)..(522): n is a, c, g, or t
  misc_feature (551)..(551): n is a, c, g, or t
tcctcatcgggtggcaaggaactgtgaggactctttcttcctgctccttcaaccagccagactctgggtgtgggctgtggcttccttgcagaacgaaccttcatcagcctcccgaactgtgtctccatacacctgcgccttctcccctgctgggaccctccctctgcagctatggtctggaggacgctgggcgcaagcaacttttccatgtgccccaatggctccatccagtggatctgggatgtgtttggtgaatgtgctcaggatggctgggatgaagccagcgtggtcctgggcttggtctccattctctgctttgccgcatccaccttcccccaatacatcaaggcctgcaagacagggaacatggaccaggctctatcgctgtggttccttctaggctggatcggtggagattcctgcaaccttattggctccttccttgcagaccagctacccctgcagacttacacggctgtgtactacgtcttggccgatctcatgatgctgaccctgtacttncattacaagttcaagaacccggtcttttncgttgtctgcccctatcaactctgtgc

SEQ ID NO: 1522 - DNA, 566 bp, Cricetulus griseus
  misc_feature (408)..(408): n is a, c, g, or t
  misc_feature (453)..(453): n is a, c, g, or t
  misc_feature (502)..(502): n is a, c, g, or t
  misc_feature (520)..(520): n is a, c, g, or t
  misc_feature (559)..(559): n is a, c, g, or t
ttgggatagttgtgtgaggctggccccgttagcctctggagccctacctcggcaaatccaggctttggctagagttcaagttgagtttccctcttgtttatgtggccatggggcagtcaggaggggctcattgtccctctgttgtggcactggctgctcagtgtctgtgaagttgtggcccgtctgtgaagttgtggcccgtctgtgctaggcagagcagggcttgggcttgctcatggccccagaggcctgctcaggggctggatatgtccctgccaagtcactgcccatcagactcctctgttcctttctagtccacatatccctttgttaccagctcccttgtactcgtgggagggagcagctaccctgatctgtgtctacagttggaggctaccgtagttggangatgctgcgtccgccgttagccctgggggtggtaccacccttganggtttccaggtctttggccagacccagatcccagttagcctcttgttgngttatgttctaaaccaangcctttgctatgaagaagtgtttcatatgaaccattttnctagggc

SEQ ID NO: 1523 - DNA, 373 bp, Cricetulus griseus
  misc_feature (35)..(35): n is a, c, g, or t
  misc_feature (37)..(37): n is a, c, g, or t
  misc_feature (106)..(106): n is a, c, g, or t
  misc_feature (224)..(224): n is a, c, g, or t
  misc_feature (288)..(288): n is a, c, g, or t
  misc_feature (291)..(291): n is a, c, g, or t
  misc_feature (295)..(295): n is a, c, g, or t
  misc_feature (305)..(305): n is a, c, g, or t
  misc_feature (330)..(330): n is a, c, g, or t
  misc_feature (343)..(343): n is a, c, g, or t
  misc_feature (363)..(363): n is a, c, g, or t
gtggaaagaaaagttctagattaccaaactccagnangagtttggctgtagcctttatttgctgatctccatgccatgatgttagaacaacttctaagaaaccagnataaggggaaggaagacatccatgtacaattctcatcctgtcctccactttccatattagcacaggggctgctgtggctcacttgaatgcaggtggaaacattctcatcccatgagancttatccagggatcctgattttatagagggacctttatgggctctggcacttgctaggaatggngtnccanaaaagctgtncttgggccaggatccacacaatgantgtttagttagtngaggaatacccatggcaaangaaacactgc

SEQ ID NO: 1524 - DNA, 567 bp, Cricetulus griseus
  misc_feature (6)..(6): n is a, c, g, or t
  misc_feature (11)..(11): n is a, c, g, or t
  misc_feature (118)..(118): n is a, c, g, or t
  misc_feature (247)..(247): n is a, c, g, or t
  misc_feature (301)..(301): n is a, c, g, or t
tacagnatagnacagagaacattaaagtaatagtttaagcttagggcttagctttaatcttatttggagtattaaacaggattctggatatcagcaatgtaatttaaaagtacaggcnaagggactggcattgtatattattggtaacacacttgtctggcatgcacaaggctctggatttagttcccagtgctgtttaaaacaacaaccacactagtaagcagtaaggagtttctctgttatatcngttgttatctgggaagcagggtggtttcactgttgaatatggactatatatagnatcagacctaggttcatttcttgaactcgtcataatacttacagcaatgtaatcaccgtctgttgagcatattgtgtacctgctaagtcattgatttttttgttatctcacttaattttctctgtaattctggaaggtaagtttagactcttcattttcctgttagagaaactgcagctaagagtaattacagagtgagctctatctctgatttctctctttatcctttctattatgtaatagtatttctttttttctctagctag

SEQ ID NO: 1525 - DNA, 440 bp, Cricetulus griseus
  misc_feature (2)..(32): n is a, c, g, or t
  misc_feature (39)..(39): n is a, c, g, or t
  misc_feature (59)..(59): n is a, c, g, or t
  misc_feature (67)..(67): n is a, c, g, or t
  misc_feature (179)..(179): n is a, c, g, or t
  misc_feature (281)..(281): n is a, c, g, or t
  misc_feature (350)..(350): n is a, c, g, or t
  misc_feature (381)..(381): n is a, c, g, or t
  misc_feature (395)..(395): n is a, c, g, or t
  misc_feature (410)..(410): n is a, c, g, or t
tnnnnnnnnnnnnnnnnnnnnnnnnnnnnnnncaggggnaggaagggaggcagtagggnaactgggnattgacatgtaaaataatcttgtttctaatttaaataaaaaatgggagggaaaaggagggagcaaacattcctctctttgctttcagatgaatcaatttgcccccttgtggnagtatgccaaagactaaattacagggccctcaatccaacaacatacccaagaagactaatgtcctgggagtttgttagacataaggttgaagtccccagggnacccttggtaaagctgcggcaagattctgtgctgtcttgaaataaaatggtcccaaaattatagatganggtggcatttgtgtttgtgtgtatgtgggantttgcaattaagantgtcctgtctcccanaactcacaagacataggcagatggatctct

SEQ ID NO: 1526 - DNA, 149 bp, Cricetulus griseus
  misc_feature (15)..(15): n is a, c, g, or t
  misc_feature (20)..(20): n is a, c, g, or t
  misc_feature (37)..(37): n is a, c, g, or t
  misc_feature (61)..(61): n is a, c, g, or t
  misc_feature (67)..(67): n is a, c, g, or t
  misc_feature (138)..(138): n is a, c, g, or t
tctcatcaggaacancagcnctgggctcctatgctgncacctcatcttcatcgatacccangcctantttgatcatgcggtatatgcggttggagtgggtttggggatcctcaagtgagaaaccagaggagagcatancagtctcaaac

SEQ ID NO: 1527 - DNA, 544 bp, Cricetulus griseus
  misc_feature (519)..(519): n is a, c, g, or t
  misc_feature (539)..(539): n is a, c, g, or t
gcgtgggtttttgacataacattttctcagcatttttcacatctagtaacttaaaacattacacttaactgtgattctggtgactgctaataattttgtgagctcaacccctttttaaaattttatttatttttatatgtgtggtagttttgcctgcatttatgttccagtgagaccaggtattggatcccctgggattagagttgcagaaactgtgatctgctatgttaatatgggtcctgggatcaaacctgagtcctctggaagaacagccagtgctcttaactgccgaggcatctttctggtttcctcaaaactctttgtaaaatgaatattgttccatgactttcagtcttttatatttgctgtgattaagggaaaactacattctagtaaaagtgtttggtatagttaaccccaaaattcttaaccaaaataataaagtttgactaaatttataggttgcatataaagttgtagtaatggagcagagtcatatttaaaatacttttgtattangctaatttgtcatattctgnccagt

SEQ ID NO: 1528 - DNA, 580 bp, Cricetulus griseus
  misc_feature (364)..(396): n is a, c, g, or t
cattgtttggtggaaatggcgagacaggttttgagcaaaattcgacttactctgtgttcagcatttctattacattgactgatgaggggtatgagcatttttttgaggttgctcatgctgtcttccagtatttaaaaatgctgcaggagctaggcccagagaaaagagtttttgaagagattcagaaaattgaggataatgaatttcattaccaagaacagacagatcccgtggagtatgtggagaacatgtgtgagaacatgcagctctacccacttcaggactttctcaccggagatcagcttctgttcgaatacaagccagaagtcattgctgaagctcttaataagctggttcctcagannnnnnnnnnnnnnnnnnnnnnnnnnnnnnnnnaaggaagatgtgatctcagggagaagtggtttgggactcagtacagtatagaagatattgaaaactcttgggctgaactgtggaagactaattttgacttaaatccagatcttcatcttccagctgaaaacaagtacatagccacggactttacattgaagcctttttgattgccctgaaactg

SEQ ID NO: 1529 - DNA, 546 bp, Cricetulus griseus
  misc_feature (246)..(278): n is a, c, g, or t
  misc_feature (329)..(349): n is a, c, g, or t
  misc_feature (405)..(405): n is a, c, g, or t
  misc_feature (427)..(427): n is a, c, g, or t
  misc_feature (494)..(494): n is a, c, g, or t
  misc_feature (510)..(510): n is a, c, g, or t
gtcaacaccaaaacccatccctattctagcagctgggttttgcttagacaagacatccttattgcttgtgtatggcaactggtttcagcctaccattgagcgagtggctttgaactccaaagatactcatatatgtttggaaagagacatttccaattgctgggctccaacagtagaaacagctataaccaaggtgagaacaccagtgatgagttcagaagctaaagttctggtgcctggggttcnnnnnnnnnnnnnnnnnnnnnnnnnnnnnnnnntctcacagcctaaggaggtggagaacaagaggaaattgggcagtaatgagnnnnnnnnnnnnnnnnnnnnnggagccatgggtctagatagaaaaggaaggaaggacgaccttttgcagacaaccanctttccagtccttctcacacanggcttagaaagcaatgattttgaaatgttaaacaaagtgcttcaaactatgaatataaacctaatanagaagaccgtgctaangatgcccttgcatgctgttatcccattgttgcaaga

SEQ ID NO: 1530 - DNA, 490 bp, Cricetulus griseus
  misc_feature (74)..(74): n is a, c, g, or t
  misc_feature (240)..(276): n is a, c, g, or t
  misc_feature (337)..(355): n is a, c, g, or t
  misc_feature (468)..(468): n is a, c, g, or t
ttctccccctaggttggggttacatgtgtcatcatgaatagcacttttttgcatggggtggcaatggtacttanaggcaagccagtttactgagtcacttcctaagcactaaattttgatttctttctttttaaaattaaaaaaacaaaaaccaagatattgtctaggcttttaaaagaattgttgacaaaagataacatcccctttagaaagtttttcattcgcctgcattggtggtgnnnnnnnnnnnnnnnnnnnnnnnnnnnnnnnnnnnnnatggatctctgggagttcgaggccagcctggtgtatagagagagttccaggacagccaggnnnnnnnnnnnnnnnnnnnccttgaaaaacaaaaacaaacaagccaaagaagctgggtgctgaggcctcaaaagataggaaggagcgaggttgagctcctcccctcctcctctcttgggctgatgctttcangttggttccttctttgaaataa

SEQ ID NO: 1531 - DNA, 379 bp, Cricetulus griseus
  misc_feature (309)..(309): n is a, c, g, or t
  misc_feature (370)..(370): n is a, c, g, or t
aagtctgatgtcgaacttttaatgttttcagtgttctctaatttttaggagttttttgtagcctttacacctggaaaaaagatttgtaaaatcaccaaaataattgtgtgctttattttttaagtagtgattataggtgttacatcccatagttactgcaagatttattgccgtatattggagcagatgtctcattaacataagagtacttaggaagtgaagtccttttgtgcattttcaacatttatcaactggcaatcagaaaatgtttactgtgaagaggaatctccaacttacatagcccttttnggtatgtttaataattcttaatggggcttgcctgtaagtatgatatgcatagcatcttagngaaatgccg

SEQ ID NO: 1532 - DNA, 517 bp, Cricetulus griseus
  misc_feature (351)..(351): n is a, c, g, or t
  misc_feature (416)..(416): n is a, c, g, or t
  misc_feature (423)..(423): n is a, c, g, or t
  misc_feature (432)..(432): n is a, c, g, or t
  misc_feature (447)..(447): n is a, c, g, or t
actgtggtttgggtaggctggatggcgggttttcctacagcttagcacgtctagtttctctgcttcactcctttggttcaagacgtgagctctcaacttccggtttctgctgtccttcctcccttccatgacagactctgtccctctgggaccacaggtcacaataaagcctcctgctgtggaatattattttaagatgtgttacattcatttatgctgtggaatatttgttcgataatgcaaaggtgtgttgcattcttttatgttgcatctgtttaactctgttaagctgtgttaccttgcccgcctaaaatacctgattggtctaataaacagctgaatggccactancgaggcagaagagagaaataggtggagttagtatgcagagacaataaacaggagcagaaatctanggaaganagtacaganagagaaaaggaaganaggagggtgccaggggccagtcacccagccacacagccagccacagagtcaggaggaaagaaagacatat

SEQ ID NO: 1533 - DNA, 527 bp, Cricetulus griseus
  misc_feature (114)..(152): n is a, c, g, or t
  misc_feature (467)..(467): n is a, c, g, or t
  misc_feature (509)..(509): n is a, c, g, or t
  misc_feature (520)..(520): n is a, c, g, or t
ctcaactccccacttcatcctccatgaaggcccatgttcattcctactctataccttggtcctactgatgctctattaccaaaggcctaaaggttaagtaggagtaacaccttnnnnnnnnnnnnnnnnnnnnnnnnnnnnnnnnnnnnnnnctcagctggctttctgggttttctcaggtaacctgcttcctcagggctgttcccacagaggcctcagggttatctcccccttagcaaagtccccactaggattgctggcttggggcctacagcagggctcctcagcctgcctgctgttgtgttacaggaaactcttggccaccgcatgtcccatggagccctgacatgtggtcagcatagcctttctccttggcttgggccttccaggtagccccatttggggtgcctgagtgcagacttctctgtgattgccctgtggttccttggttggacagtttcccccanaagaccacagggcaactgtcaagctgctcaccccttcccaangctggggctgnaaccagc

SEQ ID NO: 1534 - DNA, 489 bp, Cricetulus griseus
ggtcctgtttgggttcgcagtgcaccgcaagcccgcgaagagtggcgaccgggagacatggacccctgtggctgacttcactcaccatgcccacaccgcctccttgtcagctgtggcatcgaacagtcgctttgtagtcacaggcagcaaagatgaaacgattcacatttatgacatgaaaaagaagatcgatcatgggtctctggtgcatcacagtggcaccataacttgcctgaaattctatggcagcaggcacttaatcagtggcgcagaagatggactcatctgtgtatgggatgcgaagaaatgggaatgcctgaagtccattaaagctcacaaaggacatgtgactttcctttctattcacccgtctggcaagttggctctgtctgttggtactgataagacattaagaacatggaatcttatagaaggaaggtcagctttcataaaaaatataaaacaaaatgcccacatagtggaatggtc

SEQ ID NO: 1535 - DNA, 501 bp, Cricetulus griseus
  misc_feature (427)..(427): n is a, c, g, or t
agtgtaaaatgggctcccaaagtccattcctatgcaagggataagtactgatctactacaaggaggccccatatattactgaggcctcctcactgacacccacattcagggggtctagatcagttccatgctggtttcccagtgatcagtctgggggccaagagctcccccttgttcaggtcagctgtttctgtgggtttcaccagccaggtcttgacccctttgctcatcactccttctctgcaactggattctaattcagttcagtttaaggttgtgtaggggaagaatagaggagagcaaaataagagatacatcaaagagggagccaatataggtttagagagaaatcaggcactagggaaatgtccagagatctacaaggatgataccaactaaccatctaagcaacagtagagagactacnttaaatgccctcccctgataacgagattgatgactaacttgggtccagtttttaaaattatttgaggagatttt

SEQ ID NO: 1536 - DNA, 110 bp, Cricetulus griseus
  misc_feature (80)..(80): n is a, c, g, or t
attttgactacaaagatgaatctgggtttccaaagcccccatcttataatgtggctacaacactgcccagttatgatgangctgagagaaccaagactgaagccacgatc

SEQ ID NO: 1537 - DNA, 286 bp, Cricetulus griseus
  misc_feature (137)..(137): n is a, c, g, or t
  misc_feature (279)..(279): n is a, c, g, or t
gccccagcagcttctgctccagctcaggccaaaccagatctggaaaagcagacaaaagcttcccctaggaaaggcaccccagccacccctgcatctgccatggtctcctctatgcgagtgagcaccgcaccctctantgaggaggggtcaggagctgctcctggcactacaagggtgcaggggaagtctgtggggaagggcctccaagggaaaggtgacttgggacaagggatggccccagtgcaccctgagaggccggggcctacagttgcccatgtnaggatta

SEQ ID NO: 1538 - DNA, 475 bp, Cricetulus griseus
  misc_feature (375)..(375): n is a, c, g, or t
  misc_feature (385)..(385): n is a, c, g, or t
  misc_feature (436)..(436): n is a, c, g, or t
  misc_feature (463)..(463): n is a, c, g, or t
gaggtccgttgtgtgagcaagctgctatggtgctgagttcccgggtagagtcgaccgagccggggcggtcgcggccatgaaggcgggtgctacttctatgtgggcttcatgctgtgggctgctgaatgaagtcatgggaactggagctgtcagaggtcagcaggcaggatttccaggaagcacggggccattcagatttacaccaagttctgactttcccacctacccaccagcagctactgaagggcccaatatagtttgcaaagcgtgtggactttcattttcagtctttataaagaagcacgtctgctgtgactgcaaaaaggacttttgctccttttgctcagtttcacaagaaaacctccgcagatgttntacttgtcanctactccaagagacagccttccagcgccctcagttgatgcgactgaaagtnaaggacctacggcagtatctcctcctnataaacatacca

SEQ ID NO: 1539 - DNA, 568 bp, Cricetulus griseus
  misc_feature (6)..(6): n is a, c, g, or t
  misc_feature (13)..(13): n is a, c, g, or t
  misc_feature (46)..(80): n is a, c, g, or t
  misc_feature (346)..(346): n is a, c, g, or t
  misc_feature (406)..(406): n is a, c, g, or t
  misc_feature (505)..(505): n is a, c, g, or t
cgactncactatnagggcgatattgggtaccgggtccccccctcgnnnnnnnnnnnnnnnnnnnnnnnnnnnnnnnnnnncttttctttcattgggggaaggcgtgaggaaagtaccaaacagcagcaggacttttaaactttaaatagacaggtctgggagcctgagccctccttttctttgacttcagcctccaaggagcctcaccgctttggcgcgccggcttcgctttcattaagcgaaagagaagtgcccagacatgggtgactggagtgccttggggaagcttctggacaaggtccaagcctactccaccgctggcgggaaggtgtggctgtccgtgctnttcatttttagaatcctgctgctggggacagcggttgagtcagcatggggtgatgagcantccgcctttcgctgtaacactcagcaacctggttgtgaaaatgtctgctacgacaagtccttccccatctctcacgtgcgcttctgggtccttcagatnatattcgtgtctgtgcccacgctcctgtatttggctcacgtgttctatgtgatgagaaaggaa

SEQ ID NO: 1540 - DNA, 581 bp, Cricetulus griseus
  misc_feature (19)..(19): n is a, c, g, or t
taatgatggcttccaaagnagtattttttaaaggaacaaaataagcatgaattaacttttcaatataagctatgacgtgtaatagttggttatgaattgtagtggcaccagctagcacctctgtcatttaaggatctttttgaatgcttttagaagaatcccttattttcaagggttaaaatgagcagacaaactattctttccctggctaaagctgctgtgggaaccctcagcttaggaaggtggaaatctgttggcgctttggtttagtgtagcacgggaatggaagtagaaaagttttattcagttctttgagtgctcagaaaatgcaatcagtgtattatatatgatgattcgtagtcagaatcaatgtattatacgtgatgattcatagtcatttgtagtcatcgaccctaaggctttttactaagaaactagctgaagattcacccttgaattaggtctggggaaatggccaccatcaggaggatttactttagaacaaaaatgaaattctagtctaactcaatagtgtgtggtgagtgtgcagaccatagggcattggtgagtgcctgcaattt

SEQ ID NO: 1541 - DNA, 580 bp, Cricetulus griseus
  misc_feature (346)..(346): n is a, c, g, or t
  misc_feature (427)..(427): n is a, c, g, or t
  misc_feature (510)..(510): n is a, c, g, or t
  misc_feature (534)..(534): n is a, c, g, or t
aagctgcagggcgagttggaggatgagtggcaggaggtcatcgggaggtttgaagaggatgcttctcatgagatgcaggaacccgagtccttctcagcctggtcagaccgcctggctcgagagcacgcccagaaacggcggcggcagctggaggcagagacatcctgccgacccccaagggctgagggctccagtcacagctggcggcagcacgaggaggagcagcggcttttccgagagcgagcacgggccaaggaggaggaactgcgtgagagccgagccaggagggctcaagaggctcaaggggaccgagggacagagcctcccaggcctgggcccagggcanaacacccacgaggggcaggaaggggcagcctctggcgctttggtgatgtgccctggccatgccctggtgggggggacccanaggccatggctgcagccttggtggccagaggcccccctctggaggaacagggggctctgagaaggtacttgagagtccagcangtccgatggcaccctgaccgcttnctgcagagattccgaagccagattgagacctgggagctgggccgtg

SEQ ID NO: 1542 - DNA, 386 bp, Cricetulus griseus
  misc_feature (45)..(45): n is a, c, g, or t
  misc_feature (124)..(124): n is a, c, g, or t
  misc_feature (220)..(220): n is a, c, g, or t
  misc_feature (338)..(338): n is a, c, g, or t
  misc_feature (372)..(372): n is a, c, g, or t
tacagtggccaggttgaatagcaggtgagctgaaggaaagaaganagttctggaaggagacgagacagaatcttgggtaaagaaggctaagactggggtctccatgcaagtgaaagtaccccanggacactgagtggaaggaaggcagaatgcacagggtccatccacactgagagaagaagcccttcacctgagggtgaaatctagaagctcagcatanaaaaggcctggggacttgaggaaccagtaaagtgaaaaaccataccagcaatgtctgaaaggccattggagccaacataagccattctcacagcatgaccacaacccatggtgctganacaaacactgtctaacagaaggcactgggcactnctgtggagcgtcag

SEQ ID NO: 1543 - DNA, 336 bp, Cricetulus griseus
  misc_feature (153)..(153): n is a, c, g, or t
  misc_feature (203)..(203): n is a, c, g, or t
  misc_feature (314)..(314): n is a, c, g, or t
acaagctacaaaatctccagatggtgttaatagaagtgaagcatcccctcctcagtcgggcgacacacagtacctttgcacagaagctccagctccgagtgccttcagtggagtctctgtttcggagtcccataaaggaatctctgttctggncttctaaagagtctttagtgcgaacatcttccagagagtccctgagccancttgacctggactgtcccgctgccacctttgacccaccttctgatatggagagcgaggctgaagacgcaccaggcagctctgacagcctcaacagatagcagttgcttcancggttgcgaagaatggaacgaa

SEQ ID NO: 1544 - DNA, 568 bp, Cricetulus griseus
  misc_feature (17)..(17): n is a, c, g, or t
  misc_feature (89)..(89): n is a, c, g, or t
  misc_feature (451)..(451): n is a, c, g, or t
  misc_feature (490)..(509): n is a, c, g, or t
cagccaggattctgagnatacagaatttaaaagattcttctcttctggaaagtgataagaaaaggaaaggtaggccaaagggcaaaggnaaacaaaagaaagcacagagcatcttcaagtaagtagatggagaagtagaagctgttctgcagaagaaagctaaagcaaggagtatagagttacagatttccagtgtgaagtttgaagatgttggaggcaatgatgcaacattaaaagaagtctgcaaaatgctcatacacatgcgccacccggaagtataccaacaccttggtgtcaccccgcctcgtggagttctcttgcatggaccaccaggctgcgggaagacattacttgcacatgcaattgctggggaacttgacttgccaattctgaaagtggctgcaccagagattgtgtcaggagtttcaggggagtctgagcaaaagctcanagatttatttgaccaagctgtgtcaaacgccccctgtannnnnnnnnnnnnnnnnnnngatgctattacccccaaaagagaagttgcttcaaaagatatggaaagaagaattgtagc

SEQ ID NO: 1545 - DNA, 579 bp, Cricetulus griseus
  misc_feature (137)..(208): n is a, c, g, or t
gtgctgagtacagctatttccagggtctaagccatgcatggtgactaagagctgaggcaggacgattgccttgagtgggaggccagcctgagctacaatgtgagaccctatctcatgattgggaagggggaagcttnnnnnnnnnnnnnnnnnnnnnnnnnnnnnnnnnnnnnnnnnnnnnnnnnnnnnnnnnnnnnnnnnnnnnnnnaaggtgagaatccagaatgaccccctgtcttccagaaagtcccacatattctctatctgcaaaccacccgttgttgccatgatttcagcatattggttgtcttgtgatactgccctctttctttggaattccatgaaatcagggattatttatttttcacaatcttacttttctttcataatgaaaagatggttaaagttgagaggctttttgcaccacaaataaaaactgcatggaccggccagcaaggtggctcatcatggacaggcctctgtcatacatgtctatcgacctgagtaactgtggttagagaactgtctctccacagttgcactttgtatttcatttgcgattgcacacccttaacctat

SEQ ID NO: 1546 - DNA, 581 bp, Cricetulus griseus
ctttagtgttagcatacagctctgcagtctccagcaaaatggttaggcagattttagagctttgtcctaacctggaacatctggatcttacccagactgatatttctgattctgcatttgacagttggtcttggcttggttgctgccagaatcttcggcatcttgatctgtctggatgtgaaaaaatcacagacatggctctagagaagatttctagagctcttggagttctgacatctcatcagagtggctttttgaaaagtgcaggcaaggccaattcagctccatggataaataaagacattaccatgcaatcctccaagcagtatgcctgcttgcacaatttaactgacaaaggtgttggtgaaaaaatagacaatgatcactcttggactaaacctgtatcttctgaaagttttacttctccttacgtgtggatgctagatgctgaagatttggctgatatcgaagatgctgtagagtggagacacagaaatgtcgaaagtctctgtgtaatggaaacagcctccaactttggttgttcttcatctgggtgttacaatatggactttgtgggatta

SEQ ID NO: 1547 - DNA, 470 bp, Cricetulus griseus
  misc_feature (368)..(387): n is a, c, g, or t
aagctgaagatcacgaaagcaaggcatggaaatcactagctcttaccactaccttagctgaaagggctgatcttggctctaccaaacctcagactgctatactgacctcactgtcttcctatcctcaatatggctggagaatgaattgctaatactactgaaggccctgctcctatcttttatacccctctagtgctgggtttaaaggcatgtaatcgaaggtgcaaagatcatctttgtgtgagctgtttctctttaggactggatcaatcttgtgtagatctgggtggactcacagagatccttctacctcttaatcctgagtcctaggattaaaggtgtgtactaccacctcctaatttctggcnnnnnnnnnnnnnnnnnnnnatcaccactgcctgatctttatagcttgaggctggctttgctttctgaatccctaagcaagcctgtataaatcataagtaata

SEQ ID NO: 1548 - DNA, 580 bp, Cricetulus griseus
attaatttgacactgtagcctatatttttataaaatccagtactttgtaaagtccgtcatttgtaaccttgagtggacttcaatttctttagaaccaatttttcttgtttggttctgatttattgttgcactccatgatggcaaatttcaaaagtgtacattctgagcaatttttcttttcttcatttgtgggaaaacaccatcatgtatggggtgtcaccttcatttactgcaaatgtaccttgggactattaacataaagtatctcataagtatgaaatatatggaaagatatttaagattgaaaaatgaatagcaggcatatgagccattgcttatatattgtttgtctcttccatgctagagtccttggcacagcaaggtcagaaatcacagcgattttcttttttacttcctaacactgagctcataaggtttgtccctcaccatgaaatggacatttttagcttttcttacttaaagtatgttgccatattctgtgctgcatagcccttttaaaacctgaacaggctttcctctttctgctcagctgcaactaatgcaaactcaaaagttggta

SEQ ID NO: 1549 - DNA, 579 bp, Cricetulus griseus
actgcttctgatatggtgtccacttcccgcatcttggttgcagtagtgaaaatgtgttatgaggctaaagaatgggacttacttaatgaaaatattatgcttttgtcaaaacggcggagtcagctaaaacaagctgttgcaaaaatggttcagcagtgctgtacttacgtggaggagatcacagacctcccagtcaagctgcgattgattgatactttacggatggttacagaaggaaagatttatgttgaaattgagcgtgctcggctgactaagaccttggcaactataaaagaacaaaatggtgatgtgaaagatgctgcctccatccttcaagaattacaggtggaaacctacgggtccatggagaagaaagagcgagtggagtttattctggagcagatgagactctgcctagctgtgaaggattacattcgcacacagatcattagcaaaaaaattaacactaagttcttccaggaagaaaatacagagaaattaaagttgaagtactataacttaatgattcagctggatcagcacgaagggtcctatctgtccatttgtaagcactacaga

SEQ ID NO: 1550 - DNA, 580 bp, Cricetulus griseus
  misc_feature (572)..(572): n is a, c, g, or t
cacgtgacttcctacactgtgaaccatggccctgccattccggaaggacttaactgagtataaggacctggatgaagatgagctccttaacaatctgtcagaaacagagctgaaacagcttgaaactgtcctggatgatctcgaccccgagaatgctcttctgcctgcagggtttcggcagaagaaccagacgtcaaagtctgccacgggaccctttgatagagaacatctgctttcttatctagagaaggaagcattggaacataaagaccgggaagactatgtgcccttcactggagagaaaaaagggaaaatttttatccccaaacagaaacctgtgcagacttttgcagaagaaagcatatcccttgatccagaattagaagaagctttgacaagtgcctctgatacagaattgtgtgatcttgcagctatccttgggatgcacaatctgattacagacacacagttctaggacgtggtgagaagtagtaatggtgtcaaccaagaacatttttcaaatgtggtaaaaggtgaaacgattcttccagtgtttgatcagccaccaaatncaaccaac

SEQ ID NO: 1551 - DNA, 147 bp, Cricetulus griseus
gttcgtaccccacgaccgttcccgggaggaggaggagagggtgtatcttttgaacgaacttcttttagcctgcttcttggagaacccctgttttcttccctaaaaggagttcctcttgccccagactcttgaataatggaggagggt

SEQ ID NO: 1552 - DNA, 147 bp, Cricetulus griseus; identical to SEQ ID NO: 1551

SEQ ID NO: 1553 - DNA, 194 bp, Cricetulus griseus
ggaaaaaaacataaaggttttggagtgggtttgaacccaattttagggggttcaaacccttccttttttatttaactttaacaaaggggggtttttaaaatgtttggtttggaggagggcacccgggtatccactttaaatttgtggatgggggatcaactggcatcacttaactttttgaaggaaaaccttcc

SEQ ID NO: 1554 - DNA, 580 bp, Cricetulus griseus
  misc_feature (467)..(481): n is a, c, g, or t
tgttccagtagcacgatgtgatccacagcaaggagggacgccaataaggcttccgataagataagtcttataaaatatatagatttatgacagttaagactgagctagcagatgagaatcctagtcattggccaagcagctttgaacttaatacaagtttctgtgtattcatttgggccctaacttgggcaggcagcttgcgtaaagcatacacgtggcggtggggctctgtggcttttggcagaaagatttactgtaacaaccaatgaagatctatgctggagaggatgtggagaaaaaggaatactcctccattggtggtgggagtgcgaacttgtaagaccactttagaaatcagtatagcggttgctcagaaaaatgggaatcagtctgcctcaagatccagcaattcctctcttgggcacgtactcaatgcacattcatacaacaaggacatatatgttcannnnnnnnnnnnnnngcattgtttgtaatagccagaacctggaagcaacctatatgccccttcactgaagaatgggtagagaaaatgtggtacatttatacaatggagtactac

SEQ ID NO: 1555 - DNA, 580 bp, Cricetulus griseus; identical to SEQ ID NO: 1554
  misc_feature (467)..(481): n is a, c, g, or t

SEQ ID NO: 1556 - DNA, 319 bp, Cricetulus griseus
  misc_feature (19)..(80): n is a, c, g, or t
atgtgtggaaatgttgatnnnnnnnnnnnnnnnnnnnnnnnnnnnnnnnnnnnnnnnnnnnnnnnnnnnnnnnnnnnnnncgcgtccggagcaaccctgtctcacaatgacgaaaccaaaaacagacggacgcaacccactgagctattctacccaccgctgtaactcatattttaaagggactttctataattgagctccaaaactagatatcctatcattcccaacagtcccttcagatctgcactatacaaggtatagagaatctcgttttgtgcccgttatccatgctgaataccatggcgattctacttcacca

SEQ ID NO: 1557 - DNA, 576 bp, Cricetulus griseus
  misc_feature (225)..(240): n is a, c, g, or t
agggtctgcagagggaccagggacctggcctcacaggctggaccacacccctaaagaaagcagcatcagatggggtgggactcagtagaaatgaacatggggagagggcctcgggctgctcagaagaggctcagcctcagattctgggcgtgctgtgtgccacagctaacggctggtgaaagagaaggacggaaggcagtcagcacgcatccttgaatggaaacnnnnnnnnnnnnnnnntcaggaagaagacagcccagagctgtctcagtgtctgaggcttgggcccaaggacataaactatgacgaccaaaagccacacttgaggctgcaaaccaaaaagccaagatgctgagaggaaacctgggcccacagactcgatgaacaccaatgcttaacccttgacagtcctcagctgggaatccattgagttgatgccaccaaacatgctactcgagagggcaaccgaagctccagagaccagagagagtccactctcatcctctcaagctacatcatcacatctactccccgccccatgagccctgtcagtggccaagcaggaagctgacccaa

SEQ ID NO: 1558 - DNA, 579 bp, Cricetulus griseus
caactataagcaatgtgaagtctatggccaggtaaggtgtgcatctattttgtttgaggactgtggcccacaggatttttaatactgtcatttgggtcctgatggaaaatgaaggcttatgggtgatttctttgttattaaagccctgagagcaagggcccggagctgcttgtttgagaagctgtagccgcccccggcatgtggtcaactaagtgtgttgattttttcaaaccacaagtgagatgcttttgtgagtgtgaggcaccttgacacagacctgtgttatcaattttgtactcaaatgccaaaagatggaaaatattttcaagtcataactaaaaatggacatctttgataattttccttttatagaatcagctaaattgtcttttctttttcttttgaatattattggggatattgtgggatcttggatgtctagtggaaaggaaactacagagcacctagttcggttggaccacttcctaagtatctttgcatcccatacctggattgccggccctgggcatgagaagtctcctgcaccataagactcaaggaagctgatgttatcaacaa

SEQ ID NO: 1559 - DNA, 362 bp, Cricetulus griseus
  misc_feature (228)..(252): n is a, c, g, or t
  misc_feature (255)..(267): n is a, c, g, or t
taaattcataaacaataagctatacagagataaatgtctaaacctgtatccaaatgacacttcaaatacaaattaaaaaaaaaactggcttacatttgacactttttaaaatatatatccaagaaataaggagacataaaggcggaaaaaaaaactcttaaaaaaaagcagttatgggtctggaaagatggctcaaaggttaaaagcactgctcttccaaaggtcctnnnnnnnnnnnnnnnnnnnnnnnnnggnnnnnnnnnnnnnctgtaatgagatctggtgccttcttctggtgtggagatatacatggaagcagaatgttgtatacataataataaatataaagtcttaaaaaaaaa

SEQ ID NO: 1560 - DNA, 570 bp, Cricetulus griseus
  misc_feature (50)..(78): n is a, c, g, or t
  misc_feature (114)..(150): n is a, c, g, or t
  misc_feature (210)..(244): n is a, c, g, or t
  misc_feature (291)..(341): n is a, c, g, or t
  misc_feature (436)..(467): n is a, c, g, or t
cactatgctcagctacagcatctttcttatatgactgggtggagaaatannnnnnnnnnnnnnnnnnnnnnnnnnnnncaatgaatcaaacccacgatccatagaagcatcacnnnnnnnnnnnnnnnnnnnnnnnnnnnnnnnnnnnnngctgcttatatccagcctcctcaactataaacaaatagggctatgaacattgcaaccacnnnnnnnnnnnnnnnnnnnnnnnnnnnnnnnnnnngcactgccaaccaaattaggccttgatgcattcaacgcctgacttgnnnnnnnnnnnnnnnnnnnnnnnnnnnnnnnnnnnnnnnnnnnnnnnnnnnacacataaaggatccccaatgaccatctgacttgaaagttatcaacctattgatgttaataggcgaaggcactatgcccttatctaaatgctatnnnnnnnnnnnnnnnnnnnnnnnnnnnnnnnnctcgcggaaaattatagcttactcatgcatgtgccatataagctgaatatgctgactgctcccatgcatcccatcacttacaatgatcaatctaattatctac

SEQ ID NO: 1561 - DNA, 568 bp, Cricetulus griseus
gcagtcgcattgacgatctggagaaaaatatcgctgacctcatgacccaggctggtgtggaagaactggaaggggaaaacaagattgctactgcacagaaaagttgaaggtgctgacattcacaccgagtccagaacatctttttcccaagccaagagaaaaccaactggctttctgcaactaactactatgtgttgacaggtttatgaagcgtgtattcttatcacaacagcctacatagtccatagagtgtccctcccctgcatccccagtttctcaaacttggtatattcacatcttggtcagttgtcttaattattaaacactaaaactttggcggtttctgcataaaattgtcaaactttttagtgatttttgaagtcctttcctgctgttcttcttgcggtagttactgtttgatgacatgacagagtacttcccagttaggtgactagtgactcctccccttggcagaagccgtgatgtgagatgtgtacgtttagggttctttctttcagcacatagtgactgccgaactgacactagagtgccagaaatacttttccat

SEQ ID NO: 1562 - DNA, 455 bp, Cricetulus griseus
  misc_feature (85)..(98): n is a, c, g, or t
  misc_feature (100)..(126): n is a, c, g, or t
acagaaatgacatgagtgcttttatattgtgaatgactgaaaatttaaaatacattgagtcatagggtttgtctaaaaaagggannnnnnnnnnnnnnannnnnnnnnnnnnnnnnnnnnnnnnnngaagaaatgtgctgggactgctcttcaacattctgttctctgtgaatagtttatataaaattataatattttctacagctgtgtggactctctcacagagtccagaacggctatatattagttttatgcaaattgttttacacagacacacagttcttcttggttatcttccacagcccacagggaagggaagaatggtttctgggacgcacatttagaccatattgctctccttcacgtttatatgcgagatggtgttcttgacggcagcatacacagagcggatgttctcagtgtgtgtggcgcatgatatgtgcgagtatattttt

SEQ ID NO: 1563 - DNA, 579 bp, Cricetulus griseus
atataactgactagaatattaagaattgagtgctcacacccccacccccacccagggatgtgtacttgggcatggttaggaaattccttggatctcagatctgtgcaccttgcagccatttaaccaggactgactactgttgtcatcttgctggtgaagcccactctcctgcgctggtgttgagggacagccactcggctgtgtcatctaggtttgaatgtgtattactatcactacttaagggactttgggtacatctgtttagtgtatgtagaatgtgcagagtactttgtcagttttcctctgtttttcttttttagcaaaattagtcatcaatttagtctagttaattaagctgacagtctactgtgaggagatgacatgtctactgtgaccatagcaaaagactgttggaaaacttttatactaagagtgttttctactaagataaaaagacacacacatgcacctcacagctctctagtagggaattaatgcggatttaaaaatggcaatcatgggtcctattggttttgttctttacagagcattcactcccacagaagggtgaccaaagcc

SEQ ID NO: 1564 - DNA, 579 bp, Cricetulus griseus
  misc_feature (547)..(547): n is a, c, g, or t
tgctctactatgaagagactaagagcttcctgtggtggacaagcaacctgatggtgctgggtggctcctcagcctatacctgggtcaggggctgggagatgcagaagacccaagaggaccccagctccaaagagggtgagaagagtgctattggggtgtgagcttcttcagggacctgggactgaacccaagtggggcctacacagcactgaaggcttcccatggagctagccagtgtggccctgagcaatactgtttacatcctccttggaatatgatctaagaggagccagggtctttcctggtaatgtcagaaagctgccaaatctcctgtctgccccatcttgttttgggaaaaccctaccaggaatggcacccctacctgcctcctcctagagcctgtctacctccatatcatctctggggttgggaccagctgcagccttaaggggctggattgatgaagtgatgtcttctacacaagggagatgggttgtgatcccactaattgaagggatttgggtgaccccacacctctgggatccanggcaggtagagtagtagcttaagtgctattaa

SEQ ID NO: 1565 - DNA, 600 bp, Cricetulus griseus
  misc_feature (286)..(305): n is a, c, g, or t
gtcgacccacgcgtcccgggggggtgagggggaaagaaagagtgcggtgagagatggctggaattgggggtctctggggcacctctgcactaagggaaccttctcagaatctatgaagtgatcctaatgaggacttctggtatgggggaatatggagtctaaactgtctatctcttgttgccaggagtctaaactgtctatctcttgtcgccaggagtctaaactgtctatctcttgttgccaggagtcttccagtggtgaaactgggttgcattaaattgagttnnnnnnnnnnnnnnnnnnnngaaatccccaaacaacccacgctgttgctaagacaaaaggctgctctctgcaaaatgatagtggggccccattgctgaggacataactcactgaacacggagtagtggagctggtgcctacatggagccttcactcctgtgttctagtgtctttggtgctggaaggtacttcgtaggctaccagaagagaatcagggacaccgacccaggcacaaagcctttaccctataatctgtcctgcctgcaaagtatatagggcaatggtggcacagaacttgtgggagtagacaatcaa

SEQ ID NO: 1566 - DNA, 568 bp, Cricetulus griseus
  misc_feature (2)..(14): n is a, c, g, or t
tnnnnnnnnnnnnncctgcctccaggttcctccttaagtttctgccatgtcttctctgaataataggttactaactgtacaatgaaataaatcctttctcccaagttgcttttggtcaaagtgccccctccacaggaatagaaaccctaactaaaccaacctcagactaatactaattttttgaaatactgttattgtgaaatattgttactatgtagccccaactcaaaagaaaaaataaatttcaatacatgtatttctgtggaatatagaatgttcaaaatttgtgaaaactgaagtatttctgcctggtgagtcattttcaattttaatactctttttattatcaaattatatcttcatatcttgtcattgtctgggcctaatttattaggcaattctaaaataaccagggctcttcttataccaatttaaattatatccactgttaaattgtaagtaaagtctatgaaaataaaatcattttagattttttaagttatttatatttaaaaaatcacttcacctaccattgttaacatgtaaatacagagtgaaacatctcact

SEQ ID NO: 1567 - DNA, 250 bp, Cricetulus griseus
  misc_feature (205)..(239): n is a, c, g, or t
aaaaataaacttttatttaaattaaaaacaattttattttgtataccaatcccagttcccactccctccctcccatgccctcccaaccccccttcccacccctgtccactccccatggagggtgaggcctcccatgggggatcatcaaagtttgacacattcatcatttagagaaagccctaagccctaacctgtgtatctaggnnnnnnnnnnnnnnnnnnnnnnnnnnnnnnnnnnnagagagagaga

SEQ ID NO: 1568 - DNA, 568 bp, Cricetulus griseus
  misc_feature (62)..(208): n is a, c, g, or t
  misc_feature (231)..(288): n is a, c, g, or t
  misc_feature (303)..(436): n is a, c, g, or t
  misc_feature (491)..(508): n is a, c, g, or t
ttattttccttatttttattctattgaccttacctgtaataataactatatttaacttctannnnnnnnnnnnnnnnnnnnnnnnnnnnnnnnnnnnnnnnnnnnnnnnnnnnnnnnnnnnnnnnnnnnnnnnnnnnnnnnnnnnnnnnnnnnnnnnnnnnnnnnnnnnnnnnnnnnnnnnnnnnnnnnnnnnnnnnnnnnnnnnnnnatccgttaatctaaaatttgatnnnnnnnnnnnnnnnnnnnnnnnnnnnnnnnnnnnnnnnnnnnnnnnnnnnnnnnnnntttcctcatgatatnnnnnnnnnnnnnnnnnnnnnnnnnnnnnnnnnnnnnnnnnnnnnnnnnnnnnnnnnnnnnnnnnnnnnnnnnnnnnnnnnnnnnnnnnnnnnnnnnnnnnnnnnnnnnnnnnnnnnnnnnnnnnnnnnnnnnncctacctattggctgatgacacggccgacaagacgccaatactgcagcccttacnnnnnnnnnnnnnnnnnncattggggacttggctttcgtatacaaaacctggctctgcctaaatcacaattcctggaa

SEQ ID NO: 1569 - DNA, 567 bp, Cricetulus griseus
  misc_feature (182)..(201): n is a, c, g, or t
cctaggcagcattaagatattcttatttattgttttgggtcttcctctcaatttatggcctggaactcagagatttgcctgcctttgcttcaaaaggctgagattaaaggggttaactccatagccacctccagaagacatcccaatagctaaaaaaaaaagttctttcacaaagtttgtannnnnnnnnnnnnnnnnnnnccttagtaagggtaccagttgaagcagaagcacttcttcccttacctgttatgtatccttagaatgaattgaatcataaattggagccaaaggcataaacaaaatttggtataaaagactgttcgagttgaatattaataccagtatttatgttggagagtttttatttttctgtttaaaaaggggtaatgctgtattttaaattagaggaaaaattcagattttaagccagtggtggttgatattagatgtcctgcatatcagatatttgattatgattcataacagtagcaaaattacaattatgaagtagcaatgaaataattttatggttggggggccaggtcaccatcacataaggaactg

SEQ ID NO: 1570 - DNA, 567 bp, Cricetulus griseus; identical to SEQ ID NO: 1569
  misc_feature (182)..(201): n is a, c, g, or t

SEQ ID NO: 1571 - DNA, 569 bp, Cricetulus griseus
tttatgagtcgccctaaattccctatacaaaaatacgtctttaatgaaaacggattgatcttccagacatggaaggaacaaagaaggttcaccctgatgacactgaggaactttggattaggaaagaagagcttagagcagcgcattcaggaagaagctggacatcttgtggaggccatagcagaggagggaggacagccttttgaccctcactttaagatcaacaatgccgtttccaatatcatttgctccatcacttttggcgagcgttttgagtatcatgacagacaatttcaggagctgctgagattgctggacaaggccatgtactcaggttcctcagtgatggtccatttctataacatcttcccatggataatgaaatatcttcctggacaacaccaaacagtaatagctacctggagaaaactgaaatcatatgtttctgatgttattgacaatcaccgtaaagactgggaccctaatgagccaagagacttcattgatgctttcctcaaagaaatgacaaagtacccagacaatactaccagtttcaaagaagaaaacct

SEQ ID NO: 1572 - DNA, 554 bp, Cricetulus griseus
ggtagggttgcaagtttgagaccagcctgggctacatgaagaaatcctaagcaaaatagagaggagatactttcctcaataaagaatactgttcatttccttagggaataatgactttggttggtggtgtcctttattttctattgccctgaactttgtgggggtagataatgaatggacataaagtagcaaggaaaaatgagtaacctaagaacaaatgttttagctatgtaatcttagtggctaatcttaaaatgtttattttgtcataatttttgtccatagagttaaaatttttctataaagcggatctaagtatctcttttctgtcaagaaatggacataaattaaaataatgactataaaatagataagaatttgtagtcgtcactatttgaatagtctcactttcattttggtcaagccgtgtagaaactggattgaaaggatctattcaaaaatggctgtttaactggaagaaacagtatgttacgttcttgacaaaggagataatttgaggctatgaaataaatagtattccctaggaactatat

SEQ ID NO: 1573 - DNA, 580 bp, Cricetulus griseus
gagaggtggcttgcaaagatgtgcaggtgcatttcatgaaaaccagtgctgctagcacaaactgggcacgaagatgactgctgaagctgagatcctgacaggcgccctaggttctttagttttagaagtaacctggaagcctttagttttggaaatttcagaacccctgagctggtttgtgtatggctgttttgggaattaaaacttaaatgatggaaagctgtatgtcaaacgacagcagcttagttaggtaacccttgtttgagattgtctcaacagaaagggaaattgagatgctcttctgttgagggtgttagttctcaaggctggagtcagaagtgctggtgtctaagactggatctgtccacacgacgcggcactatgcttaggtgtcattttgcattgtaactataggaaggaggtatgcattgtaagagcaggttatgcctacttcctgggcaaatggctgtggtggaagccagcagtgctgttttggagggggatgttcatgcctgcatgatactctccattcttgatctctgtccactttcctgctaattcacatctcaagacaaatgcc

SEQ ID NO: 1574 - DNA, 174 bp, Cricetulus griseus
  misc_feature (119)..(137): n is a, c, g, or t
agtaagtccttaaaaaacaaagactgctgtcttaggcaagattgattagcacattctgaggtctggtctatttgcccaatggatgggcctggacaatcgtgaccccccaccccaaaaannnnnnnnnnnnnnnnnnnttggggtttttgcctttaaaaaacccctgtgcttggg

SEQ ID NO: 1575 - DNA, 555 bp, Cricetulus griseus
tctgacacatacatcaaagcatgtcagtttttctttttttccactgtgtgggccaggttcaaaatatgactgtattcattgttgagtgtagaaagctagccttgactcttattttaagaaattatgttagcacagtaagaaagattctcttgaaatgcatcctccccaccatcccccccacccccacccccagaaaaggtgaggacttttaccagtgggaatgttgatgtttgcagtcatctctccatggtcaaagtaactattgcatgtgagttttagtgagttacaaaaagcaacctaagtttaaaaaaaaagtagagaggactctagagaatgcagaggagaattcttccagagtctatatttatttataatgcccaccatgatccagccaaccttgctttgctataggagagccatgagatggaggtgtgattcctccaaacagaatgtgagtggcaggatgagtcctacctatctccacctgctttccctgggaaaggagagcacatggcaggttgaccagccattgccgtggatgctactcggtggtgc

SEQ ID NO: 1576 - DNA, 578 bp, Cricetulus griseus
aagagcgagatggacagagacttatgtgcgctggtcccctaagggcacctacctggccacttttcatcagcggggcattgccctctggggaggggagaagttcaagcagattcagaggtttagccaccaaggcgtgcagcttatcgacttctctccatgtgaaagataccttgtcactttcagcccactgatggacactcaggatgaccctcaggccatcattatctgggacattctcacagggcataagaagagaggattccattgtgaaagctcagcccactggcccattttcaagtggagccatgatggcaaattctttgcaagaatgactctggatactcttagcatctatgaaacaccctctatgggccttttggacaagaagagcttgaagatctctggaataaaagacttttcttggtctccgggaggtaacatcattgccttttgggtgccggaagacaaagatattccagccagggtgaccctgatgcagctccccaccagacaggagatccgggtgaggaatttattcaatgtggttgactgcaagctgcactggcagaagaatggag

SEQ ID NO: 1577 - DNA, 493 bp, Cricetulus griseus
aatataagacagtgaatgattgtcttcaatagaaaacagaaatgacttgaagaacaatacacaagcttatcctttgaccttcatattcacacatagctccccacccccatgaaggtgattggattgcaagtgcagtacttattgatgactcagtgactacatcatgtttaaatactgtgctttcccactcgagatctgtgcataatattttaaaaagtgtaataactttctccaatgacaacctctgatactccacctaacacttccacctcacatattgtgaagccctggaatcttatcaccccttttagaaaatgtatagaggcaaatgttgcttttgacccttatgcttgcaatttcaaccagacgctaataaaatttatttatttgttatgccacacttctgaaccctaaatgctagaacttgggcgccaaataatggaaaagaagcacttctttactttgttataagccttatttttccaaaagttat

SEQ ID NO: 1578 - DNA, 600 bp, Cricetulus griseus
gtcgacccacgccgggcgggactctgtccaactacaagctgagagccaaaaccctgtcaggatctagatctgcctgctcccttcacactcaactttcagctgaaaggaatcgatgtatgggcggacatacaacagcggaacctgctggagggactaataggactacctccagcgattgacgaagaactattcagagaagacacagaaggagatacctcaaaactgaaacataacggcgaggggaagacggcgcctgtagctaaaatcactaaaacagattggtcgaaccgactgggtaccatctacccctatagaccttcaactagactactggacacaactccaacctgtggtacctggacagacaggactcctggatgcctgaaaaaaacatgtgcgaccattgtactaagaccatgggatatgccacctgtgctcactggaagatacaggaaatgccgtataaactgctgggtcaccaccccaagatcgctttatccttagcggacacaactaggctgtgtgctgacctacataactctggggatatagcgcacaaactgtctttgccagcttttcctggtaacgtgcaccctcaag

SEQ ID NO: 1579 - DNA, 562 bp, Cricetulus griseus
agttcctacctgtgattgggcacaaaaagccggaagtcacaaatgtgtgtagcatttttgagacaggatgatttggccagtgaactggcccggaaagaaccaaaaggggaaatcagggggctcactgagctggaactcaccgtggatccggaacatcacagggtattaggagtccctgatggcagttaggcaggccacggggccctgaggggcaaagcgggttttcacaaaggggcgtggatgaaacatgctcaaaacccgggggatgatgacctccttgtccttgggcgggggggggtaaaaccggttgttgaacaaatagcctgtgaaaacactcacctcaccagggatattccaccagggctggcccagttcctgacctggagggggcaggaaggcccggaagtggcggccaccaaactttgcatttggtgaggctgccattgtccatttgcggaggcctgacaaaccaaggcgagatacccctaggaagccatctttgcttttggtcatggtctttgagaacaaaggctggaaatcggccttccatggtaagaatctc

SEQ ID NO: 1580 - DNA, 503 bp, Cricetulus griseus
ttcaaggttaaacttattggcagtctcaagagtatcagaattcagttaaaatctcccacaacacatgcatacccacacctagtcatacacatttgttaaaaatggagagggccacattaaacccatttaaattattctgaaatttttgcatttacttaaaaaccctcaagatcctcaaagctattttccgagaaaaagtagccaaaattctgaaggctgtatcactgtgttcctgcctccaatcaactgaataagaaattgctactttaaaaaaaatataaacaaataaaatgaaaaccaacaatacaagggcattttcttagttcacagaattatcatgggctgattgcactgtagggatttccacctatataaacagaactattatttccacctgtgaacagaactaacagacatatattttaatttgtctctctgaaaagtcagatgagacaaagaattgcaagctgcagaagcagaatgtaggaagaaaacttctgaag

SEQ ID NO: 1581 - DNA, 505 bp, Cricetulus griseus
agttgtcttatccggagctggtattctttgtccatgtggtgtattttgctggtaattaatataaagagaaagtgaacttattttaagggaggtgcagaggtgaagaactagcttaaaactaaaaagttcagtctccagaagtaagaattcaagtagtttgatctgccctgctcagggccattttctgtgaagtgcacccactttattgtctgactaaggtgggacttgggtgctgtactgattctagtgttccaacagtttggggaatacatgtgacttcaattccctccttatttgtgacgtttagcaggagagttcaggctcctgaggcccttgagatggaagaagggctaggtctcctgggagactagttgaaagccaacaagacttattttaagttgcatctttttgaaaggccctggctgggaagtcctgggcagtctagctctgccactacagtacccctctgagtagtttggcaagggtgctcattggcatgcaatgt

SEQ ID NO: 1582 - DNA, 505 bp, Cricetulus griseus
  misc_feature (133)..(153): n is a, c, g, or t
tcgaagcgtttggcccggcgcgccggcttccatggagctggaggggcagtggtggcgaagacaactggctgcggacattcaccaagcgcttcggtacaaagagctgaagttgccttcttacaaaggccagtcnnnnnnnnnnnnnnnnnnnnnatattttgctgatttgattgccatagtgagcaatcgcttcacactctgcccttctgcccgacatcttgctgtctatttgctggacctgctcatggatcgctatgacatctctattcagcagctgcatttagttgcactttcctgtctgcttctagcaagtaaatttgaagagaaagaagacagtgtgcctaagctggagcagctcaacagcctgggctgtatgactaatatgaatctcgtgctaacaaaacagaatttgctgcatatggaactgttactattagagacctttcagtggaacctctgccttcccacagctgcccatttcattgagtattatctctctgaagca

SEQ ID NO: 1583 - DNA, 505 bp, Cricetulus griseus
ttcggcagactcacgcaccaactgtgaggagccgggggtttgtgcctgggaaggccgcgtaccgggaggtgcccgactggtgggagctgtggccggcggagcccataagcccggcgcagtcccgaactcggtcgcctcttgcccctgtaggcactgtcatggcgcagttcgtgttcgagagcgacttgcactctctccttaaactggacgcgcccatccccaatgcacccgttgcgcgctggcagcgcaaagcgaaggaagccaccggcccagctccctcgcccatgcgggccgccaacagatctcacagcgccggccggaccccgggccgaactcctggcaaatctaattccaaggttcagagcacccctagcaaacctggaggtgaccgctatatcccccatcgcagtgcttctcaaatggaggtggccagcttcctcttgagcaaggagaaccagccagaagacggggagacgcccaccaagaaggagcatcagaaagcctg

SEQ ID NO: 1584 - DNA, 578 bp, Cricetulus griseus
ggtgaaggagacgtgtgtgtctagttgtctactgacgcctccctccgggtagacccagaactttctctcaagactcacctccctcagcccaggtggtgtttacttctcaactgtcacagcttcatccgtctttggattcctctaaacctgtctgtgagcggatagccactagagacagttccaagaaaacctcgccacctgaagggcgatcagcacccagaaactagaacttccagtatcctttgcgcgcggctaaggggcggggattcgggagccgcctcccgctaagagatggcagagtcctcggggtctccgcaccgcctgttgtataaacaggtgggctcgccgccctggaaagaagctttcaagcagggatgtctcgagagaatgagaaacagccggcacaggctcctggccaggtaccgccaggctggaggtggcacaccaaggaaagcctcagacagatttcttgtgcaagaagtgatggaggaagagtggaactctttgaagtctgtagagaattgtccagaaaccttgtttcaattgggactgccacgagacctaacctgtgctgcagg

SEQ ID NO: 1585 - DNA, 579 bp, Cricetulus griseus
acaagcaattaaagttacccagaaaaactgtggtatacattaaggaatcaaaagaaaccaaagtaaaagtgctcacgtactttttaaaccacattaggaagtattctccatcaatagtaagcttcccgcatacttgtaaattttacaaaagatgacagttaccttaacaccttgagtttcttgtgacatgatttccagggatctagactttcatttttttcattctacgttgcggagcactgattgcatgattatttacaaatttcttaaagaggaggcataaagtggcaaaatatttccactcttgtttttaacttcctttttctctgtccttggtgcctttcacatcatgcacctcaatcccgttcgttttcccatcccttcgtatccatcctctgcccctgaaacctccccccaaaaataaaataaaatttaagagaaaaaaaagggagaaaaaatcatcaatctcatcatggaagctgcagtggaacacagggaatcacgaactaaacccttttatacattatatctttacttgaagcgttccttgcacagaaatcaggctctaaacctcagggt

SEQ ID NO: 1586 - DNA, 566 bp, Cricetulus griseus
gcgcctctcggaagcaccggtgaccaacctcttccgagcacgcttcttggcctcccgcacagctttcatcccgcgcctttctcagcgtcgcccctcggagtcgccgccgttcctgctgccatccggagcacagtctcacactccaccagcttgccgccatgcccaagaataaaggaaaaggaggtaaaaacagacgtagaggaaagaatgagaatgaatctgaaaagcgagagctggtgttcaaagaggatgggcaagaatatgctcaggtaatcaaaatgttggggaatggacgattggaagcaatgtgtttcgatggtgtaaagagactgtgccatatcagagggaaattgaggaaaaaggtttggataaatacatcagacatcatattggtggggctccgagattaccaggataacaaagcagatgtcattttaaagtacaacgcagatgaagccagaagtctcaaggcatatggcgagcttccagagcatgctaaaatcaatgaaacagatacctttggtcctggagatgatgatgaaattcagtttgatgacattggggat

SEQ ID NO: 1587 - DNA, 578 bp, Cricetulus griseus
gacaccatgtgaaggtgccatgtgggggtcacggtgcgcctctgggatagctttgggggtgtttatattgtcaagagaaagggggccctgcttctgatattggtgctggcttccggcttgggcaaggggtagggacacaggctttgtttctggaggctgtgcttggcgctgtcatagaatttgttcctctgaccagccatgcatctagacatgttgtccaggctcctactaactgtgtgttgttaggttctcctgtgtcttggtgactcaaggttttatagcattgcacagtagaacttaagctttgaaaagggccttgtaattcctgggttgtagttggcctatttgtagcctgtcacagacttggggtaggcattgaacccaccagagcccatattctctccagagacccctggcttaagtgtccgtgtgaccagctccccagtttcctagaagcccgaggtcaccttccacaccctgtattcaggagactctgcaagccacgatagccctaatattatgtatggtgttgtgtctgtctgtcccctctgcgatcagcagggaagggcactggtgat

SEQ ID NO: 1588 - DNA, 579 bp, Cricetulus griseus
aagcaagtgtctattcacagaaatcagagaggggaaaccagcgtctcaacttctcagaaagtgaaggaagccggaagagacttcacctacttgatagtggtgctcttcggagtcagcattacaggtggcttgttctacacgattttcaaagaactgttttcttcatctagtcctaacatcatatatgggaaagccctagaaaaatgcagaatgcaccctgaggtgatcagtgtgtttggggagcctgtcaaaggctacggggaaatgtcgagacgtgggcggagacagcatgtcagttttattgaatatgaaaaaaacgggctaaagcgcatccgtgtgaaattctacattgagggctctgaaccagggaagcacggaacagtgcatgtggaagtggaagagcacccacagagtggccaatttgaatttcgatacgtatttgtggaagtggctcctactagatctattgtcgttgaagataatcgttcccaaaagagttaaaagaatcaaacctgcctgctgcttcctgtatgggataaagggattcattgcccctgtgatcttcacactctctttcag

SEQ ID NO: 1589 - DNA, 579 bp, Cricetulus griseus
  misc_feature (257)..(293): n is a, c, g, or t
ttaccgtggaagaaaaagcaaaggcagccagttattattagactgtgttctccattgtgtgtgtgttgcaactaaacccacaatgcatggtgttgagtcatagggctcataaggggtgattaggtaaccactcatgggatggtttgttgatcttcgttgtcatcctacttgctctagaatcaccgaggaggcctatcgttggccatgtctaagaggggatttccatgggagattagcggaaggaataagacccaccnnnnnnnnnnnnnnnnnnnnnnnnnnnnnnnnnnnnntgtgtactggtgctccgggggtatgtactcaacttttaagcaattagttcataaggcccagtaggccaaaaccttgcttagacaataagcggagctacacaaaggaaaatggcccccatcgaagggacccattaaatgaagagtcccctagatgataacattaatgtcttgattagaattctttctgtctgtgctgaatgtgtaatttgaaagcaaataccaaatgaccaaacaccacatgtgtctaacgatgtgcaacgttgcgataacacattccatacaatat

SEQ ID NO: 1590 - DNA, 600 bp, Cricetulus griseus
  misc_feature (499)..(499): n is a, c, g, or t
gattcccacgcccgagccaccccaggcagtaggtgggatatagatataaggagtgatcgacttgctgccccccgttgtagtccacgcgagacgcgccgcgcgggagacagagagaggtcgtgagaccaagatgaatattacgcgataatggcgcccacacgcgatatggtcgtccagtacagcgcagtctcaccagttatatgtttagtgcgagttgtgttagtttgaggcagagtattagtgatgcgcgagactattatatatcaatcaacgccaagatttagcgcaagcaggttgtttaagagtatctgattgtcccgcgttgtattggttttgttgtgaagagaaagaaaactaaaagggacacaaagtttagcgagggtgtatcgccgacacggcgctcttatctagccacgtattattgtatttaagccgctgggctcgccgggcagcagatattaaagagacaaccgcataataggagaatccacaccagcgnaggtaagagagaaggatgatcgacgtaaatatttggcggagcgacacccacccagcgagcacgagagggtgggtgggtggggaagatgagtgagagagaat

SEQ ID NO: 1591 - DNA, 565 bp, Cricetulus griseus
ggtgacgcggtgaaataagaaccgtgacacaatggatgcattgggggaacttgtgtgagacactggctttttctctgcactctgtggactatcactgtgagatttcagtaggcccatttataaagaagctgctgactcatggggtagtcagactgaaagggacctataacagagggtgagtcaagagtgaggaagcaattggaacaggtggtgatatgggcagcatgtggctggcagaaatgatgagacattgttgagttctttcactgtttaggtgataaccagtgagaatgcctatggatgtggggtatgaaagagagaaggaatgctaagtaacttcaaggcttattgggcaacaatcagaacaattggaggaacgtattgctgcagaaaggggattaggttctcattgggtgtgtcacctttctgacttcagttgagatagctgggagacaggagtaattcataggactcagttgtagacactctgtctgcatagtcctaatataaacctgtgacactagatgtgttcattgaatgcactgtttaagataaaaagcagaat

SEQ ID NO: 1592 - DNA, 578 bp, Cricetulus griseus
ttctctcaaaaggaaagctttctatatggcagggcaaggagacatggactccagttacggaaattacagctatggccaacagagatcgacacagagtcctatgtaccgaatgcccgacaacagcatttcaaacacgaatcgggggaacggctttgacagaaatgctgaaacatcatccttagcatttaagccaacaaagcagctgatgtcctctgaacagcaacggaaattcagcagccagtccagtagggctctgacccctccttcctacagtactgctaaaaattcattgggatcgagatccagtgaatcctttgggaagtacacgtcgccagtcatgagtgagcatggggacgaccataggcagctcctcgctcatccaatgcaaggtccgggactccgtgcagctacctcatccaaccactctgtggacgagcaactgaagaacactgacacgcacctcattgacctagttaccaatgagatcatcacccaaggacctcctgtggactggagtgacatatctggtcttgacctggtgaaagctgtcattaaagaggaggttttgtggccagtgt

SEQ ID NO: 1593 - DNA, 579 bp, Cricetulus griseus
cagtgcagtacttaaagctttgatcggtatctatgtgtattgatctgtttaaaactaaaaatgtaggactgcaaagacggctcagtagtcaagagcactggctgctcttccaatggacctggattcatttcccagcacccatatggcagctcaccaccatctctaacaccagtcccaggggatctgatgggctcttttagcctgcactggcaccagccacacacatgatacacagacatacataaagacaggatgtccatacaaataaaaataaacaaacaaataaaactaaactaagaaaatgttaacattttaatactgacagaaatttgtaatgatttaataaactcaatatggttataagggtaattaagcccagctttttttccgtgagtgtcaaccctcctgaaattttatatttttttcaaagtgtatgtgggggtgggaaggtagtaaggggtaccacatatcttggaactggagttaaaagcagttatgagctgccccatgtggttcctgagaagctaacctgggttctctggaaagcagctagtgcttttaactgctgagctattttct

SEQ ID NO: 1594 - DNA, 580 bp, Cricetulus griseus
  misc_feature (17)..(59): n is a, c, g, or t
  misc_feature (86)..(139): n is a, c, g, or t
  misc_feature (152)..(220): n is a, c, g, or t
  misc_feature (232)..(300): n is a, c, g, or t
  misc_feature (313)..(366): n is a, c, g, or t
  misc_feature (421)..(458): n is a, c, g, or t
aatattgtattaacttnnnnnnnnnnnnnnnnnnnnnnnnnnnnnnnnnnnnnnnnnnnaatgtctacgcttctatgtttaaaaannnnnnnnnnnnnnnnnnnnnnnnnnnnnnnnnnnnnnnnnnnnnnnnnnnnnncgataggtatgtnnnnnnnnnnnnnnnnnnnnnnnnnnnnnnnnnnnnnnnnnnnnnnnnnnnnnnnnnnnnnnnnnnnnngtagtgtcaaannnnnnnnnnnnnnnnnnnnnnnnnnnnnnnnnnnnnnnnnnnnnnnnnnnnnnnnnnnnnnnnnnnnnatactcctacctnnnnnnnnnnnnnnnnnnnnnnnnnnnnnnnnnnnnnnnnnnnnnnnnnnnnnnttcttaaccaatactttatctatagcaactttatgacacataaaccaaacacgcnnnnnnnnnnnnnnnnnnnnnnnnnnnnnnnnnnnnnnctgatcataaattatatcagttactctgacttttaccacttatactacctacctggtcgaaatgatcattaactaacgaaaccgactaccccacacaaccgtatattttctctacctaacct

SEQ ID NO: 1595 - DNA, 578 bp, Cricetulus griseus
  misc_feature (525)..(525): n is a, c, g, or t
atgcagaggtcaccaaacaggtgtccgtggccaggcaagcccaggtggatttggaaagagagaaaaaagaactagaagattcctttgcacgtgtaagtgaccaggcccagcggaagactcaagagcaacaggatgttctagaaaacctgaagcacgaactagccagcagcagacaagagctgcaggtcctccacagcagcctggaaacctctgcccagtctgaagcgaagtggctgacacagatcgctgaactggagaaggaacagggcagcctggtaactgctgcagctcaaagagaggaagagttctcagccctccgagaccagctggaaagcacgaagatcaaactggccagtgcccaggaatccatgtgccaacaggtaaaggaccagaggaaaatactcttggcagggtccaggaaggacgcggagcgtgagatacaggaggcactgagccagcttgaagagcctgctctcatcagctgtgcagggtccacaggtagtcttctagatgcccacctgctgngcccagcagcctggtgcttcctgttggggttgaatgccacaggaagcatagct

SEQ ID NO: 1596 - DNA, 579 bp, Cricetulus griseus
  misc_feature (258)..(278): n is a, c, g, or t
  misc_feature (309)..(331): n is a, c, g, or t
aatgcattttatttacttctagcttctaagttttacttttgattagcaattctttatagtagagtgtaatttaatacccctttgaaggaagatacctttgtcccatatgctgctgtcattcatgtattttagttaaatgggcagacaggttctggtggaatggcatatttttaataaatactaatgatctttctagttttctttgctctttcagtgtccacatttttttgtttggtttgttttgttttttcaagacannnnnnnnnnnnnnnnnnnnngtgtcctggaattcactctgtagaccagatnnnnnnnnnnnnnnnnnnnnnnntcctgcctttggcttgattacagtcagtcaactttcagaactggaagttgtcttcctggctggtagactactctgcttaaagaagcttttgtagttttccatgaataagaaaaataggttgaatcaactcaaggttgtagcacatgatcagttggccacaaaatggttttgatgaggcattaaacgtattataaacagccttgctattcctttgaaatgtacatttaaaaatatctaaagtatatctg

SEQ ID NO: 1597 - DNA, 580 bp, Cricetulus griseus
tttggctcagtgcttagctgtggatatctgcttctgcttccatcagctactggatgaaggctctaggatggcatttaaagtagtcatcaatctcattataggggaagggcatttaaggtagcctcaccactactggttagactcttagttgggagctatttgtgtgtcagtcttttgtgtagtttataaagcatttttgtcagatatatattataaacacaagacaatgaagagttaagagccatggaatcaaggaaatccaaattgtgtccatgatgactcaccatgataaatcttattgaagtgattgaaacactaagaaaattggaatgagatagcaaattttccatagttaaatttattcatctttttattctgtttttttcattttattgtatttaaataactatttgtgaaattatagtaaaaattatagttgagtaactacacatacttatgtacaaaatgaatctttagatatatttggttcatttggaatacccacagaattcagtgaaacagtagctcacttaaaggcattgaatattgaaaagaagttatatgtacatatctatagaaa

SEQ ID NO: 1598 - DNA, 579 bp, Cricetulus griseus
tagacattgactgaatgtggcagcagaccctattatgaccagcctctagtttcagaaaacctcagaaactctggcctgttttttcatgagtaacctgtggtcttagttaggatttccattgttgtgaagagacaccatgaccatggcaactcttatcaggacaacattttattgaggtggctcacttacagttcagaggttcaatccattatcatcatgatggagagcatggtggcgtgcaggcagatatggtgctggctacatcttgaccagaaggcagcaggaagtcaactgacagtcactctgagggaagtttgagcaaaaagagatctcaaagcccgcccccaaagtgacacacttcctccaacaaggccacacctcctaatagtgccactccctttgggggccatcttcttccaaaccaccacaactgtattgtgtactcaatcttctgaatgggagtaatagaaacgtctgttgtaatcaaaaggtatttgactacatagccaagaatgtttgtatatctagctattctcattctcaaggaggtccaacaactaaaccaatgaagagtagtga

SEQ ID NO: 1599 - DNA, 86 bp, Cricetulus griseus
agtttacccacgcgtggcggctagcatggtccactgatcggtaccatcacgtcaaaccaagtacaaccgaggaaggatacctagct

SEQ ID NO: 1600 - DNA, 234 bp, Cricetulus griseus
gggttctgaattttctttgtctttagttttggcacgacgctccaggaggccaaaggatctaaagtttctttgtgttaaaggcctacctgtcttttttgtacccggtcatggttgttaaaccagggagctgagggagggtctggcccctttatttttaaattattaaaacccttttagtttagttaacccttttaagttttaaatagggggcttattttatacaggaaggagggc

SEQ ID NO: 1601 - DNA, 210 bp, Cricetulus griseus
ctcatagaaggaaaaaaagaggtgtgtcttatgaatggccataccaacccgctggggaattcctttaaagattatgttttgaggagatggtctcactcctggagggcgctcatagactttgaatcttgctaacgtaggaaggtggcaacgttgagatgcatcattctttccatcctgaccttaatgggaactttgcttttctcctcttta

SEQ ID NO: 1602 - DNA, 601 bp, Cricetulus griseus
  misc_feature (2)..(112): n is a, c, g, or t
  misc_feature (124)..(124): n is a, c, g, or t
gnnnnnnnnnnnnnnnnnnnnnnnnnnnnnnnnnnnnnnnnnnnnnnnnnnnnnnnnnnnnnnnnnnnnnnnnnnnnnnnnnnnnnnnnnnnnnnnnnnnnnnnnnnnnnnncaggatgcctcngattatgatcaaggggggcgtgtggaggaataccgaggatgagagggtgaaagcagcggtaatgaaatatgggaaaaaccacaggtctaagattgcctcattgctgcataggaaatcggcaaagcagtgcaaagccagatggtatgaatggctggatccaagcattaaaaaaactgagtggtctagagaagaggaagaaaaactgttacacttggccaagctgatgccaacgcagaggaggaccattgctccaatcattggaagaacagcagccccatgttcggagcactatgaattcctcctggacaaaactgcccaaagggaccatgaggaggaaacaacagatgacccccgaaagcttaaaacctggagaaatagacccaattccagacacaaaaccacctcggcctgaccccattgatatggatgaagaagaacctgaaacgctttcttaagcttcgacccccccgtggttaa

SEQ ID NO: 1603 - DNA, 580 bp, Cricetulus griseus
caatcaggctatggcagtcatcaaagagaagattgaggaaaagaggggtgtgttcaatgttcagatggagcccaaagtggtcacagatacagatgagactgaacttacaaggcagatggaacggctggagagagaaaatgcagaagtggatggagatgatgatacagaagagatggaagccaaagctgaagattaaccttgtagaaaacagtccagtttaaggaatacaaagcagcccttcctggctgtaaaccctagacttgaaagttttccagtattgaaaacttcaaagctgaatatttttatttccaagtatttaagtattcaacaaaccagaatcaaaatgccctccttcctgtcagctgtttcacacagaagctttaacacctcaagcatttttaatggagtggcttgatttgaccagagacaaatcttaaagagcaatcctaaaattaggctttcagtttccatttctgatgttcatggattggcattcttatggttcaatgcctccatgagattcaccaggggcacctaagacaaacagtcccaacctttccatataaaatgtattcaagca

SEQ ID NO: 1604 - DNA, 581 bp, Cricetulus griseus
  misc_feature (283)..(324): n is a, c, g, or t
actgaaggaagtatttagtatggctggtgtggtggtccgagcagacattctggaagataaagatgggaaaagtcgtggaataggcactgtgactttcgaacagtccattgaagctgtccaagctatatctatgtttaatggccagctgctgtttgatagaccaatgcacgtcaaaatggatgagagggccttaccaaagggagattttttccctcctgaacgaccacagcaacttccccatggacttggtggtattggcatggggttaggacctggaggacannnnnnnnnnnnnnnnnnnnnnnnnnnnnnnnnnnnnnnnnnaaacctatggcctgcagttttgtttgcattgactttttcttttaaaggaatgggaatggaaggcataggatttggaataaataaaattggaggcatggaaggaccctttggtggtggtatggaaaacatggggcgatttggatctgggatgaacatgggcagaataaatgaaatcctaagtaatgcactgaagagaggagagatcattgcaaatcatggaggaggtggagctggaggcactgtcccaggatcgagag

SEQ ID NO: 1605 - DNA, 569 bp, Cricetulus griseus
  misc_feature (29)..(47): n is a, c, g, or t
  misc_feature (84)..(129): n is a, c, g, or t
  misc_feature (162)..(288): n is a, c, g, or t
  misc_feature (301)..(381): n is a, c, g, or t
  misc_feature (383)..(441): n is a, c, g, or t
  misc_feature (449)..(486): n is a, c, g, or t
  misc_feature (500)..(524): n is a, c, g, or t
acttttctctactaatcataaagacatcnnnnnnnnnnnnnnnnnnnttggtgcttgagcaggaatagtaggaactgcccttannnnnnnnnnnnnnnnnnnnnnnnnnnnnnnnnnnnnnnnnnnnnngagatgatcaaatctataacgtaattgttacannnnnnnnnnnnnnnnnnnnnnnnnnnnnnnnnnnnnnnnnnnnnnnnnnnnnnnnnnnnnnnnnnnnnnnnnnnnnnnnnnnnnnnnnnnnnnnnnnnnnnnnnnnnnnnnnnnnnnnnnnnnnnntttgattactacnnnnnnnnnnnnnnnnnnnnnnnnnnnnnnnnnnnnnnnnnnnnnnnnnnnnnnnnnnnnnnnnnnnnnnnnnnnnnnnnncnnnnnnnnnnnnnnnnnnnnnnnnnnnnnnnnnnnnnnnnnnnnnnnnnnnnnnnnnnnactggagnnnnnnnnnnnnnnnnnnnnnnnnnnnnnnnnnnnnnncatccatcactatnnnnnnnnnnnnnnnnnnnnnnnnngaacaccacttttgcgtccgatctgatctaattccaggtgggcta

SEQ ID NO: 1606 - DNA, 580 bp, Cricetulus griseus
  misc_feature (122)..(137): n is a, c, g, or t
  misc_feature (139)..(161): n is a, c, g, or t
atctcctcctttggaaaatagaaagtatatgtcttgcagtggaattcagaaacagactccggggtgaccatgtagccttcactaactagacttaaaagattttatgtggtttggcctaagcnnnnnnnnnnnnnnnngnnnnnnnnnnnnnnnnnnnnnnntatctgccaaactgagtgcacgacttcatataggcttctcctttaaaatacaaaatgaagcaaaatgaaaaactgtggaggatgcatctcatttaataagtatgcttattcctattagcaagtttgcgactgaaaagactgtcaacttgacataggagaatttcttccactctggaggaaaactgtaaagtagagtgattttgtgtttgtttagaaagcaggcatgtggtgtgtgtgtatacagtatgcttttctttaaagataaaaggatactatcttaaatcttctaggggatagaagaatctagtaaaaaaaatcagtattcatttagaccatggaagaaacaatatccttaccactttaccttttaatgaaggatattgaaacacacatgaaaggctgggaatgtgagtttatca

SEQ ID NO: 1607 - DNA, 579 bp, Cricetulus griseus
  misc_feature (305)..(345): n is a, c, g, or t
  misc_feature (365)..(380): n is a, c, g, or t
ggagacctgagctacgctttttcatgcttattctctgtttagcttttctttggctgaagtctgaagctcaggcaaagtgaccagactcttttacccctgcactccacccccccatcagttttggcatgtttgggataggtttgctttaatttctcctctgaagcgttgaggcacaactaaaacacctagtgccagctggtagtgggttctgttgtgacccctgcctgacccctccaggtttcagctctgatggaggtgtctggtcctctctaggactcagctgatctccccagggcactttgtcnnnnnnnnnnnnnnnnnnnnnnnnnnnnnnnnnnnnnnnnncatgccatgggcctggagannnnnnnnnnnnnnnntctcaagggctgattatatgcttttttgagatgtgtgtttcgtgtcccccactccctgggctctgcctgcccttcagatcctcctcctgttcacacttatacctgggtccaagacttacacccagaaacctctgaccttgtgtggtgctctcctccctgtcccctctgccacccaacatatctggggtcactgcagacg

SEQ ID NO: 1608 - DNA, 579 bp, Cricetulus griseus
  misc_feature (44)..(77): n is a, c, g, or t
  misc_feature (515)..(537): n is a, c, g, or t
aagtccagatccgcgcggaggtccaagtccaagtcgtcgtccgnnnnnnnnnnnnnnnnnnnnnnnnnnnnnnnnnngagatccagaagtcctccccccgtgtccaagagggaatccaagtcccggtcgcgctcgaagagcccccccaagtctccagaggaagaaggcgcggtgtcctcttaagaaaatgatggatcgacaagcagcttaacagaggactttgagggaaaggaccagaaactcagtccatcggtccatggaagagtccttggaacaagcaactggctattgaaaaggttattttgtaacatttgtctaactttttacttgttttaatctgcctcaggtggcaaacttcattttatgtgccattttgttgctgttattcaaatttcttgtaatttagtgaggtgagcgacttcagatttcattattggattggatatttgaggtaaaatttcatttttgtttatagtgctgactttttttgtttgaaattaaacagattggtaacnnnnnnnnnnnnnnnnnnnnnnncccgccaccgggggggaccctccacctttggttcccttttgg

SEQ ID NO: 1609 - DNA, 521 bp, Cricetulus griseus
  misc_feature (11)..(33): n is a, c, g, or t
  misc_feature (61)..(117): n is a, c, g, or t
  misc_feature (121)..(139): n is a, c, g, or t
  misc_feature (156)..(219): n is a, c, g, or t
  misc_feature (222)..(264): n is a, c, g, or t
  misc_feature (266)..(280): n is a, c, g, or t
  misc_feature (282)..(298): n is a, c, g, or t
acggccgccannnnnnnnnnnnnnnnnnnnnnngtccctttttagtgaagggttaattgcnnnnnnnnnnnnnnnnnnnnnnnnnnnnnnnnnnnnnnnnnnnnnnnnnnnnnnnnnattnnnnnnnnnnnnnnnnnnnctatacattacgcgtgnnnnnnnnnnnnnnnnnnnnnnnnnnnnnnnnnnnnnnnnnnnnnnnnnnnnnnnnnnnnnnnnatnnnnnnnnnnnnnnnnnnnnnnnnnnnnnnnnnnnnnnnnnnngnnnnnnnnnnnnnnnannnnnnnnnnnnnnnnncgttaatacactattatagaaacccgaaacgtggggtttggccctctatttcgcagtattaccaccccttttttgggcttgtacctcccagaggggaattacttttttgggggcccacgaacaattaacctttttcacctttcccttatattggcccccccttaaaaaaaaatctggggggggttctttgggaaaaaacccccctaaccccgcttttgggatt

SEQ ID NO: 1610 - DNA, 579 bp, Cricetulus griseus
  misc_feature (528)..(528): n is a, c, g, or t
agcggacatcaccgccatggaagtccagctttaggaaccttcagtgaaggttaattgcacgcttgccctaataaaggacatagctgtgtactttgtgaaaatgatatcccctcaagaggaatgggttctggtggtggacatcgcccccatgaaggccctggacatgggggacctcatggccaccggccgcatgatgtccctagtcatcgaggccatgaccaccgaggtccaccacctcatgaacaccgtggtcatgatggccatgggggaggcggccaccgagggcatgatggaggccacagtcatggaggagatatgtccaaccgccctgtctgtcgacatttcatgatgaaaggcagctgtcgctacgagaacaactgtgccttctatcacccgggggtcaatgggcccccgctgccgtaagccggccccaccccgcccgcacccctgtggactgcagccttgctcctttcactcttatggcttctgtgaggcctacttccccttttccccagctgatgaggagcncgccccctccgttcccacctggttgagttcctggggggttctgatcactgg

SEQ ID NO: 1611 - DNA, 567 bp, Cricetulus griseus
  misc_feature (385)..(403): n is a, c, g, or t
gagagagtgtgtgcatgtgaatgtctctgtgtgtgtgaatgagtgcgcgcgtctgtgaatgagtctgataggtgtgtgctggggtaaattggtgtgcccgcatgtctgtctgtctgtctatctgtctatctatggaaagagttggatagtcctggtggttgagcacctgcctgcctagcatgtttgtggctctgagttccattcctaacactgcacagtgtgggaagtgcactgtacatagtacaatagagcttttgttttggatgaactcatgttttttggaaacttcgtattaatggggttgctaattgagctaaaaatttgcaaatatttaggggggtttgttgtttgccaaatgatgggtgccttcctacttcagtctccnnnnnnnnnnnnnnnnnnnttgacttaaaaatggaatgtgttctgtgcttgcattgccagctgttaggtgtgtccagggggagatggtttattgctaaatggcattcacaataaagggggagggccttgtttttcttaaccttgttcttattggggatgattttgaaatctcaaattctaata

SEQ ID NO: 1612 - DNA, 580 bp, Cricetulus griseus
attgaaccctggaccttaggcatgctaggcaagcactcaacaattgagctacagctacagccaatggcagtagctctcacaaagctcttaaagagctctgcttttagaactgggacacttgctagagcatctgtgctgtgtggaagcccaggtgctccagacaagagcttagctgaggtccccactcctggctgcctgccaccaacagtcgtgtgtgttatgttttaaatctgaaatgtctcccatgggctcccatgcttgaacacctggtacccaacttgtgatgctctttcaggggcagtgaggcctggttggtagagcagtcactgggagcaagcctttgagggttatagcatggcctgtttctttgctttctagttggcagaaaatgaacaagcctctgccacatgctcccccggctgtcacagccataactcgtgtcctctaaagtgtgagccaaaatgaacttactccttttgtaagactgtgggacgttttaagtttgcaaaatgttttatattgtgaagttgatattcatgcataatttgggggatacacaagaaaagaattgttgcagctc

SEQ ID NO: 1613 - DNA, 566 bp, Cricetulus griseus
acctgacgctgcagtataacatctacaatgtgggctccagtgcggcgttagatgtggaattatctgacgattccttccccccagaagactttggcattgtctctggtatgctcaatgtcaagtgggaccggattgcccctgctagcaatgtctcccacaccgtggtcctgcgtcctctcaaagccggttacttcaacttcacctcagcaactattacctacttggcccaggaggatgggcctgttgtgatcggctcaacaagtgctcctggacagggaggaatcctggcccagcgggagtttgaccggagattctccccccattttctggactgggcagcctttggagttatgaccttgccttccataggcatccctctgctcctgtggtattccagcaagaggaaatacgatacccccaaacccaagaagaattgaatgcagtgtttccttggcccttttctcccacaaaaccaggtgttttccagacttcatagggtgtcaaatgtgttctcttggcccttggcctatggccatcttttcctggatcctaccctgaactcaacc

SEQ ID NO: 1614 - DNA, 581 bp, Cricetulus griseus
gtgggtaaagagtgagtagcagatagaaaccacgagacagagaacatctcaaaccaggtgctcacacatgcagcagaggtgactggagtggcccaactgagtgagcaggcaaaggtaccatctaaccaggacaggggtacaaatgtccaggagaaatcccctggggaagcttcactgaggcatcaatagagtgcctactgccaccttcccccttcacccccagtgatgctttcaagggaaagaacaaagggcaatagatagatgacatcatcaaatcaggccctcacgacatgcagcagaaaccaaccagagtagtctagtccatcagctaaggttcccaggtgagatttatttccatgaatgagagtccccggctgaaattcccggtttccactccaccacacgaattcttacattatggaataaaaatcatcatctagattgggaatcgttcaccttctaattggtctcagggccacataattttaatactcttaagggtttgctgttttcccttctttttattaccaatttagggggacagcctgtctttaggcagatgctagggagggcctctttta

SEQ ID NO: 1615 - DNA, 578 bp, Cricetulus griseus
ctgcgcggtcggctgcgtcaagatgaagctgaatatctccttcccggccaccggctgccaaaaactaattgaggtagacgacgaaagaaagcttcgtactttctatgaaaaacgcatggccacagaggtggctgctgatgctctgggtgaagagtggaagggttatgtggtccgaatcagtggcgggaatgacaaacaaggttttcccatgaagcaaggcgttttgacccatggcagagtgcgcctgctgttgagtaaggggcattcttgctacagaccaaggagaactggagagaggaagcgcaagtctgttcgaggatgcatcgtggatgccaatctgagtgttctcaacttggttattgtaaaaaaaggagagaaggacattcctggactgacagatactactgttcctcgtcgtttgggacctaaaagagctagcagaattcgaaagctttttaatctctctaaagaagatgatgtccgccaatatgttgtgagatagcctttaaacaaagagggtaagaagcccaggaccaaagcacccaagatccaacgacttgttacgccacgtgtcctac

SEQ ID NO: 1616 - DNA, 580 bp, Cricetulus griseus
cccaactctagttttttgttcagtaggtatagggtggggagtgccagaatttatatttctgacaaactttgtgaatattgatgcagtttgaaatccactacaggagcaagggctggtaagatggctcagcccataaagctgagcaaacctagcaaccttggtttgttcctcataaaccatgtaaagatgaaaggagacaaccactacccactagccgtggcacctgaacatagtacatgcaaactcatactcaaataaactgaaaaccacggcatcttgtgtgaataagtatttggccaggccaaaggcttttgagatgaaagttaataacattttatggttcactttcctttaagtaatttgtgtttgttgttatgtggggtattagagggaaaaaaaaataggagttttcactggtaagttttaagttcaacttgatatcaccttgaaaattccctagcttatataaaggaattcataaaactcatattactagcttagggtaaacgaaatactatttttactgtctacagttaacctaattcagggggaaatgcaagcctataggaaagtttatagg

SEQ ID NO: 1617 - DNA, 578 bp, Cricetulus griseus
  misc_feature (181)..(208): n is a, c, g, or t
gtcagaaagatgttatggatttaaatcaccttgtatacaaaccataattattaatcatgccacagtgctacaccaaagatcttcagcttttagctaatgtgtgctgtgtgtgcatctattagaaccatcatcttgatggtgtattctctcctaaaaatgggagaaaattggactgaccagnnnnnnnnnnnnnnnnnnnnnnnnnnnnagctaaggtcagtctccaggacccatatgatacaagaagaaaagtgacttccacaaattgttctctgacctctgtgcatacacacatatacacacaaagtaaataaacatataaaaataatttaatgtaagaaaagaccttaacgttgcctggttttcttttaagggttgaggtgatacaccagcacaatagcataagttagtgtctggagaggtttggtctgtacttacacacattaaagataaaataagctgtagagtttatctagcatgttcctttaagagtggatttttcaaatacaaggtatctactcaaacattcattaatcagtgataactcattttttctcacctcactggtattactagag

SEQ ID NO: 1618 - DNA, 578 bp, Cricetulus griseus
ctgcatcgagggaggcgcatggcgggcatggggctggcgcgggcctggaagcagatgtcctggttctactaccagtacctgctggtcacggcgctctacatgctggaaccctgggagcggaccgtgttcaattcaatgctggtttctgttgtggggatggcgctgtacaccggctatgtcttcatgcctcaacacatcatggcaatactgcattactttgagattgtacagtgacgaagatgtgaccaggatccagaggttcctggggaagatccaccttatgaagctggaatgagacctcatcagactaagatgctctacagatgttaacataaccaaccttataagttaacaaagactgaaattcatgagtagaacaggaaaatcatcctgactcatgtgttgagttctttctttttgatcataaaagaggctcttatatagtagcttttgcctattttaacattgtagtcattcgtactgagatatcagtatttctctaacctttgagactgtttcaatattctccagtgaaagcttctcttaatgaaactctgagtacatcttaattgccttct

SEQ ID NO: 1619 - DNA, 566 bp, Cricetulus griseus
atatagattattaaacagatggattcataaatttatcataaataattttaaagaaataaaaattgactgcaaatatatattaactaagtatgatattctccagagaatagcattaatgctagaaagagtaagtattattaacacatatgtttgctagttcaaaataaagtattgtaaatgaattccatttttttaggaccatgattgaagtgaaagaggctagcctatggtgttctcatcctacttctgaatccaccttatttcttctttacacatgcagcatcagcttagatagctgacagattcattttgttattccatgtgaaagagcttcaacttctacaaatggtgctggcataactggttgcagacatgtagaagactacagttagacccaagcctatcgccctgcacaaaacttaagtcaaaatggatcaaagatcccaacataaatccagctacactgaaccttttataagacaaagtgggaaatacccttgaattaattggtacaggagaccgattcctgaacattacaccagtagcacagacactgagttcatcaa

SEQ ID NO: 1620 - DNA, 580 bp, Cricetulus griseus
  misc_feature (527)..(527): n is a, c, g, or t
  misc_feature (545)..(545): n is a, c, g, or t
tgttttgccatcaagaaatgtgttctgcagggatagttacagcactggcacatggtgctctccagtgagaccctttcgttattttttggtttcttctgtaacaaatagctgcgctcagtcattacaaggggaatgaatttcttgatttttaattacaaaactctaacttgtgataatttcacaaaacccttactaaaaatagactagtgtttggaatatatgacataatgcttaacatttttattaatcttgactagtggtttataattagtctggtttataagttagttctggaataaaatttgagatactaatttacttatcacatggttctctgatagtaccataactatgattcgcttgaaaaaatttgagaaagtttttcttgaaggactaacttaatctctgttggtctgcagttggtagtttgtagtctttgcaaataggaaaatgttaggtagggatcatcctagacagtggctcttttgataaaaattagagaccttgccatttcccctgcttagagncttctcttctttctcctnctcttccttttcagcaaagcagattccctcttgtt

SEQ ID NO: 1621 - DNA, 578 bp, Cricetulus griseus
tgggactggccttgggctctgatggaaataccatctgctacttggaagaccaatctgcaccctcttacttggcgtgggggtcaagctggctctactctaagcagttagtctctcgaggaaaaccagcagatgtggagggcaggaggggaggccctgagggttgcctgcccacagtggtggcctgcacttcctcaaagtggtcattttctatgggtggatggggactctccccctcttcagagaaaaccagaagaagcaaagaagcttcaggggccactgagatagacggctcgttgtgtgaaggcgctaccacctcgcatgacaacttgagtttcattcttggaggccacatgggagagaactgactcccacaagttgtctctgactccctcaagtgtgctgtggcacgcatgtgctcaccaacccccaaataaataataaataataaatgtcacaggaggggagtttcccgtctccagattcctgctttgctctcacacctccggcttctctccgcgatggacgactgtgacatgaaagccaagtacacgctttccttcccttgttgcttttggcca

SEQ ID NO: 1622 - DNA, 578 bp, Cricetulus griseus
cttggggtcttacccacgttcttggcaccatttagctggtttccatgcagccctttcccacacctcctctatctcttttgtctttggtccttttttagagtttgggtctagaatttgttcaaacatagaactagtatattagtgctaggccatgatgaacctcaacctctctcttgcctttaccaaataccttctcctgtcatacccacccaatccgtaaaagtgggctctccaactattccatttgcacagaatccctaaccaaggcaacatctgaaagtttgtgagtcccttgttcagggattaggctctgttgtgaatgcttggccactgtttggaaccttgttctgaatggctggttattcagtgtcaagctgtcctgtcagcatggatctggtggttgatgctgcttggagcttcctgcttgaaggcccttcaatcagaggaacctctctcttcttggcactggctgtaatcaagtctctctgtgccagggctttggagttattgaatggcaaccttcggagccagtcgtacattcacttttcttccccaaacattgttcaccccctgttctt

SEQ ID NO: 1623 - DNA, 579 bp, Cricetulus griseus
tggtgggtaggtgaaagacccgagctaacatgtggttagcttgttaaattacaataaagcctcatgcagttttcagcaagctctcaaatccgcctggtgattggggtgacctcggtcatggcctgggaccctggatacctgagttttctgggggtctaatatttggcagctcgtccgtgatttgcgaccacccccttacctgagtggatttgatcttggaggtaagatgattcgagctcgcaacttatatgttcaatgttatatcattgtttgttattttctgttttgttcatttggtgccacttgaatttgctgtatttttgatctgagcctacacaggactcatgatttgtataatttggaccatagggaaaacagtcttgcccagaaacagatgtgtttctggaactcttggtttcaccctggacgaaagtccaagggttgtttgtaattttggtttggggcaccatttctttgccatgcggtttgtcctgtctgatatctgtcctgtttttgctgtttgtctgtctccatactaaccaccccatccctggattccacctcaactgtgatctgcac

SEQ ID NO: 1624 - DNA, 235 bp, Cricetulus griseus
gtcgacccacgcgctccggaactcttctgtttgatatccaaatagcttatccgaatttttaattttttttttatgagttcttgtgatgttaccaaggctggtctggaactcctaagtataagctagcctgttttactgtctcagtctctgggctagctgggattgctggctcatggttacacgtatcccactacccactttgaatatgaatttgtagagaaaggatgatactttt

SEQ ID NO: 1625 - DNA, 579 bp, Cricetulus griseus
  misc_feature (280)..(299): n is a, c, g, or t
attaaatatttccctttataagagttgctatggtcatgatgtttcatcacaacaatagaaagcctaagtgagacaatgggggacccaataacgcgagtgagcagaggaatttgtaggacctgggcatggttagagcactgatacagaggtccacctggaggaagacagaggagattgcatagcttaaaattactttaacaactggagcaaacatgtgaatttagactggagagacagctcagaggttaaaagcactggctgctcttccaaaggtccttannnnnnnnnnnnnnnnnnnncatggtgactcacaaccatccataatgatctggtgtcctcttctggcctacaggcagaccactgtataaataataaataagtcttaaaaaaacaaacaaacatggatcccccctatggagtcttcatcactcacatatcagcttattttcttattttatcaagcatgtcatttgtttcttatttgtgtgacaagaattccatatgaattgcataggctttggcataaacatacagcttttatgtaattagcagtgattccagcttcattaagttgtatga

SEQ ID NO: 1626 - DNA, 579 bp, Cricetulus griseus; identical to SEQ ID NO: 1625
  misc_feature (280)..(299): n is a, c, g, or t

SEQ ID NO: 1627 - DNA, 578 bp, Cricetulus griseus
  misc_feature (275)..(298): n is a, c, g, or t
  misc_feature (303)..(335): n is a, c, g, or t
  misc_feature (436)..(456): n is a, c, g, or t
  misc_feature (463)..(482): n is a, c, g, or t
gcaggaacttaagatgtcagcctcttcctgtatatcagtgatgggaaaataattgggggcagcgtttgtgttttccataactagagacctctgaagaggtgtttgacctgcttttgattgagaggtttgccttctatattattataaaagaatgccccaaatgattatgcatacagcagagaagatattaaccatcgtgttcttatctctactcagagcgactctaagtgaccttgaattttcttcttataaaactattggtcttaccagctgtnnnnnnnnnnnnnnnnnnnnnnnncactnnnnnnnnnnnnnnnnnnnnnnnnnnnnnnnnntgagaccagcctggtctacaagatctagttccaggtcagcctccatagccacatagaaaccctgtgtcaaaaaacaaaaacaaagcataactctttgtctnnnnnnnnnnnnnnnnnnnnntggttannnnnnnnnnnnnnnnnnnnataggaccctgttcaactaccattacccatatggcagcttacagccgtctgcaactgccaaatctgacacccttccacagacaatacatgtctgca

SEQ ID NO: 1628 - DNA, 493 bp, Cricetulus griseus
tgaacctcacttcagtgccatcatgcaggcttttggacagtcctttgttcaaccagacatccacctgttcaaacaaaatcagttctacttggagactctgaatagcaagcagaaactgtaccacaaaaagatcttccggaccaccatgctattccagtttgtgaatgtgctgctccaagtcctggttcataagtctcatgaccttctacaagaggagattggtatcgccatttacaacatggcttctgtggactttgatggcttctttgcagcctttcttccagagttcctgaccagctgtgatggtgtggatgccaatcagaaaaatgtgctggggcggaatttcaagatggatcgggacctgccctcgttcacccacaatgtgcacaggctggtaaacgacctacgttactaccgactctgttaccacagcctgccccctggcaccgtgaagctctaagagtgcctgcttgccttcctggctgctcactgc

SEQ ID NO: 1629 - DNA, 577 bp, Cricetulus griseus
tgtctaacagtattttgtaatagagatgagaagctagcagttatttaagttcacataatttgattttttaatggagtatatataatcctgctttagaaatttatgaaaatttatgttggctccctggagcttcatatctagttcccacagactgactgcctatccccaggtcttagatttcctaagcacatggtacaaacagacaccacagaatgcaagactggaatgtgatcaagtgttctttccaattcttctcctggatggccttgccagtctgccctccaattagcagtgcacacagagttccacatctgagtggggatatgagagagtgagagagccatgatggctcagactttctaggtgggtacaggagcatacgcacaagcaaccatggtgacagtggaggtgcgtcacaccggctgctagtgatggcgtgtcacgttggcctttggtgatgatgcggggctggcgctgagtcacgggaggtgggaggagccagttctggaatgtgggcagttcctactagggaggcagctcatgcatatgaataaaataagcttgttttaattaattt

SEQ ID NO: 1630 - DNA, 317 bp, Cricetulus griseus
caccctgtggaggcattgtatcctgcaggggagcactacaggtgaacctctaattcctatcttattgtattagatattcctagaaaactcactagtacctaggtgggtttattactataactgaaccctttctgggagggctataggcgctgcggtcacactcgctcctgtgtgctggaccacatgtccgaaaggcatcgcccattcaagccctgctggaacattacgacttaacactcccctcaccgtgctctgccctcaccgcctggtgcactgtaaatggccccctggcctgaccttggctaagagaaagcaaa

SEQ ID NO: 1631 - DNA, 579 bp, Cricetulus griseus
tggggagcagtccctctgcaccccagagacaggaggacacagggggccgtcggaggtggctgccgggcaagcaagggagacacccgtggaaggtggcgggccggtggccccctagcagtcaggaagaggagccagctagtgagaagatcgcccaggggcatctgggcggttgtgggagagtccggaagattacagccatgccgcacagctccgacagcagcgactccagcttcagccgctctcctccccctggcaagcaggactcatccgacgatgtaagaaaagttcagaggagggagaagaaccgcattgctgcccataagagtcgacagatgcagacacagaaagccgacaccctgcacttggagagcgaagacttggagaaacagaatgcagctctccgaaaggagatcaaacaactcacagaggagctgaagtacttcacatccgtgctgagcagccacgaacccctgtgctccgtgctggccagcggcaccccttcacctgccgaggtggtatacagtgcccacgccttccaccagcctcacaccagctcgccacgctttcagccctgaactt

SEQ ID NO: 1632 - DNA, 579 bp, Cricetulus griseus
agcgtgcgccgacccccctgagcggacagatattgttcccttttctgagggatattcgccctcttgctttttgcctcgatctagaccgatgactatgtgaaacaggatctctctcaaaggaagtcttatggccagcggggccttgctaggagcagatgagctggtaatgtacttcccataccggaacatggtctctatttgtggctacctggaacatgcaaggccagaaggatctcccaacaagcctggcataagtttctgttccccactgaagctgactacactcacgacttgtatgtcattggatgctctgatggctgctctgacagccgggagtgggagacacgtctgcaagagacactgagcccttagtatgtgttgctgctatcagcagcgcatggggtcctctacatgtccctgggatccgcacggacctaatctggttctggtaaaaggtccagtgcctaacagaaactacacgcatggtgtcccatatcaagaccaacggggctcctgggcgtctgctctaccttttgtggcacttccttcctattcatgacgcctgacttgacacctgga

SEQ ID NO: 1633 - DNA, 580 bp, Cricetulus griseus
  misc_feature (180)..(202): n is a, c, g, or t
tacaggagataaaggtccccctggacccgtaggacccccaggctctaatggtcctgtaggagaacctgggccagaaggtccagctggtaatgatggtaccccaggacgggatggtgcagttggagaacggggtgaccgtggtgacccggggcctgcaggtctgccaggctctcagggtgnnnnnnnnnnnnnnnnnnnnnnnggtgcaccaggagatgctggacaaagaggagatcctggttctcgaggccctgtaggaccacctggccgagctggaaaacgtggtttacctggaccccaaggacctcgaggtgacaagggtgacaatggagacagaggtgaccgaggtcagaaaggccacagaggcttcactggccttcagggtcttcctggccctcctggtccaaatggtgaacaaggaagtgctgggatccctggtccttttggcccaagaggtcctccaggaccagtaggtccttcaggcaaagaaggaaaccctggaccacttggacccattggacctcctggtgttcggggaagtgtaagataagctggaccatgaggacctcctggtgaacct

SEQ ID NO: 1634 - DNA, 470 bp, Cricetulus griseus
  misc_feature (285)..(285): n is a, c, g, or t
ctggagggatgactcagtggttaaaagcacttgttggtcttgcagaggacccatcttcagttctcagcacccacatggtggctcacaaccatctttaactccagttccaggagatctggcgccctcttctggcctccagaagtactacatgcacatagtacacagacatgcattcaagaaaaacacccgcacacataaatattaaatctttaaaaataaataattagcaagttaaaatttaaaaggctgggggaaatgacatcttggcacactcctgtaacccanaacttggaaggtataggcaggagagctctgtaatccagcatttgcttagtatgtgcaaggcgttgtttaaatctttggctgctctcctgaagagaagttgccctaggggacatttgtctgactcccagagtggcttcattgagcagcagcttataaaacactgtatatgcagcggcttcaagctc

SEQ ID NO: 1635 - DNA, 579 bp, Cricetulus griseus
aaatacaatttgacgacatgaggaaaactactgtatctagtagaaataatgatatctaaagtttaccaacaaaagaaccctcgcagactagcaaatacccctctgctctggacatctgaggtcaaatttgaatatggaaataatttccttgcaagcccctagaggcagatcagagaaagcatgcattaagagggaaaggagagaatggaaataaacatgactataatgcagatttatgccttattttttagcatttttaaaatgttgggtctttcaagctgtttttgctttttattagatctatataaataagttaactagcaatttagttttgtatttaagctacaattaatctttcctttggtgatatttatttctttgcctttttttaactttaaatttttaagagttttgttgagtatttagagcttcatcaccatggcaatatgtatttcccttgaagcgttgcaaacaattatactaggagtgcaccctcttaatctttactagttattgtgagattgctgtgtaagttaataaacacatttgtaaatacattgtttgcagggaaaacattgt

SEQ ID NO: 1636 - DNA, 578 bp, Cricetulus griseus
aactgctgtaccattagcagtgcggctgcggcctgtaaccttgggggcgtgaaccggctgtggttcagaacgcaaaacatggcggagaagggtgcagccaccgttgtgggtggcgactctggtgacagctactacgaagatgtgtgtgatgaccgcgtcgtcaaggcggctgtggaggtgtttgagaagctgaagggtgtaaagtgccccttcctcgacggtctgtatattacagagccaaagacaattctggaactgctgtgtaggccctcaaagtaccggttggacatactggaatggatgtgtatatgggtttgcccctccttgcaggacaagttcagttcactgaaaggaactgcagtggatgtgaagatacaggagatggtgaaactaggccatgacctgatgttgtgtacaccagatgaccaggatcttctgatgggccgtgagtgtccccagaagcatctgcagttcatggaccatttgctggatatgatgcggagcctggccactggatgctccactagttctagcctgaaggaacaccttgaggacactacagagaagaatgaggcctt

SEQ ID NO: 1637 - DNA, 312 bp, Cricetulus griseus
tttgagttttcctgcggatttagggacacggctggcagtctcagaggagataagaccctggctccagaagcaggagttcgaggagagacaggccccagggactcgcagtctaaagcggaaggttgccctgtcctttggaagcctcttttgaagacttctaggacccccttcctgatatggcttaagaccagcctttgctggctgtgcaagatgccctgaggaagtgcttccctgtggcgctggatcagcaggacttgtggcaaagcactcttcagggctgcttgtccttcctgtcctttctcagtatcctgg

SEQ ID NO: 1638 - DNA, 291 bp, Cricetulus griseus
  misc_feature (72)..(87): n is a, c, g, or t
ggtattgtggggagggtgactgtgcagtcctaggctggctgcttttgttttttttagcagccagaatctctnnnnnnnnnnnnnnnnatatcctttaattagtcttcacacttgccactatgggtcatggtctctatgaagtgtcccggacactgcctggacccactgtagttcctagaatccactgctcaggagtccctcccacctgacctgggctgcaaatgagcttctttggctgtgcactgaccttgccttcccccacagacccgatactatacaagtatattattt

SEQ ID NO: 1639 - DNA, 578 bp, Cricetulus griseus
tcccactgctagcaagtcctctgagctgcgaaggtcatgctgcccaacaccgggaagctagcgggatgcacgatttttatcacaggtgcaagccgaggcattggcaaagctattgcattgaaagcagcgaaggatggagcaaatattgtcattgctgcgaaaaccacccaaacacacccgaaactcccaggcacaatctacactgctgctgaagaaattgaagcagttggaggaaaggccttgccatgtgttgttgacgtgagagatgaacagcaaatcaacaatgcagtggaaaaagctgtggagaaatttggaggaattgatattttggtgaacaatgcaagtgctattagcttgaccaacacattggatactcctacaaagagagtggacttgatgatgaatgtgaacaccaggggcacctaccttacatccaaagcatgtattccttttttaagaaagagcaaagtagcacatattcttaatctcagcccacccctgaacctaaatcctctgtggctcaaacagcactgtgcttacaccattgccaaatatggcatgtctatccgtgtgcttgg

SEQ ID NO: 1640 - DNA, 566 bp, Cricetulus griseus
  misc_feature (484)..(500): n is a, c, g, or t
tgcccctgtttggtggcctttctggcaaaagaatagagagatggtttataaagtcaaattggtggaatggcttagccaagaactagaagtttctgtcctggaggacccgggagataggctgacatcagcagaaattctgtcatacatcaccgagatgtctctcatggaggcctcctgctggactctgctggactctcactcacagccaaggcagcttttctggagtttctctggattcttcagagccaaagatgaaaatgccccacaagctgtaaggtcaaagggcacacccaccacagtgctccagcaagggcgtgttttttaggactccccccagtgcacacaacgtttcttgtaaatgtaataggtgagggatgcatgcggccccttaccatatgactcagtcaagcttcctccgaattagagacttttggggaagttctctctattgatgatcagcactagggaacagaacagaacatcnnnnnnnnnnnnnnnnngcagctttgaccctcgctggagtggtcccctctcaacaaatttccccacagtgttttccaggtgaa

SEQ ID NO: 1641 - DNA, 578 bp, Cricetulus griseus
tccgcggcgtcggagcccaggtgctgaggcccgggtctgggatccgactaccgaatcagcccagcagaggtgcccggcaatggcagccagatatagaatgggcacagcagttcactagagctatcatgtacccctccaaggaaacagcccactggaagccttcttcttttaatgatgtggacattgtgaaggacaaagtggtctccaatttgaccctgaactttgggccccagcacccagcagcccatggagtcctgatactggtgatggagttgagtggagagatggtgcggaagtgtgaccctcacatcgggctcctgcaccggggcactgagaagctcattgagtacaagacctatctgcaggcccttccatactttgaccggttagactatgtgtccatgatgtgtaatgaacaggactattctctagccgtggagaagctgctaaacatgcagcctcctccccgggcacagaggatcctactgctgtttgcatatatcacacggattttgaaccatatcatggctgtgaccacacatgccctggacataggtgctatgactcccttcttttgg

SEQ ID NO: 1642 - DNA, 188 bp, Cricetulus griseus
cgcggtgaggagctcgcgtggagaatagtcgcagccatgccgtccaagggtccgctgcagtccgtgcaggtcttcggacgcaagaagacggccacggtcgtggtgcactgcatacgcgggaacgggctcatcatggagaacgtacgccccctgtagatgatttatcctcgctctctgtagtacaacca

SEQ ID NO: 1643 - DNA, 579 bp, Cricetulus griseus
  misc_feature (399)..(418): n is a, c, g, or t
attccttccatcagttcattcaacagcagattcacagtagactgacagtacaccctttctgctgtttcttcacgagcccctctaacatgtcacccaatctaaaacacaaggttcagcaaggcacacgacccctgcaggtcaccgtctttcagcacttgcctctgctttggaatgataggccctaacgataaatatttggagagaaatttcaggttcaaaaactaacatgaaataaggcattgggatcattttccactgaaataaaatgtgtttaaaaagaaagtctggggcactttgaaagccactttgaaagccaatgaatgaatcatctcatatattagaaaacaaaccaaaaacaagccatgtggtgatgcatgtctttaatcctagaggcagcannnnnnnnnnnnnnnnnnnnacagcctgggctacagcactatttctatgtcggccagggaaagaaacaaagaaaccctgctttgaaaaacaagcactttattgggacttgtatttcatttgaatgggggagaattttctctgaaaaaccatcccttttccagtcgaatctccatgggaaaa

SEQ ID NO: 1644 - DNA, 577 bp, Cricetulus griseus
  misc_feature (196)..(215): n is a, c, g, or t
cagaacagcaagaataaacagaggaaggggttgattagatccactgggttattaagacagaatttatcacgttccagaataagataataatctaactagcttctccaaaaagtagtattacttggtatttttaataattattgtttacttagcatgttgaaattgcaccttatatattttagttaaaaaaaatacnnnnnnnnnnnnnnnnnnnntatttagctccctgaagaatatttcttaaagctacaaattcttttaagttaaatactattacttatcagggcaaagatacgaaaacctaagtgtctatcaacagatatagtaaacaagcacagaagaacactacatgatctcacttgtatgtgcaatctacagaatccaattcaaaagcaaagtagaaatgggagttccaaagggctggaaatcggggagggggctggccaaaggctccaaggtttcagtacctaggcaattatggacctactgtacaccacagtgagaacagctacacctgatgagctgcatgcctttaaactgttaccttttcaaacacaagtgtttgtccaccaaaaat

SEQ ID NO: 1645 - DNA, 371 bp, Cricetulus griseus
  misc_feature (11)..(11): n is a, c, g, or t
aaaggcccaantggcttccgttaccgtcctccccgtgtgagacaaccccccaccctaccccaccccaccccaccccgagaccgtgtcctttgtttataaaccacacttggtttttccggccggtttgctgccccgctgaggtggacaggcgctagtgtaatggcggggagtcttccttgggtggcaagcaggatcctgtggggcctgacgcccttggcgagctttataagcttctcgcagggagtcccgctgctgacccgcgtcaggctcacccttccgtcccccatagtgttggattgctgggacgagaagagggctctgtttggagtatatgacaacttcggaattctggggaatttcgataagctccc

SEQ ID NO: 1646 - DNA, 546 bp, Cricetulus griseus
  misc_feature (96)..(123): n is a, c, g, or t
  misc_feature (157)..(184): n is a, c, g, or t
  misc_feature (232)..(276): n is a, c, g, or t
  misc_feature (485)..(538): n is a, c, g, or t
agggggtggggaatagtatgaccaagatgacaacttgaacaaacaaattatttttctaattcattgttctgatgctagaatattctgtatcactgnnnnnnnnnnnnnnnnnnnnnnnnnnnngtttggttttggttttggttttggtttttcgaannnnnnnnnnnnnnnnnnnnnnnnnnnnatgtcctggcgctcgctctggaaaccaggctggcttcgaactcacaannnnnnnnnnnnnnnnnnnnnnnnnnnnnnnnnnnnnnnnnnnnncgccaccaacgcccagcttgtatcattggattttaatgaaacagaaaacattgaaaagttctctttaaaggacacaactgggctctgcagataaaatataactcactatctttaatatgaaaaatcaatagaattaccattgaaatttcttccacaactcaaaaataaaatttatgcaatggtatttaaaaatttctgcattaaacatnnnnnnnnnnnnnnnnnnnnnnnnnnnnnnnnnnnnnnnnnnnnnnnnnnnnnnttaattgc

SEQ ID NO: 1647 - DNA, 545 bp, Cricetulus griseus
aacaacaaaagccctccaaaacctctatagaaattgatatccagtatattttagtgtaaaaaccaattcaactgtgcaagtggcgttagagcccttggtgcctttgctcccatcactccctgtgggtggcagcttgccaaaggggagagggcttctgactagatgttgattttcatgagaaatcactgtgaaagactttgctcttctatgtagtgaatgccccgtggaaagatttcaaggccatttgtacctgtgtttgaatttggggtgagtaaaccaagctcattttcttacccatctggtagttggagaactgagtggtggtgtgagagctgctctcatacagtgaagtcaaccgctgcttttgtatgctgtgtgtccttgccctgcttgcctgtgtgtctgtctgcttccaagcttctgcatgcccagaggctgcttgatggatctgtctcatccctcagactgatctcatcatggattgaagggagcactgggatgagctggacactggggccatgtctgctgccatgtcagcgtctttg

SEQ ID NO: 1648 - DNA, 579 bp, Cricetulus griseus
tgccccatcacagagtgttttgaattcctggaggaaactactgtcgtctacaacttgactcatgaagactccatcaagtataagtacttcttggaacttggccgaattgactccagcaccaagccgtgtcctcagtgcaaacacttcacaacctttaagaaaaaaggacatatccctactccttccagatcagaaagcagatacaaaatccagtgtcccgcttgccaattcatctggtgttttaagtgccatgctccttggcatgaaggtgttaactgcaaggagtacaaaaaaggagacaagttactgcgtcattgggccagtgaaattgagcatgggcagagaaatgcccagaagtgtccaaagtgcaagatccatatccagagaacggaaggatgtgaccatatgacttgttcacagtgtaacactaattttcgttatcgatgtggagagagataccgccagctccgggtttttggataccacacatcaaaccttagtatttttggatgccaatatcgttacctctcatagagacctcatttaacaagattagaccgagggtcatttcgtgcttgg

SEQ ID NO: 1649 - DNA, 161 bp, Cricetulus griseus
agtttgttcagtggttcaagaagttttttgatgcaaattatgatggaaaagatatgaccctgtggctgccagacaaggccaagaaactgcagtggctcccttctcttgtcgctccagctctgagtaaaccgaagaaacctctcaacttcggcagtgcagct

SEQ ID NO: 1650 - DNA, 579 bp, Cricetulus griseus
atcttcacctaacggagaccccccccacaaggaaacctcggtagtgcacaccgacaaggaagttctgctcgccggattgagacggactctggtctgggaaaagttctcatcgctcatgagtgactgattccctggtaagtcccccctcattccgttccataatgatgggccaaattgtctaaggaagtcaaacacttcctttcgggaaagaggagtttgagtaaaatgtaaggacttgattcagttttttgcccttttgtcaaaaaatgtccatgggtcattttagaaagcccagacattcatcccctaacttggaaaaaggtcggagaaggaccttaccagattgctcatagaaaagggacctgaagcagttccctcacagacttttatttacgggcctttagcctcattcacctaataaccttaacaatttaccctgtctttatttcattccccttaccacaaacagtatttcctaagcctatatcgctcatcttcacgagattttagagcttaaaagtcgtaaaaatcctctcgcttacaatagccactgcctgccatgatgcattattctcgagt

SEQ ID NO: 1651 - DNA, 579 bp, Cricetulus griseus
aggggcacaaattattaaatttttgatgtatgtggtatgttatgtgggtgcatgcattatggtagattcctcaatggcactccaccttatttcttgagataccatccctcactgaacctggcactcatggactcaggtacactgagtagccagtacatgaacccaccggtccctagccccagcactggcactgtagactgttctactgcacctggcgtttactcttggtcctggggatctgaactcgggtcctcatgcttgtgtgatttcctgactgaggcagctccccaaccctaattaaataaaattctattcttttcttatgaattcattttttatctttaaacaaataaaaaatataactagatccctacctgaacctaaataaacccttactgagacattcagtgtgttaaactactccctgctatagtgttacgatagctcttgtcatgaccacattctatttgacactagttacttggcctttggattccactcagctcaggattacactgtagcatcatgccaaaggtcactgacctggtccttgtgtgcagtgaggcataaacatattta

SEQ ID NO: 1652 - DNA, 580 bp, Cricetulus griseus
  misc_feature (513)..(513): n is a, c, g, or t
acagcaggctgaggatgggaagtcaaagcaagactgaagatttactccctcagacatgacagagctctgatgagataaacatcagtgtttgaaagttgggtcattgttgctgagctatgggtagaggtcagcagtgacaagaaagtgtacaaggtcagaccagaagacagagagaagtgccaggtgtgtgccagctgcccgtctccctccctgatgagcagccagggcactccacctgtaactttgtctttctcttagtgtagaaacacatgtatagttgggacctggaaatgtataatagatactgctctcatccacatggcagatgcctaaatcagcactttaaaatctttaagattatagtcaatctgatttcatgtaaaaatacagatttttctacagttcactgaaaaaatgaaagaagacaaaaaccaagtggtgttggctttcgttggaaaggctttgagtgaaacttgccatttcctttgtctaccttgccttaagggcctttgncccttaactctggttattttgggggtggggaaaaagaaaagaaacattttttcttgcctgtgtcttt

SEQ ID NO: 1653 - DNA, 214 bp, Cricetulus griseus
  misc_feature (8)..(48): n is a, c, g, or t
  misc_feature (63)..(128): n is a, c, g, or t
ttagcttnnnnnnnnnnnnnnnnnnnnnnnnnnnnnnnnnnnnnnnnnctaatgtctacgctnnnnnnnnnnnnnnnnnnnnnnnnnnnnnnnnnnnnnnnnnnnnnnnnnnnnnnnnnnnnnnnnnnttcgataggtatacattcaaatcctatcgcaattctggtgttagcagcatgctaagccgcactaggctaggccctacttgtactag

SEQ ID NO: 1654 - DNA, 579 bp, Cricetulus griseus
catccagagcctcccaaaggagaattgcagttgccgccgccgccacctccaggccactatggcgcctgggctgctcaagagcttcaggccaaactggcggaaataggagctccgatccaggggagtcgcgaggagctggttgagcggctgcagacctacacccgccagacgggcattgtgctgaatcgacctgttttaaggggagaagatggggacaaagctgctcctcctcctatgtcagcacagctgtctgggattcctatgccgccaccacctatgggactcccccctctacaacctcctcctccacctccaccacctccaccaggccttggccttggctttcctatggctcacccaccaaatttgggtcccccacctcctctccgagtcggcgagcctgtggcattatcagaagaggaacggctgaagctggcacaacagcatgcagctttgctgatgcatcaagaggaacgtgccaaacaggcaggtgcgctaatggatcatgaacggcatcaggagattgccaatatgggcactgcagtccctcggcctcctcaagatatgggccagctgggt

SEQ ID NO: 1655 - DNA, 579 bp, Cricetulus griseus
  misc_feature (76)..(94): n is a, c, g, or t
  misc_feature (274)..(293): n is a, c, g, or t
  misc_feature (486)..(486): n is a, c, g, or t
cgcggaggacctacagcttttagtgtccctttaatgagggttatattgagcgcttggagtagtcatgggcatagannnnnnnnnnnnnnnnnnnttatactctcagttgatcagaaaaccttccacttccaggctcgagatgcagatgaacgagagaagtggatccatgccttagaagaaaccattcttcgacatactctccagcttcaagtaagaagctttacatggtgtttggatattttgtgtatggctttctttttggggaaaggagggnnnnnnnnnnnnnnnnnnnntaactgatataaaacaatgaaaactcttaatttctgagttgattattcttgctttttagtgttttgtagaaaagccacaatcatttattttttctgctttctatagggcaaaatacaaattttcatcaggaatgaagtcattataaggcgatttgaatgtgaaatgatattttaaaatgtgccatatacattntaagcggctggtgccattattgagctattgttaacacccacattatttccaggcttcataattgtttagtgccaggagcccacctcattttct

SEQ ID NO: 1656 - DNA, 506 bp, Cricetulus griseus
  misc_feature (3)..(82): n is a, c, g, or t
  misc_feature (93)..(162): n is a, c, g, or t
  misc_feature (165)..(298): n is a, c, g, or t
  misc_feature (300)..(322): n is a, c, g, or t
ctnnnnnnnnnnnnnnnnnnnnnnnnnnnnnnnnnnnnnnnnnnnnnnnnnnnnnnnnnnnnnnnnnnnnnnnnnnnnnnnnaaaatttgatnnnnnnnnnnnnnnnnnnnnnnnnnnnnnnnnnnnnnnnnnnnnnnnnnnnnnnnnnnnnnnnnnnnnnnatnnnnnnnnnnnnnnnnnnnnnnnnnnnnnnnnnnnnnnnnnnnnnnnnnnnnnnnnnnnnnnnnnnnnnnnnnnnnnnnnnnnnnnnnnnnnnnnnnnnnnnnnnnnnnnnnnnnnnnnnnnnnnnnnnnnnnncnnnnnnnnnnnnnnnnnnnnnnnacgacaagacgcaaatactgcagccctacaggcaacgggatattatttcattgagtacgtgggctttgttatagtaataacaagcctgcgcctagttacaatttctgatacacaatcaaatcttatatcataaaacaaaagcctcattcctttactatgcttacttgtagcagcaaccagtaaa

SEQ ID NO: 1657 - DNA, 579 bp, Cricetulus griseus
atacaaatcctgcagttaccaccaacttaccccagtgtctcttctgtgaactgatgagaggggtacacgctaccccaaagagggttctgaagaataaaaggtacagtaccttctatatggagctcagtaagttgttctgtatactgttaatagtgtttattccttaatataataatcacttgccttttttctatcctctctaaagtttgacaaaagatgtaacctatttatttgtgtgcccttctcctccatcccaaagagaggatagtaaatggcctatggtaagttcttgcgagatatggatcttggtttaataacttgctttgttttggtatttaacaatttcttgtttgatcagaagtgtgtttttaaaagcatctggggactgataccaaacttatcttcccagagtaaatatattttataaaaatattcttagggctggagagatggttttgttgttaagagcaatcactgcttttctagagaacttaagttcagtttccagcgccaataccaagtggcttacagctgcctgtgacttcagctccaagggatctgatgcccccttccggcctt

SEQ ID NO: 1658 - DNA, 568 bp, Cricetulus griseus
  misc_feature (7)..(48): n is a, c, g, or t
  misc_feature (62)..(128): n is a, c, g, or t
  misc_feature (142)..(208): n is a, c, g, or t
  misc_feature (221)..(288): n is a, c, g, or t
  misc_feature (302)..(355): n is a, c, g, or t
  misc_feature (380)..(415): n is a, c, g, or t
  misc_feature (425)..(448): n is a, c, g, or t
tagcttnnnnnnnnnnnnnnnnnnnnnnnnnnnnnnnnnnnnnnnnnntaatgtctacgctnnnnnnnnnnnnnnnnnnnnnnnnnnnnnnnnnnnnnnnnnnnnnnnnnnnnnnnnnnnnnnnnnnntcgataggtatgtnnnnnnnnnnnnnnnnnnnnnnnnnnnnnnnnnnnnnnnnnnnnnnnnnnnnnnnnnnnnnnnnnnnagtagtgtcaaannnnnnnnnnnnnnnnnnnnnnnnnnnnnnnnnnnnnnnnnnnnnnnnnnnnnnnnnnnnnnnnnnnncatactcctacctnnnnnnnnnnnnnnnnnnnnnnnnnnnnnnnnnnnnnnnnnnnnnnnnnnnnnnttcttaatcaatactttagctatannnnnnnnnnnnnnnnnnnnnnnnnnnnnnnnnnnnctcttccatnnnnnnnnnnnnnnnnnnnnnnnntcatcatttattatattagcttttctgacttccaccccttatactactagctatccaaattcctatttttaaatattcccacttcatcaaagaacctgttcccgctgtactaatcactcc

SEQ ID NO: 1659 - DNA, 579 bp, Cricetulus griseus
gttgcatctcggtggtggaggcgacaacttctccggtccctcggccatggcggcttccgggagtggtatggcccagaaaacctgggaactggccaacaacatgcaggaagcgcagagtatcgatgaaatctacaaatacgacaagaaacaacagcaagaaatcctggcggcgaaaccctggactaaggatcaccattactttaaatactgcaaaatctcagcgctggccctactgaaaatggtgatgcatgcccgatcaggaggcaacttggaagtgatgggtttgatgcttgggaaagtggatggtgagaccatgatcatcatggacagtttcgctttgcctgtagaaggcactgagacccgagtaaatgctcaagctgctgcatatgagtacatggctgcgtacatagaaaatgccaaacagggtggacgccttgaaaacgcaattggctggtatcatagccaccctggttacagctgctggctctctggaattgatgttagtacacagatgcttaaccagcagttccaggaaccatctgtggctgtggtgattgacccaaccagaacaatatctgc

SEQ ID NO: 1660 - DNA, 545 bp, Cricetulus griseus
  misc_feature (297)..(331): n is a, c, g, or t
  misc_feature (333)..(345): n is a, c, g, or t
  misc_feature (376)..(376): n is a, c, g, or t
aacatttaggaaatcatttcttcatgggacatttattgggcgtcagctaaaaacaggtcctttgtgctgggctgtgtgttacagaaatgcacagaacggaagaattgaactggtaaaagtgtagtctgcacggggataatgaaagtcccatagtctcacttcctatagggagccttattcagtcactgaatactttttgttttgttttgtgttttgagacaaggtttctctgagtagctttggagcctgtcttggaacttgctctgtagaccaggctggtctggaactcacagaaannnnnnnnnnnnnnnnnnnnnnnnnnnnnnnnnnnannnnnnnnnnnnngggccaccaggcctgactagtcacagaatanttctgtgtacctactgtgtgccgcgtactgagaccatgtgccttcctgggcactggaagcgctccagtgatgaacgatctaagatccctgccctctggtatcatttcctgatcagttactgtgccagggctacaagctaaagtctacctccttctgccatcaatatatt

SEQ ID NO: 1661 - DNA, 578 bp, Cricetulus griseus
agtgcagaccagaccacagcatcctcatcccttcctgctgcttctcagcctcaagtgttccaagctgggacaagtaaacctttgcatagcagtggaatcaatgtaaatgcggctccattccagtccatgcaaacggtgttcaatatgaatgccccagttcctcctgtcaatgaaccagaaactttgaaacagcagaatcagtaccaggccagttataaccagagttttcccagtcagcctcaccaagtggagcaaacagagcttcaacaagatcaactgcaaactgtggttggcacttaccatggttcccaggaccagacccatcaagtgcctggaaaccaccagcaaccccctcagcagaacactgggtttccacgcagcagtcagccttattacaacagtcgtggagtgtcccgaggagggtctcgtggtgccagaggcttgatgaatggatacaggggccctgccaatggatttagaggaggatatgatggctaccgcccttcattctcaaacactccaaacagtggctatacacattctcagttcattgctccccgagactattctggctacca

SEQ ID NO: 1662 - DNA, 580 bp, Cricetulus griseus
  misc_feature (3)..(34): n is a, c, g, or t
  misc_feature (548)..(548): n is a, c, g, or t
gannnnnnnnnnnnnnnnnnnnnnnnnnnnnnnnaagctctgacagaaggatagtactttctgttccgagtggtagagaagactgtcaccaggggttgtggctttcacctgccagatcccaagacaccaggtctctacgcttccacctttcttaaccgtgccttggattgcttatctgttttatataaatagagtaaatattatagtatataattctaacaactcacattcaggccactgtaaaagcttaatttcaaactggttttcattgtttcagagagtaaatatttactatatgttactatatattacaacacaaaacttttacctagggccagcaagctgactcaatggataaaggtgcttgctaccccacctgacgacatgtgctccatccccagtccccatattggaaggagacatccaactcctgcaagttgtcctttgacctccacgtgtgcttagtgacacacacaagtgtgtactcgggcacacacgcacgcgctcgcgctctcactagtcctcattcacatatcacacacttcttntattataaattatgtctcctctcatgtggtga

SEQ ID NO: 1663 - DNA, 578 bp, Cricetulus griseus
tttttatcactgcaacaaaatatcttgtaataacaatatactgaaatggaagtttattttggatcatagtataaacagatttagccaagcttaacagctgaggtgtctctgtacatgttactgaaagcctgtggcctgggtaattcatattttcatccctctgaaagcagagaacttgggctataccaaaagagaacctcaagacctgctcccagctactcatttactgacaaggtgaggccacattcccaaatgctccataacctttgcaaacaatggcattaaatgggggccacatgttcaaacacttcagactgtggggcacatttcatattcaatccactacaacacagatctggacttcaaattaatgagcaactaaattgcctgcctctggagaagaaaaacttcaccaaaacattaacaaattattagtgttggtgctgaaagatccactcaatatgttaatatcgggtcaaagacagttccctctggaaaagatgaattaataccttgcaattttcactaagaggtcatctgcaacttcatacttaattgtttatatgaacatatttgcc

SEQ ID NO: 1664 - DNA, 579 bp, Cricetulus griseus
  misc_feature (418)..(418): n is a, c, g, or t
gtgggagtcagcaaacctatccagcctgtgaccagtttatcaaataacattgtcctggaaggcagccatgcctgctgacgatgtgtgtggctgctgtcacagaacagcaacagagctgaagaaattactgttgcggcagacgaacacaaagcctaatgcattatctgttcaaccctattcataaggtatttgccatctctttaaaaaaaatgtttttgggagtgccatacacgggatagctgagtgtgtgtgtgtgtgttatgtaggacagaggacaacttgcaggagtcattctgtcccaccatgtggtttctggggatcacatttaggttgtcagatgtggtggcaagtgcttttacctgctgagccatctctatgcagtgtccatgcaaatgtgtgcagttgtttctcaccctanttgtgcaatgaaattaggagccattttagcggcaaggtgtgaacaagcatactctaccccttctctcctgctgaatggagctaaaagctatatagacagaatgctcaaagtagctctgtaaagtaaatgctagctaacaatgataggacctgatgttcctt

SEQ ID NO: 1665 - DNA, 579 bp, Cricetulus griseus
aaaactatagaggagcaagtctgcaaataactgggagaatggagatctatgtggtagaaacaaaggttggcaacatagaagccatatgtagaaaataaaatatttcctaagcaaaatgtatcagtcaaaactaagtttgaaaggctcttacatgagcagtaacatggaatataataattaagctgtattgatataatatgaccttctaggacagtggttctcaacctttctaacatttagaccctttactaaagtttatgtggtaaccccaaccgtaaaatgatttcattgctacttcataactgtaattttgaattacagttatttaggtattgtgattcataattgctatgaattgcaatataaatatctgatatgcaagacatctgacatgtgaccctgtgaaagggtactttgacgcgcacacacgcgcgcgcgcgcgcgcacactcacacactcatctacagacacactcacacacactcaccccctccggggggtgtacacacatatctagagaaaacacatatggggggggcagaattatgtgtacatacacccctagacagcgcccccccc

SEQ ID NO: 1666 - DNA, 579 bp, Cricetulus griseus
catggttgggcttatatccaaggaaaacgaagtttaatgcacacccgtgtccttgccaaattattctttagtagccaagatacagcaccaatctaatgtctatcaatgcatgaatacatgcagtgtccgtatacatggtagaatataatgctgccttttaaaagaaggaaatcttatttatgactgcatagatgaatctagagggtatttcggtgagtgaaataagtctgctgcaggatctcaccttcgtggaatcttaaagttgaactcagagaagtagcatgaaggtatcaggggctggggaaatgtcaaagtatgcatagtttcatttaaagagagttaagtgcaaaaggtctgttcctgtagttcacataagttgttgaaagagaactgtatcactgaatgatgtgttaaccactggttaggcatactagctatctccttttttgtttacacatttagttactttgcacaatgacatgatttcctttcttttctttcagttggcagaattgttttagaattgttagcagatattgttcccaaaactgcagaaaattttcgtgcgttgggtacagg

SEQ ID NO: 1667 - DNA, 344 bp, Cricetulus griseus
  misc_feature (36)..(36): n is a, c, g, or t
tcgacccagcgtccgcaaagcctgcatacaacccanaacagccgattctacgccatctctgcgagcttcaagccattcagcaataaagggaagactctggtgatccagtacacagtgaagcacgaacagaagatggactgtggtggtggctacatcaaggtgttcccctctgacctggatcaaaagaatatgaacggaaagtctcagtactacatcatgtttggacctgatatttgtggatttgatatcaagaaagttcatgttatcttatatttcaaaaaccagtatcattcaaataagaagacaatcagatgcaaggtcgatggcttcacccacctctacac

SEQ ID NO: 1668 - DNA, 579 bp, Cricetulus griseus
  misc_feature (116)..(130): n is a, c, g, or t
gctctcccagaggttctcccatggaatctgggagtaatcccagtgacagaaacagaggcctgcagccccagaaagaagccttttctgggccggtggctggcaagcaattccgcccnnnnnnnnnnnnnnnatattcccgacactatagcccagaagatgagtcaagtccagaagcccagcccatcgctgcctacaagattgtttcacaaagcaataagcagttgctggctggctctgtgtctgtcacatctctgtcctccaggactacagagctgcccgctgctgacccttttgctttatcgcccttcccttcaaaagcaggcaaacagaaaccctaggagcagaggcccagcctgaggcctgtctctacctaccccaccagcacccatcacaccactcctggcaggccttccagggagtatccactgtgaccttgtagttccctgcctcagagcagaatcacttcaaggcaactagcaaggttgctctttatgttacacttcctttttttgtttaaactcttttctggacttgtaggtatttctggtccttcacataggccttccacctgcagtcaga

SEQ ID NO: 1669 - DNA, 578 bp, Cricetulus griseus
gttcctaatgagaaggtgggctggcttgttgagtggcaagactataaccctgtggaatacactgcagtctccgtcctggctggcccccaatgggcggatcctcagatcagtgaaagcaacttttctcccaaattcaatgaaaaggacgggcatgtggagagaaagagccagaatggactgtacgagattgaaaatggaaggcccataaatcctgcagggaggacaggactggttggccggggtcttttggggagatggggcccaaaccatgctgcagatcccattataaccaggtggaaaagggatgacagcgggaataaaatcacacaccctgtttccgggaaatgcatcttacagtttgttgcaataaaaaggaaagactgtggagagtgggcaatcccaggggggatggtggaccctggggagaagatcagcgccactctcaagagggagtttggagaggaagccctgaactccttacagaagtccagtgctgagaagagggagatcgagaagaagctgcatgcactcttcagccaagagcatcttgagatatataaagggtatgttgatgatcc

SEQ ID NO: 1670 - DNA, 580 bp, Cricetulus griseus
  misc_feature (177)..(220): n is a, c, g, or t
aattacttgtgatggcttgcagagtcataaacaaaagaagacacttgggacttcaacaactttcatcattcgcacaaaccggaaggagtttcctaggcccagtaaaagccaccaagtttattacagatgcagagtgtcatgaaagtttgttaatcagctcaacagtcaggcttcttnnnnnnnnnnnnnnnnnnnnnnnnnnnnnnnnnnnnnnnnnnnnagcagttcaagcacagagtggcacatatagaattggaaccagcactctcttgtttcttgttggtgcatggagtagagctgttgaagaatgtcttcatctgggtgttcccactccagtaatagtgtcagtaatgaccgaaggctcgagttcttgcattgaagcagtagtttcccttcaagtacccatatacaatgtgtgtgaccacatgtacagcacaagtacagtggatgtcagcttgtgtccttttctcaagtcccttcaatcctggggtggtaaaggaaagcctgatttcaaagatgctccgtctcatttattgtccactaacgggctttttgggagacatggcgatcaccccaattc

SEQ ID NO: 1671 - DNA, 578 bp, Cricetulus griseus
gcctgaggaatagcttctggatttctgagaagccctgtacaatacaagatggatcctgtagtcttgagttatatggacagtctactgcgacagtcggatgtctcactattggaccctccaagctggctcaatgaccatattattgggtttgcctttgaatactttgccaacagtcagtttcatgattactcggaccatgtctgctttatcagccctgaagtcgcccaattcattaagtgcaccagcagccctgcggagattgccatgttccttgaacccctggatcttgcccacaagagagttgtatttttagccatcaatgataattctaaccaagcagctgggggtacccactggagtttgttggtttatctccaggatgaaaatagcttctttcattatgattcccatagcagaagcaactcaatccatgcaaaacaggtagcagagaaactgaaggctttcttagggagcaaggaagacaaactggtctttgtggaagagaaagccccagctcaacaaaacagctatgactgtgggatgtacgtgatatgtaacactgaagccttgtgtcagaa

SEQ ID NO: 1672 - DNA, 567 bp, Cricetulus griseus
  misc_feature (21)..(60): n is a, c, g, or t
  misc_feature (458)..(476): n is a, c, g, or t
  misc_feature (496)..(513): n is a, c, g, or t
gagtgatgagtaaaggggtcnnnnnnnnnnnnnnnnnnnnnnnnnnnnnnnnnnnnnnnncaaggcagagctcttggtccccagactgatagctgggataccagcacgggactgatccagacctcaggaacttgggtcaatgaggaggccttggaaatcatggggccttctgtagtagatcagtacttctctgtagcataggtgtggactttgggagcccatcccacacggagggatagtccctgagccaagacacatggggggggacctaggccctatcccaaaggatatgatagactctgatgaccccctatggaaagcctcaccctccccggggagcagcaaggatatgtgataggtagagttttatttgggagggtggtacgggaggaggagagggagagggaactgggattcacatgtaaaacaatcttgtttctaattccaataaaaaactnnnnnnnnnnnnnnnnnnncggccgcccccggggggacnnnnnnnnnnnnnnnnnncttaagagggttatttgcgcccttggcgaattaatgggaataacgtgttccctg

SEQ ID NO: 1673 - DNA, 555 bp, Cricetulus griseus
  misc_feature (519)..(519): n is a, c, g, or t
  misc_feature (540)..(540): n is a, c, g, or t
aaatctgttctattttcattactactgaagttgaacctagtaatcattggccatttgtatctggcctgtgtgaatggtatgttcatattctgtgttcattatttcactagaatgtttttcattatttttaattctgtgtgtgtttctgtctgtctctttaggagtgcatgtgtatatgagtgtgggtacctgcagaggccagaggtagatgctcttggagctacagatatggacagttgtaaatggcctcacatgagtgttgaaaactgaacacaggtctactgcaagagcagcaagtgctcttagctgctaagccatctctccagacccccaaaatacttctttttaagtgggtctataagaaaccagggccttgaactttctagagccactgaactgaatacctaacctttgtaagaactcttaatatattaaggattttaactctttgtcatggtgcagatattttccctacactatcatgttttttgatactgcttctactatataaaatctcangcagctcaatgactggcttanagatacttccaccaa

SEQ ID NO: 1674 - DNA, 566 bp, Cricetulus griseus
agtcttcgagtctttcatagcctttgggatagggcctacgccctcccctgtgtatctaggctcagggagtatccctctatgcgaaatgggctcccaaagtccattcctatgctagggataagtactgatctactacaaggccccagatatttccgaggccttctcactggcacccacattcatggggtctggatcagttccatgctggtttcccagtgatcagtctgggggccattttactgcttttattcaagttaaaaggccccatcaaaagggctcagtggttaaaatcactggctactccagaggacccaggatggattcccatcattcacatggcagctcacaacattctgtaactccagttccaggggagccaatgccttcttctggcttctgcaggtaccacgcatgcataaggtgcatggatatacatgcacgcattaaaaaaaaaaagttcccatccaaaaacattttttgggggcgaccttttgttgtccaacctggcttcaaaataatgatgggcctcaagtcctgagaggctggggaattataggctaactcaa

SEQ ID NO: 1675 - DNA, 579 bp, Cricetulus griseus
  misc_feature (578)..(578): n is a, c, g, or t
aatgtgagaactccggagtggaggaccaacatgcagaagatgcagacgctggggagagcccgcccttaggtgccatcccaataacggactgcttattttgttcccatcactcaagctccctcatgaagaatgtggctcatatgactaaaatccacagcttctttattcctgatattgaatacctctcagatctgaaaggactgattaaatatttgggagagaaagttggtgttggcaagatttgcttgtggtgcaacgagaaagggaaatccttctactccacagaagctgtgcaggcacacatgactgacaaaagccactgtaagctcttcacagatggtgacgctgctttggaatttgcagacttctatgattttaggagtagctacccacattacaaggaggggcaggaccctaatgaaattgatcagttgtcctcggataagactttggaatgcgatgatgaaaccatggagctgatacttccttctggtgccagagtgggtcatcgctccttgatgagatactacaaacaacgatttggcttgccaagagctgtaacagttgctagaaaccana

SEQ ID NO: 1676 - DNA, 578 bp, Cricetulus griseus
  misc_feature (318)..(338): n is a, c, g, or t
  misc_feature (455)..(455): n is a, c, g, or t
  misc_feature (524)..(524): n is a, c, g, or t
gcggtgaaataagaaccgtgacacaatggatgcattgggggaacttgtgtgagacactggctttttctctgcactctgtggactatcactgtgagatttcagtaggcccatttataaagaagctgctgactcatggggtagtcagactgaaagggaccctataacagagggtgagtcaagagtgaaggaacaatttggaacaggtggggaatatgggcaacttgtgggtggccaaaaaatgatgaaaaatttggtgaagttcttttactcggtttaggggaatacccaacggaaaaatgccccttgggattggggggnnnnnnnnnnnnnnnnnnnnnttgttaaatacccttcaagggtttaggggggccaaattaaaaaaaattgggggaaaccttttttttcaaaagagggagaaagggttttattggggggggaccccttttccttctccngagaaaatacggggaaaaaagaaagattttttggagactcctgtgggaacccccctcggtgtgtgctcnctaataaaaaccccggccacccattaggtgggctctagagagccccgcctataa

SEQ ID NO: 1677 - DNA, 579 bp, Cricetulus griseus
  misc_feature (184)..(184): n is a, c, g, or t
  misc_feature (188)..(189): n is a, c, g, or t
  misc_feature (204)..(204): n is a, c, g, or t
  misc_feature (216)..(216): n is a, c, g, or t
ggtgaagggcagaccactgacttttgacctgtacctgctggtccttctgacttatagaggcccagcatgggtgaattcaatgagaagaaggcaacatgtggcacagtctgcctcaagtacctgctgttcacctacaactgctgcttctggctggccggcttggccgtcatggcagtgggcattntggnnacattaggtgacctncaaagaagatgnacctaccatttagttctgctgggctttcaaaccccctttttagccccaaccccacaatctttatagggggctggtgggcgttgtcctggggacccgagaccctgggcttgctggtccaccttttcaaaagggcgaacggaaaccctgggccccctcgggtcttcttttctccgcgccctccctttaatattttatccctaccccagcaggaggaaatacaaagcttgccgtgtcgttttcccctccttaccctctccacttccttcctcggttgtcagtttccctcacgcgtcttataccattgtattgtacacggtcatgttgccttttcaccacttcttgttgattaaccccttttccatt

SEQ ID NO: 1678 - DNA, 522 bp, Cricetulus griseus
gcgaaccaatcgtcctagctgggaactgtgtgaaatcgttatccgctcaaacaaaaaaatgctataatgcaagcttcggcattttattctagagctctgggtttgaatgcagttctcagtcatgcacctctgtgtagggagacatcataaccatgcctcctaagggctggctacagatgtgcttaaccacacctgtcagggtatggtcaggggatgttcaggatgacacatgggggattcttaaggggcagcagacacgtgggagctctctctagcctccctagcttgctgcctctgggcacgctctagcttgcgcttggccggtattatttgaataaagatatcttaacctacaacctctcgttacacctctgaccaggtctccagctcttgtaagctttgctttcacagatccaaaaagctggcagagccagatgctaaagccagccgcagaggtcactgcttagccgtttaaacgatcatgcagtcaaaaaagactacagatatgcagtaaaaaaggtc

SEQ ID NO: 1679 - DNA, 574 bp, Cricetulus griseus
aagcccacagggcggatctacaacattaagctacctcgaaacaaggctgactgcactgcaggaggaatacaggtgacttttgtgtcctgctggattttgtaatgcgctaaggtaactgggcatgttagcccttgcctgacatgtgtgaagccctgggtttaagccccaaaatcacaatcggccaataaaataacaacagaaaacaaagaaaaaatgacaagcagccgtgggtcctagcaccaggaatgttctcctttgttactatggctcacacctagagttatctgcaaaaacaggagtcactggccagcatggcagtcaaagtctactttgaaagactctaacgtcctcaaagttcaagggctaaatgtatcaagatatctttatttcattaatatacaattcacctgagaaaatatttacataatatacaaaaatgaacaaaatgttctaaaccatggacaataaaaagaatgaactgtaaagtaagttctaagttacaaagtaagagtgtttaagtggattatctgatgctattcagcttggtttgaaatgatattcttcctttgtgatg

SEQ ID NO: 1680 - DNA, 578 bp, Cricetulus griseus
gtgccctgacacagcgcttgctgcaggccctggtggaggaaaatattatttcccctatggaggactctcctattcctgacatgtctgggaaagaatcaggggctgatggcgcaagcacctctccccgaaatcagaacaaacccttcagtgtgccccacaccaagtccttggagagccgcatcaaggaggagctgattgcacagggcctcctggagtccgaggaccggcctgctgaggactcagaggatgaggtcctcgctgagctgcgcaaacggcaggctgagctgaaggcactcagtgcacacaaccgcaccaagaagcatgacctgctgaggttggcaaaagaggaggtgagccggcaggagctgagacagcgggtccgcatggcagacaatgaggtcatggatgcctttcgcaagatcatggctgcccggcagaagaagcgcacccctacaaagaaggaaaaggaccatgcctggaaaaccctgaaagaacgagagagcatcctgaagctcctggacgggtagcatcacctgctgctggcctcctccctggcctgtcagaagcccacttccttt

SEQ ID NO: 1681 - DNA, 578 bp, Cricetulus griseus
ccgccggataccgttcagacatggccaagtccaagaaccacaccacacacaaccagtccaggaagtggcacagaaatggcatcaagaaacctcgatcacaaagatacgaatctcttaagggggtcgaccccaagtttctgaggaacatgcgctttgccaagaaacacaacaagaaaggcctgaagaagatgcaggcaaacaatgcgaaggccatgagtgcacgcgcagaggccatcaaggaccttgtgaagcccaagttggtgaagcccaagataccgaagggccccagccgcaaactcagccgccttgctttcattgctcaccccaagcttgggaagcggattagaagctacatggccaagggtcgcaggctctgccaaccaaagcccaaggttcaaaccaagccagaggcctcggctccagccaaggccccggcttcagctcctgctcaagttcccaaaggtgcccaggcccctgtgaagaccccatagaaaaggtttcttccagtgtgaagacagatggactggtgtgacacgcctacacgctatctgcaggtgatcatgccctgtgccgttttt

SEQ ID NO: 1682 - DNA, 578 bp, Cricetulus griseus
  misc_feature (81)..(99): n is a, c, g, or t
  misc_feature (144)..(162): n is a, c, g, or t
cccaaataccttattttgccaatacctcacagtgccttccaccattctttcattaaaacatgaaatattagccaggcagtnnnnnnnnnnnnnnnnnnntctagcacttgagaggcaggaacaggcagatctctgcattcagannnnnnnnnnnnnnnnnnnccagttccaggacaaccagggatacacaaaggaaacctgtcttgaaaaaagaagacaacaaagaaatattattggcaccatgcctattctccactgtgatctggactatgcttccctctctggatcaaatgatgcaccccagaaatccttatgaccttgggatgccctaagctgggtcccaggctttgctgactttagaatcccaaagcttacttgtgaaccagtcagatttctgctccctctcttgtgtgagaagtccacacctactatgcagtgcacaaagagctccagggcaccaagaagggctctcaggagaggatgcccagttttcaggccttccgccagaatgacaactacggaaaaacttagtccaagggctcctaccatgtaggtcaccaacacaagcacacaagtga

SEQ ID NO: 1683 - DNA, 579 bp, Cricetulus griseus
  misc_feature (168)..(184): n is a, c, g, or t
  misc_feature (250)..(295): n is a, c, g, or t
  misc_feature (571)..(571): n is a, c, g, or t
gagaaagtagcagtctcagattcagagagtgtttctttgtcaggttcccccaaatccagccccacctctgccagtgcctgtggtacacaagggctcagacagccagggtccaaatatccagatattgcctcacctacgtttcgaaggttgtttggtgccaaggcaggnnnnnnnnnnnnnnnnncacctaatactgagggtgtgaaatcctcctcagtattgcccagccctagtacctcattagcgcgannnnnnnnnnnnnnnnnnnnnnnnnnnnnnnnnnnnnnnnnnnnnngtgctggtgggctgagcggcaacagcagccctctcttcaataagccctcagacctaactacagatgttataagcttaagtcactccttggcttccagcccagcatcggttcactctttcacatcgggtggtcttgtgtgggctgccaatctgagcagttcctctgccggcagcaaggacactccgagttaccagtccatgactagtctccatacgagctctgagtcaattgacctgcccctcagccatcatggctcgctgtctggactgaccacangcactcac

SEQ ID NO: 1684 - DNA, 569 bp, Cricetulus griseus
cagatggatggattactgtttatcccctttgggatattttaaaactctgctacaaagaggatcagtaatacaatgatgtgctaatatattttaagaactttcgtattttaaagagatacactctaccatatgtttatgcaagcatcacactgggagaagaggaagtcataaaatcatcccagaagactccgaaagaaactgtcaccaccagatgcccttggtcatgcccgtccagaagctgtgttcctctttacaagggcagagtgtcacagtattgatgtgcccaccaccatgctgaggtactggtcaccttggagagctggcgtgcgggcctgaagagtggcctccttacctagcaagctgcagtccccacccctgactgatgtgcggcactggcactccgtgaggagcattgtccactgtgcacctgcagcactgtgtccctggaaaggccagctcagcccgtaacgtgtgtacatgtgctagtgcactcccttctgtcggggaggggacacccactttctctttttgtatagaaagcacatcatagaatgataattgtattttat

SEQ ID NO: 1685 - DNA, 572 bp, Cricetulus griseus
aaggagggtaatgagaggaagataaaatattgcatttttgctaacatgtaaactctagctctaagtctatacatctatgtagagcatacaggcagggggaaaggtatgaaaaataggaagggttgaaagggaggaagggatgagagaactacaagctgctgaaaaaaggacaatcagtcttctccagggacaagccctgtaggggttatccaaatccaggggccacctttaaacacatgtacatatgagcaacactaaatggacctagcagggtgaattcatatatacgtatatgaatatgtaacagaataacaaaagaggccatggctttgaaagggtataaaacctggaggtgggtgggggggaaatagggtaaaaacagaattcacgtatttaactctcacaaaaactctcaaggttaatccaaatccatgattaaaatgggtagatttttggcgtggaaatcattcatcaataaacctgtttgtagcttggtggtgaaccacctggcatgcttatgctaaataacaccgagttcaattccgggtaaccaaaactaaaacaaaaaagca

SEQ ID NO: 1686 - DNA, 464 bp, Cricetulus griseus
  misc_feature (372)..(394): n is a, c, g, or t
  misc_feature (396)..(424): n is a, c, g, or t
aatatgtttaagaacctcgtgaattgatgtgtgaaatttgtgagaataacacatagattatatgtgtgtgtgtgtatacatacatacatactacatatatatgagagagagaggctgcaaaattgacagctttagaaacagttcacttctgagtttttgtgattgcatgcatattgtatcttaatttgattttggctaaattgatggttctgaaacaaaaaaaaagaagatccaaaagctaaatgtgcaagaaaactatgactaaaaaatgtaagcccaaattgccgtttattctctttcatggcttatgaatataggatggatgtctatttgcaggtttttactgttgttcattgcttcagatttattacnnnnnnnnnnnnnnnnnnnnnnnannnnnnnnnnnnnnnnnnnnnnnnnnnnnaccacactgtgtgtgtgtgcgcacggggaatatgtcattt

SEQ ID NO: 1687 - DNA, 553 bp, Cricetulus griseus
  misc_feature (15)..(33): n is a, c, g, or t
  misc_feature (36)..(92): n is a, c, g, or t
acagcttttgttatnnnnnnnnnnnnnnnnnnngcnnnnnnnnnnnnnnnnnnnnnnnnnnnnnnnnnnnnnnnnnnnnnnnnnnnnnnnnngtgatgcagttactgttgaagacacaatcggacttaaatactatggaagatgatgaccctcagacttcttacatggtttcagcgtgggctagaatgtgtaaaattcttggaaaagactttcagcagtatcttccactggttatcgagcctcttattaagactgcctcagctaaacctgatgttgctctcttagacacacaagatgtggagaacatgagtgatgatgatggctggcaatttgtaaatcttggagaccagcaaagctttggaattaaaacctcatgacttgaagcaaaagcaactgcttgtcagatgttggtttactatgctaaggagttaagagaaggatttgtggactatacagaacaagttgtgaagctgatggttcctttgttgaaattttattttcacgaccatgttcgagtggcagctgcggaagccatgccctttctcttggaatg

SEQ ID NO: 1688 - DNA, 578 bp, Cricetulus griseus
  misc_feature (67)..(109): n is a, c, g, or t
cggtgtcggtgtttcaggcaccagtcggagggttttcttttgacaattgtcgcaggaatgccatctnnnnnnnnnnnnnnnnnnnnnnnnnnnnnnnnnnnnnnnnnnnccgaaaaactggcactactattgcgggggtggtctataaggatggcatagttcttggagcagacacaagagcaactgaagggatggttgtcgctgacaaaaactgttcaaaaattcacttcatatctcctaatatttattgctgtggtgctgggacagctgcagacacagacatgacaacccagcttatttcttccaacttggagctccactctctcaccactggccgccttccaagagttgtgactgctaatcggatgttgaagcagatgcttttcaggtatcaaggttacattggtgcagccctagttttggggggagtagatgttactggacctcatctctatagcatctatcctcatggatcaactgataaattgccttatgtcaccatgggttctggctccttggcagcaatggctgtgtttgaagataagtttaggccagatatggaggaagaagaagccaag

SEQ ID NO: 1689 - DNA, 579 bp, Cricetulus griseus
  misc_feature (79)..(97): n is a, c, g, or t
  misc_feature (409)..(439): n is a, c, g, or t
  misc_feature (552)..(552): n is a, c, g, or t
gttaaatgttgtttctaaagtcacttgatttaagcccattgaccatctaatatttgaatcctagcgtttacactacttnnnnnnnnnnnnnnnnnnnataattactattttgtctttggccaccgtgtgtaacttgagaaacaggtaatataagttagctggaaagggtctggattctctatttttgtgattgagtttatcataacataattcttctatctttataccactcacacttgtgtttttaatctactgaattagaaacagaaattcagccacctattccaagatttactgagtgctgtctatggaaaagattgggaggcatttactggtgtacatgcgcttgtcagtgatttctcacgtcattggtggaatgtgtttcatgaaccattaaagatttgcccannnnnnnnnnnnnnnnnnnnnnnnnnnnnnncccgggggatccccaccttttgttccctttacagagggttaatagcgccctcggcgaaaccaggggcataattgtttcctgggggaaatatatccccccccaaaggcagctgnaccggatttttttcggacagtccctct

SEQ ID NO: 1690 - DNA, 579 bp, Cricetulus griseus; identical to SEQ ID NO: 1689
  misc_feature (79)..(97): n is a, c, g, or t
  misc_feature (409)..(439): n is a, c, g, or t
  misc_feature (552)..(552): n is a, c, g, or t

SEQ ID NO: 1691 - DNA, 579 bp, Cricetulus griseus
  misc_feature (49)..(63): n is a, c, g, or t
gcacagtggctgggggacattctgctgggaaacttggaggccctgcggnnnnnnnnnnnnnnncggtacaccgccttcaaccttccggacccctttgcgcccactcctcacttggtcctaagtcttttagatgcatggagggtcccagtgaaagtgactgcagagctcttgatgggtgtaagattaccccctaagctgaaaccgaatgaggttgccaacatccagccttcttctaaaagagccagaatcgaggacctgccacctcccactaagaagctgagtccagagctgatgccttacgtgcttttcacgggatttgagcctgttcaagttcagcagtacattaagaagctgtacaccctgggcggggaagttgccgagtccacgaagaagtgcacccatctcatcgccagcaaggtgactcggaccgtgaagttcctgacggccatctctgtggtgaggcacatcgtgactccggagtggctagaggagtgcttcaagtgccagaagttcatcgatgagcaaaactatatcctgcgagatgctgaggcagaagtgctcttctctttcaatctggaa

SEQ ID NO: 1692 - DNA, 382 bp, Cricetulus griseus
  misc_feature (110)..(140): n is a, c, g, or t
  misc_feature (142)..(220): n is a, c, g, or t
  misc_feature (237)..(298): n is a, c, g, or t
  misc_feature (351)..(380): n is a, c, g, or t
caggccgccacctgagtgacaactgcatctatcgttccctttacagaaggttatatgatcgctcggagtattcaatgtcataactgacacctgtgagactttgatatacnnnnnnnnnnnnnnnnnnnnnnnnnnnnnnnannnnnnnnnnnnnnnnnnnnnnnnnnnnnnnnnnnnnnnnnnnnnnnnnnnnnnnnnnnnnnnnnnnnnnnnnnnnnnntatatttccacttgtcnnnnnnnnnnnnnnnnnnnnnnnnnnnnnnnnnnnnnnnnnnnnnnnnnnnnnnnnnnnnnnaaaactaattactaagcaaataataggcatttcactcacctaaaagacgaacnnnnnnnnnnnnnnnnnnnnnnnnnnnnnntc

SEQ ID NO: 1693 - DNA, 473 bp, Cricetulus griseus
aattgacaatacagaccttggctatgaagtacttccaattaatactcagtatgagggaatgagagactgtataaataccattaagcaggaggaaggagtgtttggcttttataaagggtttggtgctgttattatacagtatacactgcatgcggccatcttacagattaccaaaattatttactccacacttcttcagaatagcatttgagatttaggttctatcattggctgatccaaaaatgtggtctggataatttgctctgaaattgtaagtaatgaaagtaaaatgctgggtggaaagaagtagactgggaattgagactggtggaaaagctcatgctggctatactaacttctcatttttcttaaggcataaatatatagacatatagctgtgtaaataatactggatcaaaacctttccaaaattgaaaactcaataaaggtaatactttaaatgcaaaatgtaa

SEQ ID NO: 1694 - DNA, 579 bp, Cricetulus griseus
  misc_feature (174)..(196): n is a, c, g, or t
aagttaaatccaaattcaaaagtatccattgaagttatatcttctggtatcacactttttaaagatgacaagcatcccagttaaactagctgtggtagttacccgatgaaagcatgacgttccatctgtgtaatgtggttttagtgttgcttggttgtttaattattttgggcnnnnnnnnnnnnnnnnnnnnnnnctagaataatggcaactacttttcctgtttttccctaaacattttaaaaagtgaaatatgggaagagctttaaagacattcaccaactattagttttcttcacttagctacttatgtaactgtttgatcttactaagaaaacttatgcctcaaaataacaaaaaggaattttaagggttgatgggttttaaaaatatacaaactatctgatccaatgattttaatcaaacagtttgactgggcaacctttgcagctgataatgaatatttcgctttttacaaaattgccactgatttggatttgtgcactctaatttttaatttattgatgctctattgtgcagtagcattttgtttaagataaagctcatatagtattaccc

SEQ ID NO: 1695 - DNA, 189 bp, Cricetulus griseus
  misc_feature (187)..(187): n is a, c, g, or t
aggttcaactatgtgtacattagccaactttccacacacatatgtatttaaaaacatgatcctgaatgcttgacagagtcaattgccaatagtagcagttgttaaaattttatattgattgatgtaaactaatcttgaaagatccagccatgatctgttttaaaattaattgtaagagcaaccattnat

SEQ ID NO: 1696 - DNA, 579 bp, Cricetulus griseus
aatattattctaactgtgtaaaggtatgctgtatttgctttatgctgtatttgtttaatgttgtaaggatgtgtgttaattgtgtaaagatgtttgtcgtcatttaaggcgaatataggaatataagataaaaagacaactactaacctcaaatatttcacattgatatattgatacacatttaaagttttttgttatacggaatgtatgtttatactgttgtttggggtattgtgcttatgcagctcatttaaaaatgtaatctataatttaaaaatgcaggttagtagtcattcataataatcaagcttatagtcacgttaagtatgcttttaatgtttaacagatatattttaggaagatagattctctccaaactcttcaaagttctacagaatatggcatttaactatgcaatgatatgttacatttgtttatgctgtatttgtttaatgatgtaaggaaggctgttaaattatataaagatatgttgtatttgtatcaatttgcctgcctaaggcacccaattggcctaataaagagttaaacagccaacaccttggcagataaaggataagt

SEQ ID NO: 1697 - DNA, 534 bp, Cricetulus griseus
tgtttcttaaggaccacgaagaggaaaaacatcacaagatgccctgcccgcccttgagcagcatgcctcagggcacaaaaccctggtacaaggagttcttgcagctgattggctacagcaacttccagagagtagaagaatactgcgaaaaggtgtggtgtacagacaagaagaggaaaaagcttaaaatgtctccctcgaagtggaagtacgccaacccccaggaaaagaggctccgctccaagccggagcacttccgcctgccccggcacgcactggactcctgagggcgccttctgctggctgccaagggaccgagcatgggaaccttcaaagggaagagaaacaaagagaatgtcacagcatgcaaagtccttccagcacttcacagagggaggaaggtgttttaagttattctgcatactcatcttactgtgcaaaccgctcacagtactagtacttacacgagtgtattgcttaaaaggcttcactttgtatttatcaacacatgaccgtggctgcaattttgagttt

SEQ ID NO: 1698 - DNA, 179 bp, Cricetulus griseus
tgatagggacatttgttttcattgtaatatatcaagcacaggcaaatggaatttaattgaaaatgttttaatgtgtgtgaaactttcatcattcactagaagcagaactagttcatatcaccaagcaccattgttttgtttcctaatgggagtgatcttgtataactaacgatatgaac

SEQ ID NO: 1699 - DNA, 582 bp, Cricetulus griseus
  misc_feature (282)..(329): n is a, c, g, or t
caaatcagggagcattattcgtaagatggttttagacaggcaacacctgggagtgacaaagtcaaggtgtatcgtgtggggtgttgccttcttgtctgacggcactgtcataagtgtggactctgttggaaaggtgcagttatgggactgagctactgggacacttgttaagagccatctcatcgcaaatgctgacgtacagtctattgctgtcgctgatcaagaagacagttttgtggtgggtacagccgaaggcacagtattccattttcagctggtctnnnnnnnnnnnnnnnnnnnnnnnnnnnnnnnnnnnnnnnnnnnnnnnntccagcatcacactcacgatgtacgcactgtggcccacagcccaacagctctgatatcaggaggcactgacactcaccttgttattcgtcctctcatggagaaagtagaggtgaagaattatgatgctgccctccgaaaaatcacttttccccatcgacgtctcatttcctgttcgaaaagaaggcagcttctcctcttccagtttgctcatcacttggaactctggagactaggatctacacttgcaacatg

SEQ ID NO: 1700 - DNA, 387 bp, Cricetulus griseus
  misc_feature (247)..(265): n is a, c, g, or t
aataaatgacacaaagactgacttattaggaaagcaaggctgatagcttgggctcatttcttactagctcttatgacttaacccatttctatctttactctctgcctgtggcttttaccctatcccattttgtgtatcctactcattcaatgtctatctggcttccccaccttcttcccagttttctgcccccaaaatcctgcctgggtgttggccttttagctttttattaaattaatccaagtcnnnnnnnnnnnnnnnnnnntccgttaaaggctaggctcacaaccaaaaatataaattagtcgaagtgacgcttcatcacagtgttcaaaaagattattccacaacacattctgagtacttcacgcaccttccgtaataacc

SEQ ID NO: 1701 - DNA, 146 bp, Cricetulus griseus
  misc_feature (122)..(142): n is a, c, g, or t
agcctgaagaattaaaatgccaacaccaaaccttacattaacagctctggtccatactactcccatgcatttctaatatattatttgttttataaccacttctaaaattcctgcttcctccnnnnnnnnnnnnnnnnnnnnnctgt

SEQ ID NO: 1702 - DNA, 558 bp, Cricetulus griseus
  misc_feature (470)..(470): n is a, c, g, or t
acgttgtctgcgtcctaacaaccctggacagaacccagcatgtctcaggccaccaagagaaaacacgtggtgcaggaggtgctgggagagcacatggtgccctcagaccaacagcagatagtgaaggtcctgaggactcccggcaacaatctgcatgaggtagagacggcacaagggcagcgcttcctggtgagcatgccctccaaataccgaaagaacatctggatcaaaagaggggacttcctcattgttgaccctattgaagagggagagaaagtgaaggctgagatatcttttgtgctctgcaagaaccatgtccgttctctgcagaaggagggccactggcctgaggccttctctgaggtagctgagaaacaaaacagtatgaacagacagagtcagccagaactgcctgctgaaccacagctgtcaggagatgagtcaggttctgaagatgattctgacctctntgtcaacaccaatcacagacaatatcatgagagtgaggaggagagtgaataatatgaagaggacgaggacgaagaggcagcctgagcc

SEQ ID NO: 1703 - DNA, 580 bp, Cricetulus griseus
atattccattccttttttgggatctgatatggtctgttggtgaaaagggacctcaacgttaccttacactgaaaatttacaggagtccccagttcaatatgctgcatacctaacggggggaggcatcacctctgttattaaactgatgtttgcagggcttttctttttattctttgtgaagtttaacattgggagacaccttctcataaaattcccatggctcttttcctttggttatttttcaaaacaagggccaacacaaaaacagatggatggctcatcatttacgatgacattctttggtcaaagatacaaccatggtttttgtcctgagaagaacaaaccaaatatcacaatctgtacccaactgaaaggaccagaggctggctacgtgactactccaatagccatggttcaggctgccatgactcttctgaatgatacctctgatctccctaaagggggcggagtgtttacacctggagctgctttctccataacaaagttgattgacagactcaaccaacatggcattgaatttagtgtcattagcagctcggaagtctaaacattcgaagat

SEQ ID NO: 1704 - DNA, 579 bp, Cricetulus griseus
  misc_feature (458)..(458): n is a, c, g, or t
  misc_feature (536)..(536): n is a, c, g, or t
gcttcccatagcatgatgaatcaccacgggtcagggggtttggaagtttctactttgcacactgtagtttgattgattggttctgtcccctgctaaatgcttaatatgcagcttgctctccacatcttggtttatttctctataaaatggaaataagatggtatccaccttgctagatcattgtgagaattaacagtgacaacccacagagtacttgttgtggtgcctaggatatagttgcacatgatgcatattttcaattcctaaaaatattttttgctagtcatttaggacttccctgctttcttactatgtgtctgacttggcaggattatagtctgtaatggttagttttatctacctgactgggctatgggatacccatgtatctggtcaggtatcatttttgaatgtgtctggatttgtttctttattttccattttcatgaaatgagttnttttgttaacttgaattggtggattgaagaaagatgacctccctatcagaggtgagtctgtgttgtttcatacatcangacatgttgaattcagataagagagatgctcactgactggcta

SEQ ID NO: 1705 - DNA, 579 bp, Cricetulus griseus
agtgagtctcttcaggttggaaaggaaaattctgtggatcccgcttcccagcccatcaaataactgaacttctgaatgctggctgcagatggcccgacaaggagaggagtgactgtctctccctaagatgtgtccattcaagtgtcctgctgcagacttgattcagtgttgatcagagggatgagctagcaattcggaattgctgttcattatccacaaacaatttgggttttattagtaaaatagaggcgtctcaccattcctttgtcagaaattccgtttagtttgactctgggacctgaatttatataaactgttttcagttatttttggttttcatatctctgaaaccctaaacatttttattataaaccagtgatcgtattttatataggattataaaattgacccctaagaattttaagagatcaaactttcaacaattcatggccggtgttaaccccgacacgcattcgtcccttttatacttatctgaacccacagaacacacacgggaaaacccctccgcgcggcctcattattcacctcggggcggtgggattcccctctggagcctag

SEQ ID NO: 1706 - DNA, 578 bp, Cricetulus griseus
attgcgcttgagctggtgtatgagattgaaggctgtgaagtgatttgggccataaaggataaagccattgggaatactttctttgacgcaggcgcagcagaatttttgacttccaagctcatgtctgaaaaatcagaggctaaaattgcacctaaaagaaccatctacacaattgagggagcaagaaaggaaaacagaagcaaagctaaagctgataatgtgggcagtgcccttggacctgactggcatggaggcttggatctgaaaggtccacaagagttctcacacagtattcacatcgaaaccagatgtgaagtaaagaaaatctaccttcaagaggagtttaagattacaaagaaaaagcccttggcttttccaaagcatcaggataagtcagttacacttgataaagaaatgtggcctgtgtatgtggaactaaccaatgggaaaatatatggctgtgatttccttgtcagcgctacaggagtcacaccaaacgttcaaccttttctccatggaaacaattttgatctaagagaggatggcggcctgaaagtggatgaccagatgcgcacgtc

SEQ ID NO: 1707 - DNA, 567 bp, Cricetulus griseus
acagtcttaaggaaaatattcaggtctatcatatggtttgacagattttttaaaagttatttttggtaaggtcttcttttagaaaaaaatctcaagggttttttgtaccactataatctctaatactcagaattgcggtgtatttacttaatttcttattatgtgccttattatgtgcttaagatataatagattagagttttatctaaatatctagaaagataaattgtgggcttgaagagcattctgttattttttccttgtcttggattttaagggttccctccccttttttcatttcaattttaagtggttttcaataagtaatagtttttattcacatttttggtgctttggtgtacagatgggatagagaagggtgagtggtttgggaataacttggtgtgcacctgtaagcctctgttgtgactgctggttgcctccatcctttatgtaaagtagaagctgcagaactgtcttagttcgcatctgtctgacatttaccagctgtcacgatttgtctcaggattacttggttctttctcagcactcaagtgagaacttgat

SEQ ID NO: 1708 - DNA, 579 bp, Cricetulus griseus
aatttccatgttaagagtgaaattaatgagtcatgtggaactctgggttttgaggccttttattttgattatttcctaaaacttaattaaatgtttatatgcacatgcatatttagcagcctcaagtattgcttaatttaaaaattagttcaaaggaatatttgtcagcctacttgtacccctgtggaaaaatacccagcattttgaagagtcatcttcctctatcaaaccaaggggtgaaactctaacatctctcctgccccatttcagctcgaagcagtagaagctaacaattaagttgacttaaaaaaaggaaaccccaaactaggatctgttataaaataacagatttttattcagaattttaaggcagaaattccagttttgatatactgtactctctgagcaattagctctaaaatgtttgaagctttgtattttaatgcaatttgtatttttaaaaaccacattcttatgttcaaataactcattgatttcttaaaaacttaccaacccttatgaaaaaaatcccatcatgtgttttttttaattataattacatttttgcagcagttaaat

SEQ ID NO: 1709 - DNA, 580 bp, Cricetulus griseus
ggctcgagacgaagtagacagcctgatgtgtgaaaaaagaatttttgagactgtgaatagcgtcaggcacccctttctggtgaacctttttgcgtgtttccaaacaaaagagcatgtgtgctttgtgatggagtatgcggcaggtggggacctgatgatgcacattcacaccgacgtcttctctgaacctagagctgtattttatgcagcatgtgtagttcttgggttacaatatttacatgagcacaaaattgtttatagagatttgaagctggataatttgttgctagatacagaaggctttgtgaaaattgctgactttggtctttgcaaagaaggaatggggtatggagataggacaagcacattttgtggtactcctgaatttcttgccccagaagtattgacagaaacatcatacacaaaggctgtagattggtggggccttggcgtacttatatatgaaatgctggttggagagtctcccttccctggtgatgatgaagaataagtttttgacagtattgtaaatgacgaagtaaggtatccaaggttcttatctacagaagccatttccata

SEQ ID NO: 1710 - DNA, 471 bp, Cricetulus griseus
  misc_feature (19)..(60): n is a, c, g, or t
  misc_feature (74)..(140): n is a, c, g, or t
  misc_feature (154)..(220): n is a, c, g, or t
  misc_feature (233)..(278): n is a, c, g, or t
  misc_feature (280)..(300): n is a, c, g, or t
  misc_feature (314)..(341): n is a, c, g, or t
  misc_feature (392)..(420): n is a, c, g, or t
  misc_feature (422)..(435): n is a, c, g, or t
ttaatattgtattagcttnnnnnnnnnnnnnnnnnnnnnnnnnnnnnnnnnnnnnnnnnntaatgtctacgctnnnnnnnnnnnnnnnnnnnnnnnnnnnnnnnnnnnnnnnnnnnnnnnnnnnnnnnnnnnnnnnnnnntcgataggggtgtnnnnnnnnnnnnnnnnnnnnnnnnnnnnnnnnnnnnnnnnnnnnnnnnnnnnnnnnnnnnnnnnnnnagtagtgtcaaannnnnnnnnnnnnnnnnnnnnnnnnnnnnnnnnnnnnnnnnnnnnngnnnnnnnnnnnnnnnnnnnnncatactcctacctnnnnnnnnnnnnnnnnnnnnnnnnnnnngatgaattaatgtgacaccacacagcgtcttaatcaatactttagctatannnnnnnnnnnnnnnnnnnnnnnnnnnnngnnnnnnnnnnnnnntacattccatattgatccactatctccatcatcaat

SEQ ID NO: 1711 - DNA, 582 bp, Cricetulus griseus
aaatactccagaaactgtcaatctcattatagaagtttttgttgaagttgcacataaacagatatgctatcttggagagtccaaagctatgcatttatatgaagcctgccttactttgttgcaagtatattctaagaataatctaggggggggaaggatagatgttacagcggaagaagagcagtaccaggacctgcttctcattatggagcttctcactaaccttctctccaaggagttcatagacttcagtgacacagatgaagtatttagaggacatgagccaggacaagcagcaggcagatctgtgtcagcagctgatgtcgttttatatggagtaaacctaattctgcccttaatgtcacaagatcttttgaagtttccaaccctttgtaatcaatactacaaattgatcacatttatttgtgagatttttcctgaaaaaataccccagcttcctgaagatctgtttaagagtctgatgtattccctagaactaggaatgacatcaatgagttcagaagtatgccagctctgcctcgaggccttgacaccattagccgaacagtgtgctaaagcaca

SEQ ID NO: 1712 - DNA, 524 bp, Cricetulus griseus
cacgccgagtctcttcggcaggctcgccggggacatgacggggtacacaccggatgagaagctgcggctgcagcagctgcgggtgctgagaaggcaatggctgaaggaccaggaactgagcccccgggagcccgtgttgccaccgggcaagacgtggcccctggagacattctggaataactttctgcgggacggggccctgtggaagaaagtgatctttaagacataccgggccagtctcttcactgtttctcatgtaattatacctctgtggtttattcactattacgtcaaatatcacgtagctaaaaaaccatatgccatcgttgacacgaagcccaaaatattcccaggtgatacaattctggagactggagaagtaattccgccaatgaaagattttcctgatcaacatcattaaagagcacttaaaacttaaaagacttgtgtaacagcaaaagtctcttcatatagttcgtatttactgaatctgtttcctggaaaagtaactaataaagcttatt

SEQ ID NO: 1713 - DNA, 579 bp, Cricetulus griseus
tgggtttctgtagaacattccatcagggctccgtttggtcctcttattttcttagaagttccaagatacagaatttgtctgacaatgtttatctcaggaagaaatgtcttgctcttcttaattttagattattggtaactatgtgcagctgttgcatgtttggcaggcatgtgtctgaagtcccagatacataaaatccccttacaaatgaccaaggacaggagaaaattcagtatcattagtcattagggaaatgcaaatcaaaattatagtgaagttctactttattctcatggggatgattgtaattcttaaaaaccaatttaataaaagtaggtgaagatctgaagaaattgcaattcttggacattgctggtggggacaagatggtatcactgctatggaaaatagttggctaatttctcaaaaagttagatgtagaattattgtaggaccagcagttccagaaaatttgagaataggtgtactctaatacttgtatgtaaatattcatggcagcacctactcacagtggccaaaagatgacaacagtctgaatgtccattggacagcaggtaa

SEQ ID NO: 1714 - DNA, 381 bp, Cricetulus griseus
accgagttggtgacaaagaagaagccaaaggctgaaggctatgctgagggtgacctcactctttatcaccgaacctcagtcactgacttcttgcgagctgccaatcctgttgactttttttccaaggccgcgaaatttcaatagatgatgaagagttagcacagcatccagctacaactgaggatataagagcatgctgtcaggacatcaaagttctggggcgcaaagaactaaggtctctactgaattggagaacaaaacttcggcggtatgtggccaaaaagctgaaagagcaagcaaaggcactggacatcatcctcagctcataagaagaacgtgatgaggatgagtcaatagctgagacatagcatgatgattcat

SEQ ID NO: 1715 - DNA, 531 bp, Cricetulus griseus
  misc_feature (512)..(512): n is a, c, g, or t
ggagccgctgggcatagaggtcgaccagttcctggaagacgtgcggctgcaggagcgcgccaccggtggcttgttggccgaggcccccaatgaaaagctcttcttcgtggacactggatccaagaaaaaagaaccaaacaagaggacctgggtccagaagaagtctcagcgtctccagaaaccccttcgggttgaccttgcccttgagaatccttctaaggtccctgctcccaaagacatcctcgcacaccaggtccccaatgccaagaagctcaggcgaaaggagcagctatgggagaaactggcgaagcagggtgagctgcccagggaggtgcgcaaggcacaggcccggctcctcagccctcctgcaccaaaggccaaacgcgggctacaggacatcattgagcggcccttctatgacctctggaacccaaacaaccctctggacaagccgttggccggtcaggatgcattttttctggagcataccaagaagaaaggagtgaggcggncaccacgcctccatgtcaa

SEQ ID NO: 1716 - DNA, 578 bp, Cricetulus griseus
  misc_feature (84)..(110): n is a, c, g, or t
accctaccctgcagggaaatctaggcccaggcctacctaggagtcctgtatcacctgcgggccctacctcaccactgacacccnnnnnnnnnnnnnnnnnnnnnnnnnnngtggatggcagtgaaggcagtacaagctcaggtccaccttggctttcttcaagaccctgctcgttttcctccaggcgccgactgtctctctcacaagagcaccttgtagacgcaagtgcttgcctgccttcagccagcagcacccccacatccacacctgaactaggccgacaccatggcctgctccggtgccgctcacagccttgtgtattggatgggaggagggtccggcgcaagcggagacgggaggaggatgccaggtggacacgcccatccttggactttctgaaaatgacacggactttaaaaaactcaaagagcctttgctccctggactatgaagatgatgaggacgacacccaagcgaagactgttgtgtcctccccatgttactcgaaggaccttgtgagcattatcacaccaagctctagcccaaggattcccaaggctgcccctaccgttccagtg

SEQ ID NO: 1717 - DNA, 496 bp, Cricetulus griseus
  misc_feature (105)..(119): n is a, c, g, or t
ggaaagatcgcgggcgagcgaggcccgggcccagcctgaggtagggttctctactagggccaatgtctacggagaaggcctcctcccttcccagtcctctatggnnnnnnnnnnnnnnnccggcctggtctgggggcgaaggggggggggatggggtggagctgccctaaactcccccatgtggccctcattttggagtgcggaggattaatttgttccgggtgggaggtagagaggcgaatggccccatgggctcttgatgtggcgcggaggggggtgagtctcccatcctccgcgcgtgggcttctgtcctctgttcgtttccagcctctttgtcagctcctcttattatcctgccttttttcttaccgaccctgattgtggagtatatttttgctgctgtctttatcttcctgttggctatactggaggtttgggtacccaatacattatattatttgggaagctggacatggaggcccccatgggttgtatt

SEQ ID NO: 1718 - DNA, 542 bp, Cricetulus griseus
aatacaagacggtagctcattgcagtctcagggcagtctgaggtttggtggagaacattgctgtctgcagtcactctgaggacaggatcaccccccttcatttttagccttggtagaggtaagaactctctagtggcttggcttggctgctttgcttttctgatcttccacttgaggcccaacaatatctgtctctgggtttttattattcatgctgcacaccctacatagtgggttccagggcagccagagctgcatagtagagagatcatgtctcaaaccaaacaaaacaacccttacttttgtcttgcactggaaagcatgggtggagggtgagttacctggttgaagaactgtgtcatggtgcataggcactgcttccgcctctgctctagttcattttgcttgttgctccataaacacattaccttcttctggtagttatcaattctgttcagcatggtatagagattctgggtctcataccctttcccagtattttggatcatttttaatcgtgtggttatgtggtgccttgaaaa

SEQ ID NO: 1719 - DNA, 473 bp, Cricetulus griseus
acgcaatcagttgcctcaaccatatgtttttccagtctttaaggacaaaagtggcccacagtttaccagtgctctaaaaaatagtcacaaagcacttaaagcattgctaaggtcattggtggatcttcacgatgatttgctttgccagtacccaaacactacatacctattaaatgggatgaaacccaaaactgagagtgaggagatttctagtgaagatgatgagccactagcatagaagaagaagcaaagaaaagccccaccaaagaggaagctacatatggagaactatcccatcttcatggcaaagcgctttgctgattttactgtctacaggaaccgtacactgcacaagtggcatgataaaaccaagcttacttctggaaaactgggcaaaggtttcagtgcctttgaacgctctatattaactcagattgatcacattctgatggacaaagaaagattgcttcaaa

SEQ ID NO: 1720 - DNA, 524 bp, Cricetulus griseus
  misc_feature (96)..(127): n is a, c, g, or t
actcatcctcgctttgcagtgcctgtgtctttccaaattcagtgagggcttcttgagccttttgcattttggactttcagaattttggtttggggnnnnnnnnnnnnnnnnnnnnnnnnnnnnnnnnagcttttctttactgtaacgtgaaagacaaacaaaaatgtccatgctccagaagtgtcttgaaggtacatctttctacatggcattgcctctgaatgtgagcattcattactttctgattagaatcctgctctcttcaccatccatatttagtttccatttaaaaaccaggtatctacacatctttatgttaatgtatacttttctatgaagtcagcatgtgatctaaacagaggtgctaagaaacgaacagaattctcctaaggaaatcagtccatcttgataaggtgcagtaagtcgggataccaaggtacattataagtagtagcaagcctagaagctggtccatccaagcacttcacacatgctcacccgttagggtatcaatgagggtacca

SEQ ID NO: 1721 - DNA, 503 bp, Cricetulus griseus
  misc_feature (44)..(68): n is a, c, g, or t
gaacagggagtagaagagcatgagacattgctgctgcggagaannnnnnnnnnnnnnnnnnnnnnnnnggattcccgggaccctgtacagctgaaccttctctatgtgcaggcacgagatgacatcctgaatggctcccaccctgtctcctttgacaaggcctgtgaatttgcaggcttccaatgccagatccagtttggacctcacaatgagcagaagcacaaggctggcttccttgacctgaaggacttcctgcccaaggagtatgtgaagcagaagggagagcgtaagatctttcaggcgcacaaaaattgtgggcagatgagtgaaattgaggccaaggtgcgctatgtgaagctggcccgttccctcaagacttacggcgtctccttcttcctagtcaaggaaaagatgaaagggaagaataaactagtgcccacgctgctgggcatcactaatgagtgtgtgatgcgtgtggatgagaagactaaagaggtgatccc

SEQ ID NO: 1722 - DNA, 580 bp, Cricetulus griseus
tgccctcagcacatccagctgcccccttctcaggacacttgatcttcggtgggcagtaggaattaaagaccctcaaattcgggacttgctgactccacccacagataaaccaggtcaggacaatcgaagcaagctccggaacatgacggacttccggctggcaggccttgacatcacagatgccactctccgactcatcattcgccacatgccccttttgtctcgacttgacctcagtcactgcagccaccttacagatcagtcctccaacctactcactgctgtcgggtcttccactcgatactccctcacagagctcaatatggcaggttgcaataaattgacagaccagaccctgttcttcctaaggcgaattgctaatgtcaccttgattgaccttcgaggatgcaaacagatcactagaaaagcctgtgagcacttcatctcagacttgtgcatcaacagcctctactgcctgtctgatgagaaactgatacagaagattagctaagacatgctcagactggactgaacaggaaaatcttcccctgccttcccaccaaggagagtctctccctgc

SEQ ID NO: 1723 - DNA, 561 bp, Cricetulus griseus
atgttgagcatgttcagcagtgtggcttcactggctcctactttgtctccagtttttatcagctgcacatcacttagaatttcaatggtgcccctggagattttagtggtgatgcccaaagcctggaagaaagaggtcttctcgggccccagaccagtgttctgggctggcacagtgacctcacatggggcgatggcaccagcacgggcagcagccggcaccttattggccagcagcatgtccctaatttcagtgaggtcctccttggtgaacacaaagcccacattcccccggatgtggggcagcagcttctccagagctgggttgttctccaggtgcccccggatggccttgcgcatcatggtgtttttgcccatcagcaccacagccttccctcgaagggacatgcggatctgctgcatctgctttgagcccacattggctgctcccacaataaagcattttgggtaatcatccaaaagttggatgatcttaaggaagtacttggacttgcaggtcgccctgtcttcctgggcatcaccgcggtgcgtcagggattcg

SEQ ID NO: 1724 - DNA, 410 bp, Cricetulus griseus
aatctaccctcttcaatatctgcagacattaaggattataaactttatgatgtggaaactaagtgtgggttgcttcaagtgtctgaaggattgtcatttttgcatagcagtgtgaaaatggttcatggaaatgttactcctgaaaatataagggtgaataaaagtggagcctggaaaataatgggctttgatttttgagtgtcgtcaagcaatccttctgaacaagagcctaagtttctttgtgaagagtgggacccaaacttaccttcattgtgtgttccaaatcctgaatacttggctcctgaatacatcctctccgtgagcggtgagacagccagtgatatgtactctttaggcactgttatatatgctgtgtttaataaagggaaacctatatttgaagtcaacaa

SEQ ID NO: 1725 - DNA, 490 bp, Cricetulus griseus
  misc_feature (18)..(18): n is a, c, g, or t
  misc_feature (351)..(371): n is a, c, g, or t
atggaaaagagtgcaaantaatggctctcatttgaagactgtggcgttgtctagagccacactgcctagtccgtgtcccctgcagacagcaatgcccagtctgttggacctttaactcatcctcctgggcagagagattgctggctttatggtcccagctgactagggaacagctcatttggggacacactggggcacacaagctcctaagtggtactctgacaaatgctacttggctttagaaaagtgggtttttctatctgactttataatgtcactgaagtgggaaatataatttcttaatttctttttgcaaatacagggtttttctgtttggttgggtttctgtgnnnnnnnnnnnnnnnnnnnnnagacagagtttctctgtgtaacagttctgggtgtcctgggactcactctatagaccaagctggcctcggactcacagaaatctgcctgcctgtctcccaagggttgggattaaaggtgt

SEQ ID NO: 1726 - DNA, 112 bp, Cricetulus griseus
  misc_feature (40)..(59): n is a, c, g, or t
gcgttcgggtgacttttctctactaatcataaagacatcnnnnnnnnnnnnnnnnnnnncggtgcttgagccggaatagcttgaactgcccttatcattctaattccggcac

SEQ ID NO: 1727 - DNA, 137 bp, Cricetulus griseus
tattccacgtggattggaggctcaatccttgcttccctggacacctttaagaagatgtgggtctccaagaaggaatacgaagaagatggtgcccggtccatccacaggaaaaccttctaaagctgagaccgcacctt

SEQ ID NO: 1728 - DNA, 318 bp, Cricetulus griseus
agcctattcttcatgaccatataaatttaactttctgaaatctcatttcttctaagtaccttgtatttagcatgacaaagatgggtctgtgatagtatatgtgattgtatctgtatatattcttagaggcagatgtactgagcgagggggggccaccatgtaaacctttgctgagagtcagaaaggagtccatgactggctcagatatacattgtcatgagtagactgtctgtcatgggtcttcaagatggtgggtctgtttcaactgatgacacagaactgataaaagagattggctcatggcaactcctttcactt

SEQ ID NO: 1729 - DNA, 579 bp, Cricetulus griseus
  misc_feature (255)..(370): n is a, c, g, or t
  misc_feature (519)..(558): n is a, c, g, or t
cggcggggaccgaggcacatgaggacccggcgtggaccgcggagatgttgggcgtggcggccggaatgaccaacagcaacatggccaatgccttggccagcgctacatgtgagcgctgcaaggggggctttgcacctgcggagaggatgggtgaacagtaatggtgagctgtaccatgagcagtgcttcgtgtgtgctcagtgcttccagcagttcccagaaggactcttctatgagtttgagggaaggaagtannnnnnnnnnnnnnnnnnnnnnnnnnnnnnnnnnnnnnnnnnnnnnnnnnnnnnnnnnnnnnnnnnnnnnnnnnnnnnnnnnnnnnnnnnnnnnnnnnnnnnnnnnnnnnnnnnnngtgacctctgccaggaagtgctggcagacatagggtttgtcaagaatgccggcagacacctgtgtcgtccttgtcataatcgtgaaaaggccagaggccttggaaaatacatctgccagaaatgccatgccatcattgatgaacaaccnnnnnnnnnnnnnnnnnnnnnnnnnnnnnnnnnnnnnnnnaactgtgccaactgcggggaa

SEQ ID NO: 1730 - DNA, 267 bp, Cricetulus griseus
  misc_feature (211)..(225): n is a, c, g, or t
cccaggagacccaagttcatgcactggcgggcctgaaatgagagaagaccagcgtaggaaagaaaggcattatgctgaacacccttgtcagccaccaactggaatccccacactgggtgataaggagacgaatactgatgaagccggtgatggcaatatggcacttccccccaaagaccgtagcatcctgagctctctacagcatcccttnnnnnnnnnnnnnnngatagtgcgctcacaaaccttctccccatgcgagcggagccc

SEQ ID NO: 1731 - DNA, 566 bp, Cricetulus griseus
  misc_feature (17)..(45): n is a, c, g, or t
  misc_feature (47)..(66): n is a, c, g, or t
  misc_feature (68)..(82): n is a, c, g, or t
  misc_feature (111)..(170): n is a, c, g, or t
tggtggctcacgcctgnnnnnnnnnnnnnnnnnnnnnnnnnnnnnannnnnnnnnnnnnnnnnnnnannnnnnnnnnnnnnntaatgagatccaggacagcctccaaagcnnnnnnnnnnnnnnnnnnnnnnnnnnnnnnnnnnnnnnnnnnnnnnnnnnnnnnnnnnnncttacagccatagctgatgaccctaatgggggagtagaggaaattatggaagtttggggctggggtcaccatgaggactacagtgaggagtgtcaccaaggctgagtttttcctgatgaaatgagatggaggggtcaggaatgctggctactttctgatacccatgtatttcctcgggggcaggctagctctgaggagccctgctggcctgtcctctgactctctgtggtaccatcaacagctttaaggagtatactagtcacatgtgtggccttttgaagctctgaacctctttgggagctacagacttgaagctcttacaggcatctgggagcccagctgagcccttcctaccagatagtcccatgccccactccagatccaagttcctcagca

SEQ ID NO: 1732 - DNA, 534 bp, Cricetulus griseus
gccaaccatggtgaatttgggcctgtcccgagtggatgacgcagtggccgccaagcacccgggactcgaggaatatgccgtgtgccagtcgaacgccttcatgaagggcgttttcacctttgtcacagaaggtggcgccaagtcatcttgcctgcactgcaggtgcagtaggcaccaaaaccacctccttgcagccttatcaaatcaagggttccttggctcttggtaggcactggtgcgactttcggtctgcagctgttcattaagcggaaatttccataccctgtccagtggaactttctggtgtctgccgttgtagggtctgtggccagctacaaggtgacaagaatggagtctcagaaatgcagagatctctggctcttcctggagacagggaaactccccaaagacatgagcacagaccatcaagactagaagagctctggctgctggggtgtggaggatctgtctcggagaaatcctggagcacagactgtgaccccatctaactacaggctggtccttgctacctta

SEQ ID NO: 1733 - DNA, 554 bp, Cricetulus griseus
ctccttggtggaaggctgtagggtgtccctgaacctggcccggagcttccgaacggccagaccgcggctcgctgcagtcgcgtcagatacctcctgtgtccgcacgggatcgagccggcttcagagcaccgggccttccgaacccggtgggttcaagccacctccgaaacctgtcttggaggaccggcgccgagccgcggacgaaagtacaaggttcctgagtcccgaattcattcctccaaggggaagaacaaaccctctgaaatttcagctagaaagaaaagatatgctagccaggaggaaggtgcttcacattccagagttctatgttggaagcatactgcgtgtcacctcagctgaccggtatgccagtggaaaaaccatccagatcctggggatttgcatccagcggtcaagaaaagggcttggagctactttcacccttaggaacattattgaaggacaaggtgtggagatttgctttgaactgtataatcctcgaatccacgagatccaagtggtgaagttggagaagcggttggacgacagcctgc

SEQ ID NO: 1734 - DNA, 580 bp, Cricetulus griseus
tgatagtggagcagttgtccaaaacagacatctgaaaggaggtcaggagaacaggctgctgccaccgctttgtagagttgattgcattgtgtgctgcagccagtcagaaggggtgtacactgcaccatgaaggaaggcagcactggtaacaaggcaggtcctgctgcgccgctggccagcatttgaggagtaaagatggaatcagatttaactgggtaaattcccctgtcactctgggattctgtgaatcaggttgtaaattttactttaaatactaacatcagttgatactaacattctttataaagatataaaagtatattttaaaagcttttatgtatcatagctgtagctttttaatgtgggaaaatgtccaaataaaccgtccgatcactatatataatagatgctttcaaacaggcttctttttttaagggataccattctaaataacccaataatccggccttgttaatagctctccgatgcggggtactttcaaagtgctttcagcgcttgacagtatacctatccgtcaaggatcccccgctggttatatctccgacgccgtgtgctacct

SEQ ID NO: 1735 - DNA, 578 bp, Cricetulus griseus
atcggcgtttccactttaccagcgttcttgcaaactttgaccgccggcgccggaaatactacgcatgcgccatccctttgcatggtgagcctcctgattctagctgccgcagcggcaactgtggtgatcttgctgctagtcgtgagactatgggcggtcattcggccccttcacgtcgtttcccgagagtctctcacacccttgatagtagctggatccggtgaacataccactgagattctgaggctggttggaagcttgtccggggcttactcacctaggcactatgtcatcgctgactctgatgaaatgagtgccaagaaaattgaatcttttgaacatgctcgaaccaagagagactctcctcctgagcactgccttcaccgaattccaagaagccgggaagtgcggcagtcctggctctcctcggtgttcaccaccttgcactccatgtggttttcctttcccctggtttaccatctgaagccagatttggtgctgtgtaatggaccaggaacatgtgttcccatctgtgtgtctgccctgctccttgggatacttggaataaagaaagtgat

SEQ ID NO: 1736 - DNA, 458 bp, Cricetulus griseus
  misc_feature (207)..(236): n is a, c, g, or t
tcttccagtagatccttgatgctgttccatgcacattttccttccactccaaaattgttctctgaggagcaagtgtcttactccaagacttgcctgctgtggtctagtgacatactcagtagagccagtggcggagtccaatcctttccagatcagccatgtcaaagactgctagcaaagccaggcacagtggcgcacacctttagnnnnnnnnnnnnnnnnnnnnnnnnnnnnnngtctctctgatttccaagccagcctgcctggtctatagagtgagatcctgtctcaaataataagcaaaaggactgctagtcatcaatacatacaactgttgggcaacgaaaggtctctccagcagcaaagtgatagaaaaagaaattggttcaacttcatctccattggtgacggaacaacaaatggaagcttgactttgccaagacttgaattccttcggg

SEQ ID NO: 1737 - DNA, 579 bp, Cricetulus griseus
  misc_feature (75)..(103): n is a, c, g, or t
tataaagaacttacttcagcagctcattagagctacgtatggtgacactataaacagaaaaatagttgaccacgnnnnnnnnnnnnnnnnnnnnnnnnnnnnngctgactcagtgaagcgtttcagagatgcattttggcccaatggcattttagcagagactgttccatgcagagataaatctattcgaatgagaacaagaattgcaggaaaaacaaaattatttgcaattatgccagatgaactgaagcacattattggagctgagacaacacggaaaggtattcttcgtgtttttgaaatgtttcagcacaaccagttaaataggagaatggtgtatgtcttcttagaaagctttttagagaccttatttccacagtataaattccgtgaacttttcaacaaacttcattcaaagtcaaagcagatgcagaaatataaacagaaacttcaaagtactcaagcgccttctttacagaaaaggtgacactccaacctgtaaagccggtgttcatttgtccaggactaacaatgtggacacaccttccgcagtgtcatcataagctgttgcgtctgtac

SEQ ID NO: 1738 - DNA, 579 bp, Cricetulus griseus
  misc_feature (442)..(477): n is a, c, g, or t
  misc_feature (484)..(519): n is a, c, g, or t
aagtaggtttttaagatataatttgcatattatataacacaccaattataagtgatgtggttgtttttatatttagagaaacagacggttgtcaccatagtcaaagtgtagtatttatttccttttctcgggaagttctcttttacccatttgtatttaatctttgtgttagtcttacccctaggcaacaactgacctgatagtttattttattttgagactggatctcactatttagtcttggctgacctggagctcaccatgtagaccaaactgggtttgaatttatagagatctgtctgtctctggtatgctaggattgaagacatgtatttgaacatttcacatacatacacgtaattgctgtagtgttttgattctagcttctttcatttgagttacatgattttgtagtttaatcattattccctttttgctattnnnnnnnnnnnnnnnnnnnnnnnnnnnnnnnnnnnnaaaaggnnnnnnnnnnnnnnnnnnnnnnnnnnnnnnnnnnnnatttttttcttgtcctaagagaaccggccaggggcccacaaaaaaaataaatttttggga

SEQ ID NO: 1739 - DNA, 579 bp, Cricetulus griseus
tctataataaactagtgaatgtattctcctagtctcgtatctcatcttgcgccccttcttcatttctaatttaagcaaaagagtaaccctccccccaaaaaaagagaaagaaatcctatataatggttcaggaaagcttattgactaaatgggttgtaacgtcttggaaatccacaatactaaactttgaaacaatattatagcttacttttggagtctgtcacattagtaaggagacaggattatgatgttgcgtttttaatctttagggaaactagtaggatttctgggccaaggaatgtagctgagtttgtagagtgctagcctaacatacatgaagatctgagttctggctcagcatttagaacatagggacagaagttaaaggtcagcatagactacataagatgctatctcaaataaaatagagtttattatctaaggttgacaagattgtgaagatcagaagagatagcttgcagggatcaatcagttctgtgtgagttttggatcaactttccattatgtaattcttagatcaaccatgttggttgcccataatttctttattcaataaat

SEQ ID NO: 1740 - DNA, 569 bp, Cricetulus griseus
cgcgagcaaggtctcgcgggtgttgctcttcggccttcattctgtctgtagaaccctgatttctcatccccgttcccaatgttcccggaactcaataaccttctcggcaccaccccagacgggacggagcaggggaaactgactctactctgtgatgccaagacagatggcagctttcttgtgcatcacttcctctccttctacctcaaagctaattgtaaagtctgctttgtggcacttgtccagtccttcagccattataatattgtggcacagaagctgggtgtcagcctgacggcagcacgggagcaagggcagctcgtgttcctggagggtctcaagtcctcagtggacatcttcttccatgctcaggaggagcctcaccccctgcagttcctcatggaggccagtgcagggaacctacagtcgctgtatcagtttgttcgggactccctgaagcccgtggacagtggggaaaccccgtggaagttcccagtgctgttggtggacaacctcagtgtgctgctgagcctgggcctggaggcagttgctgtgctggacttcatgca

SEQ ID NO: 1741 - DNA, 580 bp, Cricetulus griseus
  misc_feature (521)..(541): n is a, c, g, or t
cgccgggatcctgctctccatctacgcctaccacgtggagcgggagaaggagagggacccggagcaccgggccctctgcgacctggggccctgggtgaagtgctccgccgccctggcctccagatggggtcgaggatttggtcttttgggttccatttttggaaaagatggtgtattaaaccagccaaacagtgtctttggacttatattttatatactacagttattacttggcatgacggccagtgcagttgcagctcttgtcctcatgacctcctccatcgtgtctgttttggggtctttgtacctggcctacattctgtactttgtgctgaaggagttttgcatcatctgcgtcaccacatatgtgctgaacttcattctcctcatcatcaattacaaacgactagtttacttgaatgaggcctggaagcgacagctgcagcctaaggaagactgacggctggcggattcccacccaactgtctcaaacacttctttcattaagtttattgtgcaannnnnnnnnnnnnnnnnnnnntacacaacagacacttttccctgagaatctataactgat

SEQ ID NO: 1742 - DNA, 581 bp, Cricetulus griseus
  misc_feature (396)..(425): n is a, c, g, or t
gggtaaagatcggtgtgactgggtccttagcaggaaagcaagagataatggagcctggcaccaaagtagtgtcaatgactgaaaacagaaaggaaatgaaatggataagggataccttggagataaacttgaaatttccagtcacaagcgttcctttcttctcattccaacatgatgtcccgaatgtttgtttttaatgtgtatggatgtttttaatgtgtcctgcatgtatatctgtgtgtgcctagtgccagtggaggccataagagggcattggatcctctgggactgaagttgtaggcagctgtaagcctccatgtgacctaaaacgtaactcatcatcatctggaggaacagccagggctctgttgtttttatttgttttttgtctttcannnnnnnnnnnnnnnnnnnnnnnnnnnnnngtcctataactcgttctgtagactatgctgacctcaaactcacagagatctgcatgcctctgcctcccaaaatgctggaattaaatgcatgtgccaccactgcccaacctgcagccagggctcttcacagtgagtcatctctccagtccccagttt

SEQ ID NO: 1743 - DNA, 581 bp, Cricetulus griseus; identical to SEQ ID NO: 1742
  misc_feature (396)..(425): n is a, c, g, or t

SEQ ID NO: 1744 - DNA, 528 bp, Cricetulus griseus
  misc_feature (477)..(493): n is a, c, g, or t
atgtatacaacattctgcttccttgtatatctgcacaccagaagaggggaccagatctcataacagatggttgtgagccaccatgtggtagctgggaactgaactcaggacctctggaagagcagccagtgctcttaacctctgagccatctctccagccccacacaagttcacttctaaatactcctatcaggaagctcacaatcatctgtaattcccccaattccagaagggatccaaaacctctagcctccaagggtacctatactcacatacacagacccatacacagaagtataattaagcatttataaaaataaatcttaaataaaaaagtccatgtgtgatagagcacatgtgtaattcaacactcaggaggtaaagtatagagccaaaagttcaaggccaccctgatctacatgaggagttcagatgcaagtatgctctttctacacagcaaattccaaattagtcacnnnnnnnnnnnnnnnnnatcttatcaaaaaaaaagaaaaaggaaaaaagatg

SEQ ID NO: 1745 - DNA, 540 bp, Cricetulus griseus
agagacaataacttttcttaccaaggctcaacgctctggcctctgcaagggccatcttctcattgtcactgtgactgtgacctcaccagacatacacacagctgctccctcagttgtccccgggggtgagggccccaccatgctgctatgacccttttcctgtctctcctctcctccctgtcctacaagccctccctgcatttgtccatgggttcatgaacctgctcctaaagctcctggattattgtgtgggagaagctttggccattgtctatggccagtgacagcaaggagagatggctataggggtctgctaaaggcttttgttaatcaaagaagccagatctggtgaaccaccagctcatccctatctccaggacttctgtctgaccacacaagtcagttctgatgctgggtgtgcctccacctcttcctcactcctgcctgtgtggccaggtgctgacccaccttgaggactgactcccagggaacactagatgctcatccagggctggtagcttatttttttgttttttgggt

SEQ ID NO: 1746 - DNA, 578 bp, Cricetulus griseus
  misc_feature (552)..(567): n is a, c, g, or t
gcgccccgcggtgcagatcccctccccctcccgttttcctcctccctccctccctcagccttgctctgggacgctggggagggggctgagcccgggtgcagagaactcatctgggtttccgagaatggtaaatacggctggccgtctctggaaaggccactgatctgcctcatgtaaagtatgctcagttcctttccagtggttttgctggaaaccatgtctcactatacagatgaacccagatttaccatagaacagatagatctactccaacgtcttcggcgtactgggatgaccaaacatgaaattctccatgcattagaaactttggaccgtcttgatcaagaacatagtgataagtttggaaggaggtccagctacgggggaagctcatatgggaacagtaccaacaatgttccagcatcttcctctacagccacagcttccacgcagacccagcactccggaatgtccccatcacccagcaacagttatgatacctccccacagccttgcactaccaatcaaaatgggagggagaacaacgatcgnnnnnnnnnnnnnnnngggaagatgtc

SEQ ID NO: 1747 - DNA, 576 bp, Cricetulus griseus
  misc_feature (280)..(299): n is a, c, g, or t
ttgaatccttgcagtagccgggtccaggttagttggccactgaccccaatctctgggttgtgccattcaaaggtgaagtaaggttggctcagggttgaaaaatgtgaggttgaaaaaagcatcctttaagttcaggacagcataccaagtgtgctctggtggcagggtatatgggtttgggactgtgggatgaatgtccattatctatttgtcaacttctctcaagtcctggaccagttgattatcaatggcatgaggctttttgacaggtggattgggnnnnnnnnnnnnnnnnnnnnttcaggtcgactgaataggcctcagtaccccaaggttcaacagacaccttatgtgggatgtaatacctgccttatcttcccggggcatggggtacaggtggacattaataggtcctgttccatgttttacgttcactaatattttttaagtcctatacctccagtttcagtcctggcttgagggaactgagaaccatatctatacgtcagcctctggctcgacctcgggttggggtagcctgtatttatctgtgaggtaatgagtcatgaacacctg

SEQ ID NO: 1748 - DNA, 580 bp, Cricetulus griseus
gggttctggaagcaaaggagctggcactacagcccaaagatgacatcgtagatagagcaaaaatggaagatactttgaagaggaggtttttctacgatcaagcttttgctatttatggaagtgtcagtggtctctacgacttcgggccagtaagatgtgctttgaagaacaatatcatccagacctggaggcagcactttatccaagaggagcagatccatggagatcgactgcaccatgctcacccctgagccagttctaaagacctctggccatgtagacaaattcgctgacttcatggtaaaagatgtgaagaacggggagtgtttccgcgctgaccacctgctgaaagctcatttacagaaattgatgtcagataagaagtgttctgctgagaagaaatcagatatggaaagtgtcttggcccagctcgataactatggacaacaagaacttggggatctttttgtgaactataatgtaaagtctcccactactggcaatgacctgtctcctccggtaccttttaatttaatgtgcaagaccttcattgagccacgaggaaatatgcctggatatc

SEQ ID NO: 1749 - DNA, 578 bp, Cricetulus griseus
ggagaacaggctggctggctggctggctggctctatccaatatcactattgctattgtatggaagttttgtaaatatttacccagaactaccagcacctgacagacactctcctggaaacaaacataccagacagtatcttacagaaagcaagctaagaaccataaagcatgcacacaaaggcctctagagaaacaaactgaatgcccaaatttaggttattacactaaaatgcacttaaagaacccttcagataattatctttatataaaatttatgtttattatctcagagttcacaatagtttaaaaagcagaaagaaaatttgatagcacataatgagaaacattacaaaaaaataccaaatataaccaaagataagcaggggctggagatgcacattacatgacttatggcaggggtggacaacacttgaacaaactgaagagtgtgcaaaacaggacctttcctgtctcaatacatctttcaaggcagtgggcagtggtagcgcacgccttttattccagcacgcatgaagcagatgcaggccgatctctgtgaattccatgccaatctggt

SEQ ID NO: 1750 - DNA, 575 bp, Cricetulus griseus
  misc_feature (2)..(16): n is a, c, g, or t
  misc_feature (77)..(102): n is a, c, g, or t
  misc_feature (426)..(440): n is a, c, g, or t
cnnnnnnnnnnnnnnntgaagccagcctggtctacatagctacttagctagtttcaggacagccagggctacacaannnnnnnnnnnnnnnnnnnnnnnnnnctctttaacagcacagtgcattcacagccacagtgtggggtgactttcaccacactttatacccagaccacttcattgtccccagaaaaagttacatattctctaaaaagtcatttctcatttttcagccccctcaaggcaccaacctgctggcctactgcctcgatcaactgtgcctgatctgggtgcctctatcaacaataatgtgtggccttttgtatctgattcctttcacttggaacagcattaatgaaacttttccatactgtaggaggaatcagtacctctttagtttttatgactgaacataaaacattccactgnnnnnnnnnnnnnnnccatagaaaaaacgctaatgatgatgaggcaggaggatcatgagttcagaccaacctgagatattttaacaaatgcatagacatattctactacaggaatatatccacatttttctccttaacaactgatgaaat

SEQ ID NO: 1751 - DNA, 579 bp, Cricetulus griseus
  misc_feature (450)..(476): n is a, c, g, or t
aattaagctggccctcaggttcaggctcagttcttgcagttggttaaaactgaacacatctgaatgactacttcttctctgaagagaagtgccctgtgcacttgcaaagtcaacagtatgccctgccatgacgtgtgatcttaacttccaatgttcatgtgtgctgaagtgtgaggaacattgagatatcattttctgaggagtgaaaagacataaaaaaaaaatgaatcctatagacagagatggggttaggggagggagaaaagtggtgaagagcacacactgctcttttgagatctgagtctagaaagaagcaggcttcagagaaaggttctaggcccatgcagagagccagtcaacatggctgcagtgcaggagagatactggtcttgtggtctgggaacctggaacctggaacctagaacctagaaacctggaacctggatcatnnnnnnnnnnnnnnnnnnnnnnnnnnncaagcaaagctgtgaacagaacctgttccagttaggtttacctcttgatttaaatcgtgtgtctgaggatctgcgattgagagagtgtatgaagtttctggta

SEQ ID NO: 1752 - DNA, 579 bp, Cricetulus griseus
acattgcacatgggaattcctccatcattgcagaccggattgcactcaagcttgttggccctgagggcttcgtagtgactgaagcgggattcggagcagacataggaatggaaaagttcttcaacatcaagtgccgatattctgggctccagccacacgtggtggttctcgttgccactgtcagagctcttaaaatgcatggcggcggccccacggtcactgctggactgccccttcccgaggcttacaccaaagagaacctggacctggttgaaaagggcttcagtaacttgaggaaacaaatagaaaatgctaggatgtttggagtgcccgtggtcgtggccatgaatgcattcaagacagatacagacgctgagctggacctcatcgcccgcctctccagagaacacggggcttttgatgctgtcaaatgcacccactgggcagaaagggggcggagagccttatccctggctcatgccgtccagagagcatcacatgcccccagcaacttccggctcctctatgacctcaagctctccattgaggataaaatcaggatcatcgcacagaagatct

SEQ ID NO: 1753 - DNA, 569 bp, Cricetulus griseus
tggacaggcttgagaaggagctaaaaaaacgaaatcctgaagttcggcacgtagatctggagatcctatagatatgatgaatgagtcacttgggacatagagacaacttcctccccactgaaggggagtcagtgccgtccagtgcttctcaagctagatgggatatttcatgtgctgagcaattgaagaggccacaggactaaaactcctttcttctaatcatgtcttcatgcttttgtagggacattggctgcttagatcacccacagtttctcaatttagccagtctgtattgaaccgtgaaatcatgtttcctttcttaacatggtaaaataagtgttccctgtggacttgtaacttaggttaccactgaagactttagtccatcgaagtcttctgatcttgaatattctggctaaaccttgtagtgtgtttagttaaacagtcactgtgttttgagttctgtctttcctggccagttgggaaagtatttctgtatatattgtgggttcgacctgaacactgagaggcactctcctgacttcattatccacagatgttcattccag

SEQ ID NO: 1754 - DNA, 579 bp, Cricetulus griseus
aaaccacgctgtcaaaaagtagccagttacaaacaaaatgagtatccccgcactgctgctgctgcgtcctttccagcatggaatcaacagccttcgggtgccttccccacggcttcactgcatccttcactcagggcggcaccctgcatcccaagccccaagtgctccactgtggaagccctctggacaccattgtactaagtggatgctgctgtctggtggcctgaggagagcattctgtatccaggccaccttgaaggaccacaaagagggactttctgataaagaacaaagatttgtggataaactttatatgggtttagtcagcgggcaaagagcttgcttagcagaggccataactctggtggaatccactcactctcggaagaaagagctggctcaggtacttcttcagagagtcctagtctaccaccgagagcaggagcggctcaaccaaggaaagccccttacatttcgagattgtctgggccccctggtgcagggaaatcaacctttatagaatatctttgaaaaatgctgactgatagagggcacagattatctgtgctagctgtggac

SEQ ID NO: 1755 - DNA, 570 bp, Cricetulus griseus
aaaaaaaacagggttaaaacaggcctataatcccagcatttgggaggctgacaaaaaaaggttataggtcccaggctggtctgggtacatagcaaattcttgtctccaaaaccaaaaataaacataaaagaacatcttcaaaaaaattatctttgctgtaacatataactgttgtagccattacaagtatacttttgagtattactatagtaacataaaatgatcattatgttcaaaaaaattaaaactcttaagtagaatacaaaactataaataggagtccaatgaggcaaaacatatataacaaagcaggtccatttctgtggatgtgttgcaaacatccaaatgggaaatcgtcaacaattaaacgtgatttaaattaaattaccacctttggagaaggttatgattatcttatttcacagttgtaaaaactcaagttccaattttaaaaaacaggtttacaggcaagtcttgaactgaaaacacaaatgtactaaacagtctattttgttgttgttgctgtttgtttctaaaacagtaaggtgcaatgtagggctcactaacata

SEQ ID NO: 1756 - DNA, 578 bp, Cricetulus griseus
tcaagcagctggtggctcggcctgatgttgtagagatgcacgacgtgactgcacaggaccctaagctcttggttcacctcaaggccacccggaactccgtccctgtgccacgccactggtgttttaagcgcaagtacttgcaaggcaaacggggtatcgagaagcccccctttgagctgccagacttcatcaaacgcacaggcattcaggagatgcgagaggccctgcaggagaaggaagaacaaaagaccatgaagtcaaaaatgagagagaaggttcggcccaagatggggaagattgatattgattaccagaaactacatgatgcctttttcaagtggcagaccaaaccaaagctgaccatccatggagacctatattatgagggcaaggagttcgagacaaggctgaaggagaagaagcctggagatctatctgatgaactaaggatctccttagggatgccagtaggacccaatgcccacaaagtccctcccccatggctgattgccatgcagcgatatgggccacccccatcctacccaaatctgaaaatccctgggctgaattctcctatt

SEQ ID NO: 1757 - DNA, 579 bp, Cricetulus griseus
caaccgggaagagcaagaggagcttatggactttgaaagagatgaagagcgctcggccaatggtggctctgaatcagatggggaagagaacattggctggagcaccgtcaacctggatgaagagaagcagcaacaggatttctctgcttcctctaccaccatcctggatgaggagcccatcgtgaacagagggctggctgctgccctgctcctgtgtcagaacaaagggctgctggagaccacagtgcaaaaggtggcccgggtgaaggctcccaataagtcactgccctcagctgtgtactgcatcgaggataagatggccatcgatgataagtacagccggcgggaggagtacagaggcttcacccaggacttcaaggagaaggatggttacaagcccgatgttaagattgagtatgtggacgagacaggcaggaaactgactcccaaggaggccttccggcagctgtcccaccgcttccacgggaagggttcaggcaagatgaagactgagcggcggatgaagaagctggatgaggaggcgctcctgaaaaagatgagctccagtgatacgcccct

SEQ ID NO: 1758 - DNA, 579 bp, Cricetulus griseus
agatgtctgacatggaggatgatttcatgtgcgatgatgaggaggactacgacctggagtactccgaagatagtaactctgagcccaacgtggatttggaaaatcagtactataattccaaagcattgaaagaagatgacccaaaagcagcactaagcagtttccaaaaggttttggaactcgaaggtgagaagggagaatgggggttcaaagcactgaaacagatgatcaagattaacttcaaattgacaaactttccagaaatgatgaacagatataagcaactcttgacctatattcggagtgcagtaaccaggaactattctgaaaagtccattaattctatccttgattatatctccacttctaaacagaattctgattttttatgtcagatggatttactgcaggaattttatgaaacaacactggaagctttgaaagatgctaagaatgatagactgtggtttaagacaaacacaaagcttggaaaattatatttagagcgagaagatatggaaagcttcaaaaaattttgcgccagttacatcagtcttgtcagactgatgatggagaaga

SEQ ID NO: 1759 - DNA, 523 bp, Cricetulus griseus
  misc_feature (22)..(78): n is a, c, g, or t
  misc_feature (101)..(160): n is a, c, g, or t
  misc_feature (182)..(236): n is a, c, g, or t
  misc_feature (261)..(403): n is a, c, g, or t
  misc_feature (428)..(446): n is a, c, g, or t
acacacattcgataggtatgtnnnnnnnnnnnnnnnnnnnnnnnnnnnnnnnnnnnnnnnnnnnnnnnnnnnnnnnnnccctacttgtagtagtgtcaaannnnnnnnnnnnnnnnnnnnnnnnnnnnnnnnnnnnnnnnnnnnnnnnnnnnnnnnnnnnccatctctcatactcctacctnnnnnnnnnnnnnnnnnnnnnnnnnnnnnnnnnnnnnnnnnnnnnnnnnnnnnnnttcttaatcaatactttagctatannnnnnnnnnnnnnnnnnnnnnnnnnnnnnnnnnnnnnnnnnnnnnnnnnnnnnnnnnnnnnnnnnnnnnnnnnnnnnnnnnnnnnnnnnnnnnnnnnnnnnnnnnnnnnnnnnnnnnnnnnnnnnnnnnnnnnnnnnnnnnngaaaccgactacaacaaaaaactgnnnnnnnnnnnnnnnnnnnttctacaaactcttctaatcccaacattttcagcaaacgagcttatactattttatattttatttgaagccacactt

SEQ ID NO: 1760 - DNA, 393 bp, Cricetulus griseus
  misc_feature (6)..(38): n is a, c, g, or t
  misc_feature (92)..(127): n is a, c, g, or t
tggtannnnnnnnnnnnnnnnnnnnnnnnnnnnnnnnncctttctcattctaaccactgcaatatataaggagaaacacagtacttacttannnnnnnnnnnnnnnnnnnnnnnnnnnnnnnnnnnnaattttatccagtaattttatgatgactattggttaaacttttaagacctttttgttgacaatatgttacataactaggaaaattatgcaaaattaatctgaacaaattaaggcttgataatttttaaattttctgtttgcaacatatggttgcaatcattcccagaaagtgctttttcctggcacctactatgcacttggccatctctagatgaagctgaataattccttcctagcctgcagctggcagaaattcatggaagtag

SEQ ID NO: 1761 - DNA, 579 bp, Cricetulus griseus
  misc_feature (7)..(34): n is a, c, g, or t
  misc_feature (545)..(569): n is a, c, g, or t
gagatgnnnnnnnnnnnnnnnnnnnnnnnnnnnngcacctgaactcttgccatctgactgtcaccagtttggggaggaaaagaggcctctcctaagaatgtccccagctctggaaatcatgctcccctcacttgtaataatcagctaaggaatcctgaaccaagtgaggaacaaaggctcatgaggccgggactcccttcactgtctttctcaaaattgggttgttaagaacaaaaccaggcaggaccagtggcgcccgtgctcagaagggtcctcccggcagcttgacactgactggttctccgtctccgtgttgatttggggagaaatcaattttgtcttgggattttgtatgttataggaatccttagagaatgtgattccttctgatggggagacagggcaaattattttaatgttttgtattttcacctttataaagatgaaatcctcaggggtgaagaactggttgcataattttctgaatttcaggcactttgtgctgtatgaagacccggatatttaagccttttgggtagtaaggnnnnnnnnnnnnnnnnnnnnnnnnngccgcgacag

SEQ ID NO: 1762 - DNA, 567 bp, Cricetulus griseus
taatgtacacgtgacatttgtagcattctttaatccattttctgaaatgtatttgacattcaattacagtcagccttttgttttgtagaacattggtactattggcacagtctaaagccattaataattttatccatctgataattttacagtaagtaggcctcagttttgatagtcatcaaagaaacattgtccaccgtgacatttagattaagggcatttttaatagttgtatggctttttactgttagactaatggaaatcactaaagaaactgtagcatttcaaattatgcataagtatatagccattttgcagtttctttatgatgaaatacttaaactcattgttcttggtagatatgcttttgtttttctcataaaattataccagaaaatttcttctttttaagattttttagttagcagggatcaaaagcattttgtggaaacaaaccagctagtaacagtgcagcaacacttttaatttagctacaaattctccttttccaacttatgaaatccaaactgaattgtacattcaatacagagaaagggtggtcatctc

SEQ ID NO: 1763 - DNA, 119 bp, Cricetulus griseus
cattagcaggacattacggaatgccaaacagtccagacactgctgtactcttgttcagctgtgaacaagggaacactgtggctcagagaactcagactcattgaggagttaggaatgca

SEQ ID NO: 1764 - DNA, 580 bp, Cricetulus griseus
  misc_feature (276)..(297): n is a, c, g, or t
gaatttcatctgaatgagagtggtgacccgtcatcaaagtccacagagatcaaatggaaatctggaaaggatttgacaaaacgctcaagtcaaacacagaataaggccagcaggaagaggcagcacgaagagccagagagcttctttacctggtttactgaccattctgatgcaggtgcagatgagttaggagaggtcatcaaagacgatatttggccaaaccccttgcagtactatttggttcctgatatggatgatgaagaaggagaggcagannnnnnnnnnnnnnnnnnnnnngaggaggaaggcttggaagatattgacgaagaaggggatgaagatgaaggtgaagaagatgaagatgatgacgagggggaggaaggagaggaggatgaaggcgaggatgactagcacagaagactgatggattccaaccctcttttttattttcttttattttcaattttctccagtccctgggagcaagttgcagtcatttccctcccctccccaatccctcttgtgctcagtcgccctgtttttgaggtctcttctcaacaccatggctctcaacttattt

SEQ ID NO: 1765 - DNA, 460 bp, Cricetulus griseus
ctcccatctaatcacgtcattgaccgctggcttggagagcccatcaaagcagccatcctccccaccagcattttcctaaccaacaagaagggatttcctgttctttctaagatgcagcataagctgatcttccgactcctcaagttggaagtgcagtttatcatcacgggcaccaaccaccactcagagaaagagttctgctcctacctccagtacttggaatacttaagccaaaattgtcctccacccaatgcttatgaactctttgccaaaggctatgaagactacctgcagtccccacttcagccactgatggacaatctggaatctcagacatacgaagtatttgaaaaggaccccatcaaatactctcaatatcagcaggctatctacaaatgtttgctcgaccgagtgccagaagaggaaaaggagaccaatgtccaagtactgatggtgttgg

SEQ ID NO: 1766 - DNA, 491 bp, Cricetulus griseus
atttgtagcaaaatcagcaacattattaagcagttcaagctgagctgtagcaagctggctgcctctttccagagtatggaagtgaggaactctaactttgctgctttcattgacatattcacatccaacacttacgtcatggtcgtgatgtctgatccatccattccttctgcagctactctgatcaacatccgcaatgccaggaaacactttgaaaagctggagagagtggatggaccaaaacagtgtcttctcatgcgctaaacattgccgaatattgtttcacacaaaaaattgaaacactgtttctttattgttggactcctatgtgtagactctaaaatactgggatgcttaccacttctgtatttcttctctactccccagtcttaccgattaactctgaatgctatttattcaaatagccagtgaggagttacaagatcgggtgtccatgaaggtggggtaacgtatacgtaggtgataatacg

SEQ ID NO: 1767 - DNA, 579 bp, Cricetulus griseus
cacaaatacataagcacagtaacatccaccagtaggcttgtgcccaaaccaaaatacggcatcctcctcttacaaatctgttagtaaagagcatacaaaccttagtaagtatttttaatacaaagaactaaaagaattgcactgtaccttttgtttgactctaatcaaatgaagcttagcattgtcatggtggacagaatatgttgttggttccctagagatgtcctcaccataatccccagaacctgtgaatgaactgccttgtatggtcagatgctcttatcagtataattaaatttcagatgttaagatggggaggttgtcctggatgtctaggtggggccagtgtcatctcagtgaacccatacaagtgaaaggaggaggcagaggctagaggaaggctctattagacactcctctctggtggctatgatcctataccttatagaagaaacagaatggaggaaaagttgactttggcttctgattcaaggggatgccattcatcatagcagggaaagtggctctttattgctcatagtgtgatcaaatatcccacaacacagatggatttgtgta

SEQ ID NO: 1768 - DNA, 579 bp, Cricetulus griseus
  misc_feature (475)..(508): n is a, c, g, or t
  misc_feature (547)..(569): n is a, c, g, or t
cattgaccttcactttgctgtccctctactgtccttgccacagccccgacgctgctgatagcacgtctttcgatgtccagttaggagatatcatcctgacagcgacagacgggcattgctggtccctgtgctcacttcacccacacaccttccagccaacagtgggctcagagaaggttctcttgcggctatcaccagtgggaaatctactcagttccaataggaaagtgaggggagagcagagaacaagctctctcaactccatgcgttaaggaaactctaacctcaaataaacaacctagtacctggtgaagatggagccacatgttggggaaagaagcatgggtgtggtgtggacagaatacagatagaaggtgtttcaactaaaatggtcagggactggactctggggaaagtgggagctgaagggaccagctgggagaaggcaatctgtgggaaggtgacggcatgtgcnnnnnnnnnnnnnnnnnnnnnnnnnnnnnnnnnncccaaactaaaagcaggcaaggtcaggcgttggtggggnnnnnnnnnnnnnnnnnnnnnnntgatgcagag

SEQ ID NO: 1769 - DNA, 579 bp, Cricetulus griseus
  misc_feature (85)..(114): n is a, c, g, or t
gcaccttccaccagtgtgtgcgactcagcaagtttgactctgaacgaagcatcagcttcatcccacctgatggagagtttgaacnnnnnnnnnnnnnnnnnnnnnnnnnnnnnntccttcctttccgggtgatcccattagttcgggaagtgggacgcaccaaactggaggtcaaggtggtcatcaagtccaacttcaagccctcacttctggcccagaagattgaggtgaggatcccaaccccactgaacacaagcggggtgcaggtgatctgcatgaaggggaaggccaagtacaaggccagcgagaacgccattgtatggaagatcaagcgcatggcaggcatgaaggaatcacagatcagcgcagagattgaacttctgcccactaatgacaagaagaagtgggctcgaccccccatctccatgaactttgaggtgccattcgcgccttctggcctcaaggtgcgctacttgaaggtatttgaaccgaagctgaactacagtgaccatgatgtcatcaaatgggtgcgatacattggccgaagtggcattaatgaaacccgctgctagctgccta

SEQ ID NO: 1770 - DNA, 580 bp, Cricetulus griseus
gaaggcagtgggagggagaaccccttccaaaccggcctctgtgaagaaagcagccgccgcccagagcagcagctcctccgaaagttccagtgacgaggatgagaagcccaagggcaagggcactgctaaaccacaggccagcaaggccaatggcactccagcttctcagaatggaaaggcaggcaaggaaagtgaggaggacgaggaggaagaagagacgaaaatggcagtttccaagccaggaaagaaacagaagcggaatgagacagcagaggaagcagggacgcctcaagctaagaaagttaagctccagactcccaacacatttccaaaaaggaagaaagcagaaaaaagggcatcttccccattccgaagggtcagggaggaggagattgaggtggatgcacgcgtagcagacaattcctttgatgccaagcgaggtgcagctggagactggggtgagagagccaatcaggttctgaagttcaccaaaggcaagtccttccgccatgaaaaaacgaagaagaagcgaggcagctaccggggaggctccatctctgtccaggtcaattctgtcaag

SEQ ID NO: 1771 - DNA, 579 bp, Cricetulus griseus
ttatcagaatgaatgacacaaggctttaccatgaggctgacaagacctacatgttgcgagaatatacatcacgagagagcaaaattgctaatttaatgcacgttccaccttccctcttcacggaacctaatgaaatctctcaatatttaccaatcaaggaggcagtttgtgagaagctagtatttccagaaagagttgattctagccctgcggactcacaaagcacaccctcggaatagaatgtggtacagcctactctccgtgtagagcctgcctggacatcttggctgtttgtagggatatttttattatgagaattaatttccttgcttatgctcagattttctgtggccttaaaggaaaataaaagagtgttacaggcaggttccacttaactcccatttatattgtctgtcttaaagttcctactggagttgtatgctctggagcaaaatttggattcctaaatgatcccaaattgtgacctcagcagcagtgatgtgtatgtgtctcaagaggggggacatgatctgcatccatcatgaagcatagtcttctactgtgaagaggctaaattgt

SEQ ID NO: 1772 - DNA, 578 bp, Cricetulus griseus
atagccattgtcatcgtgcttctcatcatgtgcgtgtacaccaagtccatgttcatcacgctcatggccatgtttgccgtcatcagctccctgatcgtctcctacttcctctacagagtcgagtttaactttgagtttttcccctttatgaacctcactgcactcatcatcttggtcgggattggtgcagacgatgcctttgtcctgtgtgacgtctggaactacaccaaattcgacaaaccgcgtgcagacacatcagaagcggagagcatcaccttgcagcacgccgccctctccatgtttgtcacaagcttcaccactgccgccgccttctacgccaactacgtcagcaacatcacagccatcatatgcttcggggtttacgcagggacggctatattggtgaattacgtcttgatggtcacctggcttcccgctgtcattgttctgcatgaacggtacctcctcaatatattcagctgcttcagaaagccccagccacaagcctatgacaagagctgctgggcggtggcctgccagaagtgccgcaaggctctctttgccatctcagaagcgtc

SEQ ID NO: 1773 - DNA, 580 bp, Cricetulus griseus
  misc_feature (75)..(113): n is a, c, g, or t
  misc_feature (216)..(231): n is a, c, g, or t
  misc_feature (548)..(548): n is a, c, g, or t
ggaactcccaggatgattatgatgaggagaggaaaacaaacctttctgcagttgttgcagcacaaagcaattggnnnnnnnnnnnnnnnnnnnnnnnnnnnnnnnnnnnnnnnacacatgagctctgctacaatgctgcctgtgcgttaatagggcaaggccagctgaaccaggccatgaaaatcctacaaaaggctgaagatctttgtcgccgtnnnnnnnnnnnnnnnnctgatgggactgaggaagacccacaggcagaactggccatcattcatggtcagatggcgtacatcctgcagcttcagggtcgtacggaggaagctctgcagctttacaatcagataataaaactcaagccaacagatgtggcactgcttgctgtaatcgcaaataacatcattaccattaataaggaccaaaatgtctttgactctaagaagaaagtgaaattaaccaatgcagaaggagtagaattcaagctttcaaagagacaactgcaagccatagagtttaacaaagctttgctggctatgtatacaaaccangcagaacaatgccgaaaaatatctgccagctt

SEQ ID NO: 1774 - DNA, 435 bp, Cricetulus griseus
aaacatttgttggtgtaaggcatgacaacaggcatgatgcaaaatgcttatgttgcgtgttagaaatgagccatgggtgagcatttctagaaacactttggattcattctacatttgacttttatttttttggctgttgttacattgagaaattttttatgatgtcaattttgtatcccacatttaattacaactctgtgggtcacaatttacgaaattgtatccttagatggcaagatctattttatctttgtgtatttaagacatcaagtaaagcttgtattatttatataaatgaaattgtcacagtcattttatatcctttcctttaagtaacagtacataatccggagaatcaaagctacttgatagcctataaagattcacaactcatcatttcatcagctaagtaagtttttgtaaactctctcatta

SEQ ID NO: 1775 - DNA, 582 bp, Cricetulus griseus
  misc_feature (263)..(280): n is a, c, g, or t
agaaaagagaaagcttggacatagggaatctttccatttcccctgttgcttgcaacagctgtaaaggtcccaaatactgggatctggggtgctgttaggcagccatttggattggctatctcagggatttgattgtaaaagtgagtaagtttagtgctcttcaagttgggtgccaggttttctaggaggcatcccaagggggaatgagaggggatggatgtccccgttcccatggatgccctttaacactgggtcatgggggnnnnnnnnnnnnnnnnnntgagctcaaggtcaagctgttgtcagcttcttacaaagtcatcaatcccaccatgagctaatgacctctgtagggagcagagtaaatgtatgttgttgatatgggcacacccatgctgaagacttcaagggctcagctcaatgggtttctccactagcccatgctcggggagtggcaaagctttctctggggggtctaagtatgcctgtttttgaaaaaatgatcagtgtgtgcagactggcaactgcagctctcctcccggatatttacaactgagagtgctttcctaccgaagcctccca

SEQ ID NO: 1776 - DNA, 567 bp, Cricetulus griseus
cccaaaattttggagtttaattgccgttttggtgatccagaatgccaagtaatcctcccacttcttaaaagtgacctttatgaagtgattcagtccaccctagatggcctgctgagtacatctctgcctgtttggctagaaaaccactctgccgtaactgttgtcatggcaagtaaagggtaccctggagcctacgccaagggtgtagagataacagggtttcctgaggcccaggctttagggctgcaggtatttcatgcaggcactgctcttaaagatggcaaagtggtgaccagtgggggcagagtcctcacagtaacagccgtcggggaaaatcttgtgtcagcccttgaagaagccaagaaaggactcgctgctataaagtttgagggagcagtgtataggaaggatattggcttccgtgctgtggccttcctccagcagccaaggggcctgacttacaaggaatctggggtagacattgcagctggaaatatgctggttaagaaaattcaacctttggcaaaagccacctccagaccaggttgcaatgttgaccttggagct

SEQ ID NO: 1777 - DNA, 579 bp, Cricetulus griseus
ttttggagacattaagatggtactgaagattgcttttgttcctccccaaccccctatttgtatgcacgaaaagaggaatgacaaattgaacattttcagtgtagtacctcagcatgtgtgcaggcagggagtctgtcgtaaagtccaacctgggatgagatgtggccgttcaatttcattccctaaatcagattaatagaagctgtcctaccaaagaatctatcaaaacagttgtctctctcgtttgcagaggtgtgagaaatgaagaggaggcatcagagcttttgactagtcacattttcacaaccagcatgttgagtgagcctgacaaatctcaagtacttctgccagacttttctataatgttcagagtccccacagcacccatttccacagtgcaaggtgacatagactagtacttgctacaaatccacctctttagaagcatgtaagaatctatagcagtggttttcaacctgtgtgtattgaccccttcgggggtcaagggacccttttcatgggtgtgcatattatatttacattataattcagaacagtagcataattacagttatttaa

SEQ ID NO: 1778 - DNA, 479 bp, Cricetulus griseus
agtaaaggtgacaaactgtaggaagacacatttgatggcattgcagtcatccgccactctgctttccatataggagcccagcaactcagacctgagctgagggaacaacaaggcactgatgagagctccaggactatagccacgcttctttaatagcatcatgattggagccaggttgaattttttaaaaaagagagttgggcagtacttctcccccaaaacatttctcctgtcggcaatctttttatcactatcaatttcaacactaatcattttctaattttgacatgatcaaatttcagtactaaaaaaaaaaaagaattccaaaatctctatgtgatgccatcaggtctttggaaaacatggcttctcttccttgagaacaaacaaaggaattgcaacagacacaatatagccttgctctgagtttcagtccggggacttgtgaccatgaaagatagcttgatatgaaaactaag

SEQ ID NO: 1779 - DNA, 579 bp, Cricetulus griseus
  misc_feature (387)..(404): n is a, c, g, or t
  misc_feature (412)..(412): n is a, c, g, or t
  misc_feature (569)..(569): n is a, c, g, or t
tctatactttaattttaagaacttagagtaatagttcacaacttttaatttgtcttatgttttccattgctgttgtttattgtcatatcctattatttgccttcacctctgtcttaattagcttttcctttgctttgataaaacaccaggactaaaagcaacttggaaaggaaagggtttatttcacgttacagcttataattgatcactgagggaagtcaggacagaaacctggagatagaaactagagcagaagccatggaggaacattgtttactggtggcttggttagtctgctttcttacagcacccaaacccaccagcccaggagtggtactaccacagtgagctgggctcttctacatcagttgtcaatcaagaaaatgnnnnnnnnnnnnnnnnnnttgctcanaatggtttcttcccagatgatgactgagaagctaatttaaaaaaaaatggtgccaagtaccacaagagtaacagaactgtgctgttttctggaattttgttttttacttttttgttgttgtagtagtagttgttgtttgtttggggttttttttggntagttttttg

SEQ ID NO: 1780 - DNA, 558 bp, Cricetulus griseus
  misc_feature (534)..(534): n is a, c, g, or t
gacccgaccctcagctggcggtcaccatgggcttcacagggttcgggaagaaagcccgaacatttgacttggaggccatgtttgagcaaactcgaaggacagctgtggaaagaagtcggaaaacactagaagcaagagaaaaagaggaagaaatgaacagagagaaagaattaagaaaacaaattgaagatgttgaaccaacaccatcaagctccagtgcaatcagagagcagtcaaaatcatcatccagggacacaagcagcagtgacagtgaagacagttctgattcatctgatgatgagttaattggccctcctttaccccctaaaacggtaggagaaccagttaacactgtggatgaagatatccttggccctttacctgcacccctcggtgaaggagacgaagatgatgatgatgacatagaggatgaaggagaagaagaaaaccccgtccaaagaattcctgactctcatgagataacactgaagcatggcactaaaacagtttctgctttgggtttggatccctcangtgcccgtttggtcactggaggat

SEQ ID NO: 1781 - DNA, 578 bp, Cricetulus griseus
agttgccggccgtaactcctcaactcggcagctggctgcctagacatgtcctgacaaacttcgattctcctcgagaccttctcttttctctccagacctcgtgcgcccgctctctctccacctcttttggtgctcaaactttccccgggtcggaagccactggaaatgcgaccacctaagtcccgacagcactggaggctcgcactctggttggggatatgttgaagatccaagggaggcaaagttggtatttcgagcccggctcctaacagaaatccaaacggcgtgggatttacccaactgccggggactgtaaggaagagcatcgaggaccgggctgctgtggtggccaggagttaaacaatggggagacaattggccttgcttctgcttctgctcctctttctccagcattttggagatagtgatggaagccaaagacttgaacccaccctatctctacagtttacacacttccagtacaatgtcactgtgcatgaaaactctgcagcaaaaacctatgttggccaccctagaaagatgggcatctacatcttagactcctcatgggaaataag

SEQ ID NO: 1782 - DNA, 297 bp, Cricetulus griseus
  misc_feature (2)..(65): n is a, c, g, or t
annnnnnnnnnnnnnnnnnnnnnnnnnnnnnnnnnnnnnnnnnnnnnnnnnnnnnnnnnnnnnnnttaagacataaatattttcattaataatatataagctgaagtagctagaggtaaaaatgtactgatgtctgaaaccttgagattttccagtaagttgacagactgatggatgtacagatgtttagatatttaaagtaacaataaagagatatagaggaaggtcagttgctcaatctgtggtgatatttatgtgtgagttctctgtaaaaagttaactttggtatttataact

SEQ ID NO: 1783 - DNA, 110 bp, Cricetulus griseus
ggtggtctggtgtggtctcctatttacttgtgatttagtctgttacagttagctacattccaagtaagaagaaaggacagtagagccttacatctctcaagggcttgtgg

SEQ ID NO: 1784 - DNA, 579 bp, Cricetulus griseus
tctttaagcgcgtttggctggcccgccggcgctcggaagtagaggcgcttccgtcgttgttcttgaagctgtggtgactgtgggatcagaatctttgagtgtgagaaattttacagttagccaaaatggctgaaaatggagataatgaaaaaatggctgctctggaagccaaaatctgtcatcaaattgagtattactttggagacttcaatttgccacgagacaaatttttaaaggaacagatcaaattggatgaaggctgggtgcctttggacataatgataaaattcaacaggctaaaccggctgacaacagactttaatgtgattgttcaagcactgagcaaatctaaggcaaaactcatggaagtgagtgcagataaaactaaaatcagaagatctccaagcagaccccttccagaagtgacggatgagtataagaatgatgtaaaaaacagatctgtttatattaaaggcttccccactgatgcaactcttgatgacataaaagaatggctagatgataaaggtcaaatactgaatattcagatgagacgaacattgcacaaaacatttaagg

SEQ ID NO: 1785 - DNA, 601 bp, Cricetulus griseus
  misc_feature (22)..(96): n is a, c, g, or t
catcgtgtggaaatgttgatcnnnnnnnnnnnnnnnnnnnnnnnnnnnnnnnnnnnnnnnnnnnnnnnnnnnnnnnnnnnnnnnnnnnnnnnnnnntcagtagcatagctgtgcctggcacatcaaacccccaacagcgccagctgcccagagcacagtctcagcactcatctcctggggaaatagcagcatctcctcaaggcttagacaacccagccctgctccgagacatgctgctggccaacccgcatgagctgtccttgctgaaggagcgtaacccacccttggcagaagctctgctcagtggagatctcgagagattctctcgggtcctggtagagcagcaacaggaccgagctcgaagagaacaagaaagaattcgtctattttctgctgacccctttgatctggaagctcaggcaaagatagaagaagatataaggcagcagaacatcgaggagaacatgacgatagctatggaggaggccccggagagcttcggccaggtcgccatgctctacatcaactgcagagtgaacgggcaccctgtgaaagccttcgttgactcaggtgcccagatgactattatgagccaggcttg

SEQ ID NO: 1786 - DNA, 579 bp, Cricetulus griseus
  misc_feature (496)..(496): n is a, c, g, or t
aagcaagcatgcataggtcagagaggagccagaagtctgttccctccaccatgtgtgtcctgggaatccaactctggtcaacaggcttggcagccatcaatttttcccgggctgtcttaaccagcacacagtaaaaaagtctctaaaggtcatgaacatagagtgctgacctaggacttatcattcagtcaacagactcccacatggaaaaaaagtgacaaagaattatatgggctgctctatgtctggttactgccagttttcacagtgattttagaatgtttaagctggcctctaggaggagaaaagagatttttcataaacacttttacaacatttcaagattaaagcacaaagcaaaacccccaggcattcaatggcaatagtgttgtcctggaatatctcacagaccagctccagcaggcaacctttggtacagctccttcacctcctcgtgtttcgctttgcctttgtccacactctgtctgcgcatctncgccattttaacacaccactcctcaaatttcaaattgtctcgatctaccagctcttgaagaaaggctgggacttgaaccattg

SEQ ID NO: 1787 - DNA, 577 bp, Cricetulus griseus
  misc_feature (228)..(283): n is a, c, g, or t
tagagttaggagtctccagggaaaagggaagaggatattcggacactgtaagacttagctaagcacatgataatctaagccaaaggggagtgttgaggttgtaacatccagcagggctaggtgcaataccacagtagatgggagtcttcagagagattccttcctgaagctcttgtgctaactccctgcctggattcacacacagcaggataatcttataatcatagnnnnnnnnnnnnnnnnnnnnnnnnnnnnnnnnnnnnnnnnnnnnnnnnnnnnnnnnccctttacaggaaagtcttaagtccttaactaggactacagcacagcacttctactgctttctgtactgttccaggggtaggttaccatttaataaaaatccactctctcctaatggggactgaaggacttacaaacacactcttaagaccaatacaacagtgaatacactagctgctccattttcattccactgctttgaaatcttggaaccatgggtgtcgatacccacagaaaaggtgggtgggacctcactgtgatgtcccaaaagaagccacgctgtcctaggtgctcc

SEQ ID NO: 1788 - DNA, 579 bp, Cricetulus griseus
  misc_feature (441)..(458): n is a, c, g, or t
gaaaaattaaagatgcatttgagcgaaacccagaacttcagaacctgctgctagatgacttctttaagtcagcagttgacaactgccaggactcctggcggcgggtggtcagcactggggtgcaagcaggcattcccatgccctgcttcactactgccctctccttctatgatgggtacagacacgaggtgctaccagccaacctcatccaggctcagcgggattactttggggctcatacctatgaactcttagccaaaccaggagagtttatccataccaactggacaggccacggtggcagcgtgtcatcctcttcatacaacgcctagtaggactgtgtcgtcaccctccctcccaccaacaggacagtccctgtggtatgcagcactcctctttgtcctagttcctgctcagatcttttagccaagtgtcggcttnnnnnnnnnnnnnnnnnnctgaagtcttgtcccatagttctgaaccaccatgtgccccgcctcaaccttttgcactgcccaggaacttatctcgtgcagcactgcgtgactgctccctgactgagctgtgccatgtggg

SEQ ID NO: 1789 - DNA, 504 bp, Cricetulus griseus
  misc_feature (24)..(60): n is a, c, g, or t
  misc_feature (70)..(140): n is a, c, g, or t
  misc_feature (158)..(301): n is a, c, g, or t
  misc_feature (303)..(338): n is a, c, g, or t
  misc_feature (343)..(373): n is a, c, g, or t
  misc_feature (438)..(457): n is a, c, g, or t
tcctcattagagtgacatcgtctnnnnnnnnnnnnnnnnnnnnnnnnnnnnnnnnnnnnngatgcccatnnnnnnnnnnnnnnnnnnnnnnnnnnnnnnnnnnnnnnnnnnnnnnnnnnnnnnnnnnnnnnnnnnnnnnntgctttattgtgggagcnnnnnnnnnnnnnnnnnnnnnnnnnnnnnnnnnnnnnnnnnnnnnnnnnnnnnnnnnnnnnnnnnnnnnnnnnnnnnnnnnnnnnnnnnnnnnnnnnnnnnnnnnnnnnnnnnnnnnnnnnnnnnnnnnnnnnnnnnnnnnnnncnnnnnnnnnnnnnnnnnnnnnnnnnnnnnnnnnnnnagaannnnnnnnnnnnnnnnnnnnnnnnnnnnnnngccataaagtgccggctgctgccctgctggtgccttgcccctgtgagggcactgggccagcccannnnnnnnnnnnnnnnnnnnaagaaccctttcttcaggtttggggcttacccttaaattccaggggc

SEQ ID NO: 1790 - DNA, 306 bp, Cricetulus griseus
ggccttcaacatggcggctgtggtactggcggaggctacggtgacggtctggcccggggtggatagagttggaagagggggtgttcgttctccctaggggcagcgggagctaggcggggactgagcccgggaggccgggcggagccagcacctttcagctttctggacggcagcggcattcaggttctaaatggcttctaagaagttgggttcagattttcatgggactttcagttaccttgatgatgtcccattcaaaataggagacaaattcaaaacaccagctaaagttggactacctattgg

SEQ ID NO: 1791 - DNA, 502 bp, Cricetulus griseus
aatccacgctacaggatttaactatcagaacgaggatgagaaagtcaccttgtcctttcctagtactctccagacaggtaattatcctttccaatactttgtattttgtttagtaagccactctttggaagtggtcactgtcagtatcttgttatggtttgatggccttggagatttaaaaccaagtaaaagtgtacaggaactttaaagatagattttgttggcgagctgaatgacaaaatgaaaggtttctatagaagtaaatacaccacccctgctggagaggtgcgctatgctgctgtcacacagtttgaggctactgatgcccggagggcttttccttgctgggatgagcctgctatcaaagcaacttttgatatctcgctggttgttcctaaagacagagttgctctatcaaacatgaatgtaattgaccggaaaccatatcctgatgatgaaaatttagtagaagtgaagtttgcccgaacacctgcgatgtcta

SEQ ID NO: 1792 - DNA, 507 bp, Cricetulus griseus
taccctagccatgaagagccgcttcagcaccggtgaccttcgcgctgggcttgcagagctgaatgcgagcttgctaggaatgagagtaaataacgtttatgatgtggataacaagacataccttatccggcttcaaaaacccgattttaaagctaccttggtacttgaatctggtgttcgaattcacacaacagaatttgagtgggctaagaacatgatgccatctagttttgccatgaagtgtcgaaaacatttgaagagtcggagattagtcagtgcaaaacagcttggtgtggatagaattgtggatttccagtttggaagtgatgaaactgcttatcatttaatcattgagctctatgatagggggaacatcgtccttacagattatgagtacctaattttaaatatcctaaagttccgaactgacgaacctgatgatgttaagtttgctgttcgtgaacgctatcctgtcgatcatgccatcaccgctaaaccttcgctgac

SEQ ID NO: 1793 - DNA, 580 bp, Cricetulus griseus
  misc_feature (126)..(140): n is a, c, g, or t
tcgggcagcctatcaatttaaaggcacacataccactcaacaggatgtggccattctgtcagtaggtagtttttccctgccagagataggagggaagagctggtggctcctggagatgctcttgtnnnnnnnnnnnnnnnaagcctgaaaatcaataaccactgtgattgtatcccagccctgatcctcattgtcagctctggaagctcagctctgacctggattctggggcaatgcagagtcctcattattgaaatgacatccctttggatttcccaaacttactgttgtttaccaaacctatttcatgtttacattgtatttttcctgctagcattgataggcagttattcaattccatttcctagaatttagccactgccttgtcagtaacaccaatcctgatttgagattaatgagaaaatattaaaatacatgtgtatttttccttttagaaaatacttttccagatagctagctttctgaaatgctcatttcctgcttaaatgttagtatatctcctagtttaaaatgcagatcacccctactcaccatgtggtgactatagctaaccttctag

SEQ ID NO: 1794 - DNA, 469 bp, Cricetulus griseus
gtatagtaactccaaaatcaggcaagaagatgaaaattttaacagacttttacaaaatggagatattttaaacaattcaccagaagaaaaattcaaagttaatgataaaaaggattttaagttgcctgagtatgatttgagtattgaagagcgattagttctgattgaaaaagatgactcaaaagctgaatctgatgaatctcaccagttagaccatatcaacatgaatcttaataaacttgtgacaaataatacgttccagccagaaataatggaaagatcaaagacacaggatatagtgcttggaaaaggctttttaaattttcattctaaaagtgaagctcagcatacagaaaatggaaataagtatccgaatttggaatccataaacaagataaatggtctttctgaggaatttccacagtcttctggtaggattgaaccacagaactccacttcttctgctgat

SEQ ID NO: 1795 - DNA, 411 bp, Cricetulus griseus
ttatccgctcatagtccgctgtatttccattaccctactttccatcctttcgtgattcccgttatgttttcatgtcttcctgtctccccccccattctttccttccccttaattccaccatatatattttttttcctgcaattatccccagcgcttctttcttttttttacatctatcttccttttgttcctttttcccgccgcagtgatatatacaatcactttccccatcccctcttaccccacccacccctgtcttccttttctttaccctccccctccatatttttttcctccttcccactacctttttcctcctttcctcgttcttcgtcttatcctctatattccattttttactcttttattcccctgggtttgttcacactctttttttctccccccccattc

SEQ ID NO: 1796 - DNA, 572 bp, Cricetulus griseus
  misc_feature (563)..(563): n is a, c, g, or t
ctcatatgctgctgcttgacaacccacacaaagaacccctccggttgcggtataagctgactttcaaccagggtgggcagccattcagcgaagtaggagaagtgaaagactttccagacctctctgtcttgaggactgcctaactcctcaaccgagactcttcagttacacttaggccagcgttcctttcactgtctggtcgggactcattgtgatgtgttgcagagtgccaagagttctcttctgatgtcagaccttgattgccaatctctgtagatcatgtgtgtgtgtgcgtgtgtgttattggggtgctgggggaggagggagagctgggcttgggatttgggtagtgtgggggatgctgacaatttctgagatcatctctgctgcactcatttctgcttctgcatgttggttgacactgttgtccctgcctcgggttggagttttatataagccaaagttttttccatgtattgttatcttttcattcatccactctgtgccttgtcagcctttgaaagtcttagttgctcccaggctgctattctcagggaccttanaaagggacc

SEQ ID NO: 1797 - DNA, 556 bp, Cricetulus griseus
atctggaatgacagttccagagataaagtgtctacaactgtgagagagatgatgctagagcactttaaaaaccaacgggataaccctgatgtgaactggaagttgcctgaagattttgctgtggtatttggagaagcagagggtgaactcgctgttggaggagttttcttgagaatcttcattgcacagccagcttgggtgctgagaaaacccagagaatttcttatagcactgttagaaaaattaactgaactcctggagaagaacaatccacatggagagactctggaaaccctgacgatggccacggtttgtctcttcagtgcacagcctcagttggcagatcaagtcccaccattgggccatcttcccaaagttctccaggcgatgaatcacagaaacaatgccatccctaagagtgctattcgggttatccatgccctgtctgacaatgagctgtgtgttcgagccatggcatctttggagaccattggtccactgatgaatgggatgaaaaagcgagcagatactgttggtctggcctgtgaagcactta

SEQ ID NO: 1798 - DNA, 459 bp, Cricetulus griseus
aagttaacatgataaaaagcgttttttcaaatttgggggaatggggaaaccttgaggttggtttaagaaaaaccccaaaactttaaacggtttttcctaccctgaaaggaaaacgggggtttttaaaaaattggatttcccaaaacacctggttttcctaaaaagggggtttttcctcccccctaaaccaaaaggggggggtggttacccaaacccaatcccattttttgttttaaccctttttttaaccctttttttaataaaaaaacccaaattttctttttttgtcaaaaacccatgagggggccctggggccccaccaaaagtaaagttttggggaggccccctttttgcttgtccacaggggtccctgaagtctaaaaaataaatcctttgttaaagccctttcaaccctttgggttttggcaggggccatctttgttgtggggaggggggggc

SEQ ID NO: 1799 - DNA, 580 bp, Cricetulus griseus
  misc_feature (61)..(79): n is a, c, g, or t
  misc_feature (156)..(175): n is a, c, g, or t
  misc_feature (521)..(540): n is a, c, g, or t
aggggaggaaaatgaggacgagggggaggagcaggaggagaacgaggaggtgcaggatgannnnnnnnnnnnnnnnnnncaaaaggtctttcaagataagatggaggaagatgtagaggaaagtgacttggaaggggaagaagaggaagtggatgnnnnnnnnnnnnnnnnnnnngaagatgacgatgatgaagatgacgatgacgatgaagacagaatggagtggggtcctttctctttcatgaagggagcctatgtttttgagaatactaggattgcttcccggaaaagagaggctttgcatggttcatcgtggcaagtaagccctgaagatgtgcgatggggtacattccctataggccgaataccaggtcagactgacgacccagcagaacttgtgttggataattatgacaccatgtatcttttggaccaacctgtactagagcatcgactagaacccccaaagtccaggaattgcactctgaacctaagttgttgtggaggcagtaacaactctnnnnnnnnnnnnnnnnnnnncggtgggcacttggaaagccttctctggagtcagggacaa

SEQ ID NO: 1800 - DNA, 533 bp, Cricetulus griseus
  misc_feature (28)..(80): n is a, c, g, or t
catgagtgcaaatgtagttgtcccctcnnnnnnnnnnnnnnnnnnnnnnnnnnnnnnnnnnnnnnnnnnnnnnnnnnnnncacgcgtgcggtaaaagagtgtggtggttggtaatggaggagtgttgaagaataagacattaggagaaaaaatcgactccacttgatgtaataataaggatgaataatggtcctgttttaggacatgaagaggatgttgggagaaggacaaccttcaggcttttttatccagagtctgttttttcagaccccgctcacaatgatcacaactccacagcggttttcattgtctttaagccccaggacttattgtggctcttgaatataatgaaaggaaacaagataaacactaatggcttttggaagatgccagccttatacttgatctatatacgataccaaatcagaatattagatccgtacattatcacataagcagcttataatctgcttcaaatttccaaagtgtttcccaaaaatcagatacccatacaccctacgacaggacttatt

SEQ ID NO: 1801 - DNA, 461 bp, Cricetulus griseus
tgggcagatgaaggcactgattgcctcctcctcctcctttcttttttgagacaggatctcatgtatcttgccgggcttgaactaacaatgcagcccaggatgacaatgaactttactaagtgtgtgtagtgtgagtgtagctatatgcacagtgccacaagtacatgactggaggtcaaatgacaacattggctataggttcgtcctcaacttcttcctgttaaaagcaaagtcttctgccatgcgccactgtgtgtgccaagtctgctggcctgcaagctgctggggagactcctgactctggctctcatcttgccataagcacactgggattatggatgcacactgctccatctctttattatatgcgttctggggatctgaactctggccatgtaccccgtccaaccatcacattgtgatcctttcgtcttgacctcttacatgctgggatgcacagc

SEQ ID NO: 1802 - DNA, 578 bp, Cricetulus griseus
aggcggctggtgaggcaggagacgcagcttgaggagatcgcagataagtttttttcttaaaaagattgagattaaaaattagaactctaaacttagactgttaaatagagtagcttgtcgagataaggcttagagttaaattcttaacttctagtgtaaaaagattttaaaagaaaatatgaaggcttatttaaggactttaaaacaaggaaaaatagttgtacgatatgatggcgctgaggtgaagcttttacgaagtaatttaaaagattgtaaagggagagacagcatagtctttaaaagcatttagaatatccagcttgtaaactacattgaaacgagaattacttaaatagaatcaaatgccttttaaaaacagtaaaatagtttgaaaatgagacttagcttaaaaagattgaaaataggttgagtttggaggcggttataaaagatctccgcttgatggcgcagtaaagattgcgtcatttgaagcatttatgtttcaaggcatttgaagtggaaccggaagattaattgttattggcagtttagtattggagaacattagaagttggaag

SEQ ID NO: 1803 - DNA, 508 bp, Cricetulus griseus
cagagttcacagcccccaactgccaatcagattaataacttgaatgtggaagataacagcagtggggatcaaaggcgggcctcactagcttcaaggaactggaggtctgctccagttccggtgaccactcagaacccacctggcgcaccccccaatgtgctgtggcagaccccactggcttggcagaacccatcaggctggcaaaaccagacagccaggcaggcccaaccagcacgtcagaatcccccatctaggcagacagcaacagcttggcagaacccagttgcatggcagaatccagtgatctggcctaacccattgatctggcagaatccagtgatctggccaaaccccattgtctggcctggtccacttgtgtggccaaacccaatggcctggcacaacgcacctggatggcataccccacctagttggcaggctccacccacccggcagggccctcaagattggcaaggccctccacattggcatataccccctgattggt

SEQ ID NO: 1804 - DNA, 600 bp, Cricetulus griseus
  misc_feature (23)..(80): n is a, c, g, or t
atgtagtgaaatgttatgcgctnnnnnnnnnnnnnnnnnnnnnnnnnnnnnnnnnnnnnnnnnnnnnnnnnnnnnnnnnncgcgtccggtggttttaacagactcattgggaaacatgggcgacacatgcagccagctgagcttttgttttcaacggttgcaaaggccccagcagaataactgtccaagcagacaggaaggctgtgaggctgagttgagaagcagcaagaggccccaaggcaaggctgccaggcgggcacaccaccacagctctggttcctgccaccagccaaccataggcagggggaggctgtttcctgtgttactctagttgctcattttccctctaagagactggcgtgtctgacagcagccgttactgctcctctgcctctcccatcaaacaggaaaacttgacaatgtagcgctctttctgtaagagtttcccatagtaccacggttcttaaacgtccctcacttgagctccccctggaaagatcaaatggagccacctccagagtcacaaacgcttttgaccagtgcatccagggttcttgagtttcagctttatttcatgtgcaaaacttacagaacttccaa

SEQ ID NO: 1805 - DNA, 321 bp, Cricetulus griseus
  misc_feature (297)..(297): n is a, c, g, or t
atttttaacactttttttaataaaccttttttgggggggggggccccttcccaaatttaaaaatttttgagggcgggaaaaatactcaaaaggttaaaaccccggtttcccaaaaccccaaggtcaatttccaacccctttttggttcccaggggattgggtttccccccaaccttccttttgggcaaaaccccatggcccataaaaacccccctccccttgggccaaatttctaaacatttttgccaaaggccttaaaaaaaatccaacttactttcctttttggaaccctttaantttttttcttccaaacgtaaaaaa

SEQ ID NO: 1806 - DNA, 578 bp, Cricetulus griseus
  misc_feature (5)..(48): n is a, c, g, or t
gggtnnnnnnnnnnnnnnnnnnnnnnnnnnnnnnnnnnnnnnnnnnnngaaccaactttttagttcggacttcatggatgagaatgccctcagcagcctctagtgtggttaaaagtgtacaaaagatgctgacatttttaaagatagaattttctaattcttttagtaaattgtgatagtatgaactgtgttgacttttgaaatttcttccttgtgatggaaatagtttttatttccatggaaagatgaccacatttgacagtttctgcattttttaatcagagtacagaattttatctatgactgctacgtatgtaagtatcaaactggaaatctgctgtactgtatactgatatttaatagactaataaatagctgtcttcagcattggaacaaatttctatacacatatacactgagggaataccatgacaatcaactttaagatcagaaggaagacttaagagtcattgagcatttagaaaatgacaatggaggaaaagttatttaagcatctacagacaagtttttgtcctaacatgggctaccttgggaccggagcacaacaacttgctaaa

SEQ ID NO: 1807 - DNA, 580 bp, Cricetulus griseus
  misc_feature (66)..(87): n is a, c, g, or t
gagcagatatctggatggcttgggccacacaattggattttggttccacttggacaatattctcannnnnnnnnnnnnnnnnnnnnntcagaagagagcaggcctgagggatgtggggactgtagttactgtgtggcccattgattggctgtgatcagtagaatggtcacctgttacacagataggcaagatggcagtcacctcccctgtctaagtggattcataatatcatatgtaagtcagggggagggatatgaatatgccatttagttttctccagtgaagtggccgaagctctagattagccaaggaagatggaaaacaaaatgccaggctccactctgcagaccaaagtgctgtctctgtagcatatgataccacttcccagatgctcacacatctgcaagaagtgcctcccaagtctggatggagagtggttctccattcctctgtcctagagaaggagacagtatgatttaaacatgccgtcaatggtgagggtcttagagggagaaaaggaggaatcattaacacaccattacgataaataagtgtaacctatgtttcagcaaacagtaat

SEQ ID NO: 1808 - DNA, 258 bp, Cricetulus griseus
ctttttaagtgctagctaattcacattaaaaacataagacaaatgtgttgtttaatggcattagcagctaatggattcttgaaattatcactatttttcacgggcgttggaggctcgcgcctttcatattcctgcacttgggatgcagatgcactctgatctctgtaattcgatgccagtctggactatacatactagtccaagacagtctccaaagcaatacaaagaaatattgcctctacaaaccaaaactatata

SEQ ID NO: 1809 - DNA, 507 bp, Cricetulus griseus
ctacctgttgtgatatctgcttactctgtgcctcattgccaggggaccaagtagattctctgaatgttttccttttctcctttctggtgatctcttcagcccacccaccagcccaaaccatccccattcctaagcgtcagcttccaatacttagaaatacattttacctgtaaccccagtgggccaagcaatctggatcccagaagaattttctaccaggaacacaggcatcacactctcctaagagcaagaatgaggaacaaaaaccaagaaacaaaacactcacctaacaaacaaaagaccagatatcaacacctataatcacaatcttcttaaaaccagacacctagacaaactgcataaaaacaataaataacaatatctgccatgacagcgtgcttccacaagagcccagctaccctaccacaatagacctgaatattgccaattagttgaagtgcacaacaaagaccataagataacctttattaacatgatagaggtccc

SEQ ID NO: 1810 - DNA, 579 bp, Cricetulus griseus
tcactgggcaagtcgaagatttggaatataatcttcacttactgtcaagtgaagtattaaccaaatagcaacaataccaacgcttgcctactgaatatgaaacgctgagggatttgctcaagtccatatgttctttggggacaaatgaggataatcagagaagttctttggcttttgaacatcatccgacagtgagtgactcctttggaaatctaatgggggaacaaggaagcctgtattcacaaaggagtgactgctttgtagatggggaccaaacttcagaaaatctatctgtcttacaaaatacagtcacttcacttgaaagttccctggagtctcaaaaccagatgaactcggatcttccaaatcagtgtgaagagttgctgcaaatcacagaagaaatagaacataacctcattactagcacaacagattcatcagaattttgtggatgaaacaaaccaacgcattggtaaattgcaggaagattctgcagtgcatcaaaatattgttgctgagactttagcaaccctcgagagtaatgaaaaagagtcgcaacttttgatagaaaaattatat

SEQ ID NO: 1811 - DNA, 506 bp, Cricetulus griseus
cagtggctgctgagcacagtagaaacccttacccctcaggtccatttgcctaccttgtccagagcctgcgaaggtaatgctgccccagctgagctcccgccagcctcactgcctctccagttaggacatcatatgattctttctcccaccctttcttttgtatagccctgacacttgcctccctggtcctgtatgctgatggcccagttaccactctgcagtgggaatgccggcacactgccatgctatcttgttcactgactggctctgtttctccttccttactcttctcccctcttctctcgaggacagtttactacgggagggccctgtggagcgccctggtgcccgtctgtgcctctctgatgggcctctgaggacagcagttaaccgtcgctatggaaaaaagctggggctagagaagactgcacatgtcctcattgcaggtgaccgattgcagcttgagccagcatgggcaggagtatgaggcttggacctagagccaa

SEQ ID NO: 1812 - DNA, 579 bp, Cricetulus griseus
ggaggagggcgctcccggccaccgcgctgcagacgccattatcctctgtttccccgctgcacggacgtcgccgaccgtcgtgctcgtctcgcgcccgggtgcggcctgcagattggtgtatccatttaattcaagaaaatggagaccgaacagccagaagaaaccttccccaacaccgaaaccaatggtgaatttggaaaacgccctgcagaagacatggaggaggagcaagcctttaaaagatctagaaatacagatgagatggttgaactgcgcattttgcttcagagcaagaatgctggggctgtgattggaaaaggaggcaagaatattaaggctctccgtacagactacaatgccagtgtttcagtcccagacagcagtggccccgagcgcatactgagtatcagtgctgatattgaaacgattggagagattctgatgaaaatcatccctaccttggaagagggcctgcagttgccatcacccactgcaaccagccagctcccgctcgaatctgatgctgtggaatgcttaaataccaacactataaaggaagcgactttgactgcgagttga

SEQ ID NO: 1813 - DNA, 580 bp, Cricetulus griseus
tcccaggagactgtagtttatgtcaacttgataaaagctaatcagcgtacagttatgtttgaattatttttgctgtatttcaattatttcttcatttgatattttcaagatagttgcatgaagcccaggttgtcctcaaagtgcctgtgtagctgaatgtgaccttgaatttctggtcttcctcctcagtgcttggattgctaccccacccagtttactctgtgctgggactggaatgaagggccttgggagtgttgtgcagccatctaccaactgagtctctatgaacattttgaaaggcttcaaatctgtattttcacttaaaaatcattttgaaaattggaaaggatagaggtcgtaactgtgagtgtaatttgtttgtaacatgcatgaggcttctaaagatatactggatttcttaactaattagttctgagtctactctaggggatagaaccatcccaccctggattgaaatgagaaagagacattttgtgactgctttaagccttgattatagagacttcagtaacttctgtgcccatagcccccttttactcttctgtgaacctcaagatgg

SEQ ID NO: 1814 - DNA, 569 bp, Cricetulus griseus
  misc_feature (23)..(51): n is a, c, g, or t
  misc_feature (55)..(77): n is a, c, g, or t
cccgcttcaaacgactcactatnnnnnnnnnnnnnnnnnnnnnnnnnnnnntcgnnnnnnnnnnnnnnnnnnnnnnnattgaagaaaactgaaagcaagtttgagaatggttttaatagatgcacacatctatgttataccacggcaaggggtgtgtttgcctgagagatcctccactggcaccttccactgagtctacgtgaataaatcaaatagatttttgtgtgggacaagatgttgtcctgagtgtgggaaagcattgaagttacatcagcatatcacaaaaagtgggtgagcaggtgaacaaagatggagggggccggagcaagacaagatgtctctgagattgtggaatctgtccctgattgctgatgtggcacacagtcctccttggctccccattttatgtcactgcttgccccaattctggcaccatgcctggtatatacaagatgggaatatgtgttctaatgggatagggaaaaggattttaggtaataagatagtagggcttatggcaaaatcatgtatttagactgaaaaaaaggaaattataagcaaaggctgta

SEQ ID NO: 1815 - DNA, 578 bp, Cricetulus griseus
  misc_feature (71)..(85): n is a, c, g, or t
  misc_feature (533)..(533): n is a, c, g, or t
aggcccagacccaaattggggctaagggctcaagctctcaggactctgccatggaggaagaagaacaaggnnnnnnnnnnnnnnntccagctttaccttcggaagaaaacggcaccagctagactccattttgaggccacttgcagcagactatgagaggcttccttttcaaccatgttggggttcttagaactcaagatatggctggaccaaccaataggaaactgccccagcttctcccaacagggggcaggacccccactaccagcccagggcccaggagctgcctctcgcctcttagcagagagtggaagtttcccacccagtttggaggattgcccgttcccaccctgctgaggagaccattcctcacccggctgacaagctgctgacgtggtctctccaaatctcagctgagcctgagtccctgtcggagggttggggctgcacttatttattgggggagacagctcactctcctgtctcatcccagatgggaggaggggagcctggggtcagtgtaggacccaggngttttgaacccctagctgctccagggtgggggaggttggtggacc

SEQ ID NO: 1816 - DNA, 580 bp, Cricetulus griseus
taattgaatacataccatatttatctttctgggtctgggttaccttactcaagatgttttttgtagttccattcatttgcctgcaaatttcatggtgtcactttttaaacagcagaataatataccacattgtgtacatttacaggcttataattaatttagatactactagtatatgaagtgacatgacaagtgatatgtacagatagaagttatgctaggaaggttttaaactattttttttttttgagtaacattgtatatcacttttatgtttataggttaatgcttttggaaaaaaaacatgcagattctgaagctctggctgaaattcttcttgaaacttgtaaataaattacttattctttaggggagtgagtaactaaaacttgaatagttttttgtggctgcggtttattttgtttttggggctggggctggaaatcaagcacgtctttatgcatgcttttgggcaggcactctaccactcagctacatcttgaccccttttttcttttgagtcatggcctctatgctgtctaaactgggctggaatttatggcctcacccaccaaggagc

SEQ ID NO: 1817 - DNA, 566 bp, Cricetulus griseus
  misc_feature (334)..(354): n is a, c, g, or t
ttttaatgtctgcagagaccacgctcccattggcagccattcctagtttactttcttgtatccctaatgagaaaagatgggagctggaaaggtgttgcctccctccaccttgtttcagatttacttacaagttaaagcacttatttcaagaagaagtttatatgtgaattcaattcctacgattgcatactatttctgatactcaaactattcagaacttttgaaacaagggcaaaaatttagtagtttttttcctcctttactggattagtgtgtcacatttcctcttaaatttggaaaaacaattacaagaggtgtgtataatgtgtcaaannnnnnnnnnnnnnnnnnnnntgtgatatagtttcctctcttaaatattgtcattttcttctagcgtagtttatgattgaattcatacttaaaatatttttcctacatactattatcctgcagagacagttttataaaacaaaagccatgcttgctggataaccatgccagggtattttataaaataagtgcagcccagattccatgaggaaactgctctgtttctatgcgcc

SEQ ID NO: 1818 - DNA, 367 bp, Cricetulus griseus
  misc_feature (10)..(24): n is a, c, g, or t
gcccctgtannnnnnnnnnnnnnngtggtatttcttggggccagagtggcattatttttacaaggtacatgtgtcatatgtttgtttgcttgatgaaattctgaaaaacagtctaccaattgcagaaaatattacttttctatgtttttattcactggctcagaaagcttctcaaagggtctgtggtcatagtagcatgactgtatccattctgttgacagagatgaagttattcttgtatttgactggtagcaaaaactgggtcataaaaaaaggaaaagatcaattttgtctcactgtttcagtatgtttaaataataatttccatgtttgcataatgaggcccatttctgatagcttggagagc

SEQ ID NO: 1819 - DNA, 269 bp, Cricetulus griseus
  misc_feature (2)..(21): n is a, c, g, or t
tnnnnnnnnnnnnnnnnnnnntaccagatgaagaggtttcactgggagcaggaccagatcgcacacatgaataactacattgccaggtttggccatggcattgccaatctggcctttataaaatcacatcaaagataaaacgctctacacaatgattccaacacaaataaattaaaggattgggtgaaaaaatggtgtttttttctttattttcccaaacccctaacccaaaaatttttataattcttccaaaactaaaccaagccttt

SEQ ID NO: 1820 - DNA, 580 bp, Cricetulus griseus
  misc_feature (459)..(459): n is a, c, g, or t
  misc_feature (576)..(576): n is a, c, g, or t
ctatgtgctggtgaagaagtggagcgaagccctcgtgctgtacgacaggggtctgaaatatgccgacgaggtcagtgctgatggcggagccttcaagaacagcctgaaggacctgcctgatgtgcaagagctcatcactcaagtgaggtcagagaagtgctcgctgcaggccgcagccatcctggatgcaaatgactcccatcaagcagagccctcctctcaagtcaaagacaataagcctctggttgaacggtttgagaccttttgcttggacccttccctcgtcaccaagcaagccagcctcgtgcactttccaccaggcttccagcccatcccttgcaagcctttgttttttgacctggccctcaaccatgtggccttcccaccccttgaggacaagttggagcagaagaccaagagtggcctcacaggatacatcaagggcatctttggattcangagctaaccatgctcttcctcaggggcagggagggcctgacttactctgtattgtgagacagacagcaagttcccaagcattaaatctaagtctgcaatggcaagggcagagctcancacc

SEQ ID NO: 1821 - DNA, 329 bp, Cricetulus griseus
gatttcacgtgttttagctgaggcatcgaagtagcgggtgctttctcgtgggaagtcatgtattcatactgcaaagtaaactccgtagctgatttggtaataacgtttactgttacaggcgatttcactttgaccccggtggcttttagtccacattccacgcagctaaatgcaggaccttccatattcttcctcccttggccctctttctttttggttcctcttcctctctttgcctatttttttttttttatgggggttggttttttcctgggcccagcatccttttacactgtatttttgtaaggggggctccctttttttatgga

SEQ ID NO: 1822 - DNA, 383 bp, Cricetulus griseus
caagtcaacaaatatgaaaacgaagactcctccagtaagaacacattttcctctaggacctaatcctttccttgaaaagcctcagccatttataagtccacagtcatgtgacgcccaaggacaaagatatacagcggaagaaatagaagtgctcaggacaacatcaaaaataaatggtatagaatatgttcctttcatgagtgttgatctgagggaacgttttgcttatccaatgcctttttgtgatagatggggcaagcttccattatcacctaaacaaaaaactacattttctaaatgggtacgaccagaagatctcaccaacaatcctacaatgatatatactgtgtccagttctagcataaagcagacaatagtatcag

SEQ ID NO: 1823 - DNA, 578 bp, Cricetulus griseus
agacaggcactgaaaaactaaggagtggtatggcccagcagattgcatatgaaatacacctggaacagcagagtgagggagaattgcagaagagaagcttccctgaccctgttacggattgtaagcccccacctcctgcccagggaattccagacagcccgccttttcctttctcactttggatttttatccttagaggcattgaaggaacctgcaaatagtcgtctacctcctcacctcattgcactcgattctaccatacctgggttttttgatgacattgggtatctggatctcttgccatgtcgtccttttgacacagtttttattttctatatgaaaccaggtcagaaaacaaaccaagagattttaaagaatgtggagtcttccagaaatgttcagccacatttcctagaatttttgctttcccttggctggtcagtagatgtgggcagacaccctggttggacgggacacgtgtccaccagttggtcaattaatagttgtgatgatggtgaagggtctgaacaagatgaagtaaactcctctgaagatgctggggctagcattttccatgg

SEQ ID NO: 1824 - DNA, 580 bp, Cricetulus griseus
  misc_feature (64)..(79): n is a, c, g, or t
cagactgaaagtgctctacagccagaaagccacgcctgggtccagccggaagacttgcagatannnnnnnnnnnnnnnngacaggatacttgatgcccctgaaatccgaaatgactactacttgaaccttgttgattggagctctggaaatgtactggctgtggcactggacaacagtgtgtacttatggaatgctggttctggtgacatcctgcagctgttgcaaatggagcagcctggggactacatatcctctgtggcctggatcaaagagggcaactacctggctgtgggcaccagtaacgctgaagtgcagctctgggatgtgcagcagcagaaacggcttcggaacatggccagtcactcggctcgagtaagctctctaagttggaacagctatattctgtccagtgggtcacgttctggccacattcaccaccatgatgttcgggtagcagaacaccatgtagccacactgagtggccatagccaggaagtatgtgggttgcgctgggccccatatggacggcatctggcaagcggtggcaatgataacgtggtcaatgtgtggcccagtggt

SEQ ID NO: 1825 - DNA, 511 bp, Cricetulus griseus
taaataacccaaaacaaagtagccaaattcctgtcttcatcagaattcttgatataaatgatcacgctccggaatttgccatgtactatgaaacatttgtttgtgaaaatgcaaaatctgggcagctaattcaaacaattagtgtcatggacaaagatgaccctcccagaggacacaagttcttctttgagccagtgccagaatttcctctcaacccaaatttcaccattgtggacaataaagataatacagcaggaatcataactcgaaaagatgggtacagccgcaccaaaatgaacacctacctactggcaggtttaatctttgacaatgattaccctattcaaagcagcactggcacgctcacgatccgtgtgtgtgcatgtgataaccaagggaacatgcagtcctgcaatgcataggccctgatgctcgctgcaggcctgagcacaggagctctcatcgcaattttactttgtgtgatcatcctgctcactctaatcgtgttgtt

SEQ ID NO: 1826 - DNA, 568 bp, Cricetulus griseus
  misc_feature (17)..(48): n is a, c, g, or t
  misc_feature (53)..(67): n is a, c, g, or t
  misc_feature (69)..(85): n is a, c, g, or t
  misc_feature (310)..(339): n is a, c, g, or t
  misc_feature (495)..(540): n is a, c, g, or t
gtcgtagaattcacttnnnnnnnnnnnnnnnnnnnnnnnnnnnnnnnntccannnnnnnnnnnnnnnannnnnnnnnnnnnnnnnttactcactgtatatctgcaaggccagaatgtgaaggcaagccacggaaaagatgctgctgttgagaccaagattgctgagtccttgagattcagagtgggctgtccgctgacttcaaccttggagagcacccctgacaatcctgaggcttcaccgggagctagagccagctaacatttccttgtttaaagactgcctttgatttttcccttgattccatgtatnnnnnnnnnnnnnnnnnnnnnnnnnnnnnngaatcaatgttggcaatacctagttctacttctcaaactggagcatcctcctctatatatttatatgtatgtgttctgtagtcctcctcatgtacctattgtgtattttttttcctaatatttaagcacatgccttttgtgttacacaatatatgnnnnnnnnnnnnnnnnnnnnnnnnnnnnnnnnnnnnnnnnnnnnnnctataatctgtggcaaatagagaaataa

SEQ ID NO: 1827 - DNA, 581 bp, Cricetulus griseus
  misc_feature (363)..(363): n is a, c, g, or t
cctttcaaaacgcagcctttcatcagcaaacttcttggtatgggtgacattgaaggactgatagataaagtcaacgagttgaagttggatgataatgaggcacttatagagaagctgaagcatggtcagtttacattgcgagacatgtatgaacagtttcagaatatcatgaaaatgggcccattcagtcagatcttggggatgattccaggttttggaacagattttatgagcaaaggaaatgaacaggagtcaatggcaagactaaagaaactgatgacaattatggatagtatgaatgatcaagaactggacagtacggatggtgccaaggtttttagtaagcaaccaggcagaatccanagagtggctcgagggtcaggtgtctcaacgagagatgtccaagaacttctgacgcagtataccaagtttgcacagatgggaaaaaagatgggcggtgtcaaaggacttttcaaaggtggtgatatgtctaagaatgtgagtcagtcacagatggcaaagttgaatcaacagatggccaaaatgatggatccacgagttcttcatcacatgggtggcat

SEQ ID NO: 1828 - DNA, 305 bp, Cricetulus griseus
ttctttttatgtagttgagtaaagtgatatttcctttgagaacttgtgataacccttataatcttgagcaaccactgtatgtgctgtggggctcttacagtctgaagtgtttaaccgaaggttttactgcttcttgcttattttagtttcctttcaacaaagctatgggttaaagatgatgtacttggtcatagatgctttttctgattcactaagtgcagcaataacaaatacatgttggttttttcaagaatgttcaatctcaaataatttcacatattctgtgactgaatgctctagccatt

SEQ ID NO: 1829 - DNA, 545 bp, Cricetulus griseus
gtcgacccacgcgggcgatgtttacgcgatgctccgtagaatcccggcgttaatacgtcctcgccccttctcgggccttcctttgtcctctggaaactgggatgtctcggtggctgtgtgtgtgccacccacggctcggtccggaaccggcaggacagaaaataatatccaaagacattttggcactggcagctgcatctatagcaagaaagatagccagtctgttccagccaatgaaatttcccagaagacagcagagactcaaggcgacagagaggagactcaaaaaaaaaacttgttagatattcttaaggacatgaaagttgaactgagcacagtaaatgtgcaaacaacaaagcctcgtggcaaaagaccttctgctggtctgcaggctgcatttagcaggcatagaagagctccagaagaccctccaaaaaataaaaatgagttcctgagttctgagttggtagcagccgcctctgctgttgcagattctctaccgtgggacaagcagacaaccaagtcggagctgctcaggcagcttc

SEQ ID NO: 1830 - DNA, 567 bp, Cricetulus griseus
accacagggtttgtgccatgtcggcgatcctccaccagccaaatatcgcttagaaacttgccgtcatccatccagtcccgcctctccatggggaaccagatggaagccaccagccagagcggcatggcctgtgtgcggcacagccttccctcctccagcagctccagccaaagcatcccggcctgcaagcaccacaccctcgtgggctttctcggggcagagggcagccagagcggtgtcactgaggcccagccaggcagcaccttaagtcctgccaacagttcacatgcccgtaagggggaggtggtttacagagtccagattgtggatctcagtcagattctggaagggattaacctgtcaaaaaggaaagagctccagtggcctgatgaaggaattcggttaaaagctgggagaaacagctggaaagactggagtcctcaggagggcatggaaggccatgtgattcaccgatgggtgccttgcagcagagacccaggtacaaggtgccacatcgacaaggcagtgctcctggtccaaattgatgataaatatgtgactgtaatt

SEQ ID NO: 1831 - DNA, 579 bp, Cricetulus griseus
  misc_feature (379)..(393): n is a, c, g, or t
cagtgacggtgtgaactgtgatgagttcgccgagttccaggaattactcaaggtgatgaggacaattgatgacagaatagtacatgaattaaacactacggttccaaccgcttcctttgcagggaagattgatgccagccaaacctgtgaacaactttatgagtctttgatggcagctcacgccagtagggacaaagttataaagaactgtatagcccaaacctcagcagtagtaaaaagtctccgagaagagagagaaaagaacctggatgacttaacattattaaagcaacttagaaaagaacagacaaagttgaaatggatgcagtcagaactaaatgttgaagaagtggtaaatgacaggagctggaaggtgttnnnnnnnnnnnnnnnaattcatttcaagcctccaaagaatgagtagagagaatattttatagacctggtcatctcatcaactaagcatgacagatgtcaacagggcaggctcccaaggatggtctcccagccagcagtccaaggcctcaagtctaattctaacatttataaaataatcaattgctattttattaccgattc

SEQ ID NO: 1832 - DNA, 600 bp, Cricetulus griseus
  misc_feature (22)..(22): n is a, c, g, or t
  misc_feature (493)..(514): n is a, c, g, or t
  misc_feature (532)..(532): n is a, c, g, or t
gtcgacccacgcgctccggggnaaaggcagtttctgtatggtagtgggaacagcttgctgttaattatggtaatgctgtaggtatcaagtatgtatgactgttaaaggggaaatagaaagcaacattttagagcactacccagtacaatccagagatcaagtggaggtaatggtggcctaaaagggcacttaagagatatggctgctgctcagagctgtgtacatgctactttcttttttttagaaaactcttttattattattattacgactatcattattattactttatgtgtatgagtgttttgcttgcatgtatgtctgtgcaccacgtgtgtgcctaatgcccttggaggtcaaaaagggcattggattccccagaattggaattacggaaagttgtttgtcaccatgtgggtacagacagcagtcttagctgctgagccatctctccagccccacataagatttccaacaggctgttttttgttcnnnnnnnnnnnnnnnnnnnnnntctttctacagagctcangctatcatggaactcactatgtagaccaggctggtctcaaactcaaagatccacctgtctctgcctcc

SEQ ID NO: 1833 - DNA, 600 bp, Cricetulus griseus; identical to SEQ ID NO: 1832
  misc_feature (22)..(22): n is a, c, g, or t
  misc_feature (493)..(514): n is a, c, g, or t
  misc_feature (532)..(532): n is a, c, g, or t

SEQ ID NO: 1834 - DNA, 361 bp, Cricetulus griseus
  misc_feature (310)..(328): n is a, c, g, or t
  misc_feature (330)..(357): n is a, c, g, or t
ggtgtctggccaaccaaatccgggagtggaggaggttgggaacatggctcagttaataaagctatggaaaaataaggatctgagtctggatcccagcacccatgacagtgctgagcaagtgtggaaccgatctgtaaccccattcttccagactgtggagggtctctgagataaactgggtagctaaactaaacaaaccggttcagatgagataccacatctctctatgaatgggatggagtaactgaggcagatatgtgatgtcaccctgtggcctctacctatgaatctacacacacactcataacannnnnnnnnnnnnnnnnnntnnnnnnnnnnnnnnnnnnnnnnnnnnnncaca

SEQ ID NO: 1835 - DNA, 481 bp, Cricetulus griseus
  misc_feature (55)..(84): n is a, c, g, or t
  misc_feature (437)..(437): n is a, c, g, or t
ctccgattcttgatcaaatgtctaaatatatttttaatatttggggcatgagttnnnnnnnnnnnnnnnnnnnnnnnnnnnnnngaaatgttacctggtagaacataatttgctaaaataaccagatttcagattgacctgttgcgaggtcccctttccccctcccctttccataacagttttgctatcaagcaaatgggttcctttttgagatattttaacacaagagaggaaggggaaagcaaacgaagctgtgctacctaaccctctttttgtttgtatttgtgttaagatattgtgaggttgtgtaaaatagcactagcttccctcttaagaaatagtttctgcttatcatttatcccttccctgtggcacttgatattttaattgtcttaaactttttgatgtgtatcctctggccccttacatactgccanaggagaaagagtttgtttgagattcattccacttgcagtgtctc

SEQ ID NO: 1836 - DNA, 261 bp, Cricetulus griseus
gtctttaaccctagagcacaaatggactttgggagcccattccctatggagggatactattgcagcccagatacagcaaggagggccgaggccctcccccaaatgatatgacagactttgaagttccctggtggagggcctcactatccctggggaaaagttggaggatgggttaggggtgttggtggggagcatgggaggatgggagggtgagggaatatggagatggatatgtaaataggagtaatggtttacgaacaa

SEQ ID NO: 1837 - DNA, 579 bp, Cricetulus griseus
caacatcacgtaatagcctggctggggaggcaaaactggaacctaccataaagaagatccactaaaaaggctttgagtggcgtgcaattaaactcagatatcaacgtgctctacgagtacctattaatatttgttcatctacatgtggaaaacgggacaaaggaaatgacaggcagaagttgtgaccaaggtcatcgggggaaatgagctaaaaggtgcctactcacagacagcattatgaaattaaaggaattccaacagaagaaagtagctactgcacataaccttcccagtaccaaagccatctatttcagaagcttggaggagaaattgacccaaaataaactcatcttgaaggaagagttgaaaacattgcttcacttgtgtcagtctcgggaagatgtggaactggcaaaaagtgtcatttacaggtgccactcagagaacagaaacttcactgtgggggaatataagtttggaccagttttcatgaggctatgctacgagttgcatcttgaggactctgcagtggagctcatcaaagacaagcacttacgaggtgtcttcctagactcaaca

SEQ ID NO: 1838 - DNA, 580 bp, Cricetulus griseus
  misc_feature (372)..(372): n is a, c, g, or t
  misc_feature (466)..(518): n is a, c, g, or t
catatcactggtccctctccactcctcgcccaacagtcctactcttttattcccttttctttcttctgagagatgtgaccagttcgaattatgtcccggaacataaagccagtgccagcaccagccggtctgcttcctctacagacgccaggtgactcccaatttacaagtagaatggccatagcctgtacctccctggcagctggctggttctggtggcactgagatgaacccactctctcgtcatggggaaggggacactgggacagcaggctgccactgagcacacacattcctcccatttttcagaagtgaatgtttcatgtttaggtgccgaatgtgaatttgggtggggagagcaggagcccttcncatagatgggtttacagaggttgtgggaactgagatctgatccctcgaaactgatcttgtgtcacttccaaagaatcatgggcttttttgaatnnnnnnnnnnnnnnnnnnnnnnnnnnnnnnnnnnnnnnnnnnnnnnnnnnnnncggggggggcgcccctttttgcccctttaaagggggggttattggcccccgggggaaaacag

SEQ ID NO: 1839 - DNA, 600 bp, Cricetulus griseus
  misc_feature (532)..(532): n is a, c, g, or t
gtcgacccacgcgggcgtgctgcctaatggctacgtctatggctacaattctctgctttctatccgtcaagatgataaagttgtttgcccaagaaccaaagaagtcttccacttctctcaagctgagaaagtatatatcatgtaggccctgcgttgccatgtgcacgcgtccggccagaggctgtggtgggtgggagccataccctcctaccctgaccccagaccccagaccccagcctgtcttggcatttgtttcttgcgaccaaagatcagtgagcaacggcaaatactcttagaaaaagaggaagtgagatttaataagtctgtgcttgacaacagcgtttgattggtaggattttgtaacataagtcgactgatgcctctgcaaattcttgcacctctcaaaggaaacttctctacagtgtgacctgaacagcaaggaaatccagagcatctcagaagtaggaattggttcatcagttatttccctgtgtttctccatttccttccttttgctagtgatgggactcangggagcttgaggagcaggctggtcctttgccaactcctgttggccacagcctgggctaattgttgcca

SEQ ID NO: 1840 - DNA, 484 bp, Cricetulus griseus
cctatcggagcctgccacccgccgcacctcctactacttccaaccgtcaccggagacagatcgaccggggtgtcactcacctcaatatttcagggctaaagatgccgagagggattgccattgattgggtggccggaaacgtgtactggaccgactctggccgagacgtgatcgaggtggcgcaaatgaagggagagaaccgcaagacactcatctcgggcatgattgatgagccccacgccatcgtggtggacccgctgaggggtaccatgtactggtcagactggggcaaccaccccaagattgaaacagcagcgatggatgggacccttcgagagactctcgtgcaggacaacatccagtggcccacaggcctggctgtggattatcacaatgaacggctatactgggcagatgccaagctttcagttatcggcagcatccggctcgatggcactgatccccgtctggctgctgacggcaa

SEQ ID NO: 1841 - DNA, 579 bp, Cricetulus griseus
  misc_feature (267)..(290): n is a, c, g, or t
tgccaaccccatgacctcacagtgtggcttttgtgccccagatgcctcctgggtgaggtgggggtgggaggaggaccacacagggccattgtctctgagtgggactgcctgcccctgctcatttagagctgccccagaaggtcagggctgtgtcctcaatagccctattccaggctcctcggttcccagagaaaggtcaggtgtgaccttgcagcagattccatcttgtgtgtaccgcagacctgctgcctgtgcctaaatgtaaannnnnnnnnnnnnnnnnnnnnnnncctaagaaaccaagggggcagccctggctgagatatcctttcctctgctgggagtttggagagtacaggacttcctttcaagccccccatctggaaggggggggcagacgcggtaatgagtaaccaacctggaatgctcaatgataagaggcccaggtgggacccttatctgcagttcctggaacaccctggccccaggtgcctggaaccaatatctgccccataatcccacggggcatcttggcaggtgctcaggtcaccaggaggaaggcaggtttacatgtatagc

SEQ ID NO: 1842 - DNA, 579 bp, Cricetulus griseus
  misc_feature (170)..(193): n is a, c, g, or t
tatttggaacattatctggacagtattgaaaacctcccatttgaattacagagaaactttcagctcatgagggacctagaccaaaggacagaggacctgaaggctgaaattgacaagttggccactgaatatatgagtagcgcccgcagcctgagctccgaggaaaaatnnnnnnnnnnnnnnnnnnnnnnnnaggcctatggcaagtgcaaggaatttggtgacgacaaggtgcagcttgccatgcagacctatgagatggtggacaaacatattcggcggctggatacagacctggcccgttttgaggctgatctgaaggagaaacagatcgagtcaagtgactatgacagctcttctagcaaaggcaaaaagagccggactcaaaaggagaaaaaagctgcccgtgcccgttccaaagggaaaaactcagatgaagaagcccccaaggctgcccagaagaagctaaaacttgtgcgcacaagtcctgagtatgggatgccctcattgacctttggcagtgtccacccctctgatgtgttggatatgcctgtggatcccaacgaacccacatattgc

SEQ ID NO: 1843 - DNA, 578 bp, Cricetulus griseus
  misc_feature (264)..(293): n is a, c, g, or t
ctctggccactggtgtgctcactggtgaggcaggagctttaccctctacccacgtggtggtggcagggatggcgaaatgtagagagtcctgttcaagtccatctgctgttggccctcccctaacgaccagaaagatggaagcagcaggagtgcctgcgacaggccagttcatgcgtattcagaatgtaggccaaaagaaagctgaagagagtccaacagagattatcatccaggccattccccagtacgctattccttgtcacnnnnnnnnnnnnnnnnnnnnnnnnnnnnnngggcttcttgaactgaacaacttcaccagtcagcagctggatgatgatgatacagcaatggagcaggatgtagacagcagcacggaggatggaactgagcccagcccctctcagagctctgctgaacgggcctagtgttcagacaccggagtgcactttaaagcctgcttggttaccaagcgtccagggaaacttataacttggggtccaaaaaaaagcactttgttcatatttaggcgtggggacctagaacacagtgtttcaatgaaatgttgctgccggagc

SEQ ID NO: 1844 - DNA, 580 bp, Cricetulus griseus
  misc_feature (95)..(118): n is a, c, g, or t
  misc_feature (526)..(526): n is a, c, g, or t
  misc_feature (575)..(575): n is a, c, g, or t
atggctaccttggagggtgagaagcccctacctgtagagatggagaagaacagcaccccctctgagccagactctggccagggacctcctccatnnnnnnnnnnnnnnnnnnnnnnnnccaccaaggaagaggctgaagcccaggggcgtcagagatcatgagagcctgtagccaccaatgtttcaagaggagcccctgccccgttcctgctgctgtctgggtgctactggggaaactggccatggcctgcaaactgggaatccttttcccacccaacccactctcctccttcactcactttctcctttttaagcccacccttggagattggcttggccctcacttccaggtccctgtaccctgtgacctaagtcagggccatgtgccctggtatgaaatggggccattatatctccttagacttgtctcctaagactttgtgttggggtctggactgctgtttccacctctcaacacctctggccttctgcaggcattctaaacctttgggccgggttggggcangagtgcggtgatgaaatataaacttgagtgggtttctgagtggcatctnctgag

SEQ ID NO: 1845 - DNA, 494 bp, Cricetulus griseus
  misc_feature (134)..(150): n is a, c, g, or t
  misc_feature (380)..(442): n is a, c, g, or t
atttcaaatccttttctgaacaaaatgtaatagaataatatttgataaattacttgaattgcttttaaaaggaaagtgtgtattgcagagtttaattgctagcatgacaatttttcagaaaattaggtagactnnnnnnnnnnnnnnnnnctgaagatattttgaaggtgtatatgtgtatttgtatcgttttttatgcattgccatcttaaagctcagcgatcactgaaaagttacttacagttctttgtcgactccccacctatgatgcccaaagaaagataacaaatgtgtctgatgaagtgtccagtgaggacgaccctgagacgggatactcattgcgctgtcatggggacagaacttctgaaagcagtcttcgnnnnnnnnnnnnnnnnnnnnnnnnnnnnnnnnnnnnnnnnnnnnnnnnnnnnnnnnnnnnnnntaaatgcacatatactgttttattgcttcactaactgagtggtaccatcgaa

SEQ ID NO: 1846 - DNA, 580 bp, Cricetulus griseus
ttaacacactagaccataccactgagatcagtgtgtcccgccttgagaccgtcatctcctccatctactatcagttgaacaagcgccttccttctactcaccaaatcagcgtggaacagtccatcagtctcctcctcaactgtatgattgccgcgtatgacagtgagggccgaggcaagttgaccgtattttcagttaaagctatgttagcaaccatgtgtggtggaaaaatgctggacaaattgagatatattttctcccagatgtcagattccagtggcttgatgatgtttggcaagcttgaccagtttctgaaggaagccctgaagctcccgacagcagtctttgaagggccatcctttggttacacggaacacgcagtccgcacctgttttcctcaacagaagaagataatgctgaatatgtttttagacaccatgatggccgatcctcctccccagtgccttgtctggctacctctcatgcacaggcttgcccatgtggagaacgtcttccatcctgtggagtgctcctactggcactgtgagagcatgatgggccttccatacccatgccagca

SEQ ID NO: 1847 - DNA, 581 bp, Cricetulus griseus
  misc_feature (210)..(270): n is a, c, g, or t
tgaaagggaaccagtgtccataaccctagctgttctgttagggattggtacagggaccgaggcccttgtccaaggaccacaacagtacagtgagctcaaaaatgcaatgatggcagatttaaaggaattagaaaagtcaataaccaggctggaggaatcactggcctccctggcagaagtggccctccaaaaccagagaaggctagaccnnnnnnnnnnnnnnnnnnnnnnnnnnnnnnnnnnnnnnnnnnnnnnnnnnnnnnnnnnnnnaaaccactcaggagtaattagggactccatggcaaaactcagagagagagattagctaaaagacagagggaggccgaggctcaacaaggatgattcaaaggatggttcaataggaccccatggttgactaccctaatttccaccctggtaggacccctcttcatactcctcttactcctgacatttgggccttgtctcctcactaggctcctacagtttatacgtgaaagggtatccatcactcaagccctcgtgctaactcagcagtaccacactgtgccaagtgctgaagtctacccaaatctgtaagt

SEQ ID NO: 1848 - DNA, 579 bp, Cricetulus griseus
  misc_feature (367)..(367): n is a, c, g, or t
gggcaaaagtgggcaccaggggctggtccaaggccagaacccataaaacactgggcaccgccaacagggcttcatgtcactggcccttagagctggagtgtacaggcccaataagaaatacaaaaataaactctgtggtccaggtgtcctgtctgtggcagactgttgttggtgcagagcggtcacttttctatcaagctctgtgctgtttaatccagccacagcacgggcagtaagagcctgcatgggtgtgtagacatccacaggctgaaaccaaagggctaggcaggtatagccttgggcagcgccaggatggtggcagtgccaggatatagccagcatctggggaggctctggagctccttangtaggcaggtccaggcactggttgaggctggatgaagctgagacttttcctcatcacatacagatcactggaaccctgtcttcctccatggtgctggtctcctctgccttgccctcactgcctgcacctacactctcttcatcagcctcttctgctcccagttccaagtccaatgcattgcctgcctctgagggtgtgtaggtggaaccact

SEQ ID NO: 1849 - DNA, 581 bp, Cricetulus griseus
gaaagccatcccaaaagtgaaggtagctacatgaaaggtgagccagaagtggaggctgcttttgcattcacattccttttgtgtagattcctttacagattcgtcccttactcctaaaataacaaacagcacagctgatttctctaccttctgcagaatggcagtcttcccccagcactgaacagtctcaggtgcctggacaagctgcaatggtcacttaattggtgtcaggtttttgaagcaggaaagcatggatcaaggtagaggtctcctaagtccccagggctaacggtcattacacctaagtgactgcaaataagacactagagaagcaaatgcttcctacagaattcttccctcacccaactttctgattaacagaaattactttttttgccttctcagaatttagaaactaaagcagcctcctccaggcgaccataagggaaaagcagacatgtgccttgctcttcagtatctaccacccaaaggctttgccccacccacctgcttccctgcgggctacaaaacagcccactgagttaagtgtgcctgtgctcacccaagatgaaccttgagaa

SEQ ID NO: 1850 - DNA, 229 bp, Cricetulus griseus
tgttagccaagtaccaacatatggaaagccagctgagctggtgaagatgtttggtattgacaaggatgccattgtgcaagctgtgaatggccttgtcaccaaaggctatgggggagccctataatggctgctgggtgggggaactccacattgcctagacaagttctggcaaggtgctcaaagatgtactgagaggagacataaatatatgttttgagaaaaattaaaa

SEQ ID NO: 1851 - DNA, 580 bp, Cricetulus griseus
  misc_feature (338)..(362): n is a, c, g, or t
aaaactggaaaaggcaagaaagaaaaggaatcaattcactctgagactcaaggtgaagcagagccttgtaggcagacttttcaccgtcatgccaaaatgtaatccatgtgtggtgtttgaagtgactacaatttgtagtgatttgttacagagaaatgaggaacttgtactagccaaactggtttcagatgtataaaatgagttgtagttcaggtcatcgtccatagtagtgagccaggctgggtaactaaggagcagggtcatttttaaaaaacaaaagagtttgcagctaacatacatctgttttccagagcagcatgggaataatttaatcacannnnnnnnnnnnnnnnnnnnnnnnnttatgcgccagaaactgggaaaaagtcattggtgcaaaatggatttggaggaaagaatcagacagactcaagttcaaattccagctctgccaggtgttaagtgggtagctggtgggaactgcttatctcatttgcaaaacccagatcatatctcccattcgtgggtgttgtgaaatctaaatatagtatattgatctgttacaatttgtttatcaaga

SEQ ID NO: 1852 - DNA, 443 bp, Cricetulus griseus
gaggtgtgttaaagagtcgcttggggagaaagcttggcttttttggagtgtgtgtgggggagactttggggggggggaacttttctcctcctcccttctctccccacccagaggcaactgctttcttcagttacacggactgagggggtaccccccccccattcagctctatatggagagcctggaggaaaaccccctttacccattatgccagcgggaaggtcaaaggcaaagaaaaagttaataatgcctgctaatggtgctaacaattcaggatgaatcttgtcaaaagttttttctggaagtgtgggtctttgattgtgtttcccgaaagcaagaccaatcatttccgtttattcactggctaaacccctacttgattggggacaaggacagaaaccatcccttacgatctgatatattatccaaacaatttattgttt

SEQ ID NO: 1853 - DNA, 502 bp, Cricetulus griseus
agctgagcctgtgatatcctcggtcgctcaggatggcctcaggcaaagcacgctgtacccggaagctccgaagttggataatacagcaattggaaagtgggcacttcccaggggtgtgctgggatgacacagccaacactatgtgccgggttccctggaagcatgcaggcaagcaagacttccgaaaggaccaggatgctgccatattcaaggcttgggcactgtttaaaaaaaagcataaggatgaggacataggaccccctgctgtctggaagactcgcctgcgctgtgccctcaacaagagtcctgaatttgaagaggttcctgagagaggccgtatggatgttgctgaaccctacaaagtctatcggatactgccaccacgaaccctccctggccaaccaagaagccagaaatcgccatccaagcgacccaatagtgctgtgtcaccagagagggaagagaataaggagaagggaaggtccagcgggcttgtaaaccc

SEQ ID NO: 1854 - DNA, 581 bp, Cricetulus griseus
atttgtgaatgaagttagaagatgtgaagaaatggatcgaaagcttcgatttgttgagaaagagataagaaaagcaaacatcccaattatggacactggtgaaaacccagaggtgcccttcccccgggacatgatcgacttagaggccaatttcgagaagattgaaaatgagctgaaggaaatcaatacaaaccaggaagctctgaagagaaacttcctggaactgactgaattaaagtttatacttcgcaaaactcagcagttttttgatgagatggcggatccagacctgttggaagaatcgtcatcactcttggagccaaatgagatgggaagaggcacgcctttaagactcggcttcgtggctggtgtgattaaccgggagcggatccctacctttgagcgaatgctttggcgagtgtgccgagggaatgtgttcctgagacaggctgaaatcgagaacccgctggaggatcctgtgactggtgactacgtgcacaagtctgtattcatcatttttttccaaggtgatcagctgaaaacagggtcaagaaaatctgtgaaggggtccgagcctccct

SEQ ID NO: 1855 - DNA, 579 bp, Cricetulus griseus
  misc_feature (533)..(533): n is a, c, g, or t
cacagttctgttttctacctccattagtgtcaccactttgggtacctcacataaatggtccttttgtgactggcttttttccctcagcagcatgtcttcaagattcaaaatttcctcccatttaaagttgaataatattgtaattatggaaaatcctgtatcttccttatctatataccattatgaatgtttgagtttttcccatgtgatattttgaatgaatataccagtagctgtttaggtccttcatcagatttttggatatatacatagatttaaattatctacttcagctaacttttaacaattatgattttgtgtatagagaagaatataagacattaatgaaagaaaacattttctgtttaatggttttgtttgtataagacacaccacttacctagacttatttaggctttctattttcagtgtgagaaaaaaaatcaggtgctgtatatatgacttcactgttcagaagtaatcattaacatttttttgccattcttttggcaagtgactgcaatctgtctcanagaaatatggaaaatctggttcaagacttattattagccaggagtg

SEQ ID NO: 1856 - DNA, 116 bp, Cricetulus griseus
  misc_feature (41)..(41): n is a, c, g, or t
tcgacccagcgtgcggggctattgccaagaaagcttttganaagacagcaaagggctaatccatagaatccgaaagtgtgatgtgctgtgatgcttatgctgactgaaaacatcta

SEQ ID NO: 1857 - DNA, 579 bp, Cricetulus griseus
  misc_feature (310)..(351): n is a, c, g, or t
  misc_feature (486)..(486): n is a, c, g, or t
  misc_feature (492)..(537): n is a, c, g, or t
  misc_feature (544)..(544): n is a, c, g, or t
tcctgcatggagaaaaaggaaaaggaggaagtaaacctaagtacaagcatttctcctttctctgcttttggttaaccatgaagtgaagcatactttctacacatcttcctgctactatgctaaggttaagcatatggggccaaagaacagcagattaaattgactgaaaccatgagccaaaatgaatgcttcctccaaaaaattgtttcagttagatattttgtcatagtagagcaaagcaaactgtatacgcaacgaatagcagagttgagatttaaatatatctctgaagcctttgtgcagtggtacnnnnnnnnnnnnnnnnnnnnnnnnnnnnnnnnnnnnnnnnnntagagggtaggaggaatctgttataactaggggtgctttcagtattctttcaacagttgacacaccccattttatttccttctttaaaagttctaaagatcattgagtagtagtaatgcatgctttttatcccancactannnnnnnnnnnnnnnnnnnnnnnnnnnnnnnnnnnnnnnnnnnnnncccacanagcaaattctagaacagccagagctaaacagtgaa

SEQ ID NO: 1858 - DNA, 511 bp, Cricetulus griseus
  misc_feature (205)..(219): n is a, c, g, or t
aggcgcaaggactcatcccaggatgaccacggccatagcatagttcttaaaggggcatgtcatgatgtgtgcccagggagaaaaacaaaaaacaagaggaaagcgtagatgcccgaggacctgtggggaaggtgaggcgctgggaccagggcctggaaaagcctcgccttgactactcagagttcttcacggaggatgtgggccnnnnnnnnnnnnnnnccatctggcaaattgagaactttgtgcctgtgctggtggaggaagccttccatggcaaattctacgaagctgactgctacattgtactcaagaccttcctggatgacagtggctccctgaactgggagatctactactggattggtggggaagccacgcttgacaagaaagcctgttctgccatccatgcagtcaatctgcgcaactacctgggtgccgagtgccgtactttgcgagaggagatgggcgatcagagcgaggagttcctgcaggtgtttgacaatgacatttt

SEQ ID NO: 1859 - DNA, 481 bp, Cricetulus griseus
  misc_feature (410)..(440): n is a, c, g, or t
gtgcaaagattacctcattgaagccatgaagtaccatttgctgccaacagagcagcgcatgttaatgaagagcgtgcgaacccggctgaggacacctatgaaccttcccaaattgatggtggtagtcgggggccaagcaccgaaggcggtgcggagtgtggaatgctacgacttcaaagaggaacgatggcgccaagtagcagagctgccttccaagaggtgcagagcagggatggtctatatggctgggcttgtctttgctgttgggggttttaatggttccctaagagtccgaactgtggattcctatgacccggtgaaagaccagtggaccagcgttgcaaacatgcgagaccgaagaatcacgctgggggcagccgttctaaatggattgttatatgcagtggggnnnnnnnnnnnnnnnnnnnnnnnnnnnnnnntggaagcgtacaacataaaggctaatgagtgggttcatgtt

SEQ ID NO: 1860 - DNA, 579 bp, Cricetulus griseus
  misc_feature (485)..(485): n is a, c, g, or t
tctagagcgggcggggaaaggggcagctggttcctttagggattaggtcctgtgaggctggcctcagaagtgagtccgtctcctctcgctcttcgctgagtctttcaggcccttggactgaggaaacgtctacaccgtgatgggaggcggggacctgaacctaaagaagagctggcacccgcagacccttcgaaatgtggagaaagtgtggaaggcagagcagaaacatgaggctgagcggaaaaagattgaggagctgcagcgagagctccgagaggagagagctcgggaagagatgcagcgctatgctgaggatgtcggggctgtcaagaaaaaagaagaaaagttggattggatgtaccagggtcctggtgggatggtgaaccgggatgagtacctgctggggcgccccattgacaagtatgtttttgagaagatggaggaaaaggaagcaggctgttcttctgagacaggactcctcccangctctatctttgccccatcaggtgccaattcccttcttgacatggccagcaaaatccgggaagaccctctcttcattatcaggaagaaagagga

SEQ ID NO: 1861 - DNA, 522 bp, Cricetulus griseus
gtcgacccacgcgtgggggggcgcgtgggctgaatttgaaactcaaagttccaaattccaggaaggcgcagagatgcttgtgaaccctgaggaaaagaatccactgagtatccccttaggagttcatcccctgggactcctttactcagggtttggggagcggcccacaggagcactgcctctaggggcaccatttgatatgcctacaggggccctgctggccacaccccagtttgagatgctccagaaccccctgaatctgacagggacccttcgtggtccatgccgtaagggtggccgggccaagggtgggcaagggccccggcctaacatctgcggcatctgcgggaagagctttgggcgaggctctaccctgatccagcaccagcgcatccataccggggagaagccttacaaatgtgaggtgtgcagcaaggcgttttcccagagctctgacctcatcaaacaccagcgtacccataccggcgagcgggcctacaagtgtcccaagtgtggcaaggc

SEQ ID NO: 1862 - DNA, 555 bp, Cricetulus griseus
aactgtgtaaaagttcaagtctgtactgttgcagtttgagaattgtagatacaacatcgtacatacgtcacttagtaatagccttcgtgaaatcagtttgtttactattggagttaccacgctttaaataaagaagagaccatggaagtaccatcataaaaacactttaacctaagtttctgttatagcagagtttcttgttttttaaaacacacatacacacacaaaatcatctgaaaagcatttgtatagtaaattgtataatgaagctttgacagccagattgtgctagcaggagtagctattatgcagtaataatatatatgatgggctctactactctgtgtcaggtggggaattagtgaagtgaatgtggactttactgaaatgcaggtacactataatctttgccagtaatgaaactcttctggccatatgatgttaactgagatgtcattttgaatataatacatctaaatataacatatatggagacgctaagctgacagtggtattttagcacatttgaaaactgagaagggatttttaggtgaa

SEQ ID NO: 1863 - DNA, 581 bp, Cricetulus griseus
catggagtctgtgtccactcagatgagacaaagaatgaactttaataggaagcttgttaatctttcagcaaatgtggatgctgcaagcaacagtctctcttttctaaaatgtgtcttgaagctacttattttcaaccaaataagaacatgattgaagaaccaccaaggagacttttactctgtctgcaccatgggaggcctcagatcacagggtggggagggaggggaaggttggatacatgatcaagttgggggtgggtcaaaaatctatgtactctgtcccatggaagtgtactctgccccatggaagtgtgctgtgcagcaccttgtaaatcccccaaacccacttaacaccttagggcttgccgatgccctcccaatagctgttgttcgccgccctctagtggtgaggttgtagaatactggtccactagtgggatttctagggttcaaaagtgatttcacttccaggtcatcatcagaaactggaacacagtgtcatgctactgtggcttgttttgtttgtgtcattttatcttattcaagaaaaagaccaaggaataacattgctgtcattccta

SEQ ID NO: 1864 - DNA, 579 bp, Cricetulus griseus
ttgctgggagcaagtcgcctggtccgtctgtaaggggacccaagcgggtcgcccaatttgtaggacaggggcttgctgggagcaagtcgcctggtccgtctgtaaggggacccaagcgggtcgcccaatctgtaaggacagggacttggtgggagcaagttgcctgctccatctgtaaggggacccaagcgggtcgcccaatctgtaaggacagggacttggtgggagcaaattgcctgctccatctgtaaggggatccaagcaggtcgcccaatctgtaaaagaggtacttgttggaatcaagtcatctaaaattccaaataggaccctagtctgtgttactgtactgtctgtccatgtttcacatttgtgttatatgtttcttaagcatctctttctgtccctgctctccctacgcacatggcatgcatgggtcaggggtcttttcttgattctctgagcacgtggcgccacctcaactatgatcggcagatgcacccggaggacagactgccactctgaggacacccaggacccatgaggtacagactcgggccaaggacacttggacccgcctca

SEQ ID NO: 1865 - DNA, 568 bp, Cricetulus griseus
gaggccagagagctgctacagctagcagatgccttggggcccagcatctgcatgctcaaaactcatgtcgatattctgaatgatttcactctggatgtaatggaggagttggcagctctggcgaaacgccatgaggggttaatatttgaagacaggaaattcgctgatataggaaacacagtgaaaaagcagtatgaaggtggcatctttaaaatagcttcctgggcagatctagtaaatgcccatgtggtaccaggctcaagagttgtgaaaggtttgcaggaagtgggcttgcctttacatcgagcatgcctgctcattgcagaaatgagctctgctggttccttggccactggaaactataccaaagcagcagttgggatggctgaggagcactgtggatttgtggttggctttatttccggctcccgagtaagcatgaaacccgagtttcttcatttgaccccaggagttcagttagaaacaggaggggatcaccttggccaacagtacaatagtcctcaagaagtgattggcaagcggggttctgatgtcatcattgtaggcc

SEQ ID NO: 1866 - DNA, 604 bp, Cricetulus griseus
  misc_feature (45)..(79): n is a, c, g, or t
  misc_feature (89)..(161): n is a, c, g, or t
  misc_feature (178)..(426): n is a, c, g, or t
  misc_feature (432)..(484): n is a, c, g, or t
  misc_feature (511)..(534): n is a, c, g, or t
ggccacccacgcgggcgggcgtcctcattagagtgacatggtgtnnnnnnnnnnnnnnnnnnnnnnnnnnnnnnnnnnnggatgcccannnnnnnnnnnnnnnnnnnnnnnnnnnnnnnnnnnnnnnnnnnnnnnnnnnnnnnnnnnnnnnnnnnnnnnnngctgtagtgtgggagcnnnnnnnnnnnnnnnnnnnnnnnnnnnnnnnnnnnnnnnnnnnnnnnnnnnnnnnnnnnnnnnnnnnnnnnnnnnnnnnnnnnnnnnnnnnnnnnnnnnnnnnnnnnnnnnnnnnnnnnnnnnnnnnnnnnnnnnnnnnnnnnnnnnnnnnnnnnnnnnnnnnnnnnnnnnnnnnnnnnnnnnnnnnnnnnnnnnnnnnnnnnnnnnnnnnnnnnnnnnnnnnnnnnnnnnnnnnnnnnnnnnnnnnnntgccannnnnnnnnnnnnnnnnnnnnnnnnnnnnnnnnnnnnnnnnnnnnnnnnnnnnaagacctctttcttccaggctttgggnnnnnnnnnnnnnnnnnnnnnnnncaccatcgaaattctaagcgatgtgcagctgataaaaactggagacatagcaggagccagcgaaccccac

SEQ ID NO: 1867 - DNA, 525 bp, Cricetulus griseus
  misc_feature (49)..(49): n is a, c, g, or t
  misc_feature (89)..(89): n is a, c, g, or t
tcgaggggtcgactccacggcggtcgcgcccactggcgtccgcgcgttntcctactttttaacattagataaggtgtaacatgtaatantgctaacagaaaagcaattaatttaaaatatagatgaggccatcattcaaagttgtgatagatccaatcagtaaatattcaagcaagtttagaattaagacattaataactttgtttctcttggaaggtttaaaattagaggaatatagtgaataactcagtatttaatggtatataatattaaaactctggtgcatttgtattgctccaagatgaatatacaagtacttgtaataagacattattacagtcgtttttaagataattcatgtctttcttagatgcctttgagtaatggacagatgggccagcctctcaggcctcaggcaaattatagtcaaatacatcatccccctcaggcatctgtggcaaggcatccctctagagaacaactcattgattatttgatgctgaaagtggcccaccagcctccata

SEQ ID NO: 1868 - DNA, 578 bp, Cricetulus griseus
  misc_feature (491)..(509): n is a, c, g, or t
ttggtgttgcacctgtagcccttaagtgtttctaggaaagcttgtaaaccttggttttgtttttctaacctcatccacccatcgtctggtctcttagtgtaaaagtatcctgctctgcgcatccttaaactctgtgcagtctaaaaccggtgtatttgctatatcgagatagggcaggaactactgtgtccctgatgcagacccttgggacatactgcatttcaagcctcttcaaggatcggtcatgtaagcctgaccggaagtttcctacagtgagcgtcacgcctagtactgagtacccagcacctaagagttgctgagtatatggggggtttcggtcatgatcagatactttgaacctcgcttacctagctcgagcagagtcggcccttttttgttctattttccgcaacgggttttgcttccttttttactgaactggtcccatagaccaagctgtccttgaactcagagatccgcttgcctctgtnnnnnnnnnnnnnnnnnnngaggtgtgtgctttaaatgtttttgttttgttctgttgcttgtttttttcttaaagcgggcctttctaa

SEQ ID NO: 1869 - DNA, 578 bp, Cricetulus griseus
gcgcccggggcgcgcggccgagcggcgagagatgctgggcatgtacgtaccactacaggttcaccctgacatacttccgggtccaggacaggatggggctctacactgtccgacgtgtgcgcaagggtagaaaaattaggaccttgtgctggatagaagataatgcctgaagacttggatgaaaatctggactaccgactgatgtgggaggtccgtgtgaccaaaggagaatttctgtatattttagatgctaccaaccccagacactccaactggtttcgatttgttcatgaagcaccatctaaagaccggaaaaacctggctgccattcaagaacgatagaatattttctactgcactctatgatattcaaactgataccgatcttctgattggctacctggacagtgatgtggaaacacgggacgaggatgagcaacaccctctcaccatgaacaaagaatgcaaatgtgaccactctagaggacaatcatcagctgcatgcgaatgtactgcatattaatttggcgatctgaatgaagagacattgataacgaaggtaagttgcattactagga

SEQ ID NO: 1870 - DNA, 580 bp, Cricetulus griseus
cttccctaagctgtgtccctgacactgaggtcctgacgctgtggagactctaggcgctgccggccggccgtggcttccctcctgggcctgagctacagcagaccctacagcagaacgttctttttacacttcaaaatgggatcctgtaagaaggttactctctcagtgctcagccgggagcagccagagggggttggagctcgggtccgcagaagcattggcagacctgagttgaaaaatttggatccgtttttgctgtttgatgagactaaaggaggaaggccgggagggtttcctgatcacccacaccgaggttttgaaacggtatcttaccttctggaagggggcagcatggcccatgaagacttctgtgggcatgttggtaaaatgaacccaggagacctacagtggatgactgcaggccggggcattctgcatgctgagatgccctgctcagaggagccagcccatggcttacagctgtgggtgaatttgagaagctcagaaaagatggtggaacctcagtaccaggagctgaaaaatgacgagatcccaaaacctaccaaggatggtgcgacag

SEQ ID NO: 1871 - DNA, 579 bp, Cricetulus griseus
  misc_feature (458)..(473): n is a, c, g, or t
gcactacagtggaaagttgggttggattaggtaggagggagtaataggatgctgggcatgtagaaaataaggagaggtgggcctaattatgatagtataaaaagttctgcattatatttattaggcacccaaatgtgtgatacagatgtgcaattggaagtgactttttggtggttttgaataagtagaagaaagtgggcagagctttcctactcctggtttcttgatggtggtgtgaagggtttttgtggggtttgtgttttttgttttggagacagtggataagagcagagagaaagtatgacctttatagacattcatgatttttcatttacatattaaagtgaatgcttcctgtctagctgcataagccacaaacagtatataatgcatttctctgaggtcaggcctggatatccatttcaggctcatcagtattttcttgtcttctgtgggcnnnnnnnnnnnnnnnnctaaaagctttacaggtcaccagtagccaggaggtgttcaagcacaatgtgctattgaaagctgattggttggtacagacttagcatgccttttaggaaattaaag

SEQ ID NO: 1872 - DNA, 507 bp, Cricetulus griseus
gaacaaaaaaacaaagtaaagatgtaaaaagaaaccagtgcacatatattctatttccatggctttatacctcactaaacctctattaccatataaatacaatatgaacagaagataatctcacaagttgcaaaatgcatagtttggtggtgttttgtttatttttgaaatctcatttctaaattccaattgggatggaattttcaaaagcattgatattaatatagatgagcatctttaaaatgttgtagctgtattagagtaatttaagaaagataaatagaaggtttaatgaaggagctaaatttaaaatatgagtatgctaccatgagagatgtttgccttgaagaaaatgctgtaaacacagggagaccacacgtcatttattatcagttgtctgatctcaaggcagtcactttcagcttccatataccatctatcaaatagaaataatacttaacagaattactgtgaagattatgttggataatgcataagaacccatat

SEQ ID NO: 1873 - DNA, 196 bp, Cricetulus griseus
atgttccaacatcttcctctacatccacatctaccacgcaaacccacaactacacacagtactcatgaccgaccaacagatataatacctgccctacatgcttgcactaccacttaaactggcaaggaaaacggggggggaaagaccaaatcctatggcaaaacctgtgcatctatgtgcccttttaactccctgg

SEQ ID NO: 1874 - DNA, 510 bp, Cricetulus griseus
  misc_feature (160)..(178): n is a, c, g, or t
ctggttggaatagtcagaagtactttgttgacaggccaaggacatttatttttatactgtaggccctttacaggatgattgatatagtacatgatacaaaaggaaaaccttttacagataaaagttcaaataaaatagcccatattggttttctagaagnnnnnnnnnnnnnnnnnnntcctaccattctgagggtttgaaaatttgatcttttctcttttctgggctatttattgacctgatggttcagtttattacagcctgtgcagttgatctctcttgtatccaagttggtatcaaagcctaaacctgaatattctggttgccagttgtgaccaagtactcgataaaaaacttgtcttgaagcacagggctgggaacaaaaacctggggtttggttcttaagaagctgaagctaccagggtaaaaatggtgagtaagtgtgaggacagctcagttaccccaccccaccccccacgggttatccccagcccaagggtgagaccctaa

SEQ ID NO: 1875 - DNA, 601 bp, Cricetulus griseus
  misc_feature (36)..(36): n is a, c, g, or t
  misc_feature (43)..(43): n is a, c, g, or t
  misc_feature (48)..(49): n is a, c, g, or t
  misc_feature (58)..(58): n is a, c, g, or t
  misc_feature (81)..(101): n is a, c, g, or t
  misc_feature (586)..(586): n is a, c, g, or t
agtacgggccagtgaatcgcgccgtaatacgaactncactatnagggnncgaattggngtaccgggccccccccttcgagnnnnnnnnnnnnnnnnnnnnntggtccaagaactctggtgtggtcctgagaaagagcaaggtggaaaaatctgcctttgaattttctgagactgaatctatgcttaaaattgcagaaaatactgggagggccctatgtgtgggggcagtacgatctattggttctgcccccatgcttcccttacggcggaatggagaacccttgtcttacatttgtgactcctactctactggcaggtgacaagtcactctccaatgttattgcacatgaaatatcccatatctggacaggaaacctattgactaacaaaacctgggatcacttttggttaaatgaaggacatactgtctatttatagcgtcacatttgtggacgattgtttggggagaagttcaaacatttccatgctttgggaggatggggagagctacagaatacgacaaaaacttttggggagtctcatccctttaccaaactggtggtggatctgaaggatgtagacccanatgtagcctattcct

SEQ ID NO: 1876 - DNA, 581 bp, Cricetulus griseus
cagaatggagaattcatgactcacaaacttaaacaaactgagaatgctttcagccccagccgcccaggatgccgggccggtggggacaaggaagctgaaggtgcccctcaagtggaagctggcaagaggctggaggaactgcgccggcgccgcggggagactgagagcgaagagttcgaaaaactcaaacaaaagcaacaggaggcagccttggagctggaagagctgaagaaaaagagggaagagagaaggaaggtcctggaggaagaggagcagaggaggaagcaggaggaggccgatcgaaaagctagagaagaggaagagaagaaaaggctaaaggaagagattgaaaagagaagggcagaagctgctgagaagcgtcagaagatgccagaagacggcttgtctgaggacaagaagccgttcaagtgtttcactcctaaaggctcatctctcaagatagaggaacgagccgaatttctgaataagtctgtgcagaaaagtggcgtcaaatctactcatcaagcagcggtagtctccaagattgacagcaggctggagcagtataccaatgccattga

SEQ ID NO: 1877 - DNA, 314 bp, Cricetulus griseus
  misc_feature (182)..(182): n is a, c, g, or t
cccaggcagagaatctgccctggctggctatggggaggggtagaggtaggttttggggcagaggggagaaaagagccctggaaacctttccctttaacctgacatatttatatatttacagcaataaaggagaagggggagggatgggggatgactggggtcacattggttcttccatggangggaacgagaggccacttagcacccccattcaagtcacattttactggcttttaacctttaaagcctccaaccgaaaaagttggagggtgaaataagggaatgttggaattaaagggccggaaccccaagtc

SEQ ID NO: 1878 - DNA, 196 bp, Cricetulus griseus
  misc_feature (30)..(54): n is a, c, g, or t
atacgccagtgacgccgtatacacacttannnnnnnnnnnnnnnnnnnnnnnnncgagtctcccaccgtccggtcataacgcagtgttgtgaaaaccaccgctaattcatccactgggaagaaaacatatactcgtgcttggcactaatcagcaatcaccaccggcactgatcacaagtggggatcgacgacaaca

SEQ ID NO: 1879 - DNA, 127 bp, Cricetulus griseus
  misc_feature (25)..(57): n is a, c, g, or t
actgtgtgggactgcgtacccgtcnnnnnnnnnnnnnnnnnnnnnnnnnnnnnnnnnagccccccctctaggtcgacccacgcgtgcggtgtgcgatgacagccctgagctccaagttgatctctga

SEQ ID NO: 1880 - DNA, 579 bp, Cricetulus griseus
gttaatggttgttgtgtgtatatttctacatctgtctaaatataattaaaaccatgagattacattaatgaaatcaatcccaatctagttctgcatacttgcaaagctttccctggtccacatgtgtaagtgaaaagacaatcttatgcataatgtacagacactcatcagtgtctgtgtcagtgtccagacagcatgcatataaagtttactttggtatgcgtatctgcttgactcatcctatgtgtaacagactcttaaccttagaaagcctgtagctcctgtccagaagtgcaaccttttgggtcattatccaaaccaccaccaagtagatgtcagttcttcccacaacgaatgtgggaatgaatgtattctattccagtccaatcaaaatcccatcaggaactcaacaaatcttgtagaattcaatagggaaagatctatgaaaaaaaatatgccagtttgaggaaggaaaaattagagaagccaataacagtgttttagtggaaacatagcacaaaggtccttgttcctacagatctccagagaaaccaggaatgttaagcacacaggattgtc

SEQ ID NO: 1881 - DNA, 575 bp, Cricetulus griseus
  misc_feature (2)..(67): n is a, c, g, or t
annnnnnnnnnnnnnnnnnnnnnnnnnnnnnnnnnnnnnnnnnnnnnnnnnnnnnnnnnnnnnnnnnttaagacaattttataaatactctgcagcttttttttctttttagctcttaaacatataatttaataacttcgtaaaaggaacttctcttttaaataaagggctatataaccacacaaataggtcatgtaaacagtgacaccggacccatcgcaggacacactgacacgcctcccacccacacttagaaccggcgatttggtcttatccagtgcactgtgccaggctccagcaccatggtttctgccccagtgcccaggctggtggcctacccatccagagccttcaagacataaccacttttcagggcagagcccatctcttccttcgggatcaagctgagaggcccactggaatctgaagagaaagctcccaagtcccactgcagactggcagcctgtagggcctgcagaccaccagagagaaagggcagacctaagcccagtgcactcttgtccattcctgcagtgcccactctggactcctagcctgcatggccttggtacaaa

SEQ ID NO: 1882 - DNA, 563 bp, Cricetulus griseus
  misc_feature (11)..(24): n is a, c, g, or t
  misc_feature (26)..(63): n is a, c, g, or t
  misc_feature (77)..(90): n is a, c, g, or t
  misc_feature (92)..(108): n is a, c, g, or t
  misc_feature (126)..(148): n is a, c, g, or t
  misc_feature (207)..(229): n is a, c, g, or t
  misc_feature (240)..(253): n is a, c, g, or t
  misc_feature (255)..(289): n is a, c, g, or t
  misc_feature (399)..(431): n is a, c, g, or t
  misc_feature (448)..(467): n is a, c, g, or t
tctttctgatnnnnnnnnnnnnnnannnnnnnnnnnnnnnnnnnnnnnnnnnnnnnnnnnnnncatgcagatcttcnnnnnnnnnnnnnntnnnnnnnnnnnnnnnnnagaggtggagcccagtgnnnnnnnnnnnnnnnnnnnnnnncaagatccaggataaagagggcatcccccccgaccagcagcgactcatctttgccggcnnnnnnnnnnnnnnnnnnnnnnntctttctgatnnnnnnnnnnnnnnannnnnnnnnnnnnnnnnnnnnnnnnnnnnnnnnnngtggctattaattcttcagtctgcattcccagtgggcaatggatggcattaatctgcactatagccatttgccccaatttaagtttagaaaatccaagtttcagtaatannnnnnnnnnnnnnnnnnnnnnnnnnnnnnnnnttgttgcatggtaagcnnnnnnnnnnnnnnnnnnnncgccccccccgcgggggacccccacctttggtccccttaagggagggtaattggccccctgggggaaaccagggcataagcggttccctgggagaa

SEQ ID NO: 1883 - DNA, 579 bp, Cricetulus griseus
gaaccacagtaactggctattcttgcttccgtgcagggatcagcaccgaaggcaacagcacagggcattctgggaacaatctgggttacaaagtggccttattcgcaggaatcatatcaggatgcatcatcttcatcgtcatcgtcatcatcatcaccttggtggttctgttgctcaagtaccgcaggaggcaccgcaaacactctccacagcacaggacaagcaaggtggcaacaactctggctgcgaacccagtgatgttctcatacccctaaggactgcagacagtgtctcccgcccacactatgagaaggtcagcggggactatgggcacccagtgtacatcgcgcaggagatgcccccacagaatcctgccaacatttactacaaagtctgaggcctgggaccttcgcctcccaagggaactctcaccttgttgtgggcgcagggactgcctgagcctggctctgggggcggaatgcctcctggaagaacctggagctggacagttttgtaggctgcaacttttcagccttggggaaactacagaccctccccagaagctggaagactgctaag

SEQ ID NO: 1884 - DNA, 567 bp, Cricetulus griseus
tccaaagaatttcaattgctttgttgaacttttactaatgatcttgtttttattttctctcttgtttttggtttttcaccattgatattgtatttagaaggtttcaggtgggtgaaacctcctattccatgcgtgaggtgcctcgctgaagggagctcgaggcctggatctagggcagacacacaacctcctcctcttccagcaaggaacgcaccgaaaagtcacatgatgagaaatatggtaacgggtttgtaactgccacagcaaaacaatttgcctccatgcctgaatcttctgtcttgtggcttcagaaacagcttaaaataataattttatttacgagcaagttatgtaaaagaatgttttatactatagccacaattctatcaaaaataagtaaaagttaattaagattaaaattattagataatttactagtaaaagcttctaactcttcttgttgttcattttttttcctttttcttctttgtttggattgcagcattctgctcttctgatgatgcgctgtgaccctgcagtagcgcaaaagctgcgcagcgttaatgc

SEQ ID NO: 1885 - DNA, 599 bp, Cricetulus griseus
  misc_feature (26)..(71): n is a, c, g, or t
atgtgctggaaatgttgtcccgctcnnnnnnnnnnnnnnnnnnnnnnnnnnnnnnnnnnnnnnnnnnnnnnagtcgacccagcgtgcgccccgcgtccggcagctgaggcgcctacaagaagagaagctttgcaaaatctgcatggatagaaatttgctgtagtttttgttccttgtggacatctggtcacttgtaaacagtgtgctgaagcagttgacaaatgtcccatgggctgcgcaatcattaccttcaaacaaaaaatttttatgtcttaattgagagcaacagtaggcatgttatactcttcttactctaattgaatgtgtgatgtgagcaaactttaagtaatcagcattgcattccattagcatctgctgccaagtggaaacaaatgttaacagcactggtactgtctaaactttggatttctggaactttcaggttattagctatatcgtctatccagctttttactcaattaaagccttagacaaagaagcatttaatattataacttttcaccttgtgtatttgtagtacactgacttgatttctatgcgcaagtgaattaatcactaccatttttcattccttttgg

SEQ ID NO: 1886 - DNA, 356 bp, Cricetulus griseus
  misc_feature (2)..(46): n is a, c, g, or t
annnnnnnnnnnnnnnnnnnnnnnnnnnnnnnnnnnnnnnnnnnnnaaagcagtgggctgagacagggcagagctgcccactgctgctggcacctgtcaatctcaatgaatgctactctgctttcctacattctggatgtcaggaacaggtcttgaaggaacttcagaactgcacagaggacatgtcactgcgagacggcctttaaaagtacaaaatctaaagctctaaatgtacggatcaatttctcaattctggacatacacaatgaactactaaaactaatatactctgacgacaatattgacagatatgaaaccatgaccacaggtattaaaaaccatcagaatacaaactg

SEQ ID NO: 1887 - DNA, 314 bp, Cricetulus griseus
aaaatgtgcttgatattgatagcatcatgacgaattgtatattttcaaaattagctgatgtgttttataaaatgttgagaccaaagtagtatagaagagtatgacatattttaatttaattgtaagatgattagaagtatttgtaaaactctatatattaaagctggtgattatagaacagtaatattattgttgtgctcgtatccctacatcacagggcaagtacaccctggggtcttgtctcagcctatctactatggctacagttgctcctcagtacgcattatcgttccgttacaattacagcctcctgg

SEQ ID NO: 1888 - DNA, 581 bp, Cricetulus griseus
  misc_feature (580)..(580): n is a, c, g, or t
gaattccaaaatatgactatactaattgcagttataagccaaaaagacttaaaagacatgaaacagactcttggagataacattaccgtgcaaatgtattctccatcctggcctaactttgactatactatggtggttatttttgtaattgctgtgttcactgtggcattaggaggatactggagtggactcattgaattggaaaacatgaagtcagtgacagatgctgacgagaaagagacgaggagaaagaaggacgagtatttgactttcagccctcttacagttgtcgcatttgtggtcatctgctgtgtaatgatcgtcttactctatttcttctacaagtggcttgtttatgttatgatagcaattttctgcatagcgtcagcagtgagtctgtacaactgtcttgctgcattggttgataggatgccatgtggacagtgcacgatttcctgtttcggcaaaaatattaaagtgatcctgattttcctctctggactgtgcatctctgtcgctgttgtgtgggctgtgtttagaaatgaagatagatgggcttggattttacaagatatcttang

SEQ ID NO: 1889 - DNA, 581 bp, Cricetulus griseus
ataaatacaaattgtaccaaccactctaagtcacacatctctgtgatgatttcaagccttcagatttattaaattgtaactactttaggcttcctagaagctgagagagccttgaccctttctgaaaaagtgagaaagcaagacacggacaggcagcagtgtgaggctgctatagaagcttctcccttgcctgctgtgtgcctttctgtctgtccatcacagtgacaaaggacgtaaatagtgtaagacatagtgagacctggtctcacaggtttcagtctatgatcagttgaatctgctgctttaagcttcaggcaaagcagcaacatcacagtggaagatcatgacaaaactaaaggctgttcatgtcgtggcaaccagagagaggcagaggagctggggattcatctgcataagtatgccctaggtcacctaccatgacttgtttaactatgaactcacctatcagttctccgactagtgaagggaatgcccatataactagtcacctatcacaactgccacgtgggaatcattcttgtaacacatgagtgtttggagctcctgtccaaactctaaca

SEQ ID NO: 1890 - DNA, 575 bp, Cricetulus griseus
  misc_feature (2)..(78): n is a, c, g, or t
annnnnnnnnnnnnnnnnnnnnnnnnnnnnnnnnnnnnnnnnnnnnnnnnnnnnnnnnnnnnnnnnnnnnnnnnnnnntctttggtgctcagaaccagggaatgcaacacaaagaccatcgagtgctgctcatatttacgaaagcaaacactacttgatagaatcttagcacaatttcctcatctgcttaatttcttccaacaaaacaggggagctaattcaaaatttccttttccctctcaagcacttttgaaatttccagagacctctctgatcagggggtgtttttagagccttttgatgtgtgtttaatctacatggcctgcttttagtgactacagtgacactgagcctctgtggggaggagtgcactttaattctttaatcctcaccttgcgtggccttatgagatactgggtcaggaaacccatttcattcttatctgccaaagagatactcagaagcacatcaaacatcagcacttcatctacacaaaaggatgagactttggtgtcactgaatatactcctttaacagtgactgctatgccatttggaaatgttttttaacctcag

SEQ ID NO: 1891 - DNA, 579 bp, Cricetulus griseus
actttgctatgagattgcatctccttgtattattggaagctatattcataaaagttcaccagaattgaagcttcttaaagtgcattgctgagttgtgatctcaggggataaactactgagatttggagttattaataactaactcatgatgcatattagctagtttcttctgtggttcacttgagtacctactgccttttactctattaatcatattgtgtcacccaaatttgtaacaaattgtgtattagttgctggctatgcccctgttctctagaaatgtatccatcaatcacatgagctatcatatcaccccatttcttcctccatacatttgattcagttacaggatttcctacttggaaacatctactactgtcccaaatgaagctggtagctctgaaccacaaacaccaactgctgatggtatagacaaagaccgtagaagctgattaatatctgtgatgatgcagtcaagagtgacttttgcattaaaaatggagacaatgccacatacaaccttcagatgataaaaaagtgtgttctgtcttaaatgtctctaagaagttttgggggctt

SEQ ID NO: 1892 - DNA, 513 bp, Cricetulus griseus
tcaacaaaaactgctggagaatcaagaagggcttcgtgcccaacatgcaggttgaaggagtattttatgtgaatgatgctctggaaaaattaatgtttgaggaattaaggaatgcctgtcgaggtggtggtgttggtggcttcctgccaggcatgaagcagattggcaatgtggcagccctgcccgggattgttcatcggtctattgggcttcctgatgtccactcgggctatggatttgccataaggaacatggctgcctttgatatgaatgaccctgaagcagtggtatccccaggtggtgtcggatttgacattaactgtggtgtccgcttgctaagaaccaatttagatgagagcgatgtgcagcctgtgaaggaacaacttgcccaggctatgtttgaccacattcctgttggggtgggatccaaaggtgtcatcccaatgaatgccaaagacttggaggaggcattggagatgggtgtggactggtctctgagagaaaggtatgcct

SEQ ID NO: 1893 - DNA, 556 bp, Cricetulus griseus
  misc_feature (2)..(62): n is a, c, g, or t
annnnnnnnnnnnnnnnnnnnnnnnnnnnnnnnnnnnnnnnnnnnnnnnnnnnnnnnnnnnnatgtccagtcattgttagatgcagcaaatcagtaccagattgaacctgtgaagaaaatgtgtgttgattttttgaaggaacaggtggacgcatcaaattgtcttggtataagtgtgcttgcagagtgtctggactgtcctgaactgaaagcaacagcagatgactttattcaccagcattttaccgaagtttacaaaactgatgaatttctacaacttgatgtcaaacgagtaacccagcttcttatccaggacactctgactgtgagagcagaggaccaggtttatgacgctgcagtgaggtggttaaaatacgatgagcctaatcgccagccatttatggttgatatccttgctaaagtcagatttgctcttatatcgaagaatttcctaagtaaaacagtacaagctgaaccacttattcaagacaatccggaatgccttaaaatggtgataagcggaatgagggaccatctactggctgctgaagatcga

SEQ ID NO: 1894 - DNA, 600 bp, Cricetulus griseus
  misc_feature (21)..(93): n is a, c, g, or t
catgtagtgcaaatgttatcnnnnnnnnnnnnnnnnnnnnnnnnnnnnnnnnnnnnnnnnnnnnnnnnnnnnnnnnnnnnnnnnnnnnnnnnnataatgagtccatccttgggactgaaggaatcctcagtaatccagaaggagctgatagcaattaatgctaacagcacctgaatcacaagctaggagtagcattgttcctgtcaccctatctctagggaggaagaaacagaagatgcggggggcggccggtctgtattctatacaaatgggtgagctcccgattcggtgagcgaccatctcaaaaaacaagatagagaacacttgaggaaggaaccgttatcaccttctgtccttcacacagcgcacgcgcatgcacttaggtttaaatttgtttttacagttgtttgttgtgtgtggggggggtagatatggaggtcagaggacaacttggtcgagtcagttctcttctaccacgtggattgtgaccacaaactcatgttgtcaggctggggaccggagaggaggttactaaagatgggtggctgggtgtgaagagatcaaatttagaatgactggtccccggacttcttagagtgg

SEQ ID NO: 1895 - DNA, 504 bp, Cricetulus griseus
  misc_feature (15)..(34): n is a, c, g, or t
cttttttgccttttnnnnnnnnnnnnnnnnnnnnatgggacgactgcgggtcattgcacataatatgcgggcgcaggcgctgtctggcttagcttccccactgggagtgggtggaaatgaccagactatttagtaattggggtccgggggccattcccttctttctcctgagggaagggtggtgttggcatgctggaagataggggctgtgtggagtgaatgctgacaaagggtaaaggaggacttgggagacagagaaagtagtggaaagtctcatttctggaaggagaaaaggaaatcccctaaaagcaaagcagtcagaaaaatcagggggactgttaagggctttgctcagcattccaagcagtgaatgtaagtgactcccttgagcctaagtaaaattactagtacagaaacacagacatggtggggccattgaagggctttttttaactgtttcttgaactctgccattcctgaagtggggggaagaagctcttggat

SEQ ID NO: 1896 - DNA, 507 bp, Cricetulus griseus
cgcctgcccactgagtgctgttactaggagtgatgacttccttttcacctgcaggataccttgggaaagccagctgccaaggatgttcatctaatagatcactgcaaatacaagtaagacttccagttacttatgtctggattgctgtgcgaatactttggagacctccatctgaagtatcatgttaattagggtggcttgcactgaggcctgcagtgcactgacctgagtcctgtgaggactatggggaagaatgagacatggttccttaatcaattaccattaattaaagaggcaggatcacctctctgcacagcacttctcccaatggttagattacatatttggcacagtaataaatgttataatcaggagcttcatatacacgtttgccattggagcatgtgcctcgctcaccataataaaagcttctaatcatccccattattggtacaaacagaccacgctacttatggaaattccccttctactgaattgacctaaaat

SEQ ID NO: 1897 - DNA, 392 bp, Cricetulus griseus
  misc_feature (148)..(241): n is a, c, g, or t
gctggtgagagctacacccacatccagtacttattggagcaggagagcttcgaccatgtccctgcccttgtgcgataccacgtgggcagccgcaaggccgtgtctgaacagagtggggccatcatctactgccctgtgaaccgcaccnnnnnnnnnnnnnnnnnnnnnnnnnnnnnnnnnnnnnnnnnnnnnnnnnnnnnnnnnnnnnnnnnnnnnnnnnnnnnnnnnnnnnnnnnnnnnnacatgaagagacgaagcattaccatgaccgatgggcttaccactgacaaggtcacccggagcgatggctgccccaacagcacctcacttgcgcatcctcgggactccatcataaactgtgccctcagcatggaccagattccagatctaca

SEQ ID NO: 1898 - DNA, 468 bp, Cricetulus griseus
  misc_feature (42)..(80): n is a, c, g, or t
  misc_feature (240)..(281): n is a, c, g, or t
ccagggagaaacgtgtgaaactcgtattacgtataactatannnnnnnnnnnnnnnnnnnnnnnnnnnnnnnnnnnnnnncgcgggcgccaagttctccttcactcagaaagcagctttttgtcacagttgtgaagacatctaatgccacaaccacaacagtcacaactacagcaagcaacaacagcactgcacccacaaatgccacatatcctatgcctactgccaaagaacactaccnnnnnnnnnnnnnnnnnnnnnnnnnnnnnnnnnnnnnnnnnngaggggtttctagaaatagccctttggattgtggagcagcatccccaaataaaggggcatcttcttccgaacaggaagcaagtagtccgtcagtagtagaaacctccaataggcccccacacagcagcagttcttctgggaactcatcaggtcattccacgcattagcagcctccgggatctgtttc

SEQ ID NO: 1899 - DNA, 567 bp, Cricetulus griseus
  misc_feature (415)..(432): n is a, c, g, or t
  misc_feature (534)..(534): n is a, c, g, or t
cgaacaggccagactggcaaggcctccagtgaagctgatccagctgctgacttgattgacatgggtcctgacccagcagccaccagcaacatctcatcccaactggcaagaatgaaccttggctccagcagtgtgagagctggcctgcagtcgctggagacctcaggtcacctggaagatgactttgacatgtttgctctgactcggggcagctcactggctgaccaacggaaaggggtcaaatatgaagccccccaaaccacagatggcctggctggggccctggatgcccggcagcagaacaccagagcgatccctgccacccaggcccgcatcatggaggacattgagcagtggctgtccacagacgtggggaacagtgctgaggagccctctggtgtcaccagtgaagaannnnnnnnnnnnnnnnnngaacgggccaaagctgctgatcgcctgcccaacctggccagcccttcagctgagggacccccgagaccttctcttggcacagctcctcggaagaagacccangagaaagatgatgatatgctgtttgccttatga

SEQ ID NO: 1900 - DNA, 568 bp, Cricetulus griseus
tgtcgggctgcggctctccctcgagtcccagcgtccctttctgtatagcccacctctggtaccatggctgtgttcgtcgctctcctgtccttgctggtgacgggtgttttagggaatgaatttagcatattaagaacaccagggtctgttgttttccgaaatggaaattggcctataccaggagatcgaatcccagacgtggctgcattgtccatgggcttctctgtgaaagaagacctatcgtggccagggcttgccgtgggtaacctattccaccggccacgggctaccattatggtgatggtgaagggagtggacaaactggatctccccgtgggcagtgtcatctcctaccctttggagaatgcggttccttttagtcttgacagtgttgcaaattccattcactccttattttctgaagaaactcctgtagttttgcagttggctcccagtgaggaaagagtgtatatggtgggaaaagcaaactccgttttcgaagacctttcagtcactttacggcaactacgtaaccgcctgtttcaagaaaactctgttctcagctctc

SEQ ID NO: 1901 - DNA, 599 bp, Cricetulus griseus
  misc_feature (13)..(80): n is a, c, g, or t
atcgtgtggaaannnnnnnnnnnnnnnnnnnnnnnnnnnnnnnnnnnnnnnnnnnnnnnnnnnnnnnnnnnnnnnnnnnncgcgtgcgctcagggtgaggccatgggctccgtgcccgagttttactccaagaggaggcactacgatgcacagccctccaactcgctggaccaatatggattacgattgggcatgtggtactggaaagatgaaaccaaaactctggaatttagaagtgggacgcctgcagtagagctcaaggataaaggcaagaaagggaaggcggttcacttcgctgaaatggacggtccggcttctgaaaggttgacagataaaaggtttccctcaagggacgaaaagtcactgaaagtcttggagaaacgatatcagctgggcaatatcacgctggatgatgtcaagtttgttgctttgcttttcctccaagacactgaaatgcagcgggtctgttctttcacaacatttatgagagagaaaatatcagatactcaaaaagactggaaattctttgagtccttttatactttctgtacatgcatcgcttggattgtcttccgacgtcagtacctgacagagatcga

SEQ ID NO: 1902 - DNA, 581 bp, Cricetulus griseus
ccgagtaccaggtgattggtggtgctggactggatgtggacttcaccttggagagccctcagggcgtgctgttggtcagtgagtctcgaaaggctgatggggtgcacacggtggagcctactgaggccggggactacaggctttgctttgacaactccttcagcaccatctcagagaaactagtgttctttgagctcatctttgacagtttccaagacgaggaggaggtagaaggttgggctgaagctgtggagccagaagagatgcttgatgtcaaaatggaagacatcaaggaatccatagagactatgaggacccggctggaacggagcatccagatgctgactctgctacgagcctttgaggcacgtgatcggaaccttcaagaagacaacctggagcgggtcaacttctggtcagctgccaatgtggctgtgttgctgttggtagccgtcctgcaggtctgcacactcaagcgcttcttacatgacaagcgccctgtacccacgtagccccagccacagaggatgaatgaagcaacggagggcgaccggcatgtgtgacttgctggagacctccca

SEQ ID NO: 1903 - DNA, 579 bp, Cricetulus griseus
aattaccatgctcggcattaccatctcactccgtttacagttatcaacattatgtacagcttcaacaaaactcagggaccaagagccctatggaaaggaatgggaagcacatttattgtccagggagtcacacttggagcagaaggcataattagtgaatttacacctttaccaagggaagttttacacaaatggaatcctaaactaataggtgaacaccttcttctgaaatgcctaacatatgtggtggccatgcctttttactcagcaagtctgattgaaacagtacagagtgagataatccgagataataccggtatcctggagtgtattaaagaagggattggaagggtgataggcctgggcgtgcctcacagcaagcgccttcttccgttgctctcactcatcttcccgacagtgctgcatggagctcttcattacatcatcagctccatcattcagaagattgtcctcctaattctgaagagaaagacctgtaatagccacctcgctgagagtaccagccccatgcagagtatgctggatgcttactttccagaacttattgctaactttgct

SEQ ID NO: 1904 - DNA, 460 bp, Cricetulus griseus
  misc_feature (126)..(126): n is a, c, g, or t
caatgtattggcatctgggaagtaactactcattttagttggagatcagtatcccattagagcctttttttcagtgaggtggggtgggactgggactctccattagtatgaacatgtgtaattcancatggggcaagtgttgtctgggggggagatgaaggttgtcaggttgcataggttgatagtttgaattttgacttcaagttgtctgattctgattgccttgcttgtgaccttgcaagttggttgttcttagacagaaagtcaagcatacaaattgtttggcatagggcctgcccctcaaatgtcgttgtttgtgacattattgatcccttatactgtgatttattttccttatttgtttaaacaattgaggtatagtgattgtacatatggttagagtatggtgtagactggtttctaaggcaagaattgttgcatattgattgaattggtgcca

SEQ ID NO: 1905 - DNA, 582 bp, Cricetulus griseus
actcagagtatctatccatggagtaaatgggaatgatgagcccaagggtgtccactcagtgccaggtgtctcagaggccaaagtgctggtcattttgtagctctaggagacaggactgtgagacctaccaggaaaaaggacttggggaccctgctgacaggtgacagatcctagagtgtggtccagggctctagagaggggattaggatggggatgttgcagcctttggagctagtgttggatacaagtgactcagagtgacgccagggtgtctgcatcttggtgtctgagtgaatgaagacctgagctcaatgccgagtggttttgggtgaggtcttccccttgctgagcttctgctgtgtgtctgtgtgacagagccatggtgaaaactggtcaggaatattgggatggaatgagagcagagccagcactgggcaagctgctaagcactgagtatcgtcatacacatcctgacatggctggtagagctagcagggcttgcagcagctgggtagctgggcattggtctgtggtgatgggctcaagagcccagggatttaagtgggaagtgtgctactccag

SEQ ID NO: 1906 - DNA, 583 bp, Cricetulus griseus
  misc_feature (526)..(551): n is a, c, g, or t
tctttttgggggttcaatgttgttttgggtttttgttttcttcacagtcttgaacattttacagtagaactcatctaaaaatggatttgggtaggggaaacatgcacaaaatcttttcataattaaaaggagccttactttctttatgcgccacatggacagaatttatgtaaacgtgaatttattttattttaagatgtgtgtttcccctcactgtctgcagctcccaatgttgtcatttttaaatgttatatatacatctcaagggtcaacctggcccttttcctccagacccgacctttcatttcccactcattccaacaggaggcacttaggggagactgggatggggacatggagagcaacccaagctccttaaacttaatgttattgttattattactactaataaagtgaggcaggaaatgcttctccttgtaaaactccctcccctccctatacaaacacacagagtgtttctaggtagacttcattgaaatacctgtttttcttgaatcaagtggannnnnnnnnnnnnnnnnnnnnnnnnntattcccactcagcactcagagacacaaaata

SEQ ID NO: 1907 - DNA, 580 bp, Cricetulus griseus
agtagaggaggagtttctggacatggcagtgctgaaggactacatagcatatgcacatagtaccatcacgccccgactgagtgaggaggccagccaggctctcattgaggcctatgtgaacatgaggaagattggtagtagccggggaatggtttctgcttacccccgacagttagagtcattaattcgattagcagaagcccatgctaaagtaagattttcagacaaagttgaagcaattgatgtggaagaggcaaaacgccttcaccgggaggctctaaagcagtctgctactgaccctcgcactggcattgtggatatatctattcttactacagggatgagtgccacttctcgtaaaagaaaagaagaattagcagaagcattgaggaaacttattttatctaaaggtaaaacaccagctttaaagtaccaacaactatttgaggatattcggggacagtctgacacagcaattaccaaagatatgtttgaagaagccctgcgtgcattggcagatgatgacttcttaacggtgactgggaaaactgtacgcttgctctgagccatcagttgctgc

SEQ ID NO: 1908 - DNA, 582 bp, Cricetulus griseus
  misc_feature (231)..(253): n is a, c, g, or t
  misc_feature (301)..(368): n is a, c, g, or t
  misc_feature (370)..(383): n is a, c, g, or t
  misc_feature (392)..(415): n is a, c, g, or t
  misc_feature (500)..(519): n is a, c, g, or t
gattaaagagacatcgatcttgtaacaccctagcgatggcatatcacctgcacggcacgcgtacgatgatcgcccagggaaagacagggtcgacctggtgactccaactacttgcttaagatgatccaacttttggatgatgacccaaaatgctttattgggggagcagacgatgtgggctcaaagcatatgcaccaaatccacgtgtcccttccagggaaggctgtggcnnnnnnnnnnnnnnnnnnnnnnntgcgcaaggacctccgggggcacctgggaaacaacccacctctggagnnnnnnnnnnnnnnnnnnnnnnnnnnnnnnnnnnnnnnnnnnnnnnnnnnnnnnnnnnnnnnnnnnnntnnnnnnnnnnnnnngccaataannnnnnnnnnnnnnnnnnnnnnnntgccattaccccatgtgaagacactgtgccagcccataacactggactggggcccaagaagacctctttcttccacgctttgggnnnnnnnnnnnnnnnnnnnncgggcaccattggaaagctaaaggatgtgcagctgataaaaactggagactaagtacgagcca

SEQ ID NO: 1909 - DNA, 581 bp, Cricetulus griseus
ctgcggctgcagcctctgcgtccgagccggaggttgagccccaggcggggcctgaggccgagggaggggaggatgaggcgaaggcagccagtgcggacaggaatgtgcagtcccgcgctgtggcctccgacgcggccaagaccaaagggcgggggtgggacctgcagcgggaaggcgtgagcgagagtgacggggatgaggaggacgccatggcttcctccgctgagagctcccccggggaggacgagtgggagtacgacgaggaggaggagaaaaaccagctggaaatcgagcggctggaggagcagctgtccatcaacggctatgactacaactgccatgtggagctgatcatgctgctgcggctggaaggggagctcaacaaagtgaggatggcccgacagaagatgagcgagctcttccccttgactgaagagctctggctggagtggctgcatgatgagatcagcatggccatggacggcctggaccgagaacacgtgtatgaactcttcgagagagccgtgaaggactacatctgtccaaacatttggctagagtatggccagtactctgttggt

SEQ ID NO: 1910 - DNA, 581 bp, Cricetulus griseus
  misc_feature (155)..(174): n is a, c, g, or t
  misc_feature (436)..(459): n is a, c, g, or t
  misc_feature (557)..(557): n is a, c, g, or t
ttaatttactatttccctaaatgaactgtaatgtcatgtataatacactttctgtatttttcactgtgcttagtgtccaacaaagtgctgactcacataaaaaaaaaaaaacagcagcaacaacccacatacccccagacaaaacctccaggggnnnnnnnnnnnnnnnnnnnnacaacagtcaaaacaatcaccttttgtctccctcctgtttgatgaaaagtctataaatggaatttatcacagcttctccaaatttattttaatatatggggaaaaaaaaagttctataaaataagttccaaaaaaaaatatagggactggggatatggatctttttttaaaatgaaaacttcagtttgatacacagcctaaaaaacagggtgtagggcatggcttaaattatagtgccaagggagtagagacagtcaaaatnnnnnnnnnnnnnnnnnnnnnnnntttgcctaacaattaaatcatgccctctgtgagagactctgtttgactcattctggcaaaacaaggtgaacactgtctgaggaaaacatttaaattanacttcattgacctctgccctccac

SEQ ID NO: 1911 - DNA, 347 bp, Cricetulus griseus
gccaccgagggggagggccaccttttgtgccctttattaagggttaaaagcgcccttggcgggactagggaaataggtggatcccgagcgaaatgattttcctaaaatgtgactttaggccaaacatattcacaaaagggcagtttcactaaaatctgccagggggggggggtttcttggtaactagtctgctagctgctattgtacttagctttttaaaaatgggctgaatttcaaaatacaaaacttgctggggtgttaatgcatgtgcaggctccaaaattgttgtgctccgccctgtattcaatagtccacacagcaaaagtggccaggtacactgtgctcag

SEQ ID NO: 1912 - DNA, 347 bp, Cricetulus griseus; identical to SEQ ID NO: 1911

SEQ ID NO: 1913 - DNA, 566 bp, Cricetulus griseus
ggttaaataaaggtgttccccatacacccgacagagtattaagtcttaattttatagtgacaatgctactagtatggtccttgataaatagttttaaaacagggaggttgcactttatcctaacagtcgagtggggtttggtaaatactgatttcaatttttaagcgtggaattttaattaatggagtttagtggtttcactcttagcattcatttatgcacaaaggctctgggtttgttagtaggtaataaaaattgattctgaaaacttctcagtttgtggaaggggtgttttgtggaaatggaaatctattcaactacttttaaataacattttaagagggtaatattaggaagcaattacgctatacattattacatggaaagtcaatattgctgatgtcaaccttagttttgggttttttgttttgctttgtttttggttttttaagaaatgtgtagaaaaatatgtacccaaaaagtgatttctctgaaggtcaatttatatttcctgactggcacttttttaatatttatacaagaagttacatttactgtttgctttg

SEQ ID NO: 1914 - DNA, 581 bp, Cricetulus griseus
  misc_feature (284)..(320): n is a, c, g, or t
gtaggatcaaattatatgaactctttccaggcttctcttccaaacttgagtattaaggagccttcatatagttcaagggtgagtctggagccagtgtgcggagtgctagcatgaaccggtttcagagatgtaataaaagtgtgcatgggatttcatgtgttgtaaaagctgaacaaattatgtagacatgtattttattaagaatgtgtgcaacttcttatgattataaaccttaaaaaatgctcagctggtgggtagtgatggcgcacggctttattcccaannnnnnnnnnnnnnnnnnnnnnnnnnnnnnnnnnnnntgagaccagcctggtctacaagagctggttccaggacagcctccaaagccacagggaaaccctgtctctaaaataatgtgtctgttactaggtattactactattaatattttgggatacttccttttgctctcactcttatgtgcattagtaaatgtgtctatttatatattggactttttttttcattttttgtttctttgaagatccacttttaaaataaaagtagatagtatgtacctatagagagaaaaacttaca

SEQ ID NO: 1915 - DNA, 600 bp, Cricetulus griseus
  misc_feature (7)..(7): n is a, c, g, or t
  misc_feature (10)..(10): n is a, c, g, or t
  misc_feature (14)..(14): n is a, c, g, or t
  misc_feature (32)..(32): n is a, c, g, or t
  misc_feature (43)..(43): n is a, c, g, or t
  misc_feature (56)..(56): n is a, c, g, or t
  misc_feature (70)..(71): n is a, c, g, or t
  misc_feature (78)..(79): n is a, c, g, or t
  misc_feature (125)..(125): n is a, c, g, or t
  misc_feature (156)..(170): n is a, c, g, or t
tacgtgntcncagntgttagatcgcgccgtcnaatacgaactncacttattagggncgaaatatgggtgnnaccgggnncccccccttcgaggggtcgacccacggcgtgggcgggcaggaatgnagcaatcgctcattgtattcctcgatgaatnnnnnnnnnnnnnnngtctcgggtgcccactgactacagatctcagccccacgagtgttcgataccattttcattatgaagcgtatcagtctggtcaaagcagaattcatttcaaactgggaggcgggggtcattttcttgcgctggtgacacacgagttccattctggctacagtcttcagaggacatggaaaaatgctcaaaagacctggcacactgacacacctatctgctggaaatgagccatctcttacaaagcatggacgtcctacaccggacatactcagcgacatccatcaatgccatccagggtggagcttttgaaagtccgaatgaggaaaatcgactacacatgaggtggcggttcatatctattgccaaacattctaaaggaaccctgcaggtccctaaaccttttgctgacccagagagactacactcttct

SEQ ID NO: 1916 - DNA, 150 bp, Cricetulus griseus
  misc_feature (2)..(16): n is a, c, g, or t
  misc_feature (112)..(127): n is a, c, g, or t
gnnnnnnnnnnnnnnntcccctctagtcgacccacgcgtggggcgccgcgtccgatggcccataagttttggagtttaattgccgttttggtgatccagaatgccaagtgannnnnnnnnnnnnnnnaagtgacctttatgaagagattg

SEQ ID NO: 1917 - DNA, 580 bp, Cricetulus griseus
atgaggtgagaggatatacgaaactgccaccataagacaccgaagaggccagacaccatgcatggtgccctcgccaagtaagatcatctttagttatctcatcattctgttatattcaaaacatgaaatatcccaaaataccaagagtggatgtaaagaagaaaggggagtggggatggaaagtgacatacaaaggcaggcccatcagagtaacagctgatttctttcttcttttagtttttaaaatttgtgtattccaataattaaaatcatttgacaaaaggatggtgctctgactaaactgcattttaccaactgcaggaaccttggacgtcttaagttttactgtagatttcagctcaccccaccatcattttccttcagcatgcacattctttccctttcctggccgccagactggctggcgggagatgcaggcctggcctctgttgttgacagttctgacacttaatgtgaaaggggcagcgcaggcatttaagcctggtcgaacctctgtatcctacagagttgtagtggtctgaaataaaagggctcccataggcttatatttgagtgtgtg

SEQ ID NO: 1918 - DNA, 582 bp, Cricetulus griseus
cacagatgactaagttggggcatggcctcctctctggccagtactcgaagcctcctgtgaaatccgagctcattgagcaggtgatgaaggaggagcacaagcctcagcagaatgggatctctccatgcatgttcaaggcctttgtcagcgagagccacccagaattctcctctaatagacaacaagatgcccaggagtttttcttgcacttggtcaatctggtagagaggaaccgaattggctcagaaaacccaagtgatgtcttccggtttttggtggaagagcgcattcagtgctgtcagacccgaaaggtccgctacacagagagggtggactatctgatgcagttacctgtggccatggaggcagcaaccaacaaagatgagctgatcgcctatgaattgatgagaagggaagcagaagcaaatcgaagaccccttccagagcttgtgcgtgccaagatcccattcagtgcctgccttcaggcctttgctgaaccagacaatgtggatgacttctggagcagtgccctgcaggcaaagtctgcaggagtaaaaacatctcgctttgcctcattccctg

SEQ ID NO: 1919 - DNA, 493 bp, Cricetulus griseus
cagtaagaagaaagtaattgtaagcaacaaaaagaggtttcagggagagtatggctccaatccagaggagagaccacctaacctgaagaggcccgaggattatgaagctgtgttcgtgggcaacattggtggggacttcaagattggggtggcaatacttcagaggagcattcgtctctacgcccccttttactcctccgacatcctcatcgcctcccccctgggcttgagaaccatcattggtggagaaggagagaagaagagagattttgacttcctgtcttctattgagcttctcatcatcgaccaggctgacatttacctgatgcagaactgggaacatgtcttgcatttggtgaaccacatgaacctgctgactttggagtcccatggggtggacttttctcgagttcgcatggagagccttattaactggtgcaggttctaccgccagaccctgctcttttgcgccctgcaggatgcccagatcaac

SEQ ID NO: 1920 - DNA, 566 bp, Cricetulus griseus
  misc_feature (38)..(101): n is a, c, g, or t
cctgtgtcaacctccgggacagccctcccaacctcatnnnnnnnnnnnnnnnnnnnnnnnnnnnnnnnnnnnnnnnnnnnnnnnnnnnnnnnnnnnnnnnntcactgcctgcccatcagctgggggtggccgcagtccagatggatgactggaagattgtcagtgggggagaggaagggctggtgtctgtgtgggattaccgcatgagccagaagctgtgggaggtgcactccaggcaccctgtgcgtcacatctccttcaatagtcacagcctcatcaccgccaatgtgccctacgagaaagtggtgcggaactccgacctggacaactttgcctatcacaggagacatcgtggcctgatccatgcctatgagtttgcagtggaccagctggcctttcagagctctcttcctgtctgccgcttaccctgtgacaccatggctgggtacagctatgacctagcacctcctctcccctatgacagtgtttaaggcgtcacctcatggagaagtgggaagagccagggtacaaatgccccacctgcaggagagacttgatcccacaat

SEQ ID NO: 1921 - DNA, 513 bp, Cricetulus griseus
  misc_feature (13)..(31): n is a, c, g, or t
  misc_feature (41)..(103): n is a, c, g, or t
tcccccctctcgnnnnnnnnnnnnnnnnnnntccgagaagnnnnnnnnnnnnnnnnnnnnnnnnnnnnnnnnnnnnnnnnnnnnnnnnnnnnnnnnnnnnnnncagcaccatgcccgcactcttggagcgccccaagctttccaacgctatggccagggctctgcacaggcacatgatgatggagcgggagcgcttacggcaggaggaggaagaggtggacaagatgatggaacaaaagatgaaagaagagcacgagagaagaaagaaaaaggagatggaagagaggatgtcactagaagagaccaaggaacaaattctgaaactacaggagaaactttcagctctacaggaggagaagcaccagcttttcttgcagctcaaaaaagttctgcatgaagaagagaaacggagacgaaaggaacagagtgacctaaccactctgacatcagctgcctaccagcagagcctgactgttcacacgggaactcacctcctcagcatgcagggggagt

SEQ ID NO: 1922 - DNA, 580 bp, Cricetulus griseus
gctcatttcactgcaggtgaaggagaaaggtgctgactacctggtgacagaggtggagaacggtggctccttgggcagcaagaagggggtgaacctccccggagctgctgtggatctccctgctgtgtcagaaaaggacattcaggacctgaagtttggagtggagcagggtgtagacatggtgtttgcctctttcatccgcaaggcagaagatgtgcatgaggttaggaaggtcctgggagagaagggccagaacatcaagatcatcagcaaaatcgagaaccatgaaggcgtccgcaggtttgatgagattttggaggccagtgatgggatcatggtggctcgtggtgacctgggcattgagattcctgcagagaaggtcttcttggctcagaagatgatgattggacgatgcaaccgagctgggaagcctgtcatctgtgctactcagatgctggagagcatgatcaagatacctcgccccacccgtgctgagagcagtgatgtggccaatgcagtcctagatggagctgactgcatcatgctgtcaggagaaacagccaagggggactaccctctg

SEQ ID NO: 1923 - DNA, 378 bp, Cricetulus griseus
cccagcagcctcaagagccagctagggttgcgtgagtttctttctctctgttccacgaacccaccaagccacagccggtcagctgtgctatttatctgactccctgtgtttccagactcatctgtccgttctcaggccaggaggggggagatgagcaacccgtatggctgccagatgtttccatctttttaggcttagagaaagagaggatctcagccaggcctaaccgatgctggctccaaggcgtgttccagggaccttcctattacataaatcccagctggagagacaactctggagctagcagtggggagtaggaatagggggtggggtgggaggggtgtctcatggatgggaggggcagcccaccttcccatt

SEQ ID NO: 1924 - DNA, 581 bp, Cricetulus griseus
aagttctggcagtcatgggcccaccatagcagcagttcatagcagtcatcatcacccaacagctgtccagcctcatggaggtcaggtggtccagagccatgcccatccagccccaccagttgcaccagtgcagggacagcagcagggggggaggctaaaggtggaggatgccctgtcctatcttgaccaggtgaagctgcagtttggtagtcaacctcaggtctacaatgatttccttgatatcatgaaggaatttaaatctcagagcattgatactccaggcgtgattagccgtgtgtcccagttatttaaaggccaccctgacctgatcatgggctttaataccttcttgcctcctggctacaaaattgaggtgcagactaatgacatggtgaacgtgacaactcctggccaggttcatcagatccccacccatggcatccagccccagcctcagccaccacctccacatccttctcagccttcagcccaatcagctccagctcctgctcagccagctcctcagcccacacctgccaaagtcagcaagccttcccaactacaagcacatactccagcca

SEQ ID NO: 1925 - DNA, 580 bp, Cricetulus griseus
  misc_feature (156)..(182): n is a, c, g, or t
  misc_feature (252)..(272): n is a, c, g, or t
  misc_feature (303)..(321): n is a, c, g, or t
  misc_feature (412)..(429): n is a, c, g, or t
  misc_feature (542)..(542): n is a, c, g, or t
  misc_feature (559)..(559): n is a, c, g, or t
ttccaatttgaagaatgttctagtttaaaagaatgcatctatttaatctttcccttgatgacttagggaggaagttgaaaagttgtggctttgaaataaaagcatcttatctgggtgtggtggtatgtatcttttttgtttgttttttttcgagtnnnnnnnnnnnnnnnnnnnnnnnnnnngtcccggaacttgctctgtagactaggctggcctagaactcacagagatatgcttacctctgcctccccnnnnnnnnnnnnnnnnnnnnnggccaccagtgcccagagggtggcatgtatnnnnnnnnnnnnnnnnnnncaggcagatatttttgagtttgaggacagctagaactatacagagagaccctgtctcaaaacaaaacaaaaaccacacacacaaaaaaacnnnnnnnnnnnnnnnnnnaaagtacggaaaaaacccaaacaatttatactgcagttcaatggtagagaagctgcttaccattcacatggccctagattccattcctgccctgcgagtataaataaggcccnaaaagataaaagaaaanataaaaaaaagggcgcgcccc

SEQ ID NO: 1926 - DNA, 579 bp, Cricetulus griseus
  misc_feature (334)..(334): n is a, c, g, or t
tgtgcaggcctggcagtggcttatgggtcccaggtaggatgcagcaggtcctcagaaccctggaagcccctcctctccctgcacctctcttggcagataggctacctttgctgctcagtccagaggggggaagcaaccattgtcaacggggtttgaggttacccttcgtctagaagaacagccagatagccttcttgatcccagtctcaaattctagcagacttcctcagctcagatgggagcccaccagtggacacttgggtgtctagaggtaagggaagggcctgttggcaacatgtctgctgtctgtcctttcagcctgtaagactgtgtntccacagaagaatgttcataaatgagtccttgctgtcccaacaagggacaggaaccaagaaaatgcacgcacatgcatactaccccagacttggaagaacaggtctaccaacctgcggtgtctttcggcctgaatgtatatgtccttaaccctccccccctgtgcctgctcactcctatgaaggctgggcggaagccctcgccccacgcccgggcccgtcgcgccaccgcgctccaaccctttgg

SEQ ID NO: 1927 - DNA, 175 bp, Cricetulus griseus
gtcgacccacgcgggcgataaaatttaattatttttaccccattctcccctctcttctccacatttccttctgaaatccttctgcccagcaagtctccctccttttatatcttctttttgtgtatgacccaactgaattaatgagagttgtttgcatgagtgggggggaggttgt

SEQ ID NO: 1928 - DNA, 581 bp, Cricetulus griseus
  misc_feature (302)..(324): n is a, c, g, or t
  misc_feature (411)..(433): n is a, c, g, or t
cctggccatcttggaactcacaaatgtcatctgtctgcctctacctcccaacaggactaaaaaggtgtgtgccatcacacacagcctatacttttgatacctttgtcttagagggtgcggactcatttctgctccgttgtctgagttaatcacccacagtgggaaaagaagagggaaataaaccttacctgcccataaaagaagtgccagagaatttgtagccatgtttaaaaaagctgccttctggggctggaaagatggctcagaggttaagagcactgactgctcttccagaggtcctnnnnnnnnnnnnnnnnnnnnnnnaccatctgttatgagatctggtggcctcttctggtgtgcagatatacatggaagcagaatgttgtatacataaaaaataaataaaannnnnnnnnnnnnnnnnnnnnnngggcccccaccgggggggagctccaccttttgttccttttataagaggtaatgcccccctcggcgaaatcatgggaatacctgcttccttggagaaatgtatccgccccagaatccgcgcccctttgttcccgttctgggtcacacgt

SEQ ID NO: 1929 - DNA, 149 bp, Cricetulus griseus
  misc_feature (4)..(31): n is a, c, g, or t
  misc_feature (42)..(64): n is a, c, g, or t
cgannnnnnnnnnnnnnnnnnnnnnnnnnnntccccctcgtnnnnnnnnnnnnnnnnnnnnnnngcgtgcgttttcaacacaggattttgtagccggatatctgtctgggcacctattacaaggcccatgccttttgggtgtggattca

SEQ ID NO: 1930 - DNA, 288 bp, Cricetulus griseus
  misc_feature (254)..(254): n is a, c, g, or t
gggagaatctgaaactcactgggtggggtggaggtgggtaccacttctttagagaagctggcattgaacccagggcctcatgtgtgcctgcttactggtactcccgccaacttactggtagacccaacccctgaaatatttcatcgagggggggacagttacataaaattagtttgctccttgctgttacatatagttttatttggttttctttcacttgagccagggtgttcaaatgttgcccaaggtaattntgagcctggctgcagtgatcctcttgtttaagcc

SEQ ID NO: 1931 - DNA, 580 bp, Cricetulus griseus
  misc_feature (509)..(540): n is a, c, g, or t
agggtccctacccagcttatccttctccactgacaccaacagcttgcttctgagcccactgtcccttgagtgggtttgttttcaatgcaagagctttgctagggacctgttccatggtcctgtatcctccaatctcccctccacatgatggggtcattagttactcaccagaagtctgacttcccaagaaagcttgaagaactgttgttggcttctaagttcagtcctactctgatgtcctgggcgtgctgctgctctgaatgctcggcctgacctgtttacatggtactggattgatggaagagcagatgccaccctccagagccacccagaatgaaagccagtgagcctattaaccgtgccatcttgcaaactgttttcaagatcaccattgctttatattgtagtaaccaatatgcgcaatatgttgaatgtatatgaatatactttgctatttctgttctttgaaaatgtaagaagtattttttctttctcatttctgttaaacnnnnnnnnnnnnnnnnnnnnnnnnnnnnnnnngcggggggagctcccaccttttgttccctttattgagagt

SEQ ID NO: 1932 - DNA, 582 bp, Cricetulus griseus
  misc_feature (539)..(558): n is a, c, g, or t
tttatttccccatttaaatgtgcccgtggttttatcagcctggtaacttaagagtccagatgtctaggataaaatggctgtcattctataaactgttcaccattctttaaggcttatatttacctcaggaaacttattctagtatggggggaccaattgaaatctcaagtgataaatacttctttacacctacacactggtacctaattctgtcttagttcagtgagccataggtcaggcagctagatggttagtgagccataagtcgggcggctagatggctgaaagctcattggagtaaaacaaggagtgcctgccagcactgaatcagggacaagtggctattccaaccagagtggcatctgtcatcagtaagatgaagggattgcctttggcagtgacagtgtcctattccaagtctggaatggcatttttctcacactgcagcccatgaagctaagtccctcagcatttttagagaacttttgaaaatgaatttagttgcataatcaagctgagcaatttccactgtgggcttnnnnnnnnnnnnnnnnnnnnccctgctcatcctggtgctgaaca

SEQ ID NO: 1933 - DNA, 581 bp, Cricetulus griseus
tgttgtggcctgtctgaagaaaaagctgttgagaaatttggggaagaaaatattgaagtttaccacagtttcttttggccattggaatggacggttccatcccgagacaacaacaaatgttatgcaaaaataatctgtaatcttgaagacgatgaacgtgtcgtgggctttcatgtactgggtccaaacgctggagaagtgacacagggcttcgcagctgcactcaagtgtggactgaccaaacagcagctggacagcactattggtatccaccctgtctgtgcagagatattcacaacgttgtcggtgacgaagcgttctgggggagacatcctgcagtctggctgctgaagttaagccctggtgtggatgctgccgccaagactacaggccactgccttgcttccttgcccacatctaggtgaagttcaagctcttgggctcttggcgcctgtccaaagtgctgtcctaaagccaccagatggcaggtagtaggctgcagcatcacactgaggtcaccttgacagactcagacagacattcggcagtgtgtcagggagatacattcatgaagtcaccag

SEQ ID NO: 1934 - DNA, 580 bp, Cricetulus griseus
ttaatgtgtcaggtcttgatacatgatttttgcttcagtaatgtttcttttacaattgtgttgttcttggatatggggcataaatattaagaatagaaatgtcattttgatggattttttcctttgatgagtataaagtgtcatcccatatctattttgattaattttggtttgaagtctattgtgtttagtattagcatggctacaccaggtttgaagtaacattattatgtggtaatgttacttttttttcttgctcaatctatttggtctgtaaatttcgtttaccttagaggtatgttcttctttagtgtagaaagtttttcttctatgattttgttaaaaagtatattctgggctgttgaacttagatttttttttacttcttttttgactattgctttggtgtttgtacttttcatagtgtaccagatttcctgatgttttatgccaatcatcttttagaattaatatttttttaacccatgtatctatttatttctaccatatgttcaatttgtagcattcaagaaagccaagaaaaataaacattcgaagtaaatgaataaaagcatttaag

SEQ ID NO: 1935 - DNA, 579 bp, Cricetulus griseus
  misc_feature (184)..(201): n is a, c, g, or t
aaggaggatggctcatgggctccgatgagatcaaaaaaggaagtgcaggaagttactgcctcctacaatggagttgacggatgcttgagctccacattggagcatcaggtaacttcacacaaccagtcctcaaataaaaacaagaaagtcgaggtgattgacctaaccatagacagttcatcannnnnnnnnnnnnnnnnnccctctgccaagaggacctgtccttccctgtctcctacatcaccactaaataataaaggtattttaagtcttcctcatcaagcatcgcctgtgtcccgcacccccagccttcctgctgtagatacaagctacatcaacacttccctcatccaggactacaggcaccctttccatatgacacctatgccttatgacttacaaggattagatttctttcctttcttatcaggagacaatcagcattacaacacctccctgcttgctgctgcagcggcggcagtctcagatgaccaggacctcctgcactcctcccgctttttcccgtatacctcctcgcagatgtttctcgatcagctaagtgctggaggaagcacttct

SEQ ID NO: 1936 - DNA, 566 bp, Cricetulus griseus
ggaaggcaaccgggagcggcggggctgggtagtcggacctgggagcccgaggcctgaaggatgctaaccaaattcgagaccaagagcgcgcgggtcaaaggccttagttttcatcccaaaagaccctggatgctggcgagtttacacaatggggtcatccagttatgggactatcgcatgtgcactctcattgacaagtttgatgaacatgatggtccagtgcgaggcattgacttccataagcagcagccactgtttgtctctggaggagatgactataagattaaggtttggaattataaacttcggcgctgcctcttcacgttgcttgggcacttagattatattcgtaccacattttttcatcatgaatacccttggattctgagtgcctcagatgaccagaccattcgagtgtggaactggcagtctagaacctgtgtctgtgtgttaacaggacacaaccattatgtaatgtgtgctcagttccacccctctgaagacctggtggtatcagctagcctggaccagactgtccgagtttgggatatttctggtgagctgcc

SEQ ID NO: 1937 - DNA, 223 bp, Cricetulus griseus
atgatagactctgatgacaccctatggaagacctcaccctccagggggagcagaaagggtttgtgataggtagggttttagttgggagagtggtaggggaggacgggagggagaaggcaactgggattgttgtgggggacaatcttgtttctaattcaaataaaaaaaatctgcaacaaaaaaaagaaaaactcactaacccaattagaaaaatcgggatggg

SEQ ID NO: 1938 - DNA, 205 bp, Cricetulus griseus
  misc_feature (3)..(49): n is a, c, g, or t
aannnnnnnnnnnnnnnnnnnnnnnnnnnnnnnnnnnnnnnnnnnnnnncacccacgcgggggggactgatgagtttgctaaaggaagaaaagtggcagatctctatgaacttgtacagtatgctggaaacattattccaaggctttatctgttgatcacagttggagttgtatatgtcaagtcatttcctcaatccaggaaaga

SEQ ID NO: 1939 - DNA, 572 bp, Cricetulus griseus
aatcaggttatcaggcttgctttttgttgagctttcttgatggtcctgagatttcgtgtcttggtttgaatgctcaactaccacctattccacttggttgtctgtgtgttcgtgggtgaaactgtgctcatttagggggggtgtggctgtgctgaaccagagtctcaggcttgccgggcaagtgctgtaccactgagctgctcacctctccctttgtgtccctttttgttttaactatacatgtgttttggtgggtggtggggctatgtgtgacgattgcaggtgtgaaggtcagaggacagctttggagagtaggttctctcctgtcatgggttcccaggattgaactcaagtcgtaagcttttatggcaagtgtttttacccactgagccatctctcctgcttgtatcttgaccaagtcttcaagtctctctgaggatgaccttccctattttatatttgaggtattgcattcatagtacctacctagaaggaacaatagcttttggtattatgtgacatctctgcaattcacaaatctttcaagtcagacaaaatacaaggcttttggg

SEQ ID NO: 1940 - DNA, 581 bp, Cricetulus griseus
agcactggagtatgacaaggatgtcgtgttttcaggacacagcagggaagtcatacatatgagctgactagggctgtgacagcatgcataagtcccacacaaatacaagccagagaaaatccctgtgtggcagggaagtcccataaagccccattgctagcagtggagctattggcaatctgtagctgctaggagagggagaataggttttatttacgtgtgtggtccctaagaggtcaaattgggcagaacaaattgtataataaactttataaatatgtatgtatacaaacatattcatacaaaggtttacctggagttactgtaggggacaccataaccacacctgctaggggctggttacagggatgccggaccatgccttcgaggtcaaggtgaccagggaaggtttaagagtgaggggtgcacacatggaccttctcccttcttccttttcatcttcggcttgctgtagttactcctgccttgccggctggctaggtcactctgtaagtaaggcttctccctaataaatacccttatatttttacctgactccatattgggagattttacattta

SEQ ID NO: 1941 - DNA, 202 bp, Cricetulus griseus
ttgggagactattgataactgtctctatttccttaggggttatgggtgtatttaagttgtttatctgttcttgatttaattttagtatgtggtacttatctaaaaaattgtccatctccttaaagttttccaattttttagaggacaggtttttgaaatatgacctgatgattttctggatttcttcagtgtctattgttat

SEQ ID NO: 1942 - DNA, 581 bp, Cricetulus griseus
  misc_feature (450)..(450): n is a, c, g, or t
  misc_feature (545)..(545): n is a, c, g, or t
gatgacatgtggttgatgatgaggaaagcttataaatatgcctttgataaatacaaagagcagtacaactggttcttccttgcacgccccagtacttttgctgtgattgaaaatctaaaatattttttgttaaaaaaggatccatcgcaggctttctatctaggacacactgtaaaatctggagaccttgaatatgtgagtgtggatggagggattgtcttaagcatagagtcaatgaaaagactcaacagccttctcagtgttccggaaaagtgtcctgaacaaggtgggatgatttggaagatatctgaagataagcagctagcagtctgcctgaaatatgctggagtatttgcggaaaatgcggaagacgctgatagaaaagatgtatttaataccaaatctgttgggcttttcattaaagaggccatgtctaaccacccgaaccangtagtagaaggatgctgttccaatatggctgtcacttttaatggactaactcctaatcagatgcatgtgatgatgtatggggtgtaccggcttanggcctttggacatgttttcaacgatgcgttggtttt

SEQ ID NO: 1943 - DNA, 582 bp, Cricetulus griseus
catgcccttcccgactggcgtgtgcacgtgtctcgctcgctatcctcgcggtgctcctggagcgctccaggcttgacctcgaaggtgcccgtttctgagcggtggcgtcgcttcccgctccctggcgtgctgcctcctgcgtgctggggctggcctcggtggcgtgtgttgtcgttcccggctctttgtcgacgggggtccgtgccgctctggttttacgaggtgtcgtttgtggggggtcgagaaagtggtttcaggcgggtaagagttctcttgcggcgtttccccgggacgtccgcatgtgtgtgtggcatctcttcccgctttgggtgagcgcccgccacgtacttgggccttctcccgtaggctcgtgcgtcggttggtgtcgagcgttcgcggccggccttttttgtgcttaagtgtatcttaagcccgttaatttggctcaccgccgttcgcccggaggtgggtttgagaggcctggcttgtccgggggtgcctttttcttggccccggtacccctgtccgcgagtgctcaatgtgaaccctggtaaagagaaaaaaagcctttaccgatacccg

SEQ ID NO: 1944 - DNA, 569 bp, Cricetulus griseus
  misc_feature (543)..(543): n is a, c, g, or t
aatttatatctttgcaagatacagttgacaatactcattcttaaaggaaagactaggaaaataacgaaaagcttacctaaagcaagattgaagtacatcagggcaaacactaaataaaccctatacctcctgtccgggtgtgggactcatggggatacagggtgggatccaaaggcttaaacagtctacccctacaatcttgttggttgtagcgcaaaaggcatttttggcctggttcagttcactacccatgcttttcctggcaggcatttcatgttcctggcatttttaaatcccaaagctctccaaatgtatttgttgctatacacactgagctttatggattacctcttcaggggccacttaaagagattatgcattgacctcctaggctttcttctgaaaccccagtggcagtctctaggactccatgtttttagacataatggtccaattataaatgaactcaatttaatgattatgtggccatacattaatattcttaaattcacatgatttattgtaaggctggtaagagactanttatttttataaattacaatactaat

SEQ ID NO: 1945 - DNA, 568 bp, Cricetulus griseus
  misc_feature (567)..(567): n is a, c, g, or t
tttttacctttggttgtactactataatgaactttagttgtaccttttaatgaaccgtggaagagttggtttcctttttaaggctgttgcacacttctagtgtacattctcaagcctccccatctcctcttgccccaaaagacagctgaccaccagtgccaaggtatgttgcagacttgacaactcacttgacagctgtggttgtcatcaagtcgtgagaggaaaacatagacagaggtaggctatgttccccattctcttgggagcaatgctagcttttcaatttctatttttaaaaatttagattatatttacttattttatgtggtatggtgggatggcacacaggtacaattaagagaataaattttggaagttggttctcaatttctaccgtgtctgacctgggctcagcctcaggccatgcagctttacccactgagccgtctccccagcccctttccattgttgttataagttgaatctgttttgtagctagcagcagtcctcctgcttcagcctctctaatagtgggaatgaactgccatgcccagcttgtttgggttnt

SEQ ID NO: 1946 - DNA, 600 bp, Cricetulus griseus
gtcgacccacgcgggcgacttcacacaggccacggaaatgattgaagaatgagtgaagagcaactagtatgagaaagaactgggcatgtaaaaggaggccaggtcagggggacaagtagggagagagaggaagttcccatacaggttcacttgttcttaccacgggggggatatttttataagctcactctgaatgttgtattgaaactagacagcggggggttggtgaggtggaccagtgtttcagagcactggatgccctttccacagatgtgagtttgatttccagcacccatttggtggctcacaaccacctgtaattcaagtttcaggaaatatgatgctttcttctggcttccgaagacaccaggaatgcagttggtacacagacacacatgcaggcaaaacacctatccacataaaattggaaataataaatataggcttcaggttaaaaggatgaacaaggaaacacatatttgacccaagacagatatgatggaggactggaccaggaggtggagagggttggagatgatagattagttttaatgtatattataatgcatattcccaatatttgggacaatataattgatc

SEQ ID NO: 1947 - DNA, 582 bp, Cricetulus griseus
  misc_feature (298)..(326): n is a, c, g, or t
  misc_feature (532)..(553): n is a, c, g, or t
ctctaccagctttacaaggactgccccaaagtacagagaaacatcatgaggatcattggaaacatggccttgaacgagcatcttcaccctgctatagtccgctcaggctgggtttctataatggcagaggctttgaaatcctaccacgtgatggaggcttcccatgctgccagaaccctggcgaatctagaccgagaaactgtgtgtgagaaataccaagatggggtgtatgtactccatccccagtgtcggacaagtcagcccattaaagccgatgtcctttttatccatggccttnnnnnnnnnnnnnnnnnnnnnnnnnnnnngcacgacagtaagcgggctctgacggaaaatgtcgtggtggatgagaacaggtacactacgtgctggcccaagacatggctagcaaaagactgtcctgcgcttcgcatcatatctgtggagtatgacaccagcctcagtgactggcgagcaaggtgccccatggaaagaaagtccattgcattcagaagcaacgaacttcttagcnnnnnnnnnnnnnnnnnnnnnngggataggccagtgatttggatatcacat

SEQ ID NO: 1948 - DNA, 578 bp, Cricetulus griseus
  misc_feature (518)..(518): n is a, c, g, or t
cttgtccatgttcctggccaaccacaacaaaatcacacaatctctgcagcagcagcttgaggtcatttctggctatgaagaactcctggcagacattgtgaatctgtgtgtggattactatgagaacagaatgtacttgacacccagtagaaaaacacatgctactcaaagtcatgggatttggtctgtatctgatggatgggagtgtcagtaacatctacaaactcgatgccaagaaaagaatcaatttatccaaaatagacaaatacttcaagcagctgcaggtggttccactttttggagatatgcaaatagaactggcaagatacatcaagaccagcgctcactacgaggagaataagtcccggtggacctgcacatcctcaagcagcagcccccagtacaatatctgtgagcagatgatccagatccgtgaagaccacatgcgtttcatctcagagctggctcgatacagcaatagtgaggtggtcacagggtctggccggcaggaggcccanaagacagatgcagagtaccggaagctcttcgacctggctctgcagggcctgcagcttctg

SEQ ID NO: 1949 - DNA, 245 bp, Cricetulus griseus
  misc_feature (70)..(94): n is a, c, g, or t
tcactgcagagcatcagtgcaggggccaaattcttccagggttaactattttgagcatcttgcttattcnnnnnnnnnnnnnnnnnnnnnnnnngcaagacaaacaaaaactggtctgagcagaaaccattaggctggaaccattttttgaaaggtcaccccgtgagggtacagcagggacaggctggacgaaaggcggtgcctctggctgagggtggagttggagtcactcaaaaagtactctg

SEQ ID NO: 1950 - DNA, 510 bp, Cricetulus griseus
  misc_feature (18)..(34): n is a, c, g, or t
  misc_feature (320)..(346): n is a, c, g, or t
ataaatttgcagaaggcnnnnnnnnnnnnnnnnntggacatgaagatccgattacaaagaccagtcgtgttttacgaatagaagccaaaagcaaggatggaaaattagtgccaatgacaatttttcacaaaatggattctgaggacttggagaagaagcccctcttggtgcatgtgtatggagcttatgggatggatttgaaaatgaatttccggcctgagaggcgagtcttggtagatgatggatggatcttaacatattgccatgttaagggtggtggcgagttgggcctccagtggcatgctgatggctgcctaacnnnnnnnnnnnnnnnnnnnnnnnnnnnaaaggcttgcattaagacgcttgatagccaaggcttgtgccagccgagcctaaccacactgagcgctttcaatgctggaggggtgcttgtgggagccctgtgcaacttcaaaccatagctccttcgaactgagactctggaggcacctttgttgcatgtcctca

SEQ ID NO: 1951 - DNA, 579 bp, Cricetulus griseus
cccatgctttgtctgtctggaaagccttcagctagtctttcagctttcctgaacttcaggtactcttgctattagcagcgtcagtgactactcacagttaacactgactgtttctctgtagttttctgctattacagccaagcacacatattccagaagttctgagacagtttgcacatagaatagccaagagaagtacattatcttctatttcttaagactgctgcatctgttttgggttttgtttcttcttagttaagacctgcctaaaaaccttcatttctagggaatttcagttaacaagggctttacaacaggctgacacttgtaaaaagaacagtttgtcagtgttgggcctaaaggggaccaagtcaaaaagacagcaacaaatagcagagctgaaaccgttttcacaattcctcagtcagcgctcaagtgccaaatggcatcttagtgttaatttctatactcagtatattcagacttagcaagtttgaattattattaaaaaataaaaagatatctcaaaaggcaaaaaaaaaaagacaagacaatctggcacccaacaccctttcagag

SEQ ID NO: 1952 - DNA, 579 bp, Cricetulus griseus
ggtggtggcgggcgtggtgctggcccagtacatattcaccttgaagagaaagacgggccgcaagaccaagatcatcgagatgatgccagaatttcagaaaagctcagttcaaatcaagaaccctacaagagtagaagaaattatgtgggatctcattaaaggaggagctgctaaacttcagataataactgactttgatatgacactaagtaggttttcctacaatgggaaaagatgcccaacatgtcataatatcattgacaactgcaaacttgtcacagacgaatgtcgacgaaagttactgcagctaaaggagcattattacgctattgaagttgaccctttcctcactgtggaagagaagttccctcacatggtagagtggtatactaagtcccatggtttgcttgttgaacaaggcataccaaaagccaaacttaaagagattgtggcagactctgatgtgatgctcaaggaaggatatgagaatttctttggaaaacttcaaaagcatggtatccctgtgttcatagtttacgctggtatcggtgatgtgcttgaagaaattatacgtcaagc

SEQ ID NO: 1953 - DNA, 581 bp, Cricetulus griseus
  misc_feature (457)..(482): n is a, c, g, or t
ataaaattagtgatccttctgatggctgggtttatgggtgtgtgtcaccccacccagtaaggatttgtttattgaagttccacagttgctttgtagtcatttgggtaagcagctgtctagagatgcgcagtgaaagtgaaccctatggtgccactgtgccttgcttcaaggtttttctcatttctcatcttgaagattgtttccagttctaatttctagccaagccagctgctcggccttaactctgctcagtgccctgttaactaacattttataacagattggtttttatatgtttaaactgtccagcatttggattttacctcttgatagctccatttgttcctggtgctgctttaaagtgtccagtggagtaggtacgcagttggcctggttgtggacctgtttgtcttctcccaagaaaagctactttggtatagatgtttacttgggtttnnnnnnnnnnnnnnnnnnnnnnnnnngaaagctctgtgaaacccataagaacctgaaaggatttggaaagggcagcccttaagtctttgaccataaagcacatgtgtgcatgctgtgtaaagact

SEQ ID NO: 1954 - DNA, 567 bp, Cricetulus griseus
ggagcgcttggaagcccttgatgccaattctcggaagcaggaagcagagtggaaagaaaaggcaataaaggagctggaagaatggtatgcgagacaggatgaacagctacagaaaacaaaagcaaacaacagggcagcagaagaagcctttgtaaacgacatcgatgagtcatccccaggcactgaatgggagcgggtggcccgcctgtgtgactttaaccctaagtccagcaaacaggccaaagatgtctctcgcatgcgctcagtcctcatctccctgaagcaggcccccctggtgcattgaagagctaccctgtggaaacactacgtctgcaatatcttaatcctactcagtgaagctgttcacgtaattggattaattatgttgagttcttttggaccaaaccttttgtctttagagttgatcattgtttgtgattgcatgtttccttcaactgtgttctccctggcattcagagaagataggggaggaggaggggagggatgctcccaacagtagcctcaacccgtgcttttgtgcattattctgagaataaatttctgttt

SEQ ID NO: 1955 - DNA, 579 bp, Cricetulus griseus
  misc_feature (465)..(483): n is a, c, g, or t
cttctgccaaatgacctcccttatgaccatcatggaagactactttgcataccgtggcttcaaatacctcaggctcgatggaaccacaaaagcagaggaccggggcatgctgctaaaaacctttaatgagcctggctctgaatacttgatttttctgctcagtacccgtgctggggggctgggcctcaacctgcagtcagctgacactgtgatcatctttgacagtgactggaatccccatcaggacctgcaagcacaggatcgtgcccatcgaattgggcagcagaatgaggtgcgggtgctccgcctgtgcaccgttaacagtgtggaggagaagatcctggccgccgctaaatacaaactcaatgtggaccagaaagttatccaggctggcatgtttgaccagaagtcatccagccatgagcggcgagcctttctgcaggccatcctggagcatgaggagcnnnnnnnnnnnnnnnnnnnggtccccgatgatgagactgtcaaccagatgattgcccggcatgaagaagagtttgacctctttatgcgcatggacttggaccgccggcgtgaaga

SEQ ID NO: 1956 - DNA, 567 bp, Cricetulus griseus
  misc_feature (338)..(357): n is a, c, g, or t
  misc_feature (516)..(516): n is a, c, g, or t
aaggaaaatggcagacggtttttcgcttaatgatgccttagctggttctggaaacccaaaccctcaaggatggcctggtgcataccaacctggggcagggggctacccaggggcttcctatcctggggcctaccctgggcaggctcctccaggggcttatcctgggcaggctcctcctagtgcctacccaggcccaactgcccctggagcttaccctggctcaactgcccctggagcttaccctggcccaactgcacccggagcttaccctggatctgcacctggagccttcccagggcaacctggagcacctggggcctaccccagtgctcctgggnnnnnnnnnnnnnnnnnnnnctatggcgcccccactggagcattgacagtgccctataagctgcccttggctggaggagtcatgcctcgaatgctgattacaatcatgggcacagtgaagcccaatgcaaacaggattattctaaatttcatgagagggaatgacattgccttccactntaaccctcgcttcaatgaaaacaacaggaaagtcattgtgtgcaacaccaa

SEQ ID NO: 1957 - DNA, 476 bp, Cricetulus griseus
actgcgccctgaaaccattgtcctctctgccctctctgggttaaagaagaagctgagtgatttacagactcagttaagccatgagatccagagtgatgtgcttactataaactaaccatagctcacccgctgcagaagactgggtgcaaggtctacggtcttgggagcccttctggtttctaggctctggactacagctgctcaagctgcctggaacgtcaccggagagattgccaggggttcactggtgttagacagagcagtttttcactaggcatttagcattctggaacctaccttgttgatcaccatggtattccttagaacactagttaccccttccatcccgtttcctagctcacttttaaggagccttattgcttcctatgtgagaaccacttgacctagacatctggtcactccagctttttaaatctctacccaaggaaggagtttacagcttggaacttaagctt

SEQ ID NO: 1958 - DNA, 580 bp, Cricetulus griseus
tgacaagctcctgcggtacgaccatcaacagagactgactgccaaagaggccatggagcacccgtacttctaccctgtggtgaaggagcagtcccagccttgtgcagagaacaccgtgctttccagtggcctcagcgcagcacgatgaagcctggggaatcgacggtctgttgcggttcctcatacttttccataagcagaacaagaaccaaatcaaacgtcttaacgcgtgcgtagcgagatcacgtcctgagagcagacacaaaatggtggcaggcttggcgagcacgaactataccacctgaagggcagcccaccaccgtaaatcagacctcacttccgaatgtaaaaggttcacatgcctttggcttcctgttgacttcctcccgacccagaaagcatgggaaatgtgaagggtatgcaaaaatggttgttggttactgttgctccctgtgcccttgacctgtcccatggctgcctgttgctccagcaaatcccaaggactagctgaccacagactccacagatgggatgggggcagtgtatggcatgatgggcacttacatattattattttaaa

SEQ ID NO: 1959 - DNA, 580 bp, Cricetulus griseus
gactgtcgcacaggcgacaggcccaaaaatgacaataaaaaagaggactacttctagccaatggcaatttccgcctgttgtgattatcttaaagaatatggagagcttcagcacaaaagtactccaagacttcataattatcagcagtcagcatcggcatgaatttccactgatcctcatttttggaatcgccacatctcctgttattatccatcgactgcttccacatgcagtgtcatctcttctgtgtatagaacttttccagtctttgtcatgcaaagagcacctggcagtaattcttgatcagctgcttcttacagctcaatttccttttaaaataagtaagaaagcattacaggttctgaccaacatcttcttataccatgatttctcaattcaaaacttcatcaaaggacttaagctttctctattagaacatttttatttgcaacccctaaatgttctgtgctgtgatctcccaaaagccaagaaaagaataaaatttttgtcagttaatcaatgtgaaaacatccggccgcttccatcatttatgaagtacctggaaaagcaagcttcaaga

SEQ ID NO: 1960 - DNA, 128 bp, Cricetulus griseus
aggctcctgttgggcctctgggccaggtgaagctgacagtgaggtaccacagtgatgaacaaaacctggttagcatcatccacagctgccgggcccttccccaaaatggccgtgaactgccagatccc

SEQ ID NO: 1961 - DNA, 432 bp, Cricetulus griseus
  misc_feature (373)..(400): n is a, c, g, or t
gtccacccacgcggcggtttctagaaggcgcaagatgctcataatgcatggactggggagagaagaggaacacggttgcctccatcgctgcgggcattctatttttcacaggatgggggatcatcatatatgcagctgtcatttatcccagcatggaagaattcagccgctcataccatgcttgtggcgtcatagcgaccatagccttcctcatgattaacgcagtgtcgaatggacaagtgcgaggtgacagctacagagaacgctgtctgggccacacaaaaaagcccatagtatatcctggaattgctgtatttttccagaatgccttcatcttttttggagggctggtgtttaagtttggtcgcacggnnnnnnnnnnnnnnnnnnnnnnnnnnnnatacagcacaggcgccctgtatgggatttttt

SEQ ID NO: 1962 - DNA, 579 bp, Cricetulus griseus
attggacgtagctgctctttcctctacccaggaggcactggcacacctgcctcctgcaactgccttggtgtaaccatggcactggctcacctcttggtcaccacagggcccctcccctccccagacaggtgtctgggagacagctgtccctaaggttagtgatctgtgagtaggcagagttgccagggcttctctgaccagtccccctcacattcacacacctcagcagctccatgaccttctctttttcgcctggctggtcaccagcttccagctgcagctacaagtggcctggagcttgctgggtgctcccatcccctgctcagacccctccaggctctcctgagaccaagagctaagcccagcccagcagagcccaagctcatcctgcccaggcccacagggagccaccagccaggctctcagaaaagcactggaagcctgggcttcaagccctgatgtcttggatcccatctgggttttgtccccagggccttaactgtttgaccacagctctggagggaagtgacttggagaggggacagccagattatccctccctgcccccgccccgcctcc

SEQ ID NO: 1963 - DNA, 134 bp, Cricetulus griseus
gtgtcttgctctttaaactgccctttgacaatcacgtgctaattattgtattttaccaaaaccagcacatacatagtattgctgcatgtccagtccttcaagacagaagtgcttattcttctgctgagtcccgt

SEQ ID NO: 1964 - DNA, 579 bp, Cricetulus griseus
cttctcttgagtacagtagcttgacctgtctgctttgatctgcaccttgacagcaagcttccctgttgtgggacatcggggtacctgcaggcaagtgagacctggtcttaatgtgcaaaccctatacctgctctgcaagagcgttggtttcatgggctgcagcagtgggcatagcaagtcgctcatccagtggacttgattggctagtagctaggaagcgggcctttagagagacccaccattgaatggggtttttttttaaacctttggttgtagacaatgaaaaggtagatagccctcttcatgtctatttccctttcaaatagttgcatccaaaagaaagctgttctgtcccatgctctcctactttgctcctctgttaaaataaaaacaggggttgacttatgtcccgctcctgaatacatgtaaaatttgcacaaaactatcttctatgaaaatgatttgtaatctgtagacattacttgggagatgtcttgagatgtaaaatcccatcctttgggttgagggttctttgtttttctccaaataaacccagtctttaaagttgaaaaaaaaaaa

SEQ ID NO: 1965 - DNA, 234 bp, Cricetulus griseus
  misc_feature (154)..(226): n is a, c, g, or t
gtggactctgcctgggctggtctttaccaagttacagtgaatctagtagacattttacctgtctccaaatctatcttgggtacagcccctggatattttatctgggtttggagagttttaaagggtgtgcgcgcacgtgtgtgtgtgggggggnnnnnnnnnnnnnnnnnnnnnnnnnnnnnnnnnnnnnnnnnnnnnnnnnnnnnnnnnnnnnnnnnnnnnnnnngggggaat

SEQ ID NO: 1966 - DNA, 579 bp, Cricetulus griseus
  misc_feature (19)..(38): n is a, c, g, or t
cagagccagttgtcactcnnnnnnnnnnnnnnnnnnnncaacccagtgcttctcaaagtgaagaaaaagctcctgagctgcccaaaccaaagaagaacagatgttttatgtgtagaaagaaagttggccttacagggtttgactgccgatgtggaaatttgttttgtggacttcaccgttactctgacaagcacaactgtccatatgattacaaagcagaagctgcagcaaaaatcagaaaagagaatccagttgttgtggctgaaaagatccagagaatataaaattactacatgtgaagagactgaaactttgtttttattttaatatatcgtaggaaaacattaaagagcagatgcatggccattttcctttgatgttctccagagttttgctttatatttgtctgtcgtataattgatattttaggatgtttgggtgtttgttacaggcagaattggatagatacagccctacaaatgtatatgccctccccctcataaaattggacaaaaatctgcgcaacaaattgaaataacacagataataggaacaaaatttagttccacgtgccaaatt

SEQ ID NO: 1967 - DNA, 580 bp, Cricetulus griseus
ctgtgatttcatcactgtccacactcccctcctgccctccaccacaggcttgctgaatgacagcacttttgcccagtgcaagaagggcgtgcgagtagtgaactgtgctcgagggggaattgtggatgaaggtgccctgctccgtgccctgcagtctggacagtgtgctggtgctgcactggatgtgtttacagaagagccaccacgggaccgggccttagtggaccatgagaatgtcatcagctgtccccatctgggtgccagcaccaaggaggcccagagccgctgtggggaggagattgcagtccagtttgtggacatggtgaagggaaagtctctaacaggggtcgtaaatgcgcaggctcttaccagtgccttctctccacacaccaagccttggattggtctggcagaagcgttgggcactctgatgcatgcctgggctggctcgcctaaagggaccatccaggtggtgacacaaggaacatctctgaaaaacgctgggacctgcctgagccctgcagtcattgttggacttttgagggaagcgtcaaagcaagcggatgtgaacttggtgaac

SEQ ID NO: 1968 - DNA, 385 bp, Cricetulus griseus
ggcttatttctctccaactttaaggttatttgtgagctttaacatcgcctggctggagacagacatctgattagcttgaaaaactacagcagtagactgattcaatcaagatatttgtgtattgttgtgttctatgtccactttctgtgctattcctatatccctgtatctctgaaacactggaagagctagtaaattgtaaatgaaataccatgtttcccttgaatttcatttctcagtgtggcaactgtgaaaagtgctgtgaattttctgttttgatacagtggtgatggaaatttaacccctatgaatctgctgttgatgttgtatgatagaaaattggcctccctgaagcttgattgtataaatctgcacccaagagaaa

SEQ ID NO: 1969 - DNA, 580 bp, Cricetulus griseus
tcaaaactaccttatttcataattgatggtacattctgaattttctcagtaactctggctggaaacagaggtcttgacttgtcttctgaaatgactagcagaagccaacacatgaacccttaactatagcattttaatgaatccatctaaggcaccttatgctgcatggccagctgttccatgtttaaatgccatcaatgatgacctaactgaaataagtcatcttcacatatcaacactcagggtgttgttaagacttagaaagtaaaaggaaagaataactgtgcatcaagatttgctgttctggttgttaatctgatctctgatttgccacacacattaggaaaatagaaaggaaaactattttcttggcaaaagtgactttcattctattcagcaatattgaaaattcaagtaaggaagacttggtggtggtacatgtcaaaaaaccaaagagagtaaaagaaacttccttatgactcatatttttgagttttaacttatctgtgtgtaacttttctttggtgagaagataagttattttcccgtttaatcctttgtgtcttcttattcctcttag

SEQ ID NO: 1970 - DNA, 557 bp, Cricetulus griseus
  misc_feature (494)..(494): n is a, c, g, or t
  misc_feature (516)..(516): n is a, c, g, or t
cagaaggtacatggtaggaaagggccagaagctgactctgagtggaggagaggcccgccagagaaggagtggagacgaggagagactcgggatgatgagagacctcacaggagagatgaagaccggctgagacgcttgggggatgatgaagagagagaatcttctcttagaccagatgatgatcgaatccccaggcgtggcctggatgatgacagagggcctaggcgtggtcccgatgaagatagattttctcgtagaggaacagatgatgaccgtccatcctggcgtaatgcagatgacgacaggcctcccaggcgaattggtgatgatgataggggaagctggcgtcacacagatgatgacagaccacccagacggggactggatgatgacagaccactgagacggggactggatgatgacagaccactgagacggcgactggatgatgacagaggaagctggcgcacagcagatgatgacagaggacctanacgtgggatggatgatgagcgngggccgagaagaggaggtgctgatgatgaacggtcatcctg

SEQ ID NO: 1971 - DNA, 578 bp, Cricetulus griseus
ctgtcctggaaaagtggcatctcaggactcatggaacaatgtctggatggcaccggcacagtgcctggcattcagttgttaatttatgcaacacattcacaaagagtttacattgtgcctgggggttgttcagggctctaggattcagtgctgaaaagacaagggcctggcccttcaaggagctgagatgctcagcaatgagtgaaggatgacacagctgtgcacaagtgacaagatgtctagccacacatactcagtgtccacagtacagcaaatcagacatggagcttgacaaggatgttagacagtgtgcagggaaggtctccctgaggacggaggcagggaaaatagtatatgagttaatatttttaagaaatataaaattatgcagcccacagcaagataaaattctgtttggtaaccaaccgaaaagcagcaggaaacaaacttataaagagaataaaaaccaatgatagacactgattcagaaaagatacaagactcgtggataaaagcattcactggcatttattgttatgaaggaatttcttactttcaagatcccagatgaaaagcta

SEQ ID NO: 1972 - DNA, 146 bp, Cricetulus griseus
cgaagatggcggcgacaccggccctgctttcctgaggcggctgcgatggaacctcctccagctccggggccggtacggctctttgactcgcaccggctcccgaacgacggcttcctgctgctcgtgctgctgctctacacttcggt

SEQ ID NO: 1973 - DNA, 417 bp, Cricetulus griseus
ggtgaaatcacaagtgcaggaagtgaagactgaagggaagggaagaaatacggtgtggtggttccagtgagaaggctccttcccgatacactcacatttgtgaacacttgatttccaaggggtggtgctgtttggggaggttttgggatcttgagcagatggaatcttgcttgaagaaagaaggcttaaatgatttgtagctttctcctacttcctgttttcctttcctgtttcctgtatggatgaaatgtaatcagcagcttcctggtcctgccaccatgcttttcctcactgttattcctcccccactgtggtagactctatccctctaaatctgtgaactgaaacgcactctttcttctccaagctgcttctgtgagagtcttttatcaaaattaactaagacatgttcatgaa

SEQ ID NO: 1974 - DNA, 234 bp, Cricetulus griseus
tcgagagctgcttgatgtgggtgctagaagagcagtaaatgttcttaggtactaagccatttttccagccccttaatttttatttttgattaaaagaaagtctaaagacccaagctggccttgaactcaatcctcctgcttctgcgtctgtgtgcgtgcgtgcgtgcgtgcgtgcgtgcgtgcgtgcgtgcgtgcgtgcgtgcgtgcgtgcgtgcgtgcgtgcgtgcgtgcgtg

SEQ ID NO: 1975 - DNA, 508 bp, Cricetulus griseus
  misc_feature (128)..(144): n is a, c, g, or t
  misc_feature (494)..(494): n is a, c, g, or t
tagtgccacagccaagactcaacataatggcatgaacaacatcattcgactgttcctgaagaagggactagtcaatgacctggccagagttcctcacagcctagacttgtcgagtcctaatatggccnnnnnnnnnnnnnnnnntctaaaacctttggaaacactttcccggattgtaaaccagcccagtagcctttttggcagcaagagtgcttctagcaagagcaagtctgagcaggatgcccaaggagcctctcaagattcaaatagccatcagcaagatccaggcgagcctggggaagcagaagtacaggaggaggatcatgatgtctctcagacagaggttgcagatggggatatcatggatggggaggctgaaaccgactcagtggtgattgctgggcaacctgaggtgctcagttcacaagagatgcaggtagggaggcagatcattccagcaatcttcagttgcaacgctgaaccaaaacccccangtggtgtgggtggg

SEQ ID NO: 1976 - DNA, 357 bp, Cricetulus griseus
  misc_feature (200)..(248): n is a, c, g, or t
taagtcctgtatgttgactcgtgagaaatcaccagggatcctgactgctgcctgtgagagtgctgggatcagctagtgctttgataggcagtaatgatgcttcgcttcaagtggggcagccttgcgggtaaggctctgactaaaggattcttttgggggtaaaagaaggaagatagaggactcaaattttagtgtgtgannnnnnnnnnnnnnnnnnnnnnnnnnnnnnnnnnnnnnnnnnnnnnnnnaaacacagaccctctggaacatactatgtcctttgccttccgagtattgagattaaaggcgtgggccacagtgcctggcccccaaacctttgctttttgaatcttacct

SEQ ID NO: 1977 - DNA, 417 bp, Cricetulus griseus
  misc_feature (333)..(352): n is a, c, g, or t
ccatcagtgatttacacacaccccgaggttgcttgggttggcaaatcagaagagcaattgaaagaagagggtattgagtacaaagttggtaaattcccatttgctgcaaacagcagagctaaaacaaatgctgacacagatgggggggtgaagattcttggacaaaaatcaacagatagagtactgggggcacatattctgggaccaggtgctggagaaatggtgaatgaagctgccctggctctggagtacggagcttcctgtgaagacatagctagagtctgccatgcacatccgaccttgtcagaggcctttatagaagcaaacctggcnnnnnnnnnnnnnnnnnnnntcaactcttaatgagaagattgttttgctcacatgcggaagcttttgtcaaacaggataatctcc

SEQ ID NO: 1978 - DNA, 255 bp, Cricetulus griseus
aaggcctaccgcccacatgtccactctgctgatccatcatcccgactatgcttggctgcaagagctggggctccatgaggacaacgcgggcgtgtgtaatggaaactggcgcggcgggggacaggtaattacgrgcgatggtcctgctaacaatgagccaatggcacggatcccaccggccagtatggaagactgtgaacaaactgttaaggaaccccaggaagctgaccaaatgtgaccacagattcctgcccc

SEQ ID NO: 1979 - DNA, 361 bp, Cricetulus griseus
  misc_feature (245)..(294): n is a, c, g, or t
gcattgtactcttcctctttttggagatagagatatatatatatagagagaaatgctataaggaagtttatttcttaggttcactgaacaatatttcttttacagtgtaatatgggggtggggatatgcaaaagaaatgtgtatttttgctagttgcctatcttctgagataataagcacaatcctgaaatggatccaataattcagttagatgttatagattagtatttaagtttgcagtaagnnnnnnnnnnnnnnnnnnnnnnnnnnnnnnnnnnnnnnnnnnnnnnnnnntaaaaaaaagctcatgatacacaatgtgggtattcacccatgtcaaaaaatctgttcactggtccac

SEQ ID NO: 1980 - DNA, 581 bp, Cricetulus griseus
  misc_feature (70)..(107): n is a, c, g, or t
cagttggccctacctccttgcccacaagtactctggcaatgttcagtcttctcccagggtctgagagagnnnnnnnnnnnnnnnnnnnnnnnnnnnnnnnnnnnnnnaccactagggattagtttgccttacatttactttactgtgtggctttccctccctcacctcaacccaaccagtgtttgaatttcactctctggaaaggaactgatgaaatgctatagttttctttctctacccctattctgcaaattcatccagcatattctcatgggctcctttgggactctgaggcagggagaaagatgcctgtcctcttgcccaaagggagcaatgagtcagtactctgggcaggattaccaaggacagacaagacctgcaggggctggtgttgaagagcaagagctgagaattcctggaagcagggactggggaaagactgcctaagctgaatgcttggaagttcgaattgacagttgggatatagaaacaccagtagatttcaggttggagaaccccggctcaaggctgacagaagagagactggtggagtttgaattgaagaatggagctcaacatag

SEQ ID NO: 1981 - DNA, 380 bp, Cricetulus griseus
tgtttctagtctggaagacttcttcaaggatcagttaaatgaaggaatcctcctccatctcttacttgcccgtctctttgccctagcactgacaaaagcagggtggcctcccaagcttcttctgaagctggcaaggctcgctggtgggcagcatgaaatgctaatggggcacaattacaaagcacgtgggtgtttccttggtttccctctcagaggagtgtgagtgcccccatggttggaggagggaggcaccaaacgaaacagggccctgtggatggaagcaccccattgccttcagacacaatgctgtaacaggaggcaagaggactctctcaggactccattcctcgggcaatcggtgatgctgaccccaataacca

SEQ ID NO: 1982 - DNA, 203 bp, Cricetulus griseus
atagtttcctgtaaaccgacagaaaacattacatttaggcagataatgcacaaagcaatgacattttcgtttattactgaaattgctgattatctaaagcatggttttaatgtttttataaaatttgggtatgttctttaatcttcttaggcggatgctccaactccctcgagcacacccgatttacagtgctacaaacacag

SEQ ID NO: 1983 - DNA, 246 bp, Cricetulus griseus
  misc_feature (60)..(136): n is a, c, g, or t
  misc_feature (140)..(166): n is a, c, g, or t
  misc_feature (182)..(221): n is a, c, g, or t
cccgagttcattcgccgcttctctgtgaggactgctgccgccgccgctgacaatgcagannnnnnnnnnnnnnnnnnnnnnnnnnnnnnnnnnnnnnnnnnnnnnnnnnnnnnnnnnnnnnnnnnnnnnnnnnnnnaagnnnnnnnnnnnnnnnnnnnnnnnnnnntgaccagcagaggctnnnnnnnnnnnnnnnnnnnnnnnnnnnnnnnnnnnnnnnngtccgactacaacatccagaaggag

SEQ ID NO: 1984 - DNA, 576 bp, Cricetulus griseus
cagtgatgaggatgcagtgctgactccctcaggggtcacgggagctggcacaggtgatgaaggggatggccagacacctgggagcacatagcagcggagccgctgagccaggctgctgctttgtcgtctgtccgatgcccgtccctccctgcaggccacatcatggtggtgtctattgccggggtggccgcaggctggatccacgtgtcccctctgcagcagatggggatgccaggatgcggcttgggactcagacctcatcatattgacgagcagaaagaacatttcccgccctcctccgatcgaaacggcacattgacacttgtcacagcttctgctggctctcagaccgtctctcccaccctgggcagtgacagttcgaactctgggctcactgttctgttgagcaacctgctgtctgctcggcttcccgctctaccgggtccacatgactaatgcctcttgttcatttctgatggcttggcttttgagggcctggatgaagctgcttgtgggttgagctgacttgatgcccctgtgggcagcgtccggcccccacggtgactccctaagttt

SEQ ID NO: 1985 - DNA, 577 bp, Cricetulus griseus
gggccctgctccgagctttcccgggataagtagcattagcggcgggaaagagccggccgctgcaaggaacgaagagtatccgacaactagagtattggaagaggctggaaaagaaggcagacacaaggcttcgctccctgagttgcttgggacccctcttcagggttgtctccagcaggaaggctggtgggaactcaaggacagaagcagaggtaacgagtcagctggttctgcatttgtcatcgttcgctgttccttctttggaggggagttattttccctgagctgggtggacaccctgggcctatggggcctccttctatccccgcatcattccggccagaagatgagctcgagcacctgaccaagaagatgctgtatgacatggaaaatccccctgctgatgactactttggccgctgtgctcgctgtggggaaaacgtagttggggaaggaacaggatgcaccgccatggatcaggtcttccatgtgaattgcttcacctgcatcgtctgtaacaacaaactccgaggacaacctttctatgccgtggagaagaaggcgtactgtgagccct

SEQ ID NO: 1986 - DNA, 557 bp, Cricetulus griseus
  misc_feature (519)..(536): n is a, c, g, or t
aaatgagtttaaggaatggcagtacttcaagagcctgcacaggttcactcacatcccttcaggaaagtgcttagatcgatcagatgtccttcatcaagtcttcatctccaactgtgactccaataaaatgactcagaagtgggaaatgaataacattcacagtgtttaagaagagtgcacaaaaccaataatctacctactgacaagtacacttacagaggactgaaaatcgcctggaacctgctgcaaccgttattactaattctgtacagctccaatcctggaacctctgatcagattgaaggacattgataaactgtgatttttacaataacattatcatctgcagttactgtttacaaaactgcttttaccttaaactctgtagatgtttacatcctttttcttttgtttttagatgacgttggtaatttgtgcctttaactccgttcagaacagagttaaagcatatgttgtcttctttgggaatacactcaggggtctgaaaggcagtttggnnnnnnnnnnnnnnnnnngtggcttttaacacacttgaa

SEQ ID NO: 1987 - DNA, 561 bp, Cricetulus griseus
  misc_feature (62)..(76): n is a, c, g, or t
  misc_feature (254)..(254): n is a, c, g, or t
gtcgacccacgcgggcgagtggatccagtgaccgtatttgcctcactgtccccagaggtctnnnnnnnnnnnnnnntccccaagtccctccttactcaacctttggagagaacagcttcaatcacgagcttccccaagacaacccggaagtcacctgttcctaagaattcagccttggtccttctttgttcctgtccccagtgccagggggcctctggtttggagggtacatacactactttagcagaactcanatgttgggggatgggagggaaacgagaatgaccacagagtccctggataatgtagtagtagatgtctccacagggtgacacaatggatggccttgcttgattgtgttaggtcacagtattgggaggatgtcccttcatcttgtctagttgaagtcactgtacggtctatagttgcaaaacaagcaaaggaggattgaacacttcatgttacatctttaccttacagctaactcaagggttgtttttctctggggaccgtcccatcacccagatccctgctctaggctctcctaatgtgtggcttgat

SEQ ID NO: 1988 - DNA, 195 bp, Cricetulus griseus
  misc_feature (67)..(117): n is a, c, g, or t
ttgattgcgggccggccatggcgcttcacgtccccaaggccccgggcttcgcccatatgctcaaggnnnnnnnnnnnnnnnnnnnnnnnnnnnnnnnnnnnnnnnnnnnnnnnnnnnaagcttgcaaggagctttctgagactacccgtgcagtatatggaccaaatggaatgaataaaatggtcatcacgtcgc

SEQ ID NO: 1989 - DNA, 578 bp, Cricetulus griseus
  misc_feature (370)..(429): n is a, c, g, or t
ggaggagctgtggttgttacgctctacaggatgggttttcctgaagctgccagctccttcagaactcatcagattgaggctgcgcccaccagctctgcaggtgatggattcaaggcagatcttgtctttaaggagatcgagaagaagcttgaagaggaaggagaacagttcgtgaagaaaattggtggcatttttgccttcaaagtgaaggatggccctgggggcaaagaagccacctgggtggtagatgtgaagaacggcaaagcatcagtgctgcccaactcagataagaaggctgactgcactatcaccatggctgactcacacttgctggctttgatgactggtaaaatgaaccctcagtcggccnnnnnnnnnnnnnnnnnnnnnnnnnnnnnnnnnnnnnnnnnnnnnnnnnnnnnnnnnnnnctccagcttcagcctggcaaagctaagctatgaagatctccatttggaaacctcagcacatcaggatgagatggatagatatgtagatatccacctctcattgtcaggacttagtccgacatttcccgattagcatgaagtaaatttgt

SEQ ID NO: 1990 - DNA, 579 bp, Cricetulus griseus
ctggcatccagagatgttgtatctcgatccatgactcttgagatccgtgaaggaagaggctgtggccccgagaaagatcacgtctacctgcagttgcaccatctgccccctgagcagctggccacacgtctgcctgggattgcagagacagccatgatcttcgctggcgtggatgtcactaaggagcctatccctgtcctccccactgtgcattacaacatgggtgggattcccactaactacaaagggcaggtgctgaagcaattgaatggacaggatcaggttgtgcctggcctgtatgcctgtggggaggctgcctgtgcttcattgcatggtgccaaccggcttggagcaaattccctattggacctcgtagtctttggccgagcctgtgccctgagcattgcagaatcttgcaggcctggagataaagttccttcaattaaagcatatgctggagaagactcagtctgaatcttgacaagttaagattcgctgatggaagcataagatcatcagaactacgcctcagcatgcccaagtcaatgcagaatcatgctgcaatgttcccggggggaa

SEQ ID NO: 1991 - DNA, 202 bp, Cricetulus griseus
gtgctggtcaaggacttcaccttcgaaggcttcagccgcctgcgcttcctcaacctgggccgcatgatacacggtgtccccgtagagtgactggtccgaccactcaattcactggctgccttggacctctcaggcatccagacaggcgacgctacctttgtaacacaggggaaggacagtctgatgtcccttgggctctaca

SEQ ID NO: 1992 - DNA, 338 bp, Cricetulus griseus
tgcttgacgtcgggtctggggttgcttgtggtggcagtggctgaagccggcgtctgggaaaagcctaaacagaggagacgccatggacgatcagggctgccccaggtgtaagaccaccaaataccggaacccttcgttgaagctgatggggaacgtgtgcggacacactctgtgtgagagctgtgtggacttactgttcgtgagaggagctgggaactgtcctgagtgtggtactccactgagaaagagcaacttcagggtacagctctttgaagatcccaccgttgacaaggaggttgagattcggaaaaaagtgctgaagatatacaataaaaaaa

SEQ ID NO: 1993 - DNA, 115 bp, Cricetulus griseus
gtgcgagggatccgtgtccctggactcctgcgagtcttccctacccttggccgcgctcaacgtgcgagtgcggcgccgactctgtctgtgtcttggacgcgcggacgccggtggt

SEQ ID NO: 1994 - DNA, 579 bp, Cricetulus griseus
gggggggtctaactggaaggggcatctcatgagatggcacctgttcacagtgagttgaaaccacaggtttgcttgcagatggctcaagactaggggaagcagaggtgctacccacagaccccaaaccagtctctggtatagctacagagctccgctgtggagctgtcttcttggctggggctggtggaacaagacaagggatatctgccagtcttgtgggggtctctgggagactaggccacttgccaactgggggctgagaattcctgccttctgcctctgtttgccgttgctgccttcgctgccggtactcatataggctgagaggccgaagtctggcttcttgggttgtagcattggtgctcccttccaccttcagaggacctacaccactcttgacttcaggggtgatgttcttgggatggtctgaggactctagagaaagacgatttccctgagctgctgctactgcagcccgtctagggtcggttggtctgcacttaactagcacagggtctactggagccaggtcatttggaatagggtcaacggtcactgtgttagctggagacaagttat

SEQ ID NO: 1995 - DNA, 305 bp, Cricetulus griseus
  misc_feature (219)..(254): n is a, c, g, or t
tccgcaagaccatcatgcagctgtgtcatgaccgtggctacctggtgacccaagatgagctggaccagacacttgaggagttcaaggctcagtttggggacaaacccattgaaggaagacccaagcgcacagacctgacagtggtggtggcccacaacgatgatcccacagaccagatgtttgtgttcttcccagaggagcccaaggtgggtatcaagnnnnnnnnnnnnnnnnnnnnnnnnnnnnnnnnnnnnaacatcacttcggcgctgatcgtggtgcaacatggcatgacgccctctgcc

SEQ ID NO: 1996 - DNA, 506 bp, Cricetulus griseus
  misc_feature (407)..(407): n is a, c, g, or t
gagaatgtgagctgtgtctggttttcccatgatcataatacaggaaagcatgtgcaggctagggagaaagcaggctgggacagcgcctctgaatggacacttcagcagtttctccatgctttacttcccatccacatagctcccctataccacaccctaccaatgtctggattctagcctctgccacaccccacagcccagcaactcctcaggactttgttcctggacctcagtccccatagctggtggcctgtgtgcctgtgtggatgtgagacctcatgcagaggttccctccaagcctcttctagggacaggacctgacacagttgcttgctggctccaagttatgcccagggaggagtcgggtgccttacccatgtgccccttccctctaagtatagcttcantagatgagtttgggaggtttgcatatgaacacagaataaggctgaacacccccaataaaacatgcagcagaaagcccacgtggctgaaataagctctca

SEQ ID NO: 1997 - DNA, 567 bp, Cricetulus griseus
  misc_feature (416)..(416): n is a, c, g, or t
gtatgcaaatagaatggttgccagagcacttgctgcttttcctgaagacctgggcttagctcccagcacccatatcacagcaactcacaacctcctgtaactgcagttccaagggatctgttgccctctctggcttccttgggcacctgtgcacccacacatacccataaatgaaaataaatacaaattaagaaataaaaagtccatccccaggcttgttgcttggttatgttgcatgtagatttacacactcagtagcagtcttttagagggcaccccagacaacaacctgataacattgatggcatggcagtccctgcctacagccataagatagctcaggattcgacaaagttcaggtttaaagaaaaaaattgcatgggacaggtggggatacagctagagagatggctcantagttgagtgctggctgctcttccaaaggatccatgttcagttccctgcacccagttccaggggaaaatgaatactcttttctgatccctgctggcactaggcatgcatatgggttcgtacacacatgcagagaaatacacatacaccata

SEQ ID NO: 1998 - DNA, 448 bp, Cricetulus griseus
tgcacagtgttcatggctatcctagcacttttgccagttgtatgcatattctgtcagaggaaacctgttttcagagatggttaactgtggagagaaaatttgctcttcaaaaaatggactcaatgctctcatcagaggctgtttgggtatcccaatataaagacatcactgatgtggatgaaatgaaggttccagactgtgcagaagtttttatgactttacttttggttataactgacaggtataagaatcttcccacagccccccgaaagctgcagttcctggagttacagaaggacctactagatgacttcaggatacgattgacccaggtgatgaaagaagagaccagggctccacttgacttccgatactgtgcaattcttaatgccgtgaactacatctgaacagtcctggcagactgggctgacaatgttttctttctgca

SEQ ID NO: 1999 - DNA, 576 bp, Cricetulus griseus
  misc_feature (123)..(123): n is a, c, g, or t
  misc_feature (134)..(134): n is a, c, g, or t
  misc_feature (465)..(465): n is a, c, g, or t
gagagtctggggccttcctcgcttcctctgacccttactccagagagagactctttatgtggcattcagccccggcctggcctctgcttcactgtgtgtgtgatggatactggtgtgcaagtngagagtcacantcactgtacgatccaggaacacggcgacgtgagggggcatcaccatcacgaaaccctctctgaggggacactagagaattctaacacagcacttggtcaaataggcaacatcttcaacagcagttaatggaaaaagtgaggcgtgtgcctgcaccgaggaagctacaggaaaccagccctcctgagaaagtgccaacagagggataagactgtgttcaaatcaccagaactcacaaaaagccaggcaaggagctaggcacggtggccacgccacaccacacaggagggacaaatgcttttccgggcagctctgggccacccttcaactcanatactctcaagccagtgtgaggcacacctgtaatcatagcacttacaggttaaagcacaaggatctcaagttccagccctcccctggctacacagcaagatgctgtctcaa

SEQ ID NO: 2000 - DNA, 422 bp, Cricetulus griseus
  misc_feature (221)..(242): n is a, c, g, or t
agactagctggacattgttcccaccttcactcttccctctggtctttgagaagatcacagtgatttttataaaggttttttgggggagagtaaggatgatcctactcccagccgtctttcttccttacaaaaggaaaagaacgaacagggcatgacatcaatttgagccagtctcagataaaagttctacaagtgttaagaagagccctattgtttgtgannnnnnnnnnnnnnnnnnnnnncaccagcaagcagctgctccctctctccgacttagggttgagggagtagagagggtgtggccacctgcaccccttgtaaagagagtggggcagccttgttagcacagtataccttatcaggactctacgcactgccgggtcgtacaattattactattttgcaatttggaatgtattcta

SEQ ID NO: 2001 - DNA, 594 bp, Cricetulus griseus
  misc_feature (470)..(502): n is a, c, g, or t
gtcgacccacgcgtgggggaaggagcctcctgtgagtcagcctgcagcctcatcagactcagagacgtcggacagtgatgatgagtggacatttgggagcaataaaaataagaagaaaggaaaagccagaaaaatagagaagaaaggaaccatgaagaaacaagccagcggaactgcctcctcaggcagttcagacaaagacagttcagctgagagctcagctcctgaggaaggtgaagtgtcagattctgacagcaacagctcctcttctagttcagattcagactcctcatcagaagatgaagagttccatgatggctatggggaggatcttatgggagatgaggaagatagggcccgattggagcagatgacggagaaggagagggagcaggagctcttcaaccgcatagaaaagagggaagtgttgaaaagaaggtttgaaattaagaaaaaactaaaaacagccnnnnnnnnnnnnnnnnnnnnnnnnnnnnnnnnnccgcccccgggggggacctccactttttgttccttttatggagggtaaattgcccgctgggggaaatcatggccatagctgttccctggggg

SEQ ID NO: 2002 - DNA, 415 bp, Cricetulus griseus
gagccgtttcttcagcctagcaccacgtcttgaaggatgttttaggcatttcaaactgacattgttttttttgaaaggtcagattgcaccttaagagccagctgatagataataagagtgtaaaggcctgcaccctggagggtgtgtctcctgactgctgaaggagatttcctgaatcattgactgggagagtttgcgtggcatgaacgtgccgcgtgtgcttgtgcaaagtcagaggacagttagtgggagtcgcttgtttctgtctgccatgtgggtcctgtggatgagactcgggtgtctaggcttggctgcaagcacccctacctgcactattagctgtgagaatgttgcaggtgactgaagaaagtggcaactttttctctaagtatctgtggtttatgtccaaaattta

SEQ ID NO: 2003 - DNA, 501 bp, Cricetulus griseus
  misc_feature (295)..(317): n is a, c, g, or t
  misc_feature (320)..(332): n is a, c, g, or t
  misc_feature (376)..(406): n is a, c, g, or t
gggctttccttgtgtctagtatgaggaagctggccattgaaggtgcggagcaaaaccacccaaaactggaagttcctgagggtatacttccggctggctgcatagattccccagacaaaacaggcttactgtgagcttacaagttcactccctgaggagaaaaagagaagcttgaagaatccaagtagtagaaaacaaatgctccctgtctaccaacagcacgcagaggcagaggcagagggcagagggcagagggcagagggcagaggtcagaggcagaggcatctctgtgagnnnnnnnnnnnnnnnnnnnnnnnccnnnnnnnnnnnnntctctgaagccacagagactcaaaaagacaaacaaacaaaacgnnnnnnnnnnnnnnnnnnnnnnnnnnnnnnncaaacaagaacagcaataacaaaaaacccttctttgtgtgctccaaggtgcacaggtaaggaaggatattcagctcctgaaagtgtcacctctgt

SEQ ID NO: 2004 - DNA, 582 bp, Cricetulus griseus
  misc_feature (119)..(136): n is a, c, g, or t
tctggaatgctggccttgtatcctttctatgtccttgcttaactatgtgtgatactcttaatgtggggtatgtgggtatagccaatgcaactcagcatctagcatcgtagtggtgcttnnnnnnnnnnnnnnnnnnggagaggcagaggtaggtggatctgtgtaagttcaaggttcctacatagcctatgtagttttaggctagctagggttatgtagtgagaccctgtctcaaaaacagaaacaaaaattcaaaacaacaacaaaaagcaaaacaatccagtatcttttgctttatacacattcttgttcatggatttacttatctcaggtagtttatatttagcaccataaaagaagtaattgtcttcaagtagtttttgtattttctttgcgagtttaaggattttctctcatgattttatgaactgagttctcagtaatataaaaggtcctaattaaagaagtagggaatgcatacctgtgtgggtatgaacaacacccccttcctttccactgttaattgatgctgagcagtttattttgatatttgaatacttcttgacactgagggtttgagaa

SEQ ID NO: 2005 - DNA, 354 bp, Cricetulus griseus
gttcctgcggctgctgatgcccgcagcccccgcaccccaccgcggctcctacaagccggtgatcgtggtgcacgggctctttgacagttcctacagcttccgccacctgctggactacatcaatgagacgcaccccgggaccggggggacggtgctcgacctcttcgatggcagagagagcttgcggcccttgtgggagcaggtgcaagggttccgacaagccgtggtgcccattatggaaaaggcccccgaaagggtgcatctcatctgttactcccaagggggcctggggtgccgcgccttgctgactgtttcggatgagcacaacgtggattctttgatctgcctggcctc

SEQ ID NO: 2006 - DNA, 582 bp, Cricetulus griseus
  misc_feature (89)..(89): n is a, c, g, or t
  misc_feature (310)..(327): n is a, c, g, or t
  misc_feature (477)..(477): n is a, c, g, or t
caccaccaacctctctcaggttgtacgccgcaggactcagcggaggaagtctggcatcacctccctgctctttggggaggatgacctanaggctctcaaggccaagaatatcaagcagacagagctggtagctgacctccgagaagccgttttgcgtgtggctcgccacttccagtgcacagaccccaagaactgtagtgtggagctgaccccagactacagcatggagagccaccagcgggaccatgagaactatgtggcatgcttacgcagccaccggcgccgggccaaggccctgctggactttgannnnnnnnnnnnnnnnnngctaggcttccgaaaaaacgacatcatcacgatcatttctcagaaggacgagcactgctgggtgggtgagctgaacggccttaaaggctggtttccagccaagtttgtggaggtcctggatgaacggagcaaagagtactctattgcggnggatgactctgtgacagaaggagtcacagaccttgtgcgagggactctctgcccagccctcaaggccctgtttgaacatggactgaagaagccgtccttgcttgg

SEQ ID NO: 2007 - DNA, 581 bp, Cricetulus griseus
aagttgcttacagtggcagtacccagtctcagaatcacaaggattcccaccaggaattgttcccagaggattgcaagcacatgatttacaaccaaatgggtcttcagcacttaaaccatagaagccttctttacagacatcgcagcgctgtccttcaacatgcaatttgcaccggcactgaccagcaatgagacccgcagagaaatcagtgtaaccgtcacagattcctccattctcagaaccagctgggtcacaggtacatggttcacagagattggggtctcggacgtccctctcggggtgctggtagtagaatggtttgcactgctcgcagttgcgtcccatggtgttgtgctgacagtcatcacacacgcccccgctgacattcccagtggccaagaaaactgccatgtcaaagtgacatgagctggaatgttcattgcagttgcattttttgcaagcattgctgttccgaccttcagcaggtctccatgggaaatcatggtagatatccatgcacagctcacagtttatgcctttggtgttatgcctgcacatgcagtgtccatgaaccattcctt

SEQ ID NO: 2008 - DNA, 341 bp, Cricetulus griseus
tctcctgcaaaaatccttacaataaatgaggatggatcacttggtttgaaaacccctaaatctcacgtctgtgagcactgcaatgctgcctttagaacgaactatcacttacagagacatgtcttcattcatacaggcgaaagaccggggaatgtagtcaatgcgacatgcgttggatacagaagtacctgcttcacagacaccataagatccataccggcgaaaaaccatttcgctgtgatgagtgtggtgtgacattcatacagaaatatgacatggaaaggcacaagataactcacagtggagaaaagccttaccagggtgaatactgcttacaggat

SEQ ID NO: 2009 - DNA, 506 bp, Cricetulus griseus
gatgaaggatcaagtttgcttccttttgaaactgatgccgcagcaatgccagacacagtatgagctggggaaggttctccaactgcttgtcgggactgagcacctcttctctgatggtccagatgtgcagaaactgtgtgtcctcagccagatcttgaaggacacgcctgtagccatcaacccagctgttattaccagctacagcgctgagaattttcagcatgagtgtagatctattttggaaaagctgaaggcagatggacagtttgctgtggccaggagagtggcagagttagccgcattacctgtggacagcttggtgattgaacagctagcccaggaaatgaagaccctgaaacacactcagcagtggccccgcaaacacacaagaattgacttctggaaaaaatgccatgaaatttttaagaaaaactccatttccaacagggcagcctcttccttcttctccagtcaggtccctgtggtgagtgagcaccccactgagc

SEQ ID NO: 2010 - DNA, 303 bp, Cricetulus griseus
  misc_feature (110)..(110): n is a, c, g, or t
  misc_feature (220)..(220): n is a, c, g, or t
  misc_feature (294)..(294): n is a, c, g, or t
aaatggccaatttaagccgctgcaacctcgcacatgcaaatctctgctgtgctaatcttgaacgagctgatctttctggatcagtgctcgactgcgcaaatctccagggnagtcaagatgctctgctcaaacgcagaaggcgcatccctgaggctctgtaattttgaggatccttccggtcttaaagccaacttacagggtgctaatctgaaaggcgtanatatggaaggaagtcagatgacaggaattaaccttcgagttgccaccttaaaaaatgcaaaactgaagaactgnaatctcaga

SEQ ID NO: 2011 - DNA, 133 bp, Cricetulus griseus
  misc_feature (55)..(55): n is a, c, g, or t
  misc_feature (71)..(71): n is a, c, g, or t
  misc_feature (92)..(92): n is a, c, g, or t
  misc_feature (99)..(99): n is a, c, g, or t
  misc_feature (127)..(127): n is a, c, g, or t
tcttcaaggtaagtagatgggcatcggtggcgtcctcggcctcctctggttccanagacggttacctaagnattcctgccaggcacattganatgtgtntgatggtgacagctgatcacgggccatnctgtgt

SEQ ID NO: 2012 - DNA, 441 bp, Cricetulus griseus
  misc_feature (16)..(16): n is a, c, g, or t
  misc_feature (27)..(27): n is a, c, g, or t
  misc_feature (42)..(42): n is a, c, g, or t
  misc_feature (48)..(48): n is a, c, g, or t
  misc_feature (60)..(60): n is a, c, g, or t
  misc_feature (131)..(131): n is a, c, g, or t
  misc_feature (140)..(140): n is a, c, g, or t
  misc_feature (143)..(143): n is a, c, g, or t
  misc_feature (167)..(167): n is a, c, g, or t
  misc_feature (181)..(181): n is a, c, g, or t
  misc_feature (203)..(203): n is a, c, g, or t
  misc_feature (224)..(224): n is a, c, g, or t
  misc_feature (263)..(263): n is a, c, g, or t
  misc_feature (278)..(278): n is a, c, g, or t
  misc_feature (293)..(293): n is a, c, g, or t
  misc_feature (305)..(305): n is a, c, g, or t
  misc_feature (307)..(307): n is a, c, g, or t
  misc_feature (356)..(356): n is a, c, g, or t
  misc_feature (367)..(367): n is a, c, g, or t
  misc_feature (411)..(411): n is a, c, g, or t
  misc_feature (420)..(420): n is a, c, g, or t
gacggaaccaaccagngggagctgganaaacagctcagcagntaaaantacctgctgttnttccctaggacctgagctgggtcctcaacacccacattaggcagctgtaaccccacctgtacctccagctntcagggatntancacccttttttaccctccaccaantactcacacccacncatacaaataagtaatattatntttttaaaaaaaataatctantttaaccctttgactttatagctcaggaaaaactgaaanaacggggactatacnctgatacagtcaaanatggggcccggntntttgccagccaggcaaagcgtttgccatgcaaacctaagtacctgatgngatccccagtncccacaaaaaagctgagcacatagccggacagacacctgcacgngcacctgcntatacatacatacatttacac

SEQ ID NO: 2013 - DNA, 191 bp, Cricetulus griseus
  misc_feature (88)..(88): n is a, c, g, or t
  misc_feature (98)..(98): n is a, c, g, or t
  misc_feature (138)..(138): n is a, c, g, or t
  misc_feature (164)..(164): n is a, c, g, or t
  misc_feature (169)..(169): n is a, c, g, or t
  misc_feature (171)..(171): n is a, c, g, or t
  misc_feature (173)..(173): n is a, c, g, or t
aaaaagccagctctgagggtggtgcatccacgggtgctggcctggactcgctgcacaagaacagcgtcagtcaaatctcggtgctcancgggggcaangccaagtgctcgcagttctgcactacaggcatggtatggnggcatgagcatctgggatgtgaagancttgnantnagccttgaaggacctgaa

SEQ ID NO: 2014 - DNA, 394 bp, Cricetulus griseus
  misc_feature (193)..(193): n is a, c, g, or t
  misc_feature (361)..(361): n is a, c, g, or t
tttgcaacctaggctgattaaacctgcctattttattttcccattaaatcgacattaaaggaggacattgttttatagtaaatgtttgcacagtacccacaacagcccaggctaacttcaaaatgacatacatccctcaggctaagttgaaataaagctgcttatctgaccccgtaagaaatcaggagcaganaaaacagttggtaaggtgcttaattctagcataaaaattaaagcaattgtgatttttaaatcacattattcacataattgtttttggttttgctttttctttgtagtgctggggatgaagcccaggaccttgaacatgctagctagtgttccacccccacactatgtntgactttctaaactactgtggttttgtctagag

SEQ ID NO: 2015 - DNA, 551 bp, Cricetulus griseus
  misc_feature (455)..(455): n is a, c, g, or t
  misc_feature (465)..(465): n is a, c, g, or t
  misc_feature (550)..(550): n is a, c, g, or t
tgtgtttttaaaaggcaagtatgaatctttttaaaggctaaccaccgtgggcatagtttcctctaacattaaactgcagactccccccaaacccttatctagtagatacctgaaatgtgcttccccatgtttgaaacttcagattgcttacaaattaaagtttaatgtataactatggtactctaggttaactaaaataaaacagaacagtcaatactataataaaagttatatgaatctcaacatctaattatgctgtatttacccttctcatgagatgacccaacgtctataggagatgaagtgagcaaggtgttatgtcatatcactggtgattacgcaagggtcacctgcacacagcatggcagtacctggatgtccctatgataattaagatggctagtgagtggctgtcgagagggcagcatgtgcagtgtggatagctcatgtctcangaaagacaangtttcatgacattgctgagattgtctgcattttacagttagtcttttcacttgactttttataactgaagtcactgaaaagggang

SEQ ID NO: 2016 - DNA, 599 bp, Cricetulus griseus
  misc_feature (11)..(11): n is a, c, g, or t
  misc_feature (37)..(37): n is a, c, g, or t
  misc_feature (118)..(118): n is a, c, g, or t
  misc_feature (193)..(193): n is a, c, g, or t
  misc_feature (200)..(200): n is a, c, g, or t
  misc_feature (241)..(314): n is a, c, g, or t
  misc_feature (321)..(395): n is a, c, g, or t
  misc_feature (400)..(420): n is a, c, g, or t
  misc_feature (432)..(478): n is a, c, g, or t
  misc_feature (481)..(554): n is a, c, g, or t
  misc_feature (563)..(582): n is a, c, g, or t
  misc_feature (585)..(598): n is a, c, g, or t
taggggcgaantgggttaccggggcccccccttcggnggttcggacccacggcgttccgggtagggaactggccctttaacatttttaatttcggggcaggaacttgggccaacacanggggcttttcttgggaggatgatacaaatcttttaacgtgaattgttacagctcatggcattcgttataattttncttcatnagtaatacctctcaataaattggcgggtttggggaattgannnnnnnnnnnnnnnnnnnnnnnnnnnnnnnnnnnnnnnnnnnnnnnnnnnnnnnnnnnnnnnnnnnnnnnnnncaccttnnnnnnnnnnnnnnnnnnnnnnnnnnnnnnnnnnnnnnnnnnnnnnnnnnnnnnnnnnnnnnnnnnnnnnnnnnncaggnnnnnnnnnnnnnnnnnnnnnagcttcggtagnnnnnnnnnnnnnnnnnnnnnnnnnnnnnnnnnnnnnnnnnnnnnnntgnnnnnnnnnnnnnnnnnnnnnnnnnnnnnnnnnnnnnnnnnnnnnnnnnnnnnnnnnnnnnnnnnnnnnnnnnncgtctgatnnnnnnnnnnnnnnnnnnnnctnnnnnnnnnnnnnnt

SEQ ID NO: 2017 - DNA, 579 bp, Cricetulus griseus
ctccgggtccctcactgaacctgaaggtggctgattggctcctggagattggcactttccttgaccatcctggaactcactatgtaaatcagggtggtctcgaactcagagatttccctgcctctttccctctgagtgctaagcttaaaggatctctggcccaggaagcaaccgcagttaagcagtcacacatgggcgctgcagcaagtgaactgaggtgcatccagaaaacatagattcaggaccagagacataaagtcacccgggagccgagccaggaaggtctgagtgggaagcagtcgccccccactcccattgccaccctgtggaaaggccagctttgcttgggcttccatcctgattgatgtggacgtctctacctgggggatgaatgcaagggacacaaaacgaactggtcacctataatctgaacagcttccccagaaagcccgtgacatataaagaggaagaacacacccattgtcatttaatgtcattccacacagtggctgagcacataccatatgccagacattggccaagctgtgtggggaatcaaagttgggtaaaaacatgttc

SEQ ID NO: 2018 - DNA, 246 bp, Cricetulus griseus
aacaaaagaattatacatagaaagccattctcttcaaaccacacagaatttgctatttgtttgtttggcaatgtttatattggcaaaaatgtaaggataaataaagccatcctacctacacacaaattgagtcagtatatattttgagcagtgaaatttttcttttaaaattttttacactgtgcttctgattggcacatcatataaactgcctcttggtaaagtgaatgttcgagacttttcttt

SEQ ID NO: 2019 - DNA, 156 bp, Cricetulus griseus
  misc_feature (15)..(15): n is a, c, g, or t
  misc_feature (32)..(32): n is a, c, g, or t
  misc_feature (102)..(102): n is a, c, g, or t
  misc_feature (121)..(121): n is a, c, g, or t
  misc_feature (124)..(124): n is a, c, g, or t
  misc_feature (150)..(150): n is a, c, g, or t
cagctactccagganaagtggagacattgganctgctgctgatagtgtaagcttttccatgccacggttgctgggtgtttgtccttcctgaggtgaggccancagtgttcctgggagtgtncantctggacacaagtgctgagtcaccantatttt

SEQ ID NO: 2020 - DNA, 279 bp, Cricetulus griseus
  misc_feature (158)..(158): n is a, c, g, or t
  misc_feature (186)..(186): n is a, c, g, or t
  misc_feature (206)..(206): n is a, c, g, or t
  misc_feature (239)..(239): n is a, c, g, or t
  misc_feature (249)..(249): n is a, c, g, or t
  misc_feature (252)..(252): n is a, c, g, or t
ctgctggcgggagaggctgcaacgccgatgtctgaggagcgatgccgagagaaatcatcaccctacagttgggccagtgcggcaatcagattgggttcgagttctggaaacagctgtgtgctgagcatggcatcagccccgagggcatcgtagaaganttcgccaccgagggcactggaccgcaanggacgtcttttttctaccanggcagacgattgagcattacattcccttcgggnctgtggctgnctnggaccctgggaagcccccccggggtgg

SEQ ID NO: 2021 - DNA, 546 bp, Cricetulus griseus
  misc_feature (407)..(407): n is a, c, g, or t
  misc_feature (424)..(424): n is a, c, g, or t
  misc_feature (478)..(478): n is a, c, g, or t
  misc_feature (495)..(495): n is a, c, g, or t
  misc_feature (498)..(498): n is a, c, g, or t
  misc_feature (513)..(513): n is a, c, g, or t
  misc_feature (530)..(530): n is a, c, g, or t
taatcgcttggtaccttcaaaaggaaatggagtaagaaaattctgtgatatccagatccgaaggttacggaggttaggcattgaaaagactgaccccaccacactgacggatgacgagataatcagatttgtaagactggaaattgatccagaaaccataacgtggcagagagtgctggacaccaatgatagattcctgaggaagatcactattggacagtctccaacagagaaaggccacacacgcacggctcagtttgatatctctgtggccagtgaaattatggctgttctggccctcactacttctctgaaagatatgatagagagagtgggcaaaatggtggtggcatccagtaagaaaggcgaacccatcactgttgatgatctgggcgtgagtggagcantggcggcgctgttgaangatgcaatcaaacccaatcttatgcagaccttatagggcacaccggtgtttgtncacgctgggccctttgncancattgcacatggganttcctccattattgcanaccggattgcactcaa

SEQ ID NO: 2022 - DNA, 579 bp, Cricetulus griseus
  misc_feature (38)..(38): n is a, c, g, or t
  misc_feature (377)..(377): n is a, c, g, or t
  misc_feature (470)..(470): n is a, c, g, or t
  misc_feature (509)..(509): n is a, c, g, or t
  misc_feature (530)..(530): n is a, c, g, or t
  misc_feature (545)..(545): n is a, c, g, or t
  misc_feature (550)..(550): n is a, c, g, or t
tcagggaaagaaggggttcttgtggtccagtccatcanggtgagacaggaacactaggcaatagatcacatggcatgggtgatcaggaagtagagagagtttagtcctggggctcagttcactttcttctttgtattccgccctggagcccatgggacagggcgggtgactcctacagtggatcttcccatttcatctaatctaatatacatatgtgttcagtcacgctcagagtttggtctcctctgtgaagccagctactgccaagttcacaatatcagccatcactatgaggggaggtgtccaacaaaatgacagttggaaagaccaaactctaaggaaagagaagcaacaatagccattcaaatgtggtgtancttgcagcagctacatcagaagccaaaagaaagaccttttccacgcaccccgccctaaattttcagtgtcttcatgattcattctgaaaaganatgtcggggagggagcaatcctggaggtagtggcacaancctcccccccatgttgagcantgtctctttttgtancccangacagcttgtgggctcagcatcccaagta

SEQ ID NO: 2023 - DNA, 467 bp, Cricetulus griseus
  misc_feature (5)..(23): n is a, c, g, or t
  misc_feature (36)..(36): n is a, c, g, or t
  misc_feature (43)..(62): n is a, c, g, or t
  misc_feature (69)..(69): n is a, c, g, or t
  misc_feature (139)..(139): n is a, c, g, or t
  misc_feature (250)..(250): n is a, c, g, or t
  misc_feature (265)..(265): n is a, c, g, or t
  misc_feature (295)..(295): n is a, c, g, or t
  misc_feature (298)..(298): n is a, c, g, or t
  misc_feature (374)..(374): n is a, c, g, or t
  misc_feature (427)..(427): n is a, c, g, or t
  misc_feature (456)..(456): n is a, c, g, or t
ttatnnnnnnnnnnnnnnnnnnntcccccccttcgnagtcgtnnnnnnnnnnnnnnnnnnnnaccaggnatatcatggacccacacaaaagcagggctcattaagggcttacaggaggactggaagtgacaatcgcagnagcttgcatggggaatgtgctaggtcctctgtatatatgctgtggtcctttagcctgggtaacagtggggtctctgacccttttgttcctagtgggttgctttgctatgangctttttgctatgangttttattgcatgttgttagatatctccangangcctactcttttctgaagagaagtgtatatgggggagaggaaaagtgtgtggggaattaaactgggaggagtgganggagggaaactgcagtcccaatgtaacatatgagaaaagaataactaaaaagnaaaaaaaaaaccttaaagtatgacatagntaacatgcccc

SEQ ID NO: 2024 - DNA, 279 bp, Cricetulus griseus
  misc_feature (9)..(10): n is a, c, g, or t
  misc_feature (81)..(81): n is a, c, g, or t
  misc_feature (207)..(207): n is a, c, g, or t
  misc_feature (227)..(227): n is a, c, g, or t
  misc_feature (242)..(242): n is a, c, g, or t
  misc_feature (246)..(246): n is a, c, g, or t
  misc_feature (253)..(253): n is a, c, g, or t
aatacacannaaagcaagaaaatgagcatcttactcaggaacattctagaatgtggcaataaggatgggggagggaaacantttcccgggctggttcgcaggggaaccctggctcaaggtctggttctgggaatccatggggtagaagtgacttcttgcaaatgggtcacgctactacgcatatggtgcatgtgggtggaacataantgtgacttttgcctcttttnagaggtcaggtttgntganaggtttnaaatgacctggaaagtccatccaatg

SEQ ID NO: 2025 - DNA, 512 bp, Cricetulus griseus
  misc_feature (266)..(266): n is a, c, g, or t
  misc_feature (293)..(293): n is a, c, g, or t
  misc_feature (343)..(343): n is a, c, g, or t
  misc_feature (431)..(432): n is a, c, g, or t
  misc_feature (507)..(507): n is a, c, g, or t
catgtggccctctcaaggtaatttattttacgcatttactgtttaccgaacaaatgtctgactgtgcccgggtgacactgccctccaggggagaggacctttctcagctcatcactgcgatttgcacattgccccacgggacactcaggcctgcattctgtcccctggacgtggaaacattctgaaccggtctctctccctctgctgtgttcagacagaagcttgattgagtcttgagtgacaagcttggaatggttgtggctcanacatcgacctgcccaggaacaccaggncgtgtctagccgacaccttgatgccacaagcatgctccccctctgccgangtctatcggtctatcgggatggtgtgtggccagggggcggagctgaatccctcacacacctttcccactttcttcttgttaaaatccnngacaactcgaaactgaatctccccgaactctacttatctgatgaagtggtgggaccctctcaagttttcttttcntctgg

SEQ ID NO: 2026 - DNA, 412 bp, Cricetulus griseus
  misc_feature (190)..(190): n is a, c, g, or t
  misc_feature (225)..(251): n is a, c, g, or t
  misc_feature (337)..(337): n is a, c, g, or t
  misc_feature (375)..(375): n is a, c, g, or t
  misc_feature (406)..(406): n is a, c, g, or t
taaactgcatgtgccgcgccctataagacctttgacctccgcacccaagcgtcgtctggtgtccccgtgggacccagcccctcccagcgtcccgaatgctcttgaggaggaccagagtgagggcagcaagagctactcagcaacaatgtcttcagaagtggagacctcggaaggggtagatgagtcaganaaaaagaactctgtggccccagagaaggaaaatcnnnnnnnnnnnnnnnnnnnnnnnnnnntcctaaaggaagggaccaaggaagcacacgaccgggcagaaaatacccagtttgtcaaagacttcttgaaaggaaacattaagaangagctattttaagcttgccactaccgcactttattttnacatacctcagcccttggaggaggaaatggnacccga

SEQ ID NO: 2027 - DNA, 492 bp, Cricetulus griseus
  misc_feature (429)..(429): n is a, c, g, or t
  misc_feature (438)..(438): n is a, c, g, or t
  misc_feature (482)..(482): n is a, c, g, or t
aaatgggagtacactaaataagcagtaaattttgattcctttttcatgtatcttttgatagctatcatgaagaacagtgtaacagacagtaaaacaaaaccatggctgataaataataaaaatggaggttcaagggcaccatagatcttctatattttattaggtgatgcttgaaatatatttataaccatatctagttttaaatagctgcccaaaaagtaacctagggaatgatttaacctacatggtacttttaataaaacttccccagatgtcctatggtgattttgatgttccctgagaaaagaacagcctcaagtctcgggggcatctgtagaagaggtacagctggaactatctctaatttaacaaaataataataacagtaaaacatgttttctaatgaaaaacatgagatgatatattcanaaactctantagtggctatttatgaatcaacccctatagacctcattgggctnaaacagtaaa

SEQ ID NO: 2028 - DNA, 555 bp, Cricetulus griseus
  misc_feature (306)..(306): n is a, c, g, or t
  misc_feature (433)..(433): n is a, c, g, or t
  misc_feature (453)..(453): n is a, c, g, or t
  misc_feature (496)..(496): n is a, c, g, or t
  misc_feature (505)..(505): n is a, c, g, or t
  misc_feature (537)..(537): n is a, c, g, or t
ctatattaatcactttctttgtaatcccttcacagtcccaggtttagtgaaaaactgctgtaaacacgggggacacagtttaacaatgcaacttttaatgactgttttctttttccttaacctactaatagtttgtggatctgataagcaagggtgggtggctgagaaaaactctgtgttgggcttaatcagtcactacatccaaaccctaacaggtcaccctggtgaccagggcattcgtataagaaaagcattgtatgtgactctgtgcagcacccccagatgccaccctactctgatcatagngaatcttctgcttaggacaccaaagataagaattagatactactctcctttgtgtataatcttgtagacacttacttgatttttttgtttttttactttttaattctaaacgatacaaaatgctggngtatctatcttttcattcanccagcaaaccagaattagattatgctcattttttttcaaaaanggaagtaancaaaataataaatattgactcctgtgtttatnggctcacacacacacaca

SEQ ID NO: 2029 - DNA, 577 bp, Cricetulus griseus
  misc_feature (105)..(105): n is a, c, g, or t
  misc_feature (234)..(251): n is a, c, g, or t
  misc_feature (284)..(299): n is a, c, g, or t
  misc_feature (400)..(400): n is a, c, g, or t
  misc_feature (509)..(534): n is a, c, g, or t
  misc_feature (566)..(566): n is a, c, g, or t
agcgtgcagccgtcatggtcagccacctgcagctcaacaacggcgccaagtatgcccatcctgggcctgggcacctggaagtcccctcccggccaggtgactgangccgtgaaggctgccattgacattgggtaccgccacattgactgtgcccaggtgtaccagaatgagaaggaggtgggaatggccctccaggagaagctcaaggagcaggtggtgaaacgccaagacctnnnnnnnnnnnnnnnnnngtggtgcacgtttcacgacaagagcatggtgannnnnnnnnnnnnnnngacgctcagtgacctgcagctggactacctggacctctaccttattcactggccaacaggtttcaagcccgggcctgattacttcccactggacgaatcangaaatgtgattcccagtgagactgattttgtggacacttggacggccatggaacagctggtggatgaaggtttggtgaaatccattggtgtctccaacttcaaccctcnnnnnnnnnnnnnnnnnnnnnnnnnncccggcttaaaatataagcctgccggttaatnatattgaatgc

SEQ ID NO: 2030 - DNA, 398 bp, Cricetulus griseus
  misc_feature (225)..(260): n is a, c, g, or t
  misc_feature (313)..(313): n is a, c, g, or t
  misc_feature (351)..(351): n is a, c, g, or t
  misc_feature (378)..(378): n is a, c, g, or t
atggacagaaatttagaggtgcaggtccaaacaagaaagtggccaaggcaagtgcagcactagctgccttagagaagttgttttctggacccaatgcagcaaataataagaaaaaaaagatcattcctcaggcaaagggtgttgtgaatacagcagtatctgcagcagttcaggcagttcggggcagaggaagaggaactctgacaaggggagcgttcgtggggnnnnnnnnnnnnnnnnnnnnnnnnnnnnnnnnnnnnggaacaccatatggttacagcactgctgcccctgcatatggtttgcccaaganaatggttctgttacccgttatgaaattcccaacatatnctgttcccccactactcattcttttanttaaatgacagaagcttatt

SEQ ID NO: 2031 - DNA, 522 bp, Cricetulus griseus
  misc_feature (122)..(122): n is a, c, g, or t
  misc_feature (249)..(249): n is a, c, g, or t
  misc_feature (367)..(367): n is a, c, g, or t
  misc_feature (403)..(418): n is a, c, g, or t
  misc_feature (484)..(484): n is a, c, g, or t
  misc_feature (493)..(493): n is a, c, g, or t
  misc_feature (511)..(511): n is a, c, g, or t
gaggcgcgatggcaggtgtaggggtcgagcggctgcaggcgatggtgcgatttacgctgctggtgctcactgtgtgtgctgcgggtgcccatgggctctatttccacatcggcgagactganaagcgttgcttcatcgaggaaatacccgacgagaccatggtcatcggcaactatcgaacccagatgtgggacaagcagaaggaggtcttcctgccctcgacccctggcctgggcatgcacgtagaantgaaggacccggacggcaaggtggtactgtcccgacaatatggttccgagggccgcttcaccttcacgtcccacacacccggtgaccatcagatttgtctgcactccaactccaccangatggctctcttcgctggaggaaaactgcgtgtacnnnnnnnnnnnnnnnntggggagcatgccaacaactaccctgagattgctgctaaagataagttaacagagctgcagctttnagctcgacntttgcttgattaagtggnaacagatccag

SEQ ID NO: 2032 - DNA, 326 bp, Cricetulus griseus
  misc_feature (114)..(114): n is a, c, g, or t
  misc_feature (189)..(189): n is a, c, g, or t
  misc_feature (246)..(246): n is a, c, g, or t
  misc_feature (289)..(289): n is a, c, g, or t
  misc_feature (325)..(325): n is a, c, g, or t
ggtaagtgtgtgctgtctgagcatgtgcagatggaggagaagtgtgggggcttggtggggatccagaccaagatcgtgcaggtgtcagcaatggaggatgggaccgtcatcaangataccaatgtggtgctggagatccccgctgccaccaccattgcctgtggcatcatcgagctgtatgtgaaacangatggccagtttgaattctgtctcctccaagggaaacatggtggctttgagcatganaagaaagttgactctgtctacttggaccccctggcctacaganaatttgcattcctggacatgccagatgggggtcaana

SEQ ID NO: 2033 - DNA, 324 bp, Cricetulus griseus
  misc_feature (23)..(23): n is a, c, g, or t
  misc_feature (60)..(60): n is a, c, g, or t
  misc_feature (142)..(169): n is a, c, g, or t
  misc_feature (204)..(204): n is a, c, g, or t
  misc_feature (236)..(236): n is a, c, g, or t
  misc_feature (309)..(309): n is a, c, g, or t
acaaagaagtggatatcctcggnatattggttgtgtacattttaatcccagtactcgggnagtcagagtacaagtgaatccatgtgagctcgaggccagagagttctaggccagctagggctgcatagtgaaaccctatttnnnnnnnnnnnnnnnnnnnnnnnnnnnnataccttattaaatttagactaagcagaaaggaantgggaggagttgtttgagaaagaacaagaaantggcctcagggacataacactgttagacctgcctttcttcccacagctcatgtgcatgtaaccttgctccatngctcctctgtactgg

SEQ ID NO: 2034 - DNA, 277 bp, Cricetulus griseus
  misc_feature (120)..(120): n is a, c, g, or t
  misc_feature (129)..(129): n is a, c, g, or t
  misc_feature (164)..(164): n is a, c, g, or t
  misc_feature (181)..(181): n is a, c, g, or t
  misc_feature (238)..(238): n is a, c, g, or t
  misc_feature (263)..(263): n is a, c, g, or t
ctctggggaagctggaccgccccctctacagagttggcacagaaggcccagctcattaattcccaaggatggggaggccaggtctccactggagtaactctccgagggaccgcagcccanacacagggnatgaaactgttaggtcatgggggtcccagcttaanggggtcagccaccccangctggtaagggcagtgtggcccactctcaaggtgagggaccttctgcggagccctanggctggaattaaacccccggggctnagggggtattggag

SEQ ID NO: 2035 - DNA, 409 bp, Cricetulus griseus
  misc_feature (173)..(198): n is a, c, g, or t
agcaaacttgagacggctgaagcgcaggaggaagaggcgagcgtcagagctgcccgcgcagagctgctgctaaccgaggaacctgggttcctggagggagaagatggggaagacacagcaaagatactgcagacggacatcgtgggggctgtggacattgcaagtgctgccannnnnnnnnnnnnnnnnnnnnnnnnntttgggccctacagactgaactactctaggacagggagacacctggcattatgaggtcgtcggggtcatgtggctgccctcgattgggtgacaaagaagctcatgtgtgagatcaacgtcatggatgccgtgcaggacatccactttctccattctgaggctctgctcgctgtcgctcagatccggtggctttacatctatgatcaccagg

SEQ ID NO: 2036 - DNA, 600 bp, Cricetulus griseus
  misc_feature (4)..(22): n is a, c, g, or t
gacnnnnnnnnnnnnnnnnnnngggcacttccgcgggggagcagccggagagggagccatggggacagtgcacgcccggagtctggagcctcttccatcgagtggacctgactttggagctttgggagaagaagctgagtttgtggaagttgaacctgaggcgaaacaggaaattctggaaaacaaagatgtggtggttcagcatgttcattttgatggacttggacggactaaggatgacatcatcatttgtgaaattgaagatgtttttaaggctaaaaacctcattgaggtaatgcggaaatcacatgaaacccgtgaaaaactgcttcgcctaggaatttttaggcaagtggatgttttgatcgacacatgtcatggtgatgatgcactgccaaatggattagatgtcacctttgaagtgacagagttaaggaggcttactggcagttacaacaccatggttggaaacaatgaaagcagtatggtacttggcctcaaactccccaatctcctatgacgtgcagaaaaagtgacttttcagttttcatatggaaccaaagaaacttcctatggcctgtcattcttcataccacagct

SEQ ID NO: 2037 - DNA, 414 bp, Cricetulus griseus
tgaagtacagcttgtgtgatttcattttctggattggagattgttgaatggagccagaccttttgagaaagtctagaagatttaaaaagaagaacttagggaaggtgaaatagtttttttaaaaaaaaaacagatataattaagttcatatgcaaatctaaatagaaatgtaaatgactataaactctgtgataagcactaaaaacttcttgagtgggtgtggtggcttggtggtaaagggccttgctaacaggcctgatgatatgagtgccatcccgggacccacatggctgaagagaactagttcccacagttgctctctgacctccacacagggctgtgtggtgagcagttgatgctgtcttctctctgggtgggctctgggcctctgacttaggaagtccacttttgtgg

SEQ ID NO: 2038 - DNA, 519 bp, Cricetulus griseus
  misc_feature (199)..(303): n is a, c, g, or t
gagaaagtgggcattcttcaggaagctactgagaatctgacatgtctgggatgaaagatgggggaccatgtagaacatggtcaggtatacaaaagccagattaaagagagcacataagaaatatggggttccctctgtagacagtggaccaaaaggtctctaccacaagggttttcacaactaaatttgctgcattttnnnnnnnnnnnnnnnnnnnnnnnnnnnnnnnnnnnnnnnnnnnnnnnnnnnnnnnnnnnnnnnnnnnnnnnnnnnnnnnnnnnnnnnnnnnnnnnnnnnnnnnnnagaagaaaagtaaagaaaaaatatttgggggagagagaagaaaagtctgagagattgccataaactacagtttcacctttgacattggcagacacccatcctcaagaaggacaaagcctggaccctgcttctgcctctcatggacctgcagatgaatggggccttcttcattataaatagaaaaagaagctgcggctggaattgcagacaacaagg

SEQ ID NO: 2039 - DNA, 579 bp, Cricetulus griseus
gaacactactgcctagtacaaatcggtgacaataacagggtgtgccttattttgatacttggctccttttcattaggaggaccctcgttttttgtaagcactactgaccctgctgtatttaagatgctctcatgttaagtgtcaagatgtttgctttcttgttcttatgtattatttctgaaagtattttaatcaaaagtaaccctttgaagtttttataaaacgatgaccaaagtttctcttttgccaaaagttaaatacaaataaaatgttcacaagtctgtccctcatagataatttcaagtaagtgccaaaagtaactcaaggtgcccttgaagaaacagtgttaatacagtgtgagccttcgacattttcacagtccttcccataaaaatgctgtagataatgctgctcctccagacttggtttctcccatatagctatggaggtgagctgaactcgcgcctgtagatgagacgtttataagctatggcctccagcgcactgtgagcagcagctcggcagtctcacatcaaagctcttgaatgctatttactgcttctacccgtactccacttc

SEQ ID NO: 2040 - DNA, 467 bp, Cricetulus griseus
cttgataggggtgtatactgccttgataggggtgtatactgccttgataggggtgtatactgccatgataggaatatatacgtgtacacccttgaagtttgagtcaaaaggaacccttctttcctttttagatcctttttgtcaggttgtcttaccccaacaacacagaagttaacaaagacagagaagtgttgcacagagagaatgaggatttagggtaagtcagatggtctaaaacaaatacttgtatctttgagccaagggacaaaaagacgttttaatagagttaaagaggaattttccttggcaaaccctacgtagtagaaagttcaaagagcctcaaatagaaacaaatatccctcacacatacctagtggttgtgctaaaagccaacaatgaagagaaatgctggaaacaactagattaaaggagacatacgaagaaacaaagttgaaaactacactggg

SEQ ID NO: 2041 - DNA, 331 bp, Cricetulus griseus
attacatagtcataagagaaatgtgttcttggttttgttcttgtttccttttttttttaattttgtttttaatgaagttgtggtattattggttctacgctccctaaaacaacattctgctttgtggaaatccagactgaacgcagcaccctccctctgtgtacctagtgtgtttatcagcccggggctctcactacttgatattttttccattagttaagacagaaagatggtagctcattcagtaggggaggggaaatctgctgctaggtatgtctgaactaagtgccatacttgtctgggtcagatttgggaaacaacctctgtacat

SEQ ID NO: 2042 - DNA, 193 bp, Cricetulus griseus
tagaggccatcagcagcagtagaggcccagcctcctcctggtccccagcaagtgtgagctctgataacacaaaggagacaggaggctatggggcgaaaagcctaggctagagaaggatcactggctggagagaaaagcacttatggttctggcacactgcagaccttccctgctacccttacactcaccattg

SEQ ID NO: 2043 - DNA, 582 bp, Cricetulus griseus
ctgtaaaatcacaccccaacaccggagacaactcaactgaaatgcaaccccggagctctctgcatcacttacaggacactgcctgctgggcagcgcctccacttcagcagcttgtttgttgtctctgtaaagctggatctggcacatttcagctttcccagacatcggaacagtagaacattatctccaagtctcatgagcctcctgccctacccaggaggtaatgcttcaatcccagggaaactgccattaccctgttcccttaattgatttcttggtgttgttgagacagggtctctgaacataagccctgactttcctggaactcactatgtataccagggtagactgctaactcacagggatcctcctgcctatgcccctcatgctgggattgaaggttgtaccacctttcctgcctctttattgaatttctgtctcaaaggtgcttaatctttgagaccccttgtttggtggtggggggtggttgtaatggctcactgggtaaaaggacttgctgtgtaaacctgccgatctgagttcagtccctcaaacccctgtcaaggggggggagagacccag

SEQ ID NO: 2044 - DNA, 578 bp, Cricetulus griseus
ggtgtcattgtccataacaaagcagcagaaaatgtagcacagttgcttagtgtgagcacctcacttcccaaagacctgaattcaaatttggatagtcctgaatgcttaaatccctaaagaacacatggttattctttgtatgtatttcatcctaaaacatgttggtgtttgttcagagaccctggttgagaagagttctagataataaggtcatatatatgaaaaatgtctactgttgcgccagctagtgcttaacaatttcattcaagcccctaagtatgtgctctgctgttggctttctttggcatttgaacattgaattcagttttttacttggtttttgaagtataagcaaaacaagcaataaaaaggggaatggggcgcgctagtgtttgaatatgctctcttgttgctctaattctgtgcctctgtgcattattaatatttgaatgcatgcaatgctagcatgggactttggtcttcacaaatactgcaggttttccagaaaacactcacaaaacaataaatgtgatagacaacattccatttgttaaaggggctatgtgaataagcacggc

SEQ ID NO: 2045 - DNA, 494 bp, Cricetulus griseus
  misc_feature (490)..(490): n is a, c, g, or t
ccgccggggtcggtgaaggatcccaagatggccgggcgtaaacttgccctaaaaaccattgattgggtgtcttttgtggagatcatacctcgaaaccaaaagacaattgcaaactccctgaagtcttggaatgagaccctccacaccaggttggctaatctgcctgagaaaccaccagcgattgactgggcttattacaagaccagagtggccaaggctggcttggtggatgattttgaaaagaagtacaatgccctgaagattccagtgcctgaggataaatacacagccctggtggacaatgaggaaagggaggatgtgaagaactgtgctgcgttcctgtctgaatcccaggacaggatccaggaatatgagaagcagctggagaagattaagaacatcatcccctttgatcagatgaccattgatgacttgaatgaagtcttcccagaaaccaagctggacaagaagaagtacccctactggcctnacca

SEQ ID NO: 2046 - DNA, 580 bp, Cricetulus griseus
  misc_feature (2)..(14): n is a, c, g, or t
  misc_feature (181)..(193): n is a, c, g, or t
  misc_feature (195)..(212): n is a, c, g, or t
  misc_feature (561)..(561): n is a, c, g, or t
tnnnnnnnnnnnnnttaatttgctaaggtactgactgctaactaatttcaaagatttttacaaaaaacgtagagccaacctggtagtggtgtatgcctgtgatctcggcactggggaggcagaggtaggcaaatctgcatatagtgagaacatattttagagaagcaatctcaaattgtcnnnnnnnnnnnnngnnnnnnnnnnnnnnnnnngctttatgttttgagccaaggtctcactatataggcctggcctggaactcattatgtagactaggatgaccttaaactcatggggatccatctgcctcagcctcccaaatactggaaccaaaggcatgtaccaccaggtctggctgcaaattgacttttaaaattaactacctaatttgttttgggccacttacatattagtttctgtacatctctaaaagagtgacttttaaaatctataaaatgttaagtttaagttttgggttgttggggcagtagttacattgtgactctcacatccgccttagttaagtgcatcaccagtcaatagaatgtctgcagggcttanatgtaccaacagatagctc

SEQ ID NO: 2047 - DNA, 371 bp, Cricetulus griseus
tgaccagtcgaactggatttgtcccactgaacatgtctctttaactaactacagttttcttacctccatattttaatagttaggaatattaagaatatttgtggcatggttttgcatctacaaaattatctcatttgcttgaatggtggcttgagtactcctaatgaggtatatggggcaaatgttagctctccaagtgaagaaattgaaacccataaatttaccaacttgcacccaaattggacagcgagtggtagagatttctaataccggggtttacgcattaaccctatttatctaaccaaatcgccgctcttattattttgcattccatctaggaatgatagaccgcgaaactaatttttagcacc

SEQ ID NO: 2048 - DNA, 580 bp, Cricetulus griseus
tgggcagggccaaggtcagtcctcagatgagagctcttctgctccatcctgtgtgcctcaagcacttgacttttctccaaacaagagtgaatctcctccttcccatggctccaccacagaggcagctcaaggtgaaacagagcctcatgaagacaacacaagccccactgagggtcttctcctggacatcaagctggaccaactcaccatcactcctgaagcaggaggcagagacctagctgaccgccctctcatagacttcagcaacacccctgagtccaacatggctttgggacccagcagctggcccctgattgaccttgtaatgaatactccagacatgggtagaaatgatgtggggaaacctccaaaagctgagcttgggcagctgattgacctgagttccccactgatccatctgagccctgaggctgacaaagaaaatgtggattcaccacttctcaagttctgagcaaagcacaactctgccctttactctgtttatttctgttgtggctttaagcccattagaagcaaatttgaaaggaactgtatttgattcggaggaggccttgtgtct

SEQ ID NO: 2049 - DNA, 327 bp, Cricetulus griseus
cattccatgtgctgtactcataggtcaaagccagactggatgttttcacctcagcgtctcatggctgtttcagtctctgtatgctctacaccccatttgtcatctctcttcctagactgtcaacagtagaagaaatgctagctgaagatgaacagttaacaagttatccataaggatccttgcgtttatgagatgtaagaatagcaacgcagccaggttccaccccaagccaggaccgggcctggcaagctgcaaggcgccttccttgatccttctgttacttaggctcttaaatggctcctcattcgttttgccttgagctgtcat

SEQ ID NO: 2050 - DNA, 579 bp, Cricetulus griseus
  misc_feature (440)..(457): n is a, c, g, or t
taaagagtgttatatctgagccatggggtattcccaccaaaaaatggttagaactgccaaggtataatcagttaagcagggaaggtattctttggctagcattagtatctttcaactgcagttgatgatgtgaatggctgtcatactcccttttcagttctctcactgctttctctgctgctagtgtgtgctttcctcccttctgttgcctatgtctccatcaggttttcgaagtggggcaggaattgctttgatgcgaaacccaacagtgttagagaatctttatgcttctctgttgaagaggttgggctgtgggagccctacccacaagtctctggcctcttagtccccagcactgtgtgacaaaacagttgacataacaactgaagagaggagaggttgattttgagtcatggtctgagagggttatttatagtccnnnnnnnnnnnnnnnnnnccatagaaatggtaccatgtggctgaagacttcatattgtgtggctggaccagatgcatatagacaggaagggggcttatagatccccaaggatatgcccccagtgactcacttcctccaac

SEQ ID NO: 2051 - DNA, 509 bp, Cricetulus griseus
gttcgaccccactgcgctccggggcagggaagggccttaggaaactaacatgctttcactactgagggggacggacggacggacggacgcactcgggtctcgctggcgctgttctgaaaccatctggctggctttctgaggtcaggctgggcgggggctgtcattggccgcgctgccgatcacactggccctcatccctccagcgatctcgcgctgttctgtaaattcctggtgctaacatcccatgccgctcccccgtggcccccccagccgcctgcccagtccagggctggtccaagaatgacgtgggggatggcctctgtgtaatgcgctggtgattttttccttcccctttatgccccttaaaattttaatttttgccccaaacatgccgggccaactaaagggtggtgagagggatttgattcccaccatgcccacaagaaccaacctgcagtaaacacttctgtgggccgccgcgcatagcacgccgcgggcacctactgccc

SEQ ID NO: 2052 - DNA, 404 bp, Cricetulus griseus
aacatgaccctgagttgagataaacccttatcacccctttaagggtcacgtgtgggaaggatggcaaataaatcattgttcaactccagggaaagtgtagagctatgcagacatgctaactgcccactgagaggttttattggctccaaatgctttttagttttgaagtagttgctggcttgaactagagatgttttcacacacaaacaaaaaccatgcatctcccgctgaatggcagctttaaagtggaggagttccagcccagattctctctcaacactattagtttgacattggggagcagatgtctgtgcccgctggggctggggcaggccagttctatcttattgccatccatgcttcttcttctactctcaaggctgcctccctctggctgtagtgtc

SEQ ID NO: 2053 - DNA, 200 bp, Cricetulus griseus
gtcgaccccgcgtccgtggaggtccccgacggcacccagtgtcaccgcaaaacctacatcaccactgccctcggcggcctcatcggcgccataggctcagcttacagcgtcgtactcaacccggcagattcccacgtgggaagcaatgggcccaggggcctgggcccggggtacaccgtgtcacttgcaagctggccatt

SEQ ID NO: 2054 - DNA, 506 bp, Cricetulus griseus
  misc_feature (457)..(483): n is a, c, g, or t
cagtgggtgtttgactgtgtgaatgcccggctcctcctccctgtggcagagtacttccctggggtgcagctgcccccacacctctcacccttcgtatctgagaaggaaggagattacattccccctgagaagctgaagctactggctctgcagcggggagaagatccaggagacttgaaagaagaagaggatgaagatgaggatgaggatgatgaagatgatgacaacgaaggtgatggtgatgtgggggaaaatgaggatgaggaagaagtggacgctgattcagagaaggaggaggaagcgcacctgtcggtcttggagcagcagaggctggaagggaagaagccccaggtggtggccggcactgtgaaactggaagacaagcagcggctggcccaggaagaagaaagtgaggccaatcgcctggccatcatgatgatgaaaaagcgggagaagnnnnnnnnnnnnnnnnnnnnnnnnnnnaagcggcgcaaaatccgtgaggc

SEQ ID NO: 2055 - DNA, 176 bp, Cricetulus griseus
cgcgctcgcagagcttatctcttctgtcgggaaactggcgtctcttcccttgctgttcctcagccccctctctcccccttgctttctcaccttctctgggaccactcacccaaagacctcccttctcccctgcccgcccacttatgggacaaaatgctgcggacactgacctcttg

SEQ ID NO: 2056 - DNA, 399 bp, Cricetulus griseus
  misc_feature (349)..(395): n is a, c, g, or t
taggaacgcgggtcttcccgctgttgctgtggggaccacgggccgaacacacgatcccggcctgaggtggtggtgggaagcccaccgcactttgctgcgacgtcatggagggtggcgggggaagtggcaacaaaacctccggcgggttagctggcttcttcggagcaggaggagcgggctactcgcactctgatttggccggcgttccgcgtgagtatcaggcctagcttgctacctctctctgtctgcttcctgggacagctagaaatgtgtagcattccttgtcccctttcttgctcgcgttcacaaggttcaccgtcagtgatggggtttccagactgaacggaannnnnnnnnnnnnnnnnnnnnnnnnnnnnnnnnnnnnnnnnnnnnnnagat

SEQ ID NO: 2057 - DNA, 581 bp, Cricetulus griseus
gatttgcactcaatcatccagagctggtagaaggtcttgtgctcattaacattgacccgtgtgctaaaggctggatcgactgggcagcttccaaactctcaggcttgacgaccaacattgtggacataattctggctcatcacttggggcaggaggagttgcaggccaatttggacctcattcaaacctacagactgcacattgcccaagacatcaaccaagaaaacctccagctcttcttgggttcctataatggacgcagagacctggagattgaaagacccatactgggccaaaatgacaacaggttgaaaactttaaagtgttctactttactggtggtaggggacaattcacctgctgtggaggctgtggttgaatgtaattctcgccttgaccctataaatacaactttgctaaaaatggcagactgtggaggactgccccaagtagttcaacctggaaagctcaccgaggccttcaagtactttttgcaaggaatgggctacataccatctgccaacatgacccggctcggccgatcacgaacccttccacctcgatagcattgggtctggaga

SEQ ID NO: 2058 - DNA, 450 bp, Cricetulus griseus
acctaggatggccaaagagctcctcaggaagcacagcttgggtcaagttcttgccttagttttaggggcagcagcgggaaggagggaacagggtgttctccccgggcctatttctgcccgagttccccagctccagggactctatttatctcccaagctgggagcctgctgtgaagggtagagcaagggatgcctctgtcacttgagttaactgagctgttcctttctactcccctgggaagaggtcctatggccttccctccctacgacaaggctggatggggcctggagcttgggaagtcagaaaatgaaaacagtcctggactcataggaggccccatccttttgctcactcactgggaaggtgggagaaggctttcctgtccttgtgtctgaggctacagagtagggtaggaccaagtcacccacactgtggtagctcccttgggg

SEQ ID NO: 2059 - DNA, 490 bp, Cricetulus griseus
accccaaccagcccctggtcatcctggagatggagagtggcgcctcggccaaggccctgaatgaagctttgaagctgttcaagactcattctcctcagacgtctgcaatgctcttcacagtggacaacgaggctggcaagatcacatgcttgtgtcaggttccccagaatgcagccaaccgaggcctaaaagccagcgaatgggtgcagcaggtttcaggcctgatggatggtaaaggaggtggcaaggatgtgtctgcccaggccacaggcaagaacgtgggctgcctccaggaagccttgcagctggctacctcctttgcccagctccgcctgggagatgtgaagaactgacaggagagaagccctcactgggaagcgtttccccatcaaacaaatgcgtcagaatgcaggagtgcacccatgagctcccctgccatgaagacatttgagtcttgggacctttcagtcggcctatccgtcctaatcca

SEQ ID NO: 2060 - DNA, 295 bp, Cricetulus griseus
gttcttgaaagaaaatggttgggattttggatgtgtctgcagacctgttaggaaatcctatttatgagtccagttggtattgtttgttatctcaaaaaatatcagatagtacctagatgtatgaagtctttctaacattgaaaaatgaaataatgagacattgtatcacagtaaatacaaaatgatgattctgggagaaatattttccttcacttcaaaatattctttattaatgatgaatttaaaaggatggcttcttttctctttctttttggatgcttaacatcaggatttt

SEQ ID NO: 2061 - DNA, 578 bp, Cricetulus griseus
aggctgcggagtggttcgtcttctggggtacaggcatggcgtaccacggcctcactgtgcctctgatcgtgatgagcgttttctggggcttcgtgggccttctcgtgccctggtttatccccaagggtcctaaccggggagttattatcaccatgttggtgacctgttcaatttgctgctatctcttttggctgattgcaattctggcccagctcaatcctctctttggaccacagttgaaaaatgaaaccatctggtatctgaagtaccactggccttgaggatgaagacatgctccacagtgcccaggccctgagatcagagaaagaatgccttctagatgcaaaaccacctccacacccataccactttcttcggtagcctactttgggcattattaccggccttacacttgaagaccttcctctgcatacagcattttttccctacacctttttcacactctgaagaattatgtgcctacttaactgactctgtgagatgcgtctgtactccgccgagagaaaagatgccgtttacagaaatctgttactgttagtcttggatcccgtggcttt

SEQ ID NO: 2062 - DNA, 575 bp, Cricetulus griseus
  misc_feature (521)..(521): n is a, c, g, or t
tcacacttaatttcatgatgtcattatttccatataggaaaaatagagtagatgggctgtgaagaatagtttaattataatcactcatctaattatttaatcaatttaaaataataaatctttttaactagctgtattatcaattaaataacactgaattggcctattttaaataaaaaactaatttgtttataaacattagcatttttttaaatgttgaggctaaactattctcagcaatttcttcatcaccagttttgcagacagttttgtgtgtgctgtcaaaaagcagctgtacttacacatgcacagggcataaggactacagtgcagaaatgtgtttgtgccctgtgtacacatgcacatgcatgctataaaggcaagtagacatggccaacaagagtgaacatccacattctagacaagcatgctaccatccttccatttatgaaatctttgtgacctatttctttcttgcaaaataatgtgttaataagcataggagaaaaataacgggaatntaactatctctacatctgttcatgctgcacacattaaagcctactctctttccc

SEQ ID NO: 2063 - DNA, 212 bp, Cricetulus griseus
  misc_feature (119)..(137): n is a, c, g, or t
gcagccacctggccaaggtgacggttgaagtggtcctggcgcacccgggcggcggctccacatgacgagccaactctttcgtactggccctggtagccggaactgctactcgaggctgnnnnnnnnnnnnnnnnnnntaaagggagaggaggagggagacggcgtcctataagacctagaaaccaaacccgaagggtaaaagtgcggacatt

SEQ ID NO: 2064 - DNA, 459 bp, Cricetulus griseus
ggcggaggcccggtgcgttcaagattcggcctcgcccgtagtccaccgccatggccgaggaaggcattgctgctggaggtgtaatggacgtcaacaccgcgcttcaagaggtgctgaagaccgccctcatccacgatggcctggcgcgcggcatccgcgaggccgccaaagccctatacaagcgccaagcccatctctgtgtgctcgcatccaattgtgatgagcccatgtatgtcaagttggtggaggccctttgtgctgaacaccagatcaatctaattaaggttgatgacaacaagaaactacgggaatgggtaggcctctgtaaaattgatccagaggggaagccacggaaactggttggctgcagttgtgtattggttaaggactatggcaaagaatctcaggccaaggatgtcatcgaacagtacttcaagtgcgagacatgaataaataaaa

SEQ ID NO: 2065 - DNA, 556 bp, Cricetulus griseus
  misc_feature (139)..(139): n is a, c, g, or t
  misc_feature (334)..(350): n is a, c, g, or t
  misc_feature (498)..(498): n is a, c, g, or t
ggacgtaaagcaggaggatcgtacaggttccaggttaagcaggtccgcttgagctctggttgaggaacttctgttggtgtttgggccacaggaatctgcaaccatggatgactcacatatgcttgaagacctgctttanacttgggttttcctgggaaccttgcagctacactaaagttgaatgaattgttgaagagacctatgaggtgacattgtaattgcaaaaagcccatgtgatccaaaatcaaatatttgtaaaagactaattggcttggaaggagacaaaatcctcaacactggtacatcagatatctttaaaaaccgtagttatgtnnnnnnnnnnnnnnnnnggttagaaggtgataacttacagaattctacagactccaggtactacgggcctataccatatggactaataccatgacggatcttcttcaagatttggcctttcagagattttggatttcttcgtgacagcccaaacagggacagacnttctgatgattagcaagcatttacctttttgacttgattttcgtctcctattcatacg

SEQ ID NO: 2066 - DNA, 576 bp, Cricetulus griseus
cctgctggtcacatggaaatatattaaggccaaatcttctgatatccgttcccagagtttctttcaactggattaagcctccagttccaaggcaagcccaagtttgtggcctccagcattaaaactcttcccatctaccagagcagacagtgtaagcttcacaccaggcctcagagtctgagtatagcccactccaattaaactagagttgttgacctttgcagaaatggaagctgtaagatccaactggtatttagctgcaatgccaaaacgagtgcagttggtacctgatgtccaagcaaggtttactgaagtgtcaaaatcttcacatactttctgataaattgatcctccaaattctgtcccattattgacattagtatgtagtcggaagtccccagtcctgtagcccactgcaaagttactcctagtcagctttgacttggcactgtcaaaggtcatctggtacccatcaagccagccctccttaccaatgacagctgagccatgcatggcaggtcccagcaaaatcaaagtcaacatcacagcgcaagcgtatacactccctcttgtaag

SEQ ID NO: 2067 - DNA, 532 bp, Cricetulus griseus
  misc_feature (475)..(527): n is a, c, g, or t
  misc_feature (531)..(531): n is a, c, g, or t
aacagaagctatgacccacttgggtttaacagatatctatagaacattccatccaaacacaaaagaatataccttctcagtgccacatggaaccttctctaaaatcaacacatcctcagcaacatagcaaacctcaacagatacgaaaaaattggaataaccccattgtatcttattggatcaccatggtttaaagttagaattcaacagcaacacaattgcagaaaccatacaaacacagggaaattgaacaatgcacaattacaccattcctgggtcaaggaagaaataaaaacagaaattaaagacttcctagaatccaatgagaattaagacacagcattaataaagtaaaaacaaagaatacaaagaatcactgtaacaaaagaattggttctttgagaaaatcaataagatagagaaacctttatccaaactaaccaaaaggcaaaaagagaacatgcacattaacaannnnnnnnnnnnnnnnnnnnnnnnnnnnnnnnnnnnnnnnnnnnnnnnnnnnntttna

SEQ ID NO: 2068 - DNA, 339 bp, Cricetulus griseus
gtcgacccacgcgctgcgctggggattattccaggaagctgtcaagtataaggtccactggtttctaaccacggcagcgtaagaaagtacaggaaagactgtcgcctagaggtagctggttgaaacccgtaagagctcatcaagtcaccggcaggttggcactcccatgctggggcctacacacgtgctgagcagtgtcctgggtatcccttgcctctggcaccctctgtggctctcggtacacccaagcaagtattgctccactgcgtgggcgcagtatataaaacggttgcctgtgctcctcgatatagagccactgtagcataattcctgggccac

SEQ ID NO: 2069 - DNA, 566 bp, Cricetulus griseus
  misc_feature (140)..(240): n is a, c, g, or t
tcggtctttacaaagagttgacttggttcaggtctgaaaatgagacttaggacaaaacactaatgctctccaggaggttgttctctaaaagaagagccctagccctcaagcctagtttagtaagaaatgcttggtgcagnnnnnnnnnnnnnnnnnnnnnnnnnnnnnnnnnnnnnnnnnnnnnnnnnnnnnnnnnnnnnnnnnnnnnnnnnnnnnnnnnnnnnnnnnnnnnnnnnnnnngagaaaaatggcccctcagacatgtctgggtaaatagctagaaacagctcctctgctcacgcagatctcagcagctcaatacacaagcgacttgctgttctcacgtctatctgtagtgtttgaagattgaagtatataaagatctgggaaaataacagtgcccgcaccagttctcggagagtcagcaaatcaaattctggacatgagattccttgcagtctagtgtacttgaggttgaaagagatagaaaatctcatttactgaggaccttctctacgtgcaaattaagagtgggggtaattaattttgcttttcttgcctctgga

SEQ ID NO: 2070 - DNA, 454 bp, Cricetulus griseus
  misc_feature (182)..(203): n is a, c, g, or t
gcaccatcatggaccattatgatctcccagcagaccaacgactacatgcagcccgaataggactgggaccgggacctgctcctggatccggcctgggaagaagcagcagaggaagacgttcacggcctggtgcggcggtcacctgcggaaggcagggacacagatcgagaacattgaggagnnnnnnnnnnnnnnnnnnnnnntcatgctgctcctggaggtgtatctcaagcgaacgcttggccacgccacagagaggcatgatgcgagtgcacaagatgttcaacgtcaacaagggcctggatctcataggcagcgaaggagtcaagctggcgtgcatcggggccgaagagattgcggatgggaatgtgaacacgaccctgggcatgatctggaccatcatccctcgctctgccatccaagacatctccgtggaatagacattagccaaaga

SEQ ID NO: 2071 - DNA, 225 bp, Cricetulus griseus
  misc_feature (15)..(37): n is a, c, g, or t
  misc_feature (61)..(89): n is a, c, g, or t
  misc_feature (110)..(111): n is a, c, g, or t
  misc_feature (136)..(136): n is a, c, g, or t
  misc_feature (174)..(174): n is a, c, g, or t
aataaaaattattannnnnnnnnnnnnnnnnnnnnnncgccccactcaaatatgttcattnnnnnnnnnnnnnnnnnnnnnnnnnnnnntcctttgtgctggatttaccnnacaaaatttttgacaggggattatntcccttaggctgattacccattttaccaccattccagnaataccctagctgagggggcgattccttcattcagttcacccccaccattt

SEQ ID NO: 2072 - DNA, 578 bp, Cricetulus griseus
cgagcaggcctgcgagcagcttgggtgctggaggaggagcggggggctcggttctctagccatggcacaagtagagaaacgaggcggcttgctccggaaatcctcagcctcaaaaaaaaccactaaaggagaaagtggtgctgatgtatgatgagatttttatggtaaggcctgttatactgcacagctagattgactctttgtttctttaggaatttttaaagttgtgcttatcagtttatttctctgtgtgtatacacatgtgtgtttgagcaacagcacaagagaacacaaatctcggtgtgtgtcctttccccatgtgggttctgaggattgggccagatcatcaggcttggtggcaaaagtgcctttggacactgagtcttgtggctgtcagtttttttttagatagagtcttgctgtgtggctgagtcaggcgtggaaatgactgtgcagatcaaatcgtccttaaacttgcagtgaccgtcctgctacatcctcttgagtgctgagattataggcatgagctaccttgattcttcagttttttttttagcccaaataatctctgttaaaaa

SEQ ID NO: 2073 - DNA, 225 bp, Cricetulus griseus
  misc_feature (159)..(197): n is a, c, g, or t
  misc_feature (200)..(220): n is a, c, g, or t
atgacttaccattctatccatagattaatgcatccctcaactgtcatcagagaggcttctttacacagtagatggtaaagagacccacaactgtccaagtaagaaaataaaagtaagagacccagaatgggcagcttttaattaatggatcacatcaannnnnnnnnnnnnnnnnnnnnnnnnnnnnnnnnnnnnnntcnnnnnnnnnnnnnnnnnnnnngtgtg

SEQ ID NO: 2074 - DNA, 580 bp, Cricetulus griseus
ggggcgccatggcgttgtgcgcgcccggggcctacctgacgcaccagcagaaggtgctgcggctgtacaagcgcgcgctgcgccacctcgagtcgtggtgtatccacaggagaaaaataccggtactttgcttgtttgctgagagcccgatttgaagagcataagaatgagaaggacatgatgaaggctacacagctgctgcaggaggcggaagaggaattctggcaaaatcagcatcctcagccgtacatcttcccggactctcccgggggcacctcctatgagagatacgaatgctacaaggttccggaatggttcttagattactggcacccttctgagaaagcagtgtatcctgattacttttccaagagggagcagtggaagaaactgaagatggagagctgggaacgggaggttaagcagctgcaggaggagacaccctctgacggtgtcatgactgaagctctgcctcccgccagaaaggaaggtgacttgcccccgctgtggtggcatatcgtgaccagacctcggggacggcccgtgtagacactgttcacgcttgccagtgaaagaactt

SEQ ID NO: 2075 - DNA, 572 bp, Cricetulus griseus
attttgctgacattgaaggctacgtggacttcaggacactgccaggaaagggacaaaatctgactggtctcaagtgttctggtctcaagtgttcttactttagtctccaagtatctggactacagggtgccactggcctatcacatttctttctatttatttatttttgggtacgtatataggagtttgtatgtctgtctgtgcatcacatgcatgcagtggccatggaggccagaagaaggcattagttccccagagtaacaaacggttatgagctgtcatttgagcgccaggatttgaacctgggtccccctggatgagtggttagtgcccttaacagctaagctacttctccaccatcaccacccctagtctacatttcttaagttcttgaaggcatcttctcaacaatgaagtggggatgaatacagtgtgaggtctcggagcacagtgacagggctggggaggggccaacaataatgcctctgtgacactcagccttctcttcgtcctcgcaatgcacagcatatggtatcctgtgacaccaaagtgcctgcctggcattctctcag

SEQ ID NO: 2076 - DNA, 579 bp, Cricetulus griseus
tttttggtttacaagaccaatgtaatttttatactattaggacattaagtgaattttagtacactatcttcaattatactggcgattggtataaaaataacgataatagagaagtatataatagaagcaatttgtccaataataacgaatgggtattctactggttggcctccgattcatgttaggagtaataggtctgctactaatagtcagtatatagtttgtgtaataggtcgaaaaattatggttcgaagtttagatgtgtgtagtaatgatagagttgctaggattaggatagagaggattagggctaggactcctcctagtttattagggatagatcgtaggatagcgtaagcgaataggaagtatcattctggtttaatgtgtgcgggagtattgagtggatttgcaggagtataattatcagggtctcctaaaatatctgggaaaaacaatactaaagttatgagagcaattaatagcatgaaggctcctagtaggtctttaatagtatagtagggatgaaatggaattttatctgcgtcagaatctaagcctgttgggttattagagccg

SEQ ID NO: 2077 - DNA, 579 bp, Cricetulus griseus
cgagtctgcaagagtcaccttctggattgctgcccccatgacatccttgctgggacgcgcatggatttaggagaatgtaccaaaatccacgacttggccctccgagcagattatgaaattgcaagtaaagaaagagacctgttttttgaattagatgcaatggatcacttagagtccttcattgcagagtgtgaccggagaactgaacttgccaagaagcggctggcagaaacacaggaggagatcagtgcagaagtttctgcaaaggctgaaaaggtacatgagttgaatgaagaaataggaaaacttcttgctaaagcagagcaactaggagctgaaggaaatgtggatgagtcccagaagatccttatggaagtggaaaaagttcgtgcaaagaaaaaagaagcagaggaagaatatagaaataccatgcctgcatccagttttcaacagcaaaagctccgagtctgcgaggtttgttcagcttaccttggtctccatgacaatgaccgtcgtcttgcagatcacttcgggggcaagttacacttggggttcattcagatccgagagaagcttgat

SEQ ID NO: 2078 - DNA, 448 bp, Cricetulus griseus
catgctcttcccttcagcggagacaaaagatagcagctatttcattctgtgagtatactacatcccttaattctttcaccaccacattaaactgccattttcaatagagatctgaaaaatgtattattacatttacctgttatttcgaaaagaattagtaagcaattaaagggaaaggataaaagtagggcaaaaatgtttctgttttttcagaccagctagcattttgagagtttaaaatgactagaaaggcaaactgttaggtattcagaaggaaaatgtgaatgttttcccaaaggcattattaacaattaataatcattacagtggtgccttgtttacctgaccttgtgtaaattcagcagcctggtaattagacccagattttgcacattcgtatatttccatgcatagatttgactcattcattcatccattaaaatttgct

SEQ ID NO: 2079 - DNA, 579 bp, Cricetulus griseus
gactatgacattttctaaagctatcagataatttcaaaaacatggaaagataagcagatttggattggtgattttataggtccttgtagagtgtttgtctaacatgtttgaagttctgggttggatctctagctccacatatatgagacatggtggctcgtgactataaatccagcatttggaaggtggaggcaaaacagtcaaggtcatcttcagctgcatgagaccctgtctcaaaaaagttaagcccagaaaaaaggcccagaaatactttttaatgggcatacatataggaagagaccaataggtctggagagatggctcagctgttaaaggcaaggctcaccaccaaaaatataagagaccagtagtgatcaaatatagagctcacttgaaaacatatgaaagcctaatttgttaattcagataatatgcatgtgggtaagtcctagttaataagaagttataatgaatgcccttgttctgtggagaagttaagaatggcaaagctgagaagtatttcttccaacagaagttctagcagtgctctctctgtgagtaagcccgctaagtaagaca

SEQ ID NO: 2080 - DNA, 508 bp, Cricetulus griseus
ctctggcaagtccctgcttaaccttcatagatgtttttctttttcggtattcatttagttaaagaattcagcaaattatttgatttacacttcattctgttctgttttgccatccctcaagttttcctgacctctacatgtgagctgtggtgcttgctttgcctttgttcccaataaaataaataatataattaaactctttgaaaggagaaatgaagtaaataaatattacctatcaaatgatttgatagcatgactgaattttaaaagacataattcttatttgtgcatatgtgtacatatgtgcaaatacatgtgccaggtgccatcagagttcaaaagatggtgtcagatcctctgaaactggagccacacatgggtgtgagccgcccaagaaagtggtgggaaccgaactggcccttgggaaaagcaataagcacctttaactgctgagccatctcttctatgcctctgctcctcttgtcccccttacatttatttattctcc

SEQ ID NO: 2081 - DNA, 512 bp, Cricetulus griseus
tgtagatgtaatcgatcagaacagagctttagtcgatggaccttgcactcgggtgaggagacaggccatgccttttaagtgcatgcagcttactgacttcatcctcaagttcccacacagtgcccgccagaaatatgtacggaaagcttgggagaaagcagatatcaatacgaaatggtcggccacaagatgggccaagaagattgatgcccgagaaaggaaagccaagatgacagattttgatcgtttcaaagtaatgaaagcaaagaaaatgaggaacagaatcatcaagactgaggtcaagaaacttcagagagctgctatcctgaaagcttcgcccaaaaaagctcctgttgctaaagctgccattgcagcggcagcggctgcagctgcagctgctaaagctaaagttccagccaagaaggggacagcaccaggcaagaaggctgcaggccagaaagctgcaagccagaaagctgcagctcctgctaaaggtcagaagagtcagaaga

SEQ ID NO: 2082 - DNA, 578 bp, Cricetulus griseus
taagtttaaaaaactacaaggcattgtttttgctaggtagactggcatccaagtagaggctgcctggttttttgtccccccgtataaccagggaccatctgaaagtcaattttttagccagatagctattgtgagcataagcgtcagtgtttagcaagaacttctgagcagcttattctgctgtgtaagaagcacctttagaaatgatggactccaaatgggcagctcttcctcttaaactcagtatttttagtgctagagtaagagtgacccgtagactgctttgccctcttagccaggctctcctgagcaggactggtgaagagctggtctcctcggtgtccctttgcactcatcttttcacaggtaggtagtgcttaagaagcactctggaggactagagcccatgtccacctcaactctcttcagtgtcaagtaagtgacactgccaagagcagcaggtacatccagaaagacttatgtcaccctaacaggataggacaatagatggccccaacacctgtgatagatcacattggtggagccctttgttttggtgacattcattgacagtacag

SEQ ID NO: 2083 - DNA, 504 bp, Cricetulus griseus
atccaagaccacattatcgcactctgtgagtagagaataaagatagttaatctcacacaaagtagaactaaaagaaattgatcattgttgaaagcagttgtttattcttcattaaatcaatgattcctgactcctgaactaaactgagttcaaattaagtttggggctttactttgtgttgcagttagggtttctattgctgccatgaaacaccatgacaaaaaaagcaagttggggaggaaagggtttattaggcttacatttcaatattgctgttcatcactaaagggggggggtgttgaggcatgaactgatgcttaagccatggagggaagcttcttacttcccatggcttgtttagttgactttcttattgaacccaggaccagcagacaaaggttggcaccacccactgtgggggaggtcctcccctcttgttcactaaatgagaaaatgccttacagctttctttcttcgccgactctagctcgtgtcaacctgaca

SEQ ID NO: 2084 - DNA, 578 bp, Cricetulus griseus
atagctttatgagatagtaaagggaaatcagtcttttatatttacaaatgaagaggagggaactcaaggggattatctaatttacccatggacatgtggttgtcaagttgatactctgaattatcatttgtgtggttttctccctaatgggaacctacaatccattaagccattatatgttgtgcactggggtagacacatgtgagtctcctcactcagtggatgaagagggtgtatgttctcctggctttctaagacaaatttgttttaaataaaactttattcatctatttttgtctttatatacctagtgattagtgatttaatttgcccctttctgggcacagaaaaacacagaaggatcaaagccacacattgagacagtgacctcacaaaattaaatagtgagtaaatatatgtgaattttctgaaactagacagtgatgtgaattctcataacaacaaaaaatatttgaacatactggtattcatattttttcccatattataatataaagcaacttggaaacaagattcataagtactaagttttgggtgccaagcttatctccagcact

SEQ ID NO: 2085 - DNA, 578 bp, Cricetulus griseus
atcgacaagttcggcttcatcgtgggttcgcaaggcgccgagggcgcgctggaggaagttcccctggaggtgctgaggcagagggagtccaagtggctggacatgctcaacaactgggacaaatggatggccaagaagcacaagaagattcgtcttcgttgccagaagggcattccaccttctctgcggggacgggcctggcagtacctgtcaggaggcaaagtgaaacttcagcagaatcctggaaaatttgatgagctggacatgtctcctggggaccccaagtggctagatgtgattgaacgtgacctgcaccggcagttccctttccatgagatgtttgtgtcccgaggaggtcatggccagcaagacctgttccgtgtgctgaaagcctacacgctataccgccctgaggagggctactgccaggcccaggcacccattgctgctgtgctactcatgcacatgcctgcagagcaagccttctggtgtctggtacaagtctgtgagaagtacctgcctggctactatagtgagaaactggaggcaatccaactggatggcgagatcctcttctc

SEQ ID NO: 2086 - DNA, 167 bp, Cricetulus griseus
agccaagcttgaatccttactctgctgttaattttatacccatgggcaaatcactcaagctcttagttacttcacgattcaaatgagagagaccattactaatctgttcgcttaccgcaattgatggattaagtgacattattccacctccttttgacgaggttacg

SEQ ID NO: 2087 - DNA, 500 bp, Cricetulus griseus
  misc_feature (42)..(62): n is a, c, g, or t
  misc_feature (444)..(463): n is a, c, g, or t
gcatcatgcaacatcggaggctcatggaccaggtaccaggtnnnnnnnnnnnnnnnnnnnnntagaagcgcagccgcaagaagcccagtggagcttcgcatccatgacctggaggacgacctggtaaatgtcctccgatgccattgatgccagtggcgaggtaagcagcagagcctctaaggctaaaaaaaaggccccaatgaccaaagggggcaggaagaagaaaaagaagaagggctcagatgatgaggcctttgaggacagtgatgatggggactttgagggccaggatgtggactacatgtcagatggctccagcagctccccggatgatacagagggcaaacccaaagtgccgctttatgatgatggccccaagggtgtggttgagcagagtgagagcattgaatacagtgtataggataagcctcctgaggaagacannnnnnnnnnnnnnnnnnnngaagttcccactccacagataataaacgcatttaaga

SEQ ID NO: 2088 - DNA, 580 bp, Cricetulus griseus
  misc_feature (468)..(492): n is a, c, g, or t
gtggaggctgcagtggtcgtcgccactctccgagcttcatcatgccgcctaaggatgacaagaagaagaaagatgccgggaagtcggcaaagaaagataaagacccagtaaataagtctggaggcaaggccaaaaagaagaagtggtccaaaggcaaagttcgggacaagctcaacaatctagtcctgtttgacaaagctacatacgacaaactctgtaaggaagtgcccaattataagcttattactccagctgtggtctctgagagactgaagattcgaggttccttggccagggcagcccttcaggagctacttagtaaagggcttatcaagctggtttcaaagcacagagcccaagtaatttacaccagaaacacaaagggtggagatgccccagctgctggtgaagatgcataaacaggttcaatcagctgtgcatttggaaaaataaaactttattaaatcnnnnnnnnnnnnnnnnnnnnnnnnncgggccgccccgcgggggagctccaccttttggtcccttttaggaagggttaattgcgccctgggggaaaacatgggcatagctggtt

SEQ ID NO: 2089 - DNA, 577 bp, Cricetulus griseus
tgttttctttcagtagcttttaaaagtgacctttaaatggatttaagcaggaagggaaagcattgcttctccacctttttctctgtattgataaattcaaactcaagaagctcattttagaagtatttcaactatgaaaatggaaaaattgccttacatcctgatcatattccaggaaaacatgaaagtttcggtctttactgagaacagggtgagaagaaagccgctgaagaaagacttcatgggaagacacagtcttcttaaagacagcgagatactcagcttccagttcttgcttcatcttagcaaactcttcttttgtcatagatccttcaccttctcccagtttctgcatcttctctcgagggccatcgaagtctggctttgtaggagcaggagggataataagcccggcataatctgttgtttctgtaagagtgtcatgcagccacacaaagtcttcatgctgccttgtaacagaaaattctgggctctggaatgtgggcagtgtggtcttggtgtgtactgtaaacttgaccttatctctttcactgagtgcatcgggtatgtcgatctg

SEQ ID NO: 2090 - DNA, 553 bp, Cricetulus griseus
taaagaattgtagttttcctttccacacatgaaatctttgagtccggaagcttgaatttaatcgatctttataatggaagaccccctagtgccaaataatatgtatcacttaaaagttagtgtcctgggaaagatgaacatgttggctcctgtgctttgattcatatggaaaatggaaaagacattagatgatggttcctggggtgacactctgcacttagcctgtctcgtgaaccgtgaccaggctcagtgagttccttgtggcaaatgcccgtgggggtgcatggggggtgttccagtgcctaagcctttgcaactccttcttgaggcaaaggagacttcttcttattgcatttctttgtatttacttgacctctcagagttctcttttttcctctagtaacctccatttaaggccttgaatgttttatatgtatgtggcagaacaatatgcaaactttgctcttagagatttttgttttttgtctagaacataaaaccagactattcatttagttctctttgaaatccaaagaatatgcatagattttat

SEQ ID NO: 2091 - DNA, 486 bp, Cricetulus griseus
  misc_feature (60)..(129): n is a, c, g, or t
  misc_feature (152)..(204): n is a, c, g, or t
  misc_feature (233)..(279): n is a, c, g, or t
  misc_feature (300)..(319): n is a, c, g, or t
  misc_feature (321)..(369): n is a, c, g, or t
  misc_feature (380)..(406): n is a, c, g, or t
  misc_feature (426)..(448): n is a, c, g, or t
tttttattctattgaccttacctgtaataataactatatttaacttctataagacaatcnnnnnnnnnnnnnnnnnnnnnnnnnnnnnnnnnnnnnnnnnnnnnnnnnnnnnnnnnnnnnnnnnnnnnntattttattctaacactgaatgnnnnnnnnnnnnnnnnnnnnnnnnnnnnnnnnnnnnnnnnnnnnnnnnnnnnngtctaaaatgtgatttattctggattagnnnnnnnnnnnnnnnnnnnnnnnnnnnnnnnnnnnnnnnnnnnnnnngctcatgatatatgcattcannnnnnnnnnnnnnnnnnnngnnnnnnnnnnnnnnnnnnnnnnnnnnnnnnnnnnnnnnnnnnnnnnnnnctaacaatatnnnnnnnnnnnnnnnnnnnnnnnnnnnaggaggaatgatatcattcnnnnnnnnnnnnnnnnnnnnnnnacgacaagacgcaaatactgcagccctacaggcaattt

SEQ ID NO: 2092 - DNA, 580 bp, Cricetulus griseus
  misc_feature (18)..(330): n is a, c, g, or t
ggaccagaaaccctgatnnnnnnnnnnnnnnnnnnnnnnnnnnnnnnnnnnnnnnnnnnnnnnnnnnnnnnnnnnnnnnnnnnnnnnnnnnnnnnnnnnnnnnnnnnnnnnnnnnnnnnnnnnnnnnnnnnnnnnnnnnnnnnnnnnnnnnnnnnnnnnnnnnnnnnnnnnnnnnnnnnnnnnnnnnnnnnnnnnnnnnnnnnnnnnnnnnnnnnnnnnnnnnnnnnnnnnnnnnnnnnnnnnnnnnnnnnnnnnnnnnnnnnnnnnnnnnnnnnnnnnnnnnnnnnnnnnnnnnnnnnnnnnnnnnnnnnnnnnnnnnnnnnnnnnnnnagatcctgaaagttatccgtaaaaacattgcgaagaagtgccctgagctcttctctgagctggctgaagacaagaaaactataagaaattctacgaggccttctccaagaacttaaagcttgcaatccatgatgattcccttaatccgtcggcgttctctcttgactgttgcgctatcatacctctccagctgggagatgaaatgacttccctgtccgaaaatgtgtgccgtgttgtaggagacccaaaa

SEQ ID NO: 2093 - DNA, 578 bp, Cricetulus griseus
  misc_feature (111)..(137): n is a, c, g, or t
actaccagtttggctaccgaaaatttgatggtacagaggggcctcgcacccccaagtacatgaacaacatcacctactactttgacaatctcagcagcactgagatttacnnnnnnnnnnnnnnnnnnnnnnnnnnntatatcaagcgccagattgaatactacttcagcgtggacaatttagagcgagacttcttcctgagacggaaaatggatgctgatggtttccttcccatcacccttattgcttcctttcaccgtgtacaggccctaaccactgacatttcactcatcttttcggctctaaaggacagcacggtggtggagatcgttgaggagaaagtccgaaggagggaacaacctgagaagtggccacttcctggtccaccaatagtggattattcacaaacagatttctctcagcttctcaactgcccagagtttgttccccgccagcactaccagatagagactgagtcagcacctggttctccccgtgctgttaccccagtgccaaccaaaacagaggatgtcagcaacctgaagaccctttccaaaggcctgtctgccagcctctca

SEQ ID NO: 2094 - DNA, 211 bp, Cricetulus griseus
  misc_feature (120)..(120): n is a, c, g, or t
  misc_feature (135)..(135): n is a, c, g, or t
ggtaaacgccctggagcggagctggaggaacagcggagcagaacagaaggccctggtggacaatgagcagctgcgccacgagctagcccagctcatagccatgcagctggtaagcgcccnggaccagggcctgcnataggatgcggagagggaaaccattgcccacggagcgcgctacagcaagctggaagagaagcacaatgggctcatt

SEQ ID NO: 2095 - DNA, 581 bp, Cricetulus griseus
  misc_feature (62)..(213): n is a, c, g, or t
  misc_feature (231)..(300): n is a, c, g, or t
  misc_feature (303)..(437): n is a, c, g, or t
  misc_feature (439)..(461): n is a, c, g, or t
  misc_feature (477)..(493): n is a, c, g, or t
  misc_feature (495)..(507): n is a, c, g, or t
ttattttccttatttttattctattgaccttacctgtaataataactatatttaacttctannnnnnnnnnnnnnnnnnnnnnnnnnnnnnnnnnnnnnnnnnnnnnnnnnnnnnnnnnnnnnnnnnnnnnnnnnnnnnnnnnnnnnnnnnnnnnnnnnnnnnnnnnnnnnnnnnnnnnnnnnnnnnnnnnnnnnnnnnnnnnnnnnnnnnnngtaatctaaaatttgatnnnnnnnnnnnnnnnnnnnnnnnnnnnnnnnnnnnnnnnnnnnnnnnnnnnnnnnnnnnnnnnnnnnnnnatnnnnnnnnnnnnnnnnnnnnnnnnnnnnnnnnnnnnnnnnnnnnnnnnnnnnnnnnnnnnnnnnnnnnnnnnnnnnnnnnnnnnnnnnnnnnnnnnnnnnnnnnnnnnnnnnnnnnnnnnnnnnnnnnnnnnnnntnnnnnnnnnnnnnnnnnnnnnnnacgacaagacgcaaannnnnnnnnnnnnnnnncnnnnnnnnnnnnncgcatgggggacattggctttgtataacaatagccggcccattgctaaaataatattcctgggaatttcaacaa

SEQ ID NO: 2096 - DNA, 509 bp, Cricetulus griseus
  misc_feature (240)..(264): n is a, c, g, or t
cggataaatcgcaagcctcacagcaagaaatggatgggaaaaataaatctgtggaaattttggaagatagttctgaggaaaattccaaattgcaggtgatccaaccgaaattggggaataacatggacacccagcgtaatgacctggagttaaagttagcaggggcagagcgggagaagcagaagctgagcagggaggtggctaggctccagaaagatcttcgtgtgctgagaaaggagnnnnnnnnnnnnnnnnnnnnnnnnnagagagagtgcacgcaggaagcggaggagaagctcaaacaggagcaagaggatcttgagttgaaacacacttccatcctgaagcagctgatgagggagtttaatacccagctggcacagaaggagcaggaactagaaaggaccattcaggagaccatccataaggcccaggaggtggaagctgagcttctggagagccaccaggaagagacgcaacagttgcacagatagattgcggagaaagac

SEQ ID NO: 2097 - DNA, 396 bp, Cricetulus griseus
ctaaatctttctggccctcttcccaatggggccacattgaataagtctaatttttctgctttttgctgttaatttggctgctttaattggcttactgaggatgggtggccacacctggcttgttaaaccacaggctgggacccccaaatccagtagtgttttctcttgctttcttgtctctgggaaaggggtacacagtgaaaccttgtctccaaaagcttaaagagaaaaggaaggaaaaagaaatggagactgctgtgctgactagtaaccggctacttagtcgctgtttctcaatgattcatgggctccatgtcaatgaaagctgttggaaaaaatgggttttcccctttttcttttcttttttttcctttcctttccttttcttttttcttc

SEQ ID NO: 2098 - DNA, 579 bp, Cricetulus griseus
  misc_feature (123)..(154): n is a, c, g, or t
  misc_feature (547)..(568): n is a, c, g, or t
cgtggaggagggcgaggaaacctgcgtcttgtcctcacacagcgggactgcgggctccaagtcggggggcgacaagatgttctccctcaagaagtggaacgcggtagccatgtggagctgggnnnnnnnnnnnnnnnnnnnnnnnnnnnnnnnngtccaggtgatggatgcctgcctcagatgtcaagccgaaaacaaacaagaggactgtgttgtggtctggggagaatgtaatcattcctttcacaactgctgcatgtctctgtgggtgaaacagaacaatcgctgtcctctctgccagcaggactgggtggtccaaagaattggcaaatgagaggtagtagaaggctttcctggtgtggttgtgaccctggatgatcttgctgccaagtgaccggacgaaggctataacactccagcggatcagttcttcagatagaaagggtgcagtcttttgagactcatccagggcatggcttagcattttgtcagttgaattttgagaagttgtctacaagatagataatttattaaaaatggcctttcnnnnnnnnnnnnnnnnnnnnnncgggccctcca

SEQ ID NO: 2099 - DNA, 507 bp, Cricetulus griseus
attccaccccattggctcagctagctgaccatccattggagcattttgtccattttgaaactgaatgacacttttgttcgtgattaacagaggtgaaagaagccaattattgggccctctttttccatagaacagctgctgttggatttaactgcgggcaaatatggccttttactactgcaaggatgttgtgatgacagtttatttttatagaactatgtgactgaaaacaaaatctgtctgacttttgttatgaatatgccctggaatttatcatggaagggtgagtttgtcgagctgttttgtagttctctgtaaaaatagcatatatgttgtgtatgatacacatgtgcatattttagcatctttttaatgcaaggatctgatgttaaacattgggttttttactcatacatatgtagctccttcagcctttttctgtgttacttttaatgtgaactcataatgtattaaagttaggaagcaattagtgggagattgagtggt

SEQ ID NO: 2100 - DNA, 581 bp, Cricetulus griseus
  misc_feature (309)..(323): n is a, c, g, or t
gtgaggacagaagtgaattacacagaggaagtggaagaccctgtggactcggatggtatgtagtttatctgatcctaacagaaatactgttcttagggaaaggaatctggacaaagacaagtcagaggcagaaaacaaaaaaggcagtaaatgcatcttttcagtgcattaggtgaggcattgagaattcatcatctcccatctcatccttagggacattcaaagtccacttgaaaatcacatttgggttgtaactgacatctaatccagctacccatgatatttcgcctcatttaactttgaagtctnnnnnnnnnnnnnnntccatttctatgtcagtatttaagtatttcagatcaaaaatagacatgctaggaaaatacgttcaatgtttgtgaattatttttttaattcctaaaagtatttactaccctcaaagtacctttctttgactctaaagaaagaagctaaagcctcctctaccaatccttcaggaataattagcaagtactttatatactcaattgatttacaaagataatatagtttatttccagaatgaatgctttctttttgtttta

SEQ ID NO: 2101 - DNA, 581 bp, Cricetulus griseus; identical to SEQ ID NO: 2100
  misc_feature (309)..(323): n is a, c, g, or t

SEQ ID NO: 2102 - DNA, 579 bp, Cricetulus griseus
  misc_feature (530)..(530): n is a, c, g, or t
agaccacaggttctgcattgttacagttatatataatagttggcagtgagttatttttacttcatataaaaccatttcagtagttgaaagatttcagggttttaaggcaggaagccggtgaaaggtgtttgttgcacttctgcagaagtagctctgaagtagtgtgaaggattacagtttgtctctctgagacacaaaagagcatagcaagtgtctttccttttggtaagttctcagtgtagtaggcagtgaatccaatctaatgtgtagtatttatctacccatccctcaagagaccctttaaggcaatggttctcaacttgtgggttgctacccctttaggggttacatactaggcatctttgcatatcatatatttacattatgatttataacagtagcaaaattacagttatgaggtagcaatgaaataattttatggttggggtcatcacaaggtgaagaactgtattaaagggtcacagttttatgaaagttgagaaacactgctctaagagattgaagttcangttgtccacactgaacgtgggtataataactgagggaaactggtgtggc

SEQ ID NO: 2103 - DNA, 442 bp, Cricetulus griseus
ttggtctttatctcatatacatttaattctccattctctgacccacatccagttctcctcaggtctctaaacagggatattaaactgcatgtctgaatccatgtacagataagtcagtctcatgactcaaaagtaagctatttccaaagatggcaacctggtgctggacccatcctaaaaacacaatgtctgtgcgagactgagtgtacatcttgctacacaatggagcctcatgggccgtgcctgcttgggaatgcccacattggagttctgcaaacctgggaggtcatttgtatgcccagtctcctgggactgactcccttcagaggttagtttcagtggaagatttggatcaccaggcttacattcgcttttagtcctggctctaacactgacttgctttgtgatcttacgtgataaccacatgaggacaaagtgtttt

SEQ ID NO: 2104 - DNA, 442 bp, Cricetulus griseus; identical to SEQ ID NO: 2103

SEQ ID NO: 2105 - DNA, 499 bp, Cricetulus griseus
aatgatataacttgtatggtaaattaaattttttatttaatttactttcttacatggtctgttaggtggggaaagcgattaagacagggtctagctttgtagcgcaggcttactttgaattgacagtttctctgcctcagcctgtcatggtggaagctttgcccctgtccctggcatctgtatacccaaagagtctataatgtcatggtggaggcttcaccccagatcctggcatccatatacccaaagagtctccctggaagttccactaggatgacactgtaacaggtacttgtgagtaggaactgaggctgcctaggaattgacatatgccttgttatgctagtaggcactacaagcatgagataagaagagtgaccccttttagctagtaggaagtcctggaatggacgctggcttttgtctaaatgccagactttgtgaaaaggaatttcttgggtcctaacaggaacacaggcctgaatgactggcttaaatg

SEQ ID NO: 2106 - DNA, 506 bp, Cricetulus griseus
cgctgttgctgtggggaccacggccgaacacacgatcccggcctgaggtggtggtgggaagcccaccgcactttgctgcgacgtcatggagggtggcgggggaagtggcaacaaaacctccggcggcttatctggcttcttcggagcaggaggagcgggctactcgcactctgatttggccggcgttccgctaactggtatgaatcccctgtctccatatttaaatgtggatccacgatatcttgttcaagatactgatgagttcattttgccaactggagctaacaaaacccgaggccgatttgagttagctttttttaccattggaggatgttgcatgacaggggctgcatttggggcaatgaacggtcttcggctaagattgaaggaaacccagatcatggcctggtctaaaccaagaaatgtacagattttgaatatggtgactaggcaaggagcactttgggctaatactctaaggtccttggctttgctctatagcgcat

SEQ ID NO: 2107 - DNA, 435 bp, Cricetulus griseus
caagaacactttgataattgagcacaaaggtttctctgttaaatcatggctattaggagatattgccacttactaacccagtctgagctgctacaccccatatcccagggtctgccttccacctgttagttgctcaccgtgcagtcctaatatccatgtttggatttatatgaaaattctgcttgtctgtgatctgagcatagaggagaagtgctgctcagaaatccatatttgtctctgtcggcaactttgaaggttctgagtgagtaaccagaagagaggttagcatggcgtaaggagtatgtacgtggaaattactccaatggggtttgagtatggctgacctggggagttctctaatgtctggtctgcatcatttggaaggcaggcaatttcatttaatgcaaggtgtcataaaccttttctcttggggat

SEQ ID NO: 2108 - DNA, 579 bp, Cricetulus griseus
atgtggcctggagccgaggggtggagtgagacctgtgtgctattctgagtttccagagaatttgtgtgacaaagattttttttttcctgaactttcctgactctctaaactgtccttgatatcttcttcccaccggtgaaggtagatgggagcacacagcaggttctgattctgtgtgttttaaaagggctttgtaggaatgatttgtgtaataatagttaagtaaatgatagcctgatagatagccatgattctgaacaccagctctgcctaactaaagggagcctgaagcagggacgagcacttgccctaatttaacagagaatgccagccagtctgccatgggaacctgcaggccttctctgcccaggacagaaaggcagcacctaagcatctctttggaaggcacctgtcctccaaagcctctgtgctgtatcctgaagttcattgaaggaaccttccttctgaagtcctgttggtgaccaagaacaagtcctaaaagttacttgggtgcatcttgtccttaaccctttacaaagtttatcattgccacctaatgaaccctgcaaatgaaagtca

SEQ ID NO: 2109 - DNA, 578 bp, Cricetulus griseus
aacttagacattgtcccaggtctttattatattgataaaatttaactatattttcatttaaaagtaaagtatctaatctaaaaccatctttaataatataggtaatgtttagatccaacaagtttctgacctttgtttagactagtgggttgttacattagatgaaagaatccaatgatcagcttcacttgtgcttttgtatataaacagtaacctatttcatacttgccaaacatgtatgatgattggtgaaattgtgctggatgtatcaagtccttcctgtattgtttcttctgtcccaattccaccaaagatacataaagcaaatcaccgttatttggtactactaataaataattccctttatattccttctattgtatctcatttaacctcaaacgcttttcagtcagccttcagcaaactgcggcaatgtgtaattaccctgactcttcctgtattttctgtgcttaagtggtttaatcttgctggctttcatcattattacttattttccatatgaaaaacaagctgatgggctcacatgagaaaactacttctctgttggcttgttttta

SEQ ID NO: 2110 - DNA, 555 bp, Cricetulus griseus
  misc_feature (524)..(524): n is a, c, g, or t
aaatgtaaaagttagctattaagaagcctgagctataggctcagcatttataattcatactcagcctctgagtcagttatttggtactgggctgttcggacaggaaacatctgtttacatatggggccccaggttgggtgtcagataaagcattaatctaattaatcttaccaataacaaattgggagccaaatatcagaataaaaacctgaaagatcagagaagcaatggagcagagcagctacagttgcttcctacctcttccattcctctgaccaaaagggcccagatcctctctccacctgccttatcacttactgtctgtatagtcctccagatctctatggttaactagtggctagttccaccctcttgactacaagcaagctttaattttcagaacacaaacaaaatatcacacaacactataatggtgaatgcatgtcaatatatttggctagattcacagtgtgttgcaccaagaataaaccctaatgtaaaaagtaaataaattagtacactanaaataaataaaattttgcctttgtctgcatg

SEQ ID NO: 2111 - DNA, 498 bp, Cricetulus griseus
ccacttgctcctggctaattctgtaaaagttaaatggtgtctgtatgcagcatttgggcctctgtaaaaccactgggctgccctgggccagagtcctgatgcaaaagtacctaatggggtgagtcattgtgtgctctgccacgccaatgccacctgttccttcccctgggcctggattcccctctggcatttcgttccacggttccacacaattctttaagaagcctaccaacccaaccagggtaaggctccagggtccagctcaaccttctacacctggcacatcacaaaagcttttctgtgtctatggatgtctccaaggacaaccaaatgttgtgtatcgatgcagtcaaaggaattcatgggcttgaccaaaatctcaagggggttcagcatccaaaacagactgataactgtaactctaaggcactgggtcataactcaatccactcaataaatagacacaccgactttaccttttacttaaccctctggtgg

SEQ ID NO: 2112 - DNA, 81 bp, Cricetulus griseus
  misc_feature (41)..(41): n is a, c, g, or t
ctcatcatttacttcacaattttcttcagggcccaatagtncactatgctgcagctccaagtttcctttcttatatgaaat

SEQ ID NO: 2113 - DNA, 567 bp, Cricetulus griseus
  misc_feature (28)..(47): n is a, c, g, or t
  misc_feature (54)..(86): n is a, c, g, or t
  misc_feature (88)..(124): n is a, c, g, or t
gcgttcgcgagcgggcgacaccgaggannnnnnnnnnnnnnnnnnnnctttaannnnnnnnnnnnnnnnnnnnnnnnnnnnnnnnngnnnnnnnnnnnnnnnnnnnnnnnnnnnnnnnnnnnnnatagtaaggactcttgaagactttgacctgggcccaacggaaaagtgtgtgagaatcaactcggtgtctagtggtttggctgaagctgacctaaagacaattctgcagtcccaggttcttccctctagtttgatgctgccgaaagtagaaagtcctgaagaaatccggtggttttcagacaaattttcattccacttaaatggccgaaaacttgaacaaccaatgaatttaatcccctttgtggaaactgcaatgggtttgctcaattttaatgcagcgtgtgaagaaacagtgaggattgggcctcaagtgggcctgttcctatatgcatttgtgtttggaggagaagattttctagccagcataggtgcaacaagcaataaggacacccaagacatcctctatgtcccacagaaaatagtcgtcatatgcgatagcctttg

SEQ ID NO: 2114 - DNA, 579 bp, Cricetulus griseus
ggcctcggcccggatggcggcggcggctgcgccgagctggggactgaaggcggtcttggcttcagggcccaggaggaactgctgctgctcttcaccatggcttctctgcacccggctttctccttccaccagcgggtcaccctgagggagcacctggagaggctccgcatcgcgctccgcgtggagcccgaggacccggaggtggagccgtgcaactttgcgggcttcagggcccagaacgactctgcttgtggtgattatatacagagtaatgagactggcttagtagaacaagcccaaatacctcaagacggactcactgtggcccctcacagagctcatcgagaagctgtacacattgagaagataatgttgaaaggagtgcagagaaaaagggctgacaagtattgggagtacactttcaaacttccaaaggaattgtcttctgagacctttgacaaggccatcttaagagccctgaatcatggttctctaaaaagggaagagcggcggcaccctgacctggagcctatcctcaagcagctatttttcaacttcatcccaagcttttcttcagag

SEQ ID NO: 2115 - DNA, 556 bp, Cricetulus griseus
  misc_feature (357)..(396): n is a, c, g, or t
  misc_feature (398)..(418): n is a, c, g, or t
ctgcaaaggaaaaaggccaacacacaaaggcagacccatcagaataacaaccaacttctcaatggagactctgaaagccagaaggtcctaaacagatgctctgcagacactaagaaaccatggatgccaccccatacaactatacccagcaaactttcactcactatagatggagaaaacaagatattccatgacaaaaccagatttaagtaatacctatccacaaatccagccctacagaaaatactagaaggaaaactccaacccaaggaagttagctgcacccacaaaaacacaggcaatagataaccccacaccagcaaattccaaagaagagaaacacacacactaccaccnnnnnnnnnnnnnnnnnnnnnnnnnnnnnnnnnnnnnnnntnnnnnnnnnnnnnnnnnnnnnccaaaaatataacaggaatgaacaattactggtcattaatatcccttaatatcaacagactcaattttcatataaaaggcacaggctgaatgaatggatatgaaaacaggagccaaccttctgctgcataaaagaaac

SEQ ID NO: 2116 - DNA, 442 bp, Cricetulus griseus
  misc_feature (143)..(160): n is a, c, g, or t
acaacctcccccccatgttgagcagtgtctctttatgtagcccaagacagcttgtggcctcagcatcccaagtacttagattataggcttgagccatcatgcctggctttgctcatcagactatgatggctaattttcagtannnnnnnnnnnnnnnnnngagatacatagatagcttgtaaaacatttctggttctttgtgtctgtgagggcgtttctagaagatattagcatttaaataggcaggcccagtaaagcagatctactttcatcccagtgtgggtgggcataatgccacccacggaaggcacagccattatagaggctgcacatttggaattactttgttagcatcccttggtttcaaggcttcagactaggactttattatatataacactatctcccctgttctccaacatgtaatgagagctcctgggag

SEQ ID NO: 2117 - DNA, 576 bp, Cricetulus griseus
  misc_feature (10)..(22): n is a, c, g, or t
  misc_feature (24)..(58): n is a, c, g, or t
  misc_feature (68)..(112): n is a, c, g, or t
  misc_feature (511)..(511): n is a, c, g, or t
tcgatcggannnnnnnnnnnnnannnnnnnnnnnnnnnnnnnnnnnnnnnnnnnnnnngttaattgcnnnnnnnnnnnnnnnnnnnnnnnnnnnnnnnnnnnnnnnnnnnnnttatctcgctcaaatcttctcctctttaggaacggaggggtaatctaactcctgaggaaagagatgcaaggacagttttctgcatgcaactggcagcaagaattcgaccaagggatttggaagagtttttctctacagtaggaaaggttcgagatgtgaggatgatttctgatagaaattcaagacgttccaaaggaattgcctatgtggaatttgttgatgttagttcagtgcctctagcaattggattaactggccaacgtgttttatgagtgccaattatagtacaggcatcacaggtaacttcttgatttagatattggtcattgagctgggtgtcacatcatatgcagcagtggcttatggttaggcaggagaattggaatcaatttgactcancttgggctatgtattaattattcattaacagacctaataagtggaatcaatgagatgggagttta

SEQ ID NO: 2118 - DNA, 316 bp, Cricetulus griseus
  misc_feature (38)..(93): n is a, c, g, or t
  misc_feature (107)..(139): n is a, c, g, or t
  misc_feature (154)..(173): n is a, c, g, or t
  misc_feature (184)..(243): n is a, c, g, or t
ctcagctccagtttctttcttatatgaattgggttagnnnnnnnnnnnnnnnnnnnnnnnnnnnnnnnnnnnnnnnnnnnnnnnnnnnnnnnnatagaagcatcaannnnnnnnnnnnnnnnnnnnnnnnnnnnnnnnntaatctttgttgtgnnnnnnnnnnnnnnnnnnnnacaaataggtnnnnnnnnnnnnnnnnnnnnnnnnnnnnnnnnnnnnnnnnnnnnnnnnnnnnnnnnnnnngtcaataaattaagggcctttctccattttaccgcctggattcccggaggtaccccagggaaatccacttcaa

SEQ ID NO: 2119 - DNA, 334 bp, Cricetulus griseus
  misc_feature (20)..(119): n is a, c, g, or t
gcgagcggccgacaccgaannnnnnnnnnnnnnnnnnnnnnnnnnnnnnnnnnnnnnnnnnnnnnnnnnnnnnnnnnnnnnnnnnnnnnnnnnnnnnnnnnnnnnnnnnnnnnnnnnnntccgcctgcctttgcctcccaattgcgggggttaaaggcatttccctcctacaccacctggctaaaaattgatttttgaaattatgcgttaatgggtatctgggggtaggtaattatggatgcccaaggaaaccaaaggaaggggttgattccctggggctggatttagagggggttgggccacctggggggaaccgaactcaggtcctttgaaa

SEQ ID NO: 2120 - DNA, 492 bp, Cricetulus griseus
  misc_feature (396)..(396): n is a, c, g, or t
cagtactgtaaggaaagatgtatgtcctaagtgtgaaagtaatagtttgcatgaaagtagtagtttgatagggtatttaaaaaaagggtgtgtgtgttctgtgataaaaagaaaaatgggtaagtagcaaatgcatcatgtaagaattttccttcatgtgagctgtcttctttatgtaaaacacaaaatgttaattataaaagtgatatgtacttacagatcaggtttcatataattaccctttgcactgcttcaccaaagatactcttaaatgataatctgtcattatctatagtgaagaatatcatagaaaaatacaattgatgctaccaccttgattcatggtaaagaatctgcagtttattcaccctcgtttttatattaatagattgtttntaatacatgaagaaggcaaatggtgcctgagttaaactaagaaaatattctgagcttcttatgcctctggtagaggaatggagctctcaacattta

SEQ ID NO: 2121 - DNA, 567 bp, Cricetulus griseus
gcagtctcccacccaccccgggaagacagctttatgagatttctctctgaccaacatccccacagcttttcctgcagtgtcaaattatttatcttctttgcattcgattcccatgaaatcaagatcattccttttactcaacagtatgccaaggcaccttttcgttatatctgcctcctaaataaaacagcttaaaagacggacattttagggagttaggacttgtcaaatatggctaaggcccagggaactgaaaacagactcctacagttaggtggggccctgaataaatagtgacattatttacacgaggaagccagctcatctggaggcttgtgcctagaacagcacacccagagtgtttgcatgacgctctgtgcaacgtcgacagacgaaacagcgaggtaacgtgccttcttcaaggacatcatcaagcttgccgaaggcctcctcagaaaagctttggaacatcctagctctttaaaaattccatttaatcagtatgcttgagtcctgccatcatcatcattgcttgaatagccttgatcaatgacctgagctccccat

SEQ ID NO: 2122 - DNA, 567 bp, Cricetulus griseus
ggcagaccgtttcacattcccaccagcagtgagtgacggttcaaatgtccccacatctcaagcagcacttgttattgctcatctttgataataactgccctggtagggttagagtgacatttccctgtggtttgatgtacatttccccgatgttgagtttcttcatgagctcattggatatttatatgtctactttgaagatttgaatctacagtccattttaaatttttaaaaaattgttgagtttttagaattctgtctatattttgggtactagacccttaccaactgtgtgattcacaatttgttttcccatttggtgtattgtattcatttctggagtgttatttgaggcagggatggtattaattttgatgggctgtgccttgcttttcctttggttgcttgtgtctggtctgggcttccaaagacacatgttttcttctaagagctgcagtcatgtaatggatggggggcctgcttctttggtgtggggctatctagtcattccggaacatttattgaaaaaattcttatttcccacttcaatattattccacttgccct

SEQ ID NO: 2123 - DNA, 578 bp, Cricetulus griseus
cgccgggggacaccgcgcagcggctggcaccatgaagatctggacttcggagcacgtctttgaccatccatgggaaatggttaccacggctgcaatgcagaaataccccaaccccatgaatcccagtgtagtgggcgttgacgtgctggacagacatgtggatccctctggaaagctgcacagccacagactcctcagcacagagtggggcctgccttccattgtgaagtctcttattggtgccgcaagaacaaaaacgtacgtgcaggagcactctgtggtcgacccggtaaagaagacaatggagctcaagtccaccaatatctcatttacaaatatggtctcagtagacgagaggctcacatacaagccgcacccccaggacccagagaaaactgtcttgacccaggaagccatcatcaccgtgaaaggggtcagcctcagcagctaccttgaaggactcatggcaagcaccatatcttccaatgctaacaaaggccgagaagcaatggaatgggtgatccataaactgaacgctgagattgaagacttggcagcatcagcaagaggaagcatac

SEQ ID NO: 2124 - DNA, 434 bp, Cricetulus griseus
actttgacaaaatttttatgttaactaaaaaataaaaaaaaatgtaaaagacttaaataatacaagaaaaaaaattgtctaagaatgtctaagaaagtcagagaaataaaataaaagattatagagagttaaaacaaatggtaaaagggatggagggttaaagcaagttgttggaggtcagagaaaaagattgctacacaaagttataaaggggtaaaataagttgtaaaaggtcagaggaaagttattaaaggtcacgagaaaagggtgttacaagtaaaaaaaaattgtaaactgtgctatggtttctcatgtgtacaaacagtaaatgttaaaaatggtgatataagttaaaattctaaccatattaagccaattctgttttaaaaagtcccgtgtatttctcaagtaatttatatatatttgctttaaaa

SEQ ID NO: 2125 - DNA, 578 bp, Cricetulus griseus
  misc_feature (551)..(577): n is a, c, g, or t
gcttgtctgttctgaggagcagtaggcagtttcctccgtccgatatctcgcataccgaagtgcgcgtctccacctcatggaagactcgatggacatggacatgagccctcttaggccacagaactaccttttcggttgtgaactaaaagctgacaaagattatcactttaaggtggataatgatgagaatgaacaccagttgtcactaagaacggttagtttaggggcaggggcaaaagatgaattacacatcgtagaggcagaagcaatgaattatgaaggcagtccaattaaagtaacgctggcaacattgaaaatgtccgtacaaccaacagtttcccttggtggctttgaaattacaccacctgtggtgttacagttgaagtgtggttcaaggcctgtgcacattagtggacagcatctagtagctgtagaggaagatgcagagtcagaggatgaagatgaggaggatgtgaaactcttaagtatgtctggcaagcgatctgctcctggaggtggtagcaaagttccacagaaaaaagtaaaaatcnnnnnnnnnnnnnnnnnnnnnnnnnnng

SEQ ID NO: 2126 - DNA, 474 bp, Cricetulus griseus
  misc_feature (342)..(342): n is a, c, g, or t
  misc_feature (411)..(411): n is a, c, g, or t
cgctgatctcagcctggaggagaaagaccagaggatcggggaactggacaggttgattgagcgaatggaaaaggtaacagatacagcctgggcctgctgtcccctgcccagtgcccttggtcccacagtttccttgaaaacctgcctagagtcagaagcctcagtactgacttctgtcagcgcccccagttttcagtgcaacacatcctgtaacaacacagaaggaagctgagcaaagttattatcttcctctctggtaactatttctactgttgtttgtttctgtagtcctggtaggcaaacacatggcctcgtgcatgtgttaggcaaaccccaacccancccatcaaaattattttgatatgttttaaaaaatcacctgtaaaattctttctcaaattaatattgcancaactacctttgtggcttctctaggcgtgcttgtcatttaacctgatgaaacaatgttatttg

SEQ ID NO: 2127 - DNA, 579 bp, Cricetulus griseus
cagacagatgtggtgctggagagggagctgagaactctacatccagatctgcaggtagcaagaagagagagccactgggcctagcttagacttctgaaacctcaaagcctaccccagtgataaacttcctttaatgtggctacatccaccccaacagggccacacctcctaattcttctaagtgacaccgctcttctatgacttagcattcacatatatgagcttatggggggggggaacccttattaaaaccaccaccaaatccaaggcaaaaaaaatcatcacaattgaaactaaaatgaaaattctctcttaaagtttgggcattagagtaggacactactgttgctactcttactaacattattctagaggcattagccagtgcattaaaatacagagaaaggtagacagaatgaaataaaacatttttaataaatgatttgatgacttatattttgacttttctctgaaaaacttatgaaaaaccaatagggaagtttaccctgggcgggtggttccaaaataaacctgaaaaatttatttggtttttttggggatggaaaccccccacatgcc

SEQ ID NO: 2128 - DNA, 578 bp, Cricetulus griseus
tcgtccggtgaaaaacttaaaaaacaggatgtattccagatgtcatctctgaattctcaagagcgggttgattactgtcacctgattaagaaactatgtgggtcggcgattgagaatcagtgctcagaccccaactgcacacacatggttgtcggggtacccattgcgcaatgagaagtacttagcctccatggcagctggcaagtgggcgcttcatcgttcctacctggaagcttgcatgaccgctgggtgctttgtgcaagaagaagactatgagtggggaagtagcgccatactggatgctctcactgatgtcactgaacaccagcggaaactagcacttgcggcaatgaggtggaggaaaagaatccagcaaaggcaagagtcaggcattgttgagggagcatttaatggctggaatgttattttacgcgttgatcggccccgagaagctggattcaagcgccttcttctggcaagcagagcaaaagtattacctggtcaaccagtacctgtatctaatgacgctacacatattttttgtgactgcaataaactgatacctgatgactgcagag

SEQ ID NO: 2129 - DNA, 579 bp, Cricetulus griseus
aacacagacaacaacaagaagctgaactgaggcccttgctacagcctgcattgttcacacagcatctgcttccatccccaaaacttgacaaagtcactactctcaggaatcctgccctaaatgccattggagtaccagtgtccctgaggaagccagtctcctatactagtattcttggttccacagagcatcaggggccacaaggaaatctccaagatcttttttcaaaataggaacctaaatgcaactgaattaaaaaaaaaatacctagccatgaagcctactagaagtcttcaggttcatgtcactgataagccaatgctaaacagccaccttggaccgagatcatcaaagatattttctttaagacattcctcacacgttaaacttgagctattttttgttgcttcagatgtatcctttgcatggtcaatggcttcttctgtagaagctttagtcatttgttgaactcttatttagatctaattcaagttttacatagaggcccaggtgtgaatgcagcccattagccacaagaccagagaagaaacagtaaactgtggaaggggtttctgcccc

SEQ ID NO: 2130 - DNA, 303 bp, Cricetulus griseus
  misc_feature (187)..(187): n is a, c, g, or t
cactgaaatatgagcacaaagaaattgagtatgtggagactgttacttctcgccagagtgaaatccataagttcattgcagatggctgcaaagaagccctgcttgaggaaaaaagcgcttctgctttctggtggacaagcactgtagctttgccaatcacatacactactatcaccttcagtctgcnaaattacttaattccaacctgtcccggaggcaggaaacctgtcgagatgccacataagcaccagagaaaatcatgaacatgatagaagcgataaaaacgcccatcttcacaccatt

SEQ ID NO: 2131 - DNA, 580 bp, Cricetulus griseus
caatatatgatatataaaccttaagtgaaatgaaaaaaatgatctattgcagataactgatggatgtagttttcttttttaaattagaaatgccacttctattgtattgtctcacacatgctctatataaatgaaaaatgttgattttttgatgatagactatatacacaggctattcccgttacgtaagtcagttctttaggcttatttgctgtgctggttttatttgtttttaatgtaaaaaggcagtattccctttttcaggttgctgagaaacttaagtggaactgaagtgcattgtgatacagttattgaactattttaaagatatagtttctttggaagcctaatgtttccagtgctgggtgcctgagtgcttctataccagctgtcaccaagcaagtctgaggcacctgagctagcccagtgcatatagagagagatccactgtgctttccttcaaatccagttcttccacagcaactagcctatagttagtatgtgctgttcttccactgttgttcactgtggctttttccaatctactttcctttaccaagtgtgtgctcatgtgcagcca

SEQ ID NO: 2132 - DNA, 578 bp, Cricetulus griseus
  misc_feature (575)..(575): n is a, c, g, or t
ctgtagaagacttccctacagagaaccctaacgataactctgtgctagggaacctgcgttctctgctccagatcttgcgccaagatatgactccaggaggtcattcagggggccgccgtcgccagcggggccgctcggtgcgtcgtctggttcgccgtctccgtcgttggggcctacttcctcgaaccaataccccagctcggacccctgagaccagatcccaggtcacagcatctgctgctccctctgaggccctggatgacagcacaggccaaagctgtgagggcggagcagtaggaggacaggatggggagcaggctcctccactacccgtcaagccccccatcccaaccccaagcacacttccagcccttgctactgtctctgagcccccaggacctctcccctcagtgcctctagaaccctcactgctgtctggagttgtacaggtcctccgaggccgtctgctacccagcctgtggcccccatgacccacttggaccccagctggacatcacacaacagtcctggccccaaaggatgaggatgatgtgttgttaatgccgctggctgancca

SEQ ID NO: 2133 - DNA, 579 bp, Cricetulus griseus
  misc_feature (18)..(489): n is a, c, g, or t
ttttatgaagcaaacttnnnnnnnnnnnnnnnnnnnnnnnnnnnnnnnnnnnnnnnnnnnnnnnnnnnnnnnnnnnnnnnnnnnnnnnnnnnnnnnnnnnnnnnnnnnnnnnnnnnnnnnnnnnnnnnnnnnnnnnnnnnnnnnnnnnnnnnnnnnnnnnnnnnnnnnnnnnnnnnnnnnnnnnnnnnnnnnnnnnnnnnnnnnnnnnnnnnnnnnnnnnnnnnnnnnnnnnnnnnnnnnnnnnnnnnnnnnnnnnnnnnnnnnnnnnnnnnnnnnnnnnnnnnnnnnnnnnnnnnnnnnnnnnnnnnnnnnnnnnnnnnnnnnnnnnnnnnnnnnnnnnnnnnnnnnnnnnnnnnnnnnnnnnnnnnnnnnnnnnnnnnnnnnnnnnnnnnnnnnnnnnnnnnnnnnnnnnnnnnnnnnnnnnnnnnnnnnnnnnnnnnnnnnnnnnnnnnnnnnnnnnnnnnnnnnnnnnnnnnnnnnnnnnnnnnngaaccccaaatacggaaaattgtggatcaaataagacctgataggcaaaccctaatgtggagtgcaacttggccaaaagaagtaagacag

SEQ ID NO: 2134 - DNA, 578 bp, Cricetulus griseus
acagagaacagcagagggaggagaaggagaagctgagggaagagacgcggcaagccaaggaggaggctcgaagaaggaaggaggaagagaaggagctgaaggagaaggagcggagggaaaagcgggagaaggatgagaaggagaaggcggaaaagcagcggctcaaggaggaacgacgcaaggagcgacaggaggctctggaggctaaactggaggaaaaaaggaagaaagaggaagagaagcggttacgggaagaagagaagcgcattaaggcagagaaggcagagatcaccaggttcttccagaagccaaagactccacaggcccccaagaccctggccggctcctgtggtaagtttgccccctttgaaatcaaagaacacatggtgctggctccacggtgccgggctaccttggaccaagacctttgtgatcggctggaccaacttctacagcagcagagtggggccagctccttcctcagtgacctgaaaggccggctgcccctgaggtctggacccacccatgtgtgcagccgcaacaccaacatcatggacagggtcattgtggagagcaag

SEQ ID NO: 2135 - DNA, 558 bp, Cricetulus griseus
  misc_feature (541)..(541): n is a, c, g, or t
acatttgccagcctctacgcacaagcctgaaaggtcctatggaaacactccatgtggctctgggctcttctctgattgctatgagtttaattctaatctttacaggatggatgtcagtgtcagcactttcttaattatgagtattggaagacactggaatctccatgtgtccaatgacaaggaactttacatttcatttgattttattctttgattttaagccttattttcacaaaacagcctagctggaatattgatgccatactgtattttgcatgctgctttcttccctagaggcattgagggcaactgtacttggtaacttttgctctctcaagatttgtcattttttcagccattcttcatgcccatgccagcaagagcttttatatcataatgataaagccagctcatacttatttgtccctgtaggtggtggtagtggtcagaaatggcttcaggcatccatgagtttcaagcttcagaagtacctggcaccttaatccaagcaaaaatatgacagcttataaaaacaaccaanaaaaaaaaataggggcg

SEQ ID NO: 2136 - DNA, 383 bp, Cricetulus griseus
caacccataggtgtgagaaccattgactctaatattgcctctcacgttctatctagtagtatttctaattcctgtcttagatgctagtaaagcacattgttttctgttttaaaaagtcttatgctgtcagtcactagcttgaagaaaacttttcttacagtggtggttgagattaagctttaaggattgagtcatctctccagccagcctggtctacagatcaagtgccaggacaggcagggctgctccgaaaaaccctgtcttgaaacaccaactaaaaaaaaaggggggggccccccccgggggagacccctacttatgcccccccatggaggggatgattaggcccctgcggttaaaacatagactattgttctccctga

SEQ ID NO: 2137 - DNA, 570 bp, Cricetulus griseus
  misc_feature (69)..(101): n is a, c, g, or t
  misc_feature (114)..(145): n is a, c, g, or t
  misc_feature (147)..(184): n is a, c, g, or t
  misc_feature (222)..(240): n is a, c, g, or t
  misc_feature (242)..(263): n is a, c, g, or t
  misc_feature (267)..(289): n is a, c, g, or t
  misc_feature (295)..(337): n is a, c, g, or t
  misc_feature (344)..(370): n is a, c, g, or t
  misc_feature (385)..(415): n is a, c, g, or t
  misc_feature (427)..(444): n is a, c, g, or t
attcaaatccaacatgggaaaagaaaagactcatatcaacatcgttgtcattggacacgtatattcatnnnnnnnnnnnnnnnnnnnnnnnnnnnnnnnnnaatgtggtggatnnnnnnnnnnnnnnnnnnnnnnnnnnnnnnnnannnnnnnnnnnnnnnnnnnnnnnnnnnnnnnnnnnnnnctgggtcttgggcaaactgaaagctgagcgtgagcggnnnnnnnnnnnnnnnnnnntnnnnnnnnnnnnnnnnnnnnnnaaannnnnnnnnnnnnnnnnnnnnnncccaannnnnnnnnnnnnnnnnnnnnnnnnnnnnnnnnnnnnnnnnnntgctgannnnnnnnnnnnnnnnnnnnnnnnnnngtgttggagaatctnnnnnnnnnnnnnnnnnnnnnnnnnnnnnnnctgagcatgccnnnnnnnnnnnnnnnnnntgtgtgaaacagctaattgtgggtgttaacaaaatggatgccaccgagccaccttacagcctgaagagattctaggaaattgtgaaagaggtcagcgcctacattaagaacattgggttcgaccct

SEQ ID NO: 2138 - DNA, 578 bp, Cricetulus griseus
  misc_feature (87)..(108): n is a, c, g, or t
acactgtctaacacaatccagaggtcacagctaggtccgacaactaatctgtctctagagatgagttcagggcagctggcatccagnnnnnnnnnnnnnnnnnnnnnnacagaattagatatggttccaggaagagatgggctgaccagctataaccattcccaggtttctgtccagcctgtggcaactacaggagcagaacacaacaaatcccttgagaagtcagatggtctctttgcccaggacagagatccaaggttttcagaaatctatcccaacatcagtgcagatcagagtaaaggcatctcctccagcactgtccctgctacccaacagctattctcccagggcaactcattccctcctaacccccggccggcagaaaatttcaggaatagtggtctgacccctcctgtaaccattgtccagccatcatcttctgcaaggcagatgttggcccagatttctcgtcactccaactctacccagggagcagctccaacttggacccctagtacccgtccaggcttctctgcacaagtgcccacacaggctacagccaagactcgttcttccca

SEQ ID NO: 2139 - DNA, 501 bp, Cricetulus griseus
  misc_feature (6)..(6): n is a, c, g, or t
  misc_feature (30)..(30): n is a, c, g, or t
  misc_feature (32)..(32): n is a, c, g, or t
  misc_feature (35)..(36): n is a, c, g, or t
  misc_feature (49)..(50): n is a, c, g, or t
agtggnacgatcatatggggtaccccgggncnccnncccctacgaaggnntcgaccccacgcccgctccggtgaatggctgcactctggcatgtggtatgcgagatgacatctctgagattatggcgaaaccacattacacacgagcgccgcatgtgcatgccctctgcacatggagaatgagcctggtgcaatccataggcagagagatgccctccggggtgcagtcctaaatggaggcccccccagcacccgtataacaccttgattctctaaatgggctagtgatgagatgccgtccactaacactggggaaagcaacctgcaagaggccatgctgaagacctgcaagaacagggacatgtgagaaaatcactgaagattccgctgctactacatttgatgccctgaacgctcgtgtcacggagcttgaacggcagctatctcgggggggccgatacaaatgcctcatttgcatggactcatactcgatgcccctgac

SEQ ID NO: 2140 - DNA, 574 bp, Cricetulus griseus
gaagggtaatatggggctggggtgagcaggagactgaggatgggcagaagtgggtggctctctctgctccatgataagggcagggggcccttatcagtctggcctttggttgtcaggaaaggcctgacagtttacttgacaatgcccaggtcctgctttccttctgcccataccattgagagcctggagcaacaaatgactcaattatccagtccactcagttcccaatgcaagtctctcctactccaagcctcagttttcctgtttacaaaagtgcctgagattgggggacctctgggactgtccacagtgcttatcagggatcctccacttggggactaacataacctcttgggtccaaataacatctcccaagagagtcctcccgggcccaccctggtcctcatctaaatttgacattgtaccttgcttcctgcccacatctaacaggcagggcacagcctgacctgttccaagcaaaggctggttggtggacagcttatccctctctccaagaggcaggtggaccagagtcacgagctctacttcaaaatgttacttacatgcagacata

SEQ ID NO: 2141 - DNA, 580 bp, Cricetulus griseus
gtgatcctctgcaattctgtagagttgatccgtgagaggctgactgtatctgaagatgaaccacaagtggagcaccagaaggaatcaaagcacaatgacgactatgtatatgacatttactatatggagatggcccctccaggatggattgagaacattctgtctgtgcagccctacagccaggagtgggagctggtgaatgatgatcagcaaccagaagatacgtatgaagatgaagatgatgaaaacagtgaaaataattggcgcaatgagtatccagatgaagaaagcagtgatgaagatgaagattctagagactctaatgaatacaacagcctcagcgaggaggaaagaggcagcagacaattgatgtggagcaagtaccctttggatgtacagaaggagtttggctatgataacccccatgatctggattcagattgatagtctcgtgagattcttccacaagcccttgagagctctgtgactgcagtgccatcatcttatgatgccttactggagatgtagaaagaaaaactataccccagcacaatacagacttaactaagggctcttctgc

SEQ ID NO: 2142 - DNA, 330 bp, Cricetulus griseus
cagcttctcgggaccagtgctgctggccactgccttccgaactcggcacactccctcattcccttctgattccgaacgaggttccagggaggggggtggggtgcagagcgaagaggggtgcagacactgctcccctggccgagctctacgccagtgctcccccatctgcctgttggcgacattttctttatttctttttttttttatagggtatattttttttcctcattttttaaagaaaaaacaaaatcgggccaggcaaactttgaaaaacaaacaaaatcaccctgtgcccctccgtgggaggcttatttttccacaccttgccgg

SEQ ID NO: 2143 - DNA, 579 bp, Cricetulus griseus
gcccatccctaccgggccttccccgtgctgctgctggatgctgtgccctggtacctgcggctgtatgtgcacacgctcaccattacctccaagggcaaggagaacaaaccaagttacatccactaccaacctgcccaggaccggcagcagccccacctcctggagatgctgattcagctgccagccaactctgtcaccaaggtctccatccagtttgagcgggccctgctcaagtggactgaatacacaccagaccccaaccacggcttctatgtcagcccatctgtcctcagcgctctggtgcccagtgtggtggcagccaaaccagtggactgggaagggagtcctctcttcaacaccttgttcccagtgtctgatggctccagctactttgtacgactctacacagagcccttgctggtaaacctgcctacacctgacttcagcatgccctacaatgtaatctgccttacatgcactgtggtggctgtgtgctacggctccttctaaacctcctcacccgcaccttccacattgaggagcccaaatcgggtggcctggccaagagattggccaacc

SEQ ID NO: 2144 - DNA, 334 bp, Cricetulus griseus
  misc_feature (81)..(98): n is a, c, g, or t
  misc_feature (222)..(239): n is a, c, g, or t
catgagggtcataagagcaagaaagaggatattagttagtgaaaacagtgattcaacttctagtcctacctggctgaattnnnnnnnnnnnnnnnnnnattttattctatacttcttttcagttccatctttaaattttttttcaagacagggtttctctgataggtttgtggaccagcctggctccaaactcataaatatccaactgcctttgcctccccnnnnnnnnnnnnnnnnnnttgccccaccaccacctggcaacagtttcaaatttttaaaccacagcaatgtaaaaaattgaacattactgggcctccaaacaggtctgcctttg

SEQ ID NO: 2145 - DNA, 329 bp, Cricetulus griseus
  misc_feature (4)..(24): n is a, c, g, or t
  misc_feature (85)..(85): n is a, c, g, or t
tcgnnnnnnnnnnnnnnnnnnnnngtctccgcctccgccggcggggaccccaagctaccacgactgcgggacccacagccctgcnagatacggagccacgatgttcccgagggagaccaagtggaacatctcgttcgctccctgcggcttcctcggcgtctaccacattggcggggcctcctgcctccgtgagcacgcgcccttcctggtggccaacgccaaccacatctacggcgcctcggccggtgcgctcaccgccacggctctggtcactggggcctgcctgggtgaagcagcggcaaacattattgatgtgtccaaggaggccc

SEQ ID NO: 2146 - DNA, 536 bp, Cricetulus griseus
ccgagaaatagtactgttgactttagcaaggttgacatgaatttcatgaggaaaattcccacaggagctgaggcttccaatgttttggtaggagaagtggactttttggagagacctatcattgcatttgtgagactggctcctgcagttctcctttccgggttgacagaggtccctgtgcccactaggtttttgtttctgttactgggcccagcagggaaggcctcacaataccatgaaattggcagatccatagccactctcatgactgatgagatttttcatgatgtagcttataaagcaaaagatcgaaatgacctcttatctggaattgatgaatttttagatcaagtaactgtccttcctccaggagagtgggatccttccatacgcatagaaccaccaaaaagtgttccttctcatgaaaagaggaagattcctgtgtttcctaatggatctgctcctgtgtctactgagcctcctaacgaggctgctcatcatgctgggcctgagctgcagaggactggacggctctt

SEQ ID NO: 2147 - DNA, 531 bp, Cricetulus griseus
  misc_feature (4)..(5): n is a, c, g, or t
  misc_feature (13)..(15): n is a, c, g, or t
  misc_feature (27)..(27): n is a, c, g, or t
  misc_feature (32)..(32): n is a, c, g, or t
  misc_feature (35)..(36): n is a, c, g, or t
gggnntaccgggnnncccccccttcgnaggtncgnnacccacgtcgttccgtcccacgtcgttccgtcccacgtccgtccgggaaaaaccaggaagtctccaagtcgggatctgtgaaggaccggatatcgggaagttcaaagcgttcgttggaggggagcgatgactacgggaaggcgcagatatccaaaagcagcagcaaggaatccaggtcatccaaactccacaaggagaagacacgcaaggaacgtgagttaaagtctggacacaaggaccgcagcaaaagccatcggaagagggaaacacccaaaagttacaaaacggtagatagccccaaacggaggtccaggagtccccataggaagtggtctgacagctccaagcaagatgacagcccttcgggagcttcttatggccaagactatgaccttagccccccgaggtctcacacctctagcaattatgactcctacaagaagagtcctggcggtacctcaagaaggcagtcaatcagtccaccctacaaagagc

SEQ ID NO: 2148 - DNA, 310 bp, Cricetulus griseus
ttgctggcagccgtggtgaagatacaggctacagctaaccaagttcgtgacgccactgataacgaactgccagtgacaaaggaagttgtgctcaatgggaacaggaacgaaatgtataggccactccaagatgaggaagagcgataccttctccatcagctccatttggcatccgtcctgatagaagatagtgtctttgtgccagggactcaaagaggactggggaagctcatacctgacctgtcttttgtgtttttctctagccacacaccctgtggggatgcctccattattccaatgcttgatttcg

SEQ ID NO: 2149 - DNA, 578 bp, Cricetulus griseus
ccactgagacagctcctcagctccatgccttcttccatctctaggaagatggtcagtgttgttcactcctgcacccccagttctgttctttctctcccatcattgtggctcccttgttatacctaagttccatgtctaatttgttttggtaatcactatatctttttagagagtgccttattttcttaacaagcaatgattaatgaacaactgagtctttccttggattcattcatgaaccaacttgttcattttgcttttgagtctggagaagctgtgggtgggactgataatagattgtgtgacactggatgttgctccaatctatccaggtttagacatggtagtccctcccaactggcaaggtctctgactaatgtgagaaatgaattaaactggggggaaaattggcatcactggtctacaggagttcagtgtactgcttaagcattcattatgtgcattctgtgccttctggtcatgttgtctgcattaaagaagcaaaattagagttgaaagattatgctttcattgtcacaccacaccgtcaccagtgtcctaaactggcctcatactga

SEQ ID NO: 2150 - DNA, 579 bp, Cricetulus griseus
atgcatacagttcgggcatgcaagcagtctgtcatgcatacatataaaagtgtaatacaattataaaaattaaactaatctatgggcccagtataaggaaaatgtactgtttgcctcctgaattaatgtgtggacttcgcttgctgtgcatcacaatgggagacttgagcccagggattcaatgtagatcccacacaccctaagacaaatagtcctttggcatttccacagttgctcacatgcctctctcacatcatggagatttcctgactctcggaggtgacagacccaaacacaaacttttatttctaagatagcatcctgtacagcaccttgtttttactttggctactaaactaaaatagtcactggcttcctcggttttaagcaaagaggttttcagttctacgtttatgagtttctcattttttaagtggagcagcttggccaacaccacaaacctaaatatttttgctagtacaagtaccatccgctgcagacgagttctttacaggaggaaacctggcttctccctgcttgggtctggccaaatagacatcccgccaggcttaccatgaa

SEQ ID NO: 2151 - DNA, 580 bp, Cricetulus griseus
  misc_feature (200)..(220): n is a, c, g, or t
  misc_feature (459)..(482): n is a, c, g, or t
tacatggctttttgtgttattggcttgaatatatcttcagaggccatgaattgagagagagtgtagagaccacctaagaggggctggagggagggacaggaacaatgatataaagagatttttaacttcaacaaaaatatttttaatctgacttttgttgaaaggagagggatataaggctgtaaagatatagctgtgtnnnnnnnnnnnnnnnnnnnnnttggttaagagcactagctgctctcccagaagacgcaggttcagttcccagcaaccacatggtgactcacaactgtctgtaactgcagttccaggggatctgacaccttcacaccaatgcacacaaaataaataagttaaataaaaattttaaaaagatatagctgtgctcatttgaataagctgtcaccaatgcttgtggcttcagtcactctaagtggccatcacccatcaatagtnnnnnnnnnnnnnnnnnnnnnnnngacaagttgggcaagcaagtacaccgccaacgagagggaagcagttttagccatgctgtaatgagagctttctacaatgtgttcagtaaagaccaaag

SEQ ID NO: 2152 - DNA, 374 bp, Cricetulus griseus
  misc_feature (150)..(167): n is a, c, g, or t
  misc_feature (205)..(251): n is a, c, g, or t
agggtgtcaatgcatacatactatcatgcattcagtcctgccatattccatactgttgttgggcttacggtacttagaaaaatattagtcattcttatgccatctttaaatattttcatattaaagttccttcttgttttttttttaacnnnnnnnnnnnnnnnnnnccttcttttattttaattgtgtatattttatttatgannnnnnnnnnnnnnnnnnnnnnnnnnnnnnnnnnnnnnnnnnnnnnnggagagggagagagagataacacacaaaagaccaccttggggagtctttcttcagaactccacctttctctcttgtaacattctctcattgctcgggaagacaaactccccatttaggctaat

SEQ ID NO: 2153 - DNA, 491 bp, Cricetulus griseus
  misc_feature (120)..(142): n is a, c, g, or t
tttgtcaaagccatctccacgacctgcatacccaattaccccgacaggaatctgcccacagtattcgtgtatctggatggtgatatcaaggcacagttcattggtcctctggtgttcagnnnnnnnnnnnnnnnnnnnnnnnagttggagtggaaactgtctgagtcaggggcaatcaagactgacctggaggagaaccccaagaagcccatcgaagacagattactgtcctcagtgcgaggctctgttcccatgagaagggacagtgattctgaggacgactaagatagcagccactgtaaatttttgaactgtcttgatatgacatattgtctggattttcaataaggaggaagaaacaaaaatttatcatattttggtttctaacctttttataattatttaaattttatacatttcagaaataatcatggccaaaaattttatttaattccttggaactctttaaattaataatgtctctttaagaa

SEQ ID NO: 2154 - DNA, 400 bp, Cricetulus griseus
  misc_feature (342)..(342): n is a, c, g, or t
taaaggcaagtgctaccatgcctggcctacatttgattcttttaagtgcagtcattgattaaatatttcttatatcttttagaattcaactaaagcaaatatgctactacagctgaattgtttggggctatttgacggattgaatattttatgtagtgtcatgtatttgtctttctttttcagtgctggggattaagttctgtatgcttagtaaataggcgctatcgctgagctacatccccaaccattgagctggaagacttttaaaagaaaatgctcttaaataatttggattttccttaaaatcttattggatgctgtaactatgttaactttttttantgtcttcatggaattcacttaaaataatttgcatgaagctggagaaatatcttaacta

SEQ ID NO: 2155 - DNA, 579 bp, Cricetulus griseus
cccatcaaggagccccttcggtcagtcctccagtacaactcagccatgaaaaatgacacggacacgcctgctgaactgagtgagctgcgaagcaccatcatcaacctgctagaccctcctcctgaggtctcagccctcatcaacaagctggactttgccatgtctacctatctcttgtctgagtatcggctggaatacatgagggtgctgcgttccacacaccctgatcgcttccaagtaatgttctgctactttgaggataaagctattcataaagacaaatctgggatgatgcagggtgtcattgctgtggctgacaaagtgtctgatgccttcctgaacatgatggcagataaagctaagaccaaggagaatgaagaagagctggaacggcatgcccagtttctgctggagaacttcaaccacattcacaacaagataaggagggtggctgataaatacctgtctggtctggtggataagtttccacatttgctctggagtggaactgtgctgaagaccatgctggacatcctgcagaccctgtcactatcactaagggctgatattcacaaggac

SEQ ID NO: 2156 - DNA, 461 bp, Cricetulus griseus
  misc_feature (5)..(23): n is a, c, g, or t
  misc_feature (435)..(457): n is a, c, g, or t
ccgannnnnnnnnnnnnnnnnnncagagaaagtgacgttgttgatgtgatggagaagtgcgatgacggatggttcgtgggaacctcaagaagaaccaaattctttggtacctttcccggaaactatgtcaagaggctgtgaatcaccttcctccttatttactccacatttcaacaacacatctgcagaactcacctgaaatgtccccgcaggcctgttgctgtcttgccttatggtttccacaggccatctccatctccacctgctgccaccagatcaccagcagtgactgccgctgggagcttcaaggaaatgtggcaaatttacaccctcataaatgcagtttcctgctttctgccctgaacttttaaatgtctgtgatatggaataagaatgaaagtcatcataattttaaaaagtggaatagttgaggcnnnnnnnnnnnnnnnnnnnnnnntaga

SEQ ID NO: 2157 - DNA, 481 bp, Cricetulus griseus
  misc_feature (31)..(46): n is a, c, g, or t
  misc_feature (83)..(101): n is a, c, g, or t
gcggtggccatggaggcgtacgatcaggtcnnnnnnnnnnnnnnnnagctgaaaggcgtcgcggagctcggcgtgaccaagcnnnnnnnnnnnnnnnnnnncaaggacaaggccaagctgctggaggccatggggacgagcaagaagagcgaggaggagaagcggcgctgcctggacaagcgcacgccggcgcaagcggccttcgagaagatgcaggagaaacggcaaatggaaagaatcctgaagaaggcatccaaaacccataagcagagagtggaggacttcaacagacacctggacacactcacagagcactatgacattcctaaagtcagctggaccaagtaacctgcccctggtgcaaaagacaggccaggttggctgtattgctccctcagtgttttctagaatgttctacatctgcctggtgcatctgctgagcccaagctttctgaaacttgaattaaagtcaggctgtcct

SEQ ID NO: 2158 - DNA, 580 bp, Cricetulus griseus
caagatgatatttattcaccaaacaagtgaatgcataaaaatacagccaactgacatccagcccgatatattcagctacttgttgcatattatgtacacaggaaaagggccaaaacagattgtggatcatagtcgtttggaggaagggatccgatttctccatgctgactacctttcccacattgcaactgaaatgaatcaagtgttctcaccagagactgtgcagacctcaaatctctatggtattcagatttcaacaacccagaaagcagctgtcaaacaagggctggagttcaaagaaactcctcccagtaacagtggaaaccgagctgctgtccagggtgaccacccccagttgcagctctctcttgcaattgggctagatgatggaagtgctgaacagcagagggcccatcctgctgcccaagctgtggaggagcaccagaagcccccagtgtccatcaaacaggagcgatgtgatccagagactgtgatctcccaaggccactcctcatcctcttccgaagagactggtccctcttttacagagaacagtatcaaagtccacttatgccattac

SEQ ID NO: 2159 - DNA, 167 bp, Cricetulus griseus
  misc_feature (161)..(161): n is a, c, g, or t
agtgtgcctttgagagccctcggtcatattaacttcagtcatttggctggcctcgctcgtgtgagagttctgggcactgctctgcttctttctgcacagagcttcctgttcatcttcccccacgccacgcagcagagagcattcattgtcatgcctgtttncaccct

SEQ ID NO: 2160 - DNA, 523 bp, Cricetulus griseus
gctccctggagacggagaacgcagggctgcgccttcgcatcacagagtctgaagaggtggtcagccgagaggtgtccggcatcaaggcggcctacgaggccgagctgggggatgcccgcaagaccctcgactccgtggccaaggagcgcgcccgcctgcagctggagctgagcaaagtgcgtgaggagttcaaggagctgaaggctcgaaataccaagaaggagggtgacttgctggctgcccaggcccggctcaaggatctggaggctctcctcaactccaaggaagctgcactgagcactgctctcagtgagaagcgcacactagagggcgagctccatgatcttcgggggcaggtagccaagctcgaggcagccctaggtgaggctaagaagcaacttcaggatgagatgcttcggcgagtggatgctgagaacaggctgcagactctgaaggaggaactggacttccagaagaacatctatagtgaggagctgcgtgagaccaagcgccggcatgagac

SEQ ID NO: 2161 - DNA, 520 bp, Cricetulus griseus
gtgtcggaggcgtccgctggaaaatggcggaatacttggcctccatcttcggcaccgagaaagacaaagtcaactgttcgttttatttcaaaattggagcatgtcgtcatggagatagatgttctcggttgcacaataaaccgacctttagccagaccattgccctcttgaacatttaccgtaaccctcaaaactcttcccagtctgctgacggtttgcgctgtgctgtgagcgacgtggagatgcaggagcactatgacgagttctttgaggaagtcttcactgagatggaagaaaagtacggcgaggttgaggagatgaatgtctgtgacaacctatgagaccatctggtggggaacgtgtatgtcaagttccgacgtgaggaggatgcagagaaagctgtgattgacttgaataaccgttggtttaatgggcagccaatccatgcagagctgtccccagtgactgacttcagggaagcctgttgccgccagtatgaaatgggagagtgcacaagagg

SEQ ID NO: 2162 - DNA, 384 bp, Cricetulus griseus
gttcttgaacttttttttttagaatcactttggagtagtaagtcaccatcttatttattctagggggacatttatttgttactccgtcataaaaggctagaccacactgccttgaaaggattaaatctgaaaggggtatctgttctccattccacttatttggggccaatagaaaatccttttatgtagaacatgtattaaatgcagtaagacagaaaatggattctaaagacctgcacagggctgaaaaagctaaaccaggactactgtggatttgttagtaacaatttaaggacctttgtcaggaagatcttacgtttgcagataagtataacttccacattggtgggttagaaattcttgaggcctttaaaagatactttc

SEQ ID NO: 2163 - DNA, 495 bp, Cricetulus griseus
  misc_feature (3)..(31): n is a, c, g, or t
  misc_feature (448)..(484): n is a, c, g, or t
cannnnnnnnnnnnnnnnnnnnnnnnnnnnncttgtacattctaggtcagcctgttctacattgtaagtttgagaccagccaagactacatagtgagagtctgtctctaaaaaccaaaacaaataaaaccccacaaagacaactactactaatgcatataacacttaaaaaattttagatgcattgtgctaaatacaagaagtcactacatattctacgattctatttgagtaaactcaggaaaaggcgagacttagggcagaaaacatgttgggtagttgaaggagaagggtttaccagaggagcattggggacttagaggaggggcaatctgattgttctatttcttgattactatgattatataagtgcttatttaaaacacacaggatcacaataccacataacacctgacattctctcctggcctctgtacacctccatgcannnnnnnnnnnnnnnnnnnnnnnnnnnnnnnnnnnnntgggcacatat

SEQ ID NO: 2164 - DNA, 568 bp, Cricetulus griseus
  misc_feature (363)..(377): n is a, c, g, or t
agatgaaaagataaatgagatgtcgaaggaagtcatgaagttgaaggaggccctcaacagcctctcgcagctctcctactccacaagttcatccaagaggcaggcccagcagctggaagcgctgcagcagcaggtcaaacagctacagaaccagctgtctgaatgtaagaagcaacaccaggaggtcatatcggtttatagaatgcatcttctgtatgccgttcagggccaaatggatgaagatgtccagaaagtcctgaagcaaatacttaccatgtgtaaaaaccagtcccagaagaagtaaaactaggattccttggcaggacactgcccctttgttgcctatttttgtgttagatctgnnnnnnnnnnnnnnnactaccattgttcttatccatggtgtgcactgtgacctagcatagcttcttttccagagttttctggggatgagtctcaagagatgatgccctcctcaaaactgcataggtacttcagaccagcagaggtgagggatccttgtcatctctttagaatctacaggatcagctatgccccaaagcctagtcta

SEQ ID NO: 2165 - DNA, 550 bp, Cricetulus griseus
tcacagctgagtgagtgcaggctttggaatttcactgctaccccatccctgcctaaggagcacaggtgtctcaggcactgaggttaacattgcccatcaccctcaaccaactcttaagtgtaggctggacagatggtccagtggctaagagcctgagtcattactactgctaccaatactgacaggaacagtggcatatatggctgagcctgagcccagtgctgagtgagttccccgctcttaccagagagggcatctgaagtagctggtgtgtccaatttcatgaaggctgcttcaatagcttggctgaaggaattctggaaactgggcacaggaacacggtcagagttatcactctccccatcgctgtccacaggggccggaggaaccaagctgttctcatctaaaaacaaaagtgaaaagtctagaactgttattgaaagggctgctcctaactcacctgttccctgcccggctctcacctttctttggagcagttttgggccacacgtctgcttttgccttcccaaccctcagcatctgccaagtg

SEQ ID NO: 2166 - DNA, 579 bp, Cricetulus griseus
  misc_feature (314)..(332): n is a, c, g, or t
  misc_feature (442)..(456): n is a, c, g, or t
  misc_feature (481)..(496): n is a, c, g, or t
cttcccaggccagggggaggaggtcccatgtctggcagagcccgcattagcctcaatcacttaaggacgtgcaggcagaccaagtccagcgggaggacttgtgactcttactcacccaccatccttctgccatttaacctcatccagctggctttgcaggagccagttttgatctcttaattgctgagactccaggcgcagattttccatttcacacaactgatcctgagaatacaccaaataactgtttttcagaagaaacatcagactgggtgctattttgcttctcaaggttgagactgaagctgggtgtnnnnnnnnnnnnnnnnnnntctagcacttgcaaggcagagtttgccagacatgagttccaagacaaccaggtctgtgaagtgagaacttgcattacaccccacttccccaaagaaaaggttgtgactcnnnnnnnnnnnnnnnttatattaaagtacagcactgagtnnnnnnnnnnnnnnnngtttgtgacatgctcttggagtcttgaaactgtgactcatgaacatactatcttaaacactttaagcatatttaaaaacagat

SEQ ID NO: 2167 - DNA, 579 bp, Cricetulus griseus
cctactcctgtctgccttatgggcctgttgcctaccacctgtctgcaaccctcatctccgtggccagccctcttgcctgtttcctccccatcttcctgcctaacaggtcgctgttgttcctggggttgctcacagtgttgggaaccagctttggggcctacaatatggccatggctgccatgagcccctgccccatcctgcatggtcactggggtggagaagtcctcatcgtgctttcctgggtgctgtttgcagcctgtctcagctatgtcaaggtgatgctgggtgtgatcttgcgtgaccggagccgcagtgccctcttgtggtgtggggcaccggtgcatctgggctcgctgattggcgccctgctcatgttcccactggttaacgtgctgcggctcttctcatctgcggactactgcagcctggactgttctgtctagcctcacttgggcaccacaagacaccggcgctgaggtggaaaaccagaacccatagaggcaaaggctaacgactcccacccccttcttcgtgtggttatagatctgggtctgagctgtttaacccacaagccctcct

SEQ ID NO: 2168 - DNA, 579 bp, Cricetulus griseus
  misc_feature (569)..(569): n is a, c, g, or t
tttctgcgccccagtccgcggaatgacccgctcgcggctcgccgcctcggccgcccacgacccctagacaccgacacccgccctaggatcaaaccactggcgcagaccggtcccgccacgccgagcctgtggtccgttctaagggcggctcgcctgaggatttgtagatactgagtcgaagttggggctaatccacatcatggaaatggaaaccactgaacctgagccagactgtgtagtacagcctccctctcctcctgacgacttttcatgccaaatgagaatctctgagaagatcagtccattgaaaacttggtttaagaaaaaacaggatcagaaacgattgggaactggaaccctgaggtctttgagaccaatattaaatactttgctagaatctggctcgcttgatggagtttttagagctagagaccaaaatgcagatgagagcagcttacatgaacgtatggtgaaaaaacccctggaactcaacccatcatgttcaccagcagaaaacagtatgtctgtcctgattcctgatgagacaaatgttgagggccagttaccanaagctcatcc

SEQ ID NO: 2169 - DNA, 338 bp, Cricetulus griseus
ctccatcacttctcagtggttttgctttccctagagcctttttccactgagagagatccagtggcctcttgttgctcacctatgcaaggtggtgctttagtaatgcagaagcggccatgatcacattcttcctatgccttcccctttccagtttgtcctaacagggtctctgcttgcactcattttctaggaagcaaagaaagccctggctatggattattgtgttacctaccgtatcacttttttttttttcactcaaatattaaattattatattgtatatacataggtaaattttaaggccactgttcaggagcctggaactgaaaatcattaca

SEQ ID NO: 2170 - DNA, 528 bp, Cricetulus griseus
ggggggggagggagccgtggaggctggagtgctgacagcctgctcagcctgagggactccgggggacttggtgtcagtgagtggtgttgcagatgaagcaggggccagccccaggaaggtggctgtaggtttggagtctgatgaggtgctggccaacggccctgtcaaaggtgagacaagaggggtcaggaggctgggtgtcttcaaaggcgaaggggccgcagtagttgctgctgcagtaggctctgaggatggtggggctggagatggagagtcctgcatcttcttcaagctctccaacagcgggttagagctaggcataggcactgggagggaggctggtgaggcggcaagccctaccgcagcaggcagggtgaatgtgaatggaggattggcagcaggtggggtttcagtggctgaagtggaggcgtcatctatcttgtcctccaagaccttgttaaaccactgcagtgaggctttcctctccatgtccaggtcttccgcagtgatggaatatcctatctcaag

SEQ ID NO: 2171 - DNA, 467 bp, Cricetulus griseus
  misc_feature (98)..(122): n is a, c, g, or t
  misc_feature (199)..(219): n is a, c, g, or t
aaagctccattgttgctccagaaggtttctcttgcccttctgacagggtgtacagttgctgtttatgagccagtatttaatatttttaacctatgtcnnnnnnnnnnnnnnnnnnnnnnnnntttgtctgtgtagccttggctgccctggaacttgatctgtagaccaggctggtctcgaactcagagttctcctgctnnnnnnnnnnnnnnnnnnnnnttaaagaaaggcatgtgccaccactacccagctaacctatgtcttaaaggatatttgtattgtttatttttcatgttggagcaatctctttggaagtacctttcattttttttctggggttaattgccacaggctttgatgttgtatcaacatagggtagtatatttttgccagaaggacacaagtatgaagaggcagatcatgtcgtatttggatcttcactgggtgaatgagtggaggctgtgagc

SEQ ID NO: 2172 - DNA, 421 bp, Cricetulus griseus
tgggtcacctttctaggcgatcccaagaacctctatatgttgttcttccccgcggcctactacgcctctcgccgactgggcatctgcgtgctctggatcaccttcattactgagtggctcaacctcgtcttcaagtggtttctgtttggagacaggcccttttggtgggtgcatgagtctgggtactccagccagactccagtccaggttcaccagttcccctcttcttgtgagactggcccaagcagcccttctggccattgcatgatcacaggagcagctctctggcctataatgacagccatttcttctcaggtggcatctcggtcccgaagcccctgggtaagggtgattcctagcctggcttattgcaccttcttattggcagtcggactatctcgggtcttcctcttagcacatt

SEQ ID NO: 2173 - DNA, 510 bp, Cricetulus griseus
aagccatgctagaggatacactggttgctctatttgatttggagaaagtttcctttttcttcaaaccatcagaagaggagcccctgattgcaaatgtccctcttacgtaccaagtggaaggaagccggcaggccctgaaagtttacttctacatcgatagttaccattttgagcaactgcctcaacggttgaagaatggaggaggctttaaagtgcacccagttctctttacacaagccctggagagcatggaaggatattcctatagagacaacctgtccgtggaagagtttcaagcccagataaacacagcctccctggaaaaggtcagacagtacaatcagaagctcagggcattctacttggacaagtcaaattcaccgccaaatgccacatccaaagctgcctacatcgagaagctcatgaggcctctcaatgctttagatgaactttaccggctggtcacctcgtttatcagatccaaacgcattgctgcgtgtgtgaacacac

SEQ ID NO: 2174 - DNA, 461 bp, Cricetulus griseus
  misc_feature (106)..(135): n is a, c, g, or t
  misc_feature (141)..(159): n is a, c, g, or t
  misc_feature (161)..(174): n is a, c, g, or t
tacagagtgagctcaaagccagcctgggctacagcgtaagctccaagccagcctgagctacaatgttcaaaaattaaagatctaagccgggcattggtggcacatnnnnnnnnnnnnnnnnnnnnnnnnnnnnnntcaggnnnnnnnnnnnnnnnnnnnannnnnnnnnnnnnncagaacgagttccaggataggctccaaagctacacagagaaaccctgtcttgaaaaaccaaaaaaaaaataaaataaaataaagacctatccagatgtggttttgcattcctttagtcctagaacctaggagataagggcatatgagcatgtgggtcctgagttcttgtgtcattgggccccttcctccccccataactcatacctttaatcctagcactcaggaggaagaggcagcagatctctttgagttaaaggccagcttggtttacacagcaaggacagtaa

SEQ ID NO: 2175 - DNA, 461 bp, Cricetulus griseus; identical to SEQ ID NO: 2174
  misc_feature (106)..(135): n is a, c, g, or t
  misc_feature (141)..(159): n is a, c, g, or t
  misc_feature (161)..(174): n is a, c, g, or t

SEQ ID NO: 2176 - DNA, 505 bp, Cricetulus griseus
tttgggaggaggaaggtactctttgagcacatccaactcatccattgccgctcttctctgtgccctttacccacatttcccagcccacagcactgacaaccgctatcatctccaggctctccggcacctctatgtgctagctgcagaaccaaggctcctggtacctgtggatgtggatacaaacacaccatgctatgcccttatagaagttacttacaagggcactcagtggtatgatcagaccaaagaagaactgatggctccaacccttcttccagaacttcatctgttaaagcagatgaaagttaaagggccaagatactgggaactgctcatagatttaagcaagggagaacagcacttgaaatccattctttctaaagatggggttttatatgtaaagctcatggcaggccagctgtcctacaaagaagatccaatggggtggcagagtttgttggcgcagactgtgtctaacaggaactcggatgtcaggtctttcaag

SEQ ID NO: 2177 - DNA, 523 bp, Cricetulus griseus
cttgtcccgcttccagttttccgtggctcctcctcctgtcgttgcaggtgtaattcctgggactcagatggaccacacatccccgacctacatgcttgctaacttaacccacttacattcagaacaacttctgcagggcttgaatctccttcgtcagcatcacgaactctgtgacatcgttcttcgagtaggtgatgttaaaattcatgctcacaaagtggtacttgccagcatcagcccatactttaaagctatgttcactggcaacctttctgagaaagagaacagtgaggttgagtttcagtgcattgatgaagctgcactgcaggccattgtggagtatgcctatacgggaaccgttttcatttctcaggatacggttgaatctctcctgccagcagcaaacctactccagataaaacttgtcctgaaagaatgttgtgcatttcttgaaagccagtttgaccctggtaactgtattggaatttcccgttttgcagagacgtatggttgtcatgacctt

SEQ ID NO: 2178 - DNA, 459 bp, Cricetulus griseus
ttcaccaggctgtaaccaacctaggtaaattgcagattttcctagtaggcctgtgctggctcagctaagtgtgactgcagtgagcactgctggggctccctggctagcagtagtcacttatatatttgtagagttggtagatgtttagggtattgttcgggtggcattaagatcctgtgtcgtcatatctagtaagtagagacccccaggataggcactagaggagtcctcagagtaagtactgaggtaagcttgaatgagtagatcactctggtattgccagttgaatgctgtgtaccctgccaagaaatacacaaataaaagtactaattcaaaccaagaaagctgctgcagttttcattctcagagaacagtcattgaattctgcttattggacaacacagtctgtcagtgaatcattagagtggtaggtccaagtttgaagacccagacagcatt

SEQ ID NO: 2179 - DNA, 580 bp, Cricetulus griseus
gtgtgtgtctgggggtgccgagggggacgtgggggcgaagcacaaccggccatggcagcagcggaggacgaggacgggggccccgaaggcccaaaccgcgagcggggcggggcgggcgcgaccttcgaatgtaatatttgtctggagaccgctcgcgaggctgtggtcagcgtgtgcggacacctgtactgctggccctgtcttcatcagtggctggagacgcggccagaccggcaagagtgccccgtgtgtaaagccggcatcagcagggacacagtcgtccctctctacggccgcggcagccacaagccgcaggaccccagactgaaaactccaccgcgccctcagggccagcgacccgccccggagagcagaggggggttccagccgttcggggacaccgggggcttccacttctcatttggtgtcggagcttttccctttggctttttcaccaccgtgttcaatgcccacgagcctttccggcggagagcaggtgtggatctgggacagggtcaccccgtctccagctggcaagactccctgttcctgtttctcgccatcttcttctttttctggc

SEQ ID NO: 2180 - DNA, 510 bp, Cricetulus griseus
tgcagccttccatcatatttatagatgaaatagactcctttctacgaaaccgttcaagttctgaccatgaagctacagcaatgatgaaagctcaatttatgagcctctgggatggattggatactgatcatagctgccaggtgatagtgatgggagctaccaatcgccctcaagaccttgactcagctataatgagaagaatgcctacaaggtttcatatcaaccagcctgctctaaaacagagagaagcaatcttgaaactcatcctgaaaaatgaaaatgtggatagacatgtagatcttctagaagttgcccaggaaactgatgggttttcaggaagtgatctaaaagaaatgtgtcgagatgctgctctcctctgtgtcagggagtatgtcaattctacatcagaagaaagtcatgaagaagatgaaatccggcctgtgcagcagcaggacctgcatcgggcaattgagaagatgaagaaatcaaccgatgcagcgtttcagaatg

SEQ ID NO: 2181 - DNA, 581 bp, Cricetulus griseus
  misc_feature (22)..(61): n is a, c, g, or t
  misc_feature (89)..(141): n is a, c, g, or t
  misc_feature (149)..(205): n is a, c, g, or t
  misc_feature (208)..(220): n is a, c, g, or t
  misc_feature (250)..(289): n is a, c, g, or t
  misc_feature (311)..(336): n is a, c, g, or t
  misc_feature (349)..(433): n is a, c, g, or t
cccccctgaccagcagaggttnnnnnnnnnnnnnnnnnnnnnnnnnnnnnnnnnnnnnnnntccgactacaacatccagaaggagtctnnnnnnnnnnnnnnnnnnnnnnnnnnnnnnnnnnnnnnnnnnnnnnnnnnnnncctgacannnnnnnnnnnnnnnnnnnnnnnnnnnnnnnnnnnnnnnnnnnnnnnnnnnnnnnnnaannnnnnnnnnnnngagggcattccccctgaccagcagaggtcnnnnnnnnnnnnnnnnnnnnnnnnnnnnnnnnnnnnnnnntccgactacaacatccagaagnnnnnnnnnnnnnnnnnnnnnnnnnnactgatgggtggnnnnnnnnnnnnnnnnnnnnnnnnnnnnnnnnnnnnnnnnnnnnnnnnnnnnnnnnnnnnnnnnnnnnnnnnnnnnnnnnnnnnnaagatccaagacaaggatggcattccccctgaaaacagacgtgcatctttgcccgcaatcagctggaagatggcggcaccctgtccgactacaacatccagaaggagtccaccctgcacctggttctacgcctcatgggtgggatgca

SEQ ID NO: 2182 - DNA, 519 bp, Cricetulus griseus
tctgcctccactccaaccgacaacccacgtctctcctcacctttctggaaattgttcccatagggatccgtagagctcctgagccgcagctggcgcaggccactgtctccgcctgatccattcattggaagccggtcttttctccgaatccaagttccttgcgtgctgccccttagagcggcgggcagcgacatggagaagagcagcgagaccaacggctacctcgacggcacccaggcagagcctgaggccgggccccgcacgcccgagacggcggctaggaaatcgcggcgctgcgttgacttttttcggcgccaggcgctggtactgctcactgtgtcgggggtgatagtgggcgctggtatgggcgcggcgctgcgcgggctgcatctcacccgcactcaggtcttctacctggccttccccggcgagatgctactccgcatgctgcgcatgatcatcctgccgctggtggtttgcagcctggtgtcgggcgccgcctccctggacgccagctcc

SEQ ID NO: 2183 - DNA, 578 bp, Cricetulus griseus
ctttcagttgtcacagacccagccactgagcctgccattttctgggcaaggctagatcccggtgctgtaagacagctcgacacaacttgacttccttctttttcctcctttaggactagctgtttgctaactttgtcaagcccagctgtggtgggaagaattaggaatcaagtagtatgtatgatctcgtcacagtgctatttctagctctttatagacctgtttccaactagaaacagctggaaaacgaaaggaaaaaagtgtgtggggcatgcttctattctgattgtatacctattgaaattactgtgaggcccctccagccccttcctaggaattaattttggttttacagcaaaaattgacttttttccaatcatgtcattgaaagtgcctttaacaggaaaaataattactgaatgggaatttgcttaagaagccacaggatgaatgctttgggccccttacatgatgcagtggggagtttttcccttctttttctcttgtggacaatagctaaatagcagtattagttacaagcttggttgcagtgttcctatcttgggggctggtttata

SEQ ID NO: 2184 - DNA, 510 bp, Cricetulus griseus
  misc_feature (476)..(497): n is a, c, g, or t
acaaaagtggttgagagagagtacctgggagaattgggagaagctctagagaggaaatgggaggaagaaagcgatggaattctattttaattaagactgcattaggcctaaaacattttttccttagatttaaatgtctaagatctgggaacatatctgtaacagagaactttcccagcatgtgcaaagttctggctttgattcccaataccaccaatgtgggatatttaaatatctaaattatgaacaagtggagagaatcataataaactgttatgtaaattaaaggctcaaatgttcctatgttctcattctgaaggtaactgtttaggaactagatagtgatgcatgccaataatcctgacacttgagcaactaaggcaatcacatatttaatcccagtttgggttatatatctgtatttaaaaaaaaaaagttttggccaggcagtggtggtgcatgcctctaatcccaannnnnnnnnnnnnnnnnnnnnnagatctcttgagt

SEQ ID NO: 2185 - DNA, 536 bp, Cricetulus griseus
  misc_feature (108)..(125): n is a, c, g, or t
cgcttctccaggacgtggtgtgtccaggcgtgcggcggcctgcaggaggcccacccgggtcatttcttgagcctgtctctggtgctttctgaagtgaatcctgcgtgnnnnnnnnnnnnnnnnnntgtgggaacctgcgggcctcgggcgggagagatggatgcaagttcacacgacaagcagccctctgaagccagggagtgtgtcgttaataattctggaaatgcctcttttatcttgggaaccggaaagtctgtgacgcctcataagcgtgtagaagacgcgactcctaatctttgcacccccgttacggttaagtcacctttgaacttctccacgataaccgtagagcagttgggaatcacccctgaaagctttgttaagaccccttcaggaaagtcagcttcccttcagaagaccaggagacgttctacagttggtgtccggggctctccggaaacaaattgcctgatccgtttcattgctcaacagcgaagcctaaagaatgctgcaagatctctgttgactcagaattc

SEQ ID NO: 2186 - DNA, 492 bp, Cricetulus griseus
gccggtcgaaagagaagaggaagtctaagcacaagctgaagaaaaggagaggccatccctctgaagagcccagtgaaaacatcaataccccaacaagattgactccacaattacagatgaagccaatgtccaatagagaaagaaactgtgtattaaagcatcatgtgttcttggtccgaaactgggaaaagattcatcagaaacaggaggaagtaaagcacacccgtgacattcactcagcatcactgtatacccgttggaatggcatctgcagagatgatggcaatattaagtctgatgtcttcatgacccagttctctgccctacagacagctagatctgttcgaacaagacgattggcagctgcagaggaaaacctggaagtggctcgggcagctcgcctagcacagatcttcaaagagatctgtgatggtatcatctcttacaaagattcttcccagcaagcccttgcagctccacttttgaatcttc

SEQ ID NO: 2187 - DNA, 568 bp, Cricetulus griseus
aaaaccctaaacactccaactcttatgatatgttcatgagagggagaagaaatattgtccggagcacaaagaatacatgatcctcagttgctaacagagagagctttgcaccatggaattgatttggagaaaatcaaagcttacattgattccttccgctttggagcccctcctcatgctggtggaggcattgggttggaaagggtgacgatgctgtttttaggactgcataatgtacgtcagacatccatgttccctcgtgaccccaaacgactcacaccttaaagccacactgttttttctctccagtaatctgcagttgatcagattatacctgagaaacttaagttatgcagtaacttaagtagaataactgtcttactaaagtgccacgattgctttttaagtagttcagtacaaattaagaaaaagcattttgaacttcagatatgtttcagtaggaaatgcttgaacatttgaaatgagaaatttttatggttaaaattcctagtctgtctctacagaaatgttaaggggaattttaagcagtttaagaatgtatgattct

SEQ ID NO: 2188 - DNA, 537 bp, Cricetulus griseus
  misc_feature (14)..(48): n is a, c, g, or t
attggggtaccgcnnnnnnnnnnnnnnnnnnnnnnnnnnnnnnnnnnnaaacttcaaaatgaacaaagtgagtagaaagaaggtagctgatgatttgcataaggctcaacagtcactgaactttatccactcaaaaattgcactaaaagctgctggagacaatgctgttattgggaatagtagtgtttccccagaaacgggagctcctgagaaagagacaatgtctgtgagtctgaatcagactgtggtccagttacagcaactgcttcaggaagtcaatcagcaactcatgaaggagaagtgatcctggctgtgggagtgaagtcattggaaattactcgaaggcgttgtattatattttgccaaatgaaagccttatttatgtttcaccctttctactttgtcacacactgaacagttttgtcttttctaaccttgttagactactgacttacagagaaaacacttaaaaagccaactctgtagacacctccagagtttagttttataataaactgtttgaattaatagacctga

SEQ ID NO: 2189 - DNA, 449 bp, Cricetulus griseus
gcccttgttttgtagtatttttaaagagaagcaccatcttggcatttcttaaaggagaactgtcctttgtaactgaccacttctttgtcatctattaaggggctcaaaaaagagtaatggacatagcaaatgttcatggactgccatgtgttgtgtactcctagttttgtttagcaatggacagaagactcaggtctcagatataaacatgttactcgtgagtggcagaaagtaaagaagtaaattccatcaactaacaggagagaagaatggaaatgtgctgtcaagcgtctctgtgatagagaggtctcactgacttaaggaggggagtcattggtgctgtcaagcgtctctgtgatagagaggtcttactgacttggggaggggcgtcattgtggagtcgtgtgggtgtgtggaagactgctccaggcagacagcatggtgagact

SEQ ID NO: 2190 - DNA, 579 bp, Cricetulus griseus
  misc_feature (532)..(547): n is a, c, g, or t
tatcattgaagttggtacaccacccacagggaaccagcccttcccaaagaaggcagtagatgttttctttcctccagaagcacaaaatgactttcctgttgcaatgcagataagtgaaaagcatgatgtggtgttcttgattaccaaggatggttatatccacctctatgatcttgagactggcacatgcatctacatgaacagaatcagtggagaaacgatcttcgttactgcacctcatgaagccacagctggaataataggagtcaacagaaagggacaagttctgtcagtttgtgtggaagaagaaaacataattccttacatcaccaatgtcctacaaaatcctgatttggctctgagaatggctgtgcgcaacaacttatctggtgctgaagaactctttgcccggaaatttaacgctcttttcgcccaatgaaactactcataggctgcaaaggtggctgctaatgcaccaaagggaatccttcgtactccagacaccatccgtcgattccagagtgtcccagcnnnnnnnnnnnnnnnngcacctctcctttcatactctggaatcctttt

SEQ ID NO: 2191 - DNA, 579 bp, Cricetulus griseus
  misc_feature (269)..(283): n is a, c, g, or t
  misc_feature (549)..(575): n is a, c, g, or t
cagtatgtcaaggcggcctcttacctgctttccatccacaaagtgtatgaagctgtggaacttctcaagtcaaatcatttctacagagaagctattgcagttgccaaggctcggctgcgccctgatgaccccgttctgaatgacctggacctgagctggggttccatcctggagagagatggccactacgctattgcagccaagtgctacttaggagccacttccgcctatgatgcagccaaagttctggccagaaaaggagatgcagnnnnnnnnnnnnnnnctgcagagctggcttccatagcaggagaaagtgagctggctgcttccctggctctcagatgtgcccaggagctgcttctggtgaagaactgggtgggcgcacaggaagccttgcggcttcatgaaagcttgcagggccagagactggtcttctgcctccttgagcttctgtgccggcacttagaggaaaagcagcctccagaggtcagaagcccctcctccgtttaccaccagtgggccacaagctctgaaggaaccttggtgcannnnnnnnnnnnnnnnnnnnnnnnnnncttg

SEQ ID NO: 2192 - DNA, 580 bp, Cricetulus griseus
  misc_feature (488)..(488): n is a, c, g, or t
  misc_feature (577)..(577): n is a, c, g, or t
agtaggggctgcttcttccactcagcaattttggggaggcctgagctgtgctgtccttctgagcctttgtctcttgagggcctttgttcatcctggccgctcagcagctctaagtacacacacgcacacgcacgcacgcatgtgtacacacatgtatgcatgcatgcacgcacacacactcacaaaccaaccagaggtctaggaaaggacagccacttcctgtaggcttcagctctgcatacagatgacaggagtagaaatacaggccaagttccctacggtgacctcaggttggcctcagagctcatgtgtcagttcctaacccatctttgtttataaacaccagaatttctgcctcacccgtaggcagtttattagtgagtagagccagttaagaaccactttcaatacctggaaactttctaaaagtctttggtaatgtgagaagcaactaacagaagagcagggcataacttccttttggcctncgtttgccagtcactccctctccatttgcctacgtcctgctcatcagctcatatctgatactgcaggcagcttactgtttcctttctangac

SEQ ID NO: 2193 - DNA, 474 bp, Cricetulus griseus
agcactgctgacccaagtatctcctgaaggctaccaattgttcttaaaccaggagtggggaatatgaggtgtgtgcccctccctctgccacagttggttctcataagtcaatgagtgctacctgacattcctgccagcctaccagagtgaatgaataccagtcccccccttgcttcatagagagtgggcatgagggaaccatgatctctgtgtcagctctattccctggtgaccagaaacacttgagtgtcactgttgagcccatggacacggaccaagccacagtccctgtgacaatgcactctcatttcaaccacgatgctgtcaaagatggctgctttagtcaggcacacagggctcagtctggtggcctcttgcatcttggcccaatcttcctgctgccttgtgattgagtaataatcccgggagctggtttgcctgtaaatctgaaatcacatcccatgtttgtttgct

SEQ ID NO: 2194 - DNA, 525 bp, Cricetulus griseus
atgtcttgctgataccgacaggtttgtttcagccattggcattgttagtagatagaatattttaattagggtgaaagattatatttatacttaagtagagctccattataaatcagtgacagcctctgctttccttttttactttttgtcttacaaatgtctgtccagttatttgatgggataatatgaatgagacccacaatggagtgagaaaggtatacaatgtttttgtcagggattttattctataccattattgctgtattatgaaagcaattagaacttgattgccgtttggaatgctttcatttttcacatatatgctgctgttttcctataaatccacaagtcctcagatgttattagtagttgttagcacttcttttttaacaatgagagatgagcttttatatttagccaccaactaataatgttattaaagtttaatttttgttatagtttatcaaaaattaacattttcacttctaaaatgttctgattttacctctgtaactgacagctgat

SEQ ID NO: 2195 - DNA, 491 bp, Cricetulus griseus
  misc_feature (149)..(168): n is a, c, g, or t
tcctcgatggtgctggctgccgctggaggggtggaacaccagcggctcctagaacttgcccagaagcacttcagcagcgtctctcgagagtatgaagaggatgctgtacctggtgtaactccatgtcgcttcactggcagtgagatccnnnnnnnnnnnnnnnnnnnncctttagcccacgtggccattgctgtagaaggacctggctggtgtaacccggacaatgtggccctccaagtggccaatgccatcattggccactatgactgcacttatggtggaggagtgaacatgtccagccctctggcttccgttgctgtgtctaacaagctttgccagagtttccaaaccttcaacaattcctactctgagactgggctgctaggtgcacactttgtatgtgatggcatgagcatcgatgacatggtcttcttcctgcaaggccagtggatgcgcctgtgcaccagtgccacagagagtgaagtgacccg

SEQ ID NO: 2196 - DNA, 525 bp, Cricetulus griseus
  misc_feature (42)..(42): n is a, c, g, or t
atcagacagtgcaggagaagaatgcgatgcagcggagggggnccgaaaactaaaggtgtccagggtgccgtcctccatcccctcaagaaaacctttttacatctccattccttattccacttggatttcctctatcaaggaagcccattcatgtgtatgggatcaactgtttatagtcttttcacactgcagctttgggaaactccatcccttgatttgtgttgtctcggccttcctggtgtgcagttactgctgtagaaaagtatcaatagcttcatttcatataaacacgagtaacttccagacacttgtgtagaggactgacagtgcatttggtatttaagtaatctgaaccagttcttcaagtggctgtgttttgtattactgtgaagatatggaaatgtagtacattacaatttaaaataattgtaataataacttcctgatttctacattccctctctgaccctcctcgggggtttcctttcagaagcaacttttccatactcgtactgcatattcctt

SEQ ID NO: 2197 - DNA, 441 bp, Cricetulus griseus
  misc_feature (355)..(410): n is a, c, g, or t
gactattttagagaaggtacagggccagctgctgcctggcagtctcaatggccaacactaaatgaaggtgtttgaaattagggagggacatgtcccagcaaactgggagcacatgctctgtctccacagcaaccagccactgcaggcaacatttccttcctcccctgttctctctgcttgctgttgttttgacgctgttctgcttgcttgtcttctgactggggataaggaatggctgggctctcaagcacagctaatttgaagagtgtggggccaggcacttgcatgagggcagatggagcatggctctgaagctacttctagggctgctgtgggacccacttgttgacctctnnnnnnnnnnnnnnnnnnnnnnnnnnnnnnnnnnnnnnnnnnnnnnnnnnnnnnnncgcactctcccgcatctctgtgtgaaaacac

SEQ ID NO: 2198 - DNA, 438 bp, Cricetulus griseus
  misc_feature (254)..(279): n is a, c, g, or t
ccatatgcccagcagccaatgcagaccccaccccacagtaacatgatgtacacggcccccggacaccatggctacatgaacacaggcatgtccaaacagtctctcaatgggtcctacatgagaaggtaggcagcctggcagcccacagagcccactgggccgctctgttggattgatctgcacaaatacctttgaagagtacgatttcaaaaccagcattggtgtgaatgcaaaaacattgttggcaccatttnnnnnnnnnnnnnnnnnnnnnnnnnntgtttgcagcaaaaagccttatacaagtgggtcctctttttccttttttctttttgggccccttggtttctgtaactttaatataaaattctctgcaaaggaaggccccccttaggactacagttgggcagcagccactcattgggcctgcttccttta

SEQ ID NO: 2199 - DNA, 523 bp, Cricetulus griseus
cttacaagtcattcacctcaggggctttgtcatggtgagaaagcacactaacagtagtcttggtgggactgtccatcaaatagtcctgtccactgtgtctgaggaacagggactctggctgagggaaagccgcagggatgggaactgccaagctcccagatccttcctgaagaccctactaatccatagcctgaagtgggaggttgtggggaccttcttggcattagtctgaggtctgaagcctggttggtcagcgttgttttcattgctatgcttagcctccatgtgtttctgttgtttgtgatcagagaggctcagctgatcagatatctattcaaagagccccttagatgatcaaacagcacaggaactgattgatgatgggcccagattaagatggaggagaaagcgctatgcaaagaaagccacagcagactatctttagttcatcaaaccacagacagcgaggcaattggataagtgtccagatgtctaacgacagagaagagaggctccttggctg

SEQ ID NO: 2200 - DNA, 438 bp, Cricetulus griseus
tgaaggtgaagcgggagccgggtgagaatggcaccagcctgactgatgaggagctggtgaccatgtcggttcgagagctgaaccagcacctgagaggcctgtccaaggaagagatcatccagctgaagcagcgccggcgcacacttaagaaccgcggctacgcagccagctgcagagtgaagcgtgtgacccataaggaggagctggagaagcagaaggcggagctgcagcaggaagtggagaagctggcctccgaaaacgccagcatgaagctggagtttgacgccctgcgctccaagtatgaggccctgcagaactttgccaggaccgtggcccgcagccctgtggccccagctcggggtccccttgctgctggcctggggcctttggtccctggcaaggtggctgccaccagcgtcattacaatagtaaagtcca

SEQ ID NO: 2201 - DNA, 473 bp, Cricetulus griseus
  misc_feature (11)..(51): n is a, c, g, or t
  misc_feature (134)..(134): n is a, c, g, or t
gggcgacttgnnnnnnnnnnnnnnnnnnnnnnnnnnnnnnnnnnnnnnnnntggcatgattgaagaaataattcataggcagcagggaaccccatccatcaacattcttaagtcaagaaagggacttagctttnctagggtaggctctctataagagtacctggtcaatgtcagcgcaatggcgtttatcctttgaaagaccatgtttatggtagacttaagtggcattcagtatcatggtatccagtagctataaattttctccaatattttttcagacacatggtactacaaactcaaatgttttgcccttatctggtacatcagattcatggatcagataatctgttcaccccaaagggtagagatatcatgcccaataatataaaacttatccttggttcctcaaagattatagtgaaatattttcaggctaatgtagagtataggtggcaatacttggagtaaacctt

SEQ ID NO: 2202 - DNA, 250 bp, Cricetulus griseus
tatgtccagagaagaaattagatatatttacatgtaaaccaacacaaggggtgagtcagataggcttaagagtcctgttgggcatggcctctacaccaagctgggtacattttaaaagtatatctaaaccctactaaagggaccatagggttggtcgttcaccaacaagtcatatttctttgccagaaagaaatgttaaaaaatacttgcttaataaagggaggggggtgggaaaaggtatagagaggga

SEQ ID NO: 2203 - DNA, 404 bp, Cricetulus griseus
tcaatacacttgtcaaacctgaaggatatacaataccagcagtatgccctaatggaaactgtagactttggctaataagtatgtggcaatgtaagtccagcagttgttgcaagtctggttttgtaggtctgtatcgttctggtatgggatgctgatagtaggggaggctgtgggggaactctctgttcaattttgatgcgaaattaaaactgttgtaaacaataaaatctgtttgaaaggaaaaattggaaaggaatgattagtagatgttcaatatattcccatgctaatcattaaaaataactaaaaattatagaaaaaagaaaacggggaaggaatcaaaagaatacactgcaaaaatatatcacatcaaacacaaaataaggtagtaacatgaactgaga

SEQ ID NO: 2204 - DNA, 107 bp, Cricetulus griseus
ttctttgccagaagctaaatcatggcaatgaccaccagtctcccagtagcagtaactataatggcctggtagagagctttgagctgggttccggggggcacactgat

SEQ ID NO: 2205 - DNA, 579 bp, Cricetulus griseus
taaagacgtttgccactgtgcccagcaaataaaaatttgaaatgctacaatattttatgagtcagggagtttagtagtaaaagtgtcttggaagttcccagctagctgccctagagttatggcaaaaagcagtaaattctgtgtgaattatttttataattatggttcacttaaggggtgacattggatagcttaatttaccataaatcactagacaataaatatgatttaacagtatttatagagttcaacttggctaggatgtttttctgtcttggagttaagaaaatgttgaaatcttagcggcccagtctccaagaacatcactgaccacaatagctcgtgcttataccgtgtctaggattgctatgctcctcagagaaggcgttatgaggggaatagtgtgtgtgttgggccatgcatggtgccacacacttttagtcctagatctccctgagtttgagaccagtctggtctatatagtgagactctatctcaaaacaaaacatagaaagaaatgaaatagaaaaagaaaagtctgtgtacagtgtggacctcggactccttggctatgtgtct

SEQ ID NO: 2206 - DNA, 568 bp, Cricetulus griseus
gtcgacccacgccgtcgcgaaaaacaaaatggtcaaccataaaaccatacatgtcccatactagttctgttcttggttatttattccaaatgaaatgaaagcagattcctaaaaagactttcagtgagtgtttaggtgagcattatttataatagccaaaaactgaaatcaacctaatgtccatcaactgatgaatgtgttctatccatgcagtagaacactttgtttcttttacattatgttttaatgatttccagtggtgtatctattttccagatttctttacccaacgtaatttcttagataacctttttcctggattcattataattttacagtaaccgttacttgaggaatttccaaaataagtgagtttgttatttgtttgttgtatgttgtttgagtccttacatgcaccaaaacatttttatttttgctgttgcatgagcctcatttttcctcagaactttaagggtataaaactctgacctatagccgtaccaccctgagtgctctattctcgtcttatttcagaagctaagcaaggccccagcctacttagtgcttg

SEQ ID NO: 2207 - DNA, 429 bp, Cricetulus griseus
  misc_feature (371)..(385): n is a, c, g, or t
atgatgacttttgcaactttagtgacaatctgcgagtcacatactagatatggctgggtagcaactcattgcagagcaggtgcttagcacacataaggtcctgctctcatctcaagcaccagaggaaaacaaaacaacaaaagaccctataaaaacaaattctatcttttcttcttaatgtcttagaccaaggggaggagggacaggtgctggtcttgagtaatacgaaagaatgattatccaactgtgcttcattaattccatctctgcttcaagcagcatagcccagtacaagtctatggtgctgtaaggacagacaggtgactgaccacaccatccagtgcttctctcatcacaacaaaagtctctgnnnnnnnnnnnnnnnacatggtgctaggacaaggcgtggatgaaatactgaagggagat

SEQ ID NO: 2208 - DNA, 429 bp, Cricetulus griseus; identical to SEQ ID NO: 2207
  misc_feature (371)..(385): n is a, c, g, or t

SEQ ID NO: 2209 - DNA, 551 bp, Cricetulus griseus
  misc_feature (20)..(112): n is a, c, g, or t
  misc_feature (159)..(198): n is a, c, g, or t
  misc_feature (223)..(279): n is a, c, g, or t
  misc_feature (304)..(344): n is a, c, g, or t
  misc_feature (346)..(380): n is a, c, g, or t
  misc_feature (386)..(492): n is a, c, g, or t
tgctgaaggctgtgatgcgnnnnnnnnnnnnnnnnnnnnnnnnnnnnnnnnnnnnnnnnnnnnnnnnnnnnnnnnnnnnnnnnnnnnnnnnnnnnnnnnnnnnnnnnnnnnntctacgatgggccacctgatgatgaggcggccatgggcattaaaagnnnnnnnnnnnnnnnnnnnnnnnnnnnnnnnnnnnnnnnnatggtgccaacctccgacaaaggcnnnnnnnnnnnnnnnnnnnnnnnnnnnnnnnnnnnnnnnnnnnnnnnnnnnnnnnnnccgcatcatgggccccaactacacnnnnnnnnnnnnnnnnnnnnnnnnnnnnnnnnnnnnnnnnngnnnnnnnnnnnnnnnnnnnnnnnnnnnnnnnnnnnttgagnnnnnnnnnnnnnnnnnnnnnnnnnnnnnnnnnnnnnnnnnnnnnnnnnnnnnnnnnnnnnnnnnnnnnnnnnnnnnnnnnnnnnnnnnnnnnnnnnnnnnnnnnnncttcatcgtcagccctgtcgtcatattggctgcggaggccaataacccagctgacctgc

SEQ ID NO: 2210 - DNA, 551 bp, Cricetulus griseus
gccggcgtcgcctcgagcagtcgcaaccatgagcgggaccttagcgaagatcgcggagatcgaagccgagatggcccggactcaaaagaacaaggctacagcacatcaccttgggctgcttaaggctcgtcttgctaagcttcgaagagaactcatcacccctaaaggtggtggtggtggtgggccaggagaaggttttgatgtggctaagacaggtgatgctcggattgggtttgtgggtttcccgtctgtggggaagtcaactctgctgagtaacctagcaggagtgtattctgaagtggcagcttacgaattcactactttgaccaccgtgcctggtgtcatcagatataaaggagccaagatccagctcctggatctcccgggtattattgaaggtgccaaagatgggaaaggcagaggtcgtcaagtcattgcagtggcccgaacatgtaatttgatcttgattgttctggatgtcctaaaaccattgggacataagaagataattgaaaatgaattggaaggctttgggattcgattgaacagca

SEQ ID NO: 2211 - DNA, 524 bp, Cricetulus griseus
tgagatcagcgttagaggtgtcaagataggtgtcaaagccgatgatgctcaggaggccaagggaaataaatgtagccactttttccagctaaaaaacatctctttctgtggatatcatccaaagaacaacaagtactttggtttcatgaccaagcaccctgctgaccaccggtttgcctgccatgtctttgtgtctgaagactccaccaaagccctggcagagtctgtggggcgtgcatttcagcagttctacaagcagtttgtggagtacacctgtcctacagaagatatctacctggagtagcagtgccaccaccctctgcagccctctgccccaggccagtactaggacagctggcaacggacaggatgtggcactgccacaagagaatgggggagtgagggctgtttcgggggggcaggggtatggggagaagcagatgcagtttattgtaatatatggggttagattcatctatggaggacagtacaggctctctggggactggtgaaaggtcaagctg

SEQ ID NO: 2212 - DNA, 416 bp, Cricetulus griseus
acaagaacccaagaagggagagccagagaagcagtgagccctggagaagctccagcgggtcacagctgcctcctgccaccctgcaccacatcaacgctacgagaaacgcacactgttcaccattgccattgtggttctaatgcaggcaaatacactgtttgattatgcctagttctacgttcctttcagctcactcgtatctttagtgcaattaacgtctgttctgatttatgttgtgtcctgagagctgaagtcttaagctttggtggcctttgaagagtgacagcaagttttacctaaccctgtgggggggaggttgccagcagaatgccttgtagttatttgatagaatttattactgtatatttaacagatctgcgtatatatatatattataataaaagaatgtgagatga

SEQ ID NO: 2213 - DNA, 572 bp, Cricetulus griseus
atcgaaggccagcagagagttcggggacagcctgagtttggagattcttcagattattaaggagtcccagcagcagcatggcttacggcacggagacttccagcggtacaggggctactgttccagaagacaaagacgtgtccggaaaacactcaactttaaaatggggaacagacacaaattcactgggaagaaagtaaccgaggagctcctgactgataacaggtacttgttgctggttctgatggatgcagagagagcctggagctacgccatgcagctcaaacaggaagccaatactgagccccgaaagcgctttcacctgctgtcccgcctgcgcaaagccgtgaagcatgccgaggaactggagcgcttgtgtgagagcaaccgcgtggatgccaagaccaagctagaggctcaggcctacactgcttacctctcaagaatgttgcgctttgaacatcaagaatggaaagctgccattgaggcttttaacaagtgcgaaacgatctacgagaagcttgccagtgcgttcacagaggagcaggcagtgctgtacaagcagcgtgtgg

SEQ ID NO: 2214 - DNA, 510 bp, Cricetulus griseus
ctaaaaaaaaagtgtgggctgttaaattaaatggttaaacaaatgttaaacaaaactttacttagtggcgatcatacatcataatcagtatttttcaatacagtacttgtccaaggcactacatgcatagctacccttcaaaaacaaatggagagagggtggggaaggagtgggaggaagaaatcagagctgtaaaccaggggcaggcctgggaaaagggcaagagaaaggatacaaactttcagttctaagttctggatacttaatatacagtacagtaatcaatactaatgtatatttgaaacttgctgagagtagaccaagtgttctcatcaaaaaagaaactgaagggacctgggtgaggcatatgctaattaatttgacaatggtaacaattatttcacaacctctgcatgcatcaaaatatcacgccgcacatttttaatctataaatgattatcttgtgagtcacatctcaatagaataaagctagagaaaggaaacaatatc

SEQ ID NO: 2215 - DNA, 579 bp, Cricetulus griseus
  misc_feature (143)..(182): n is a, c, g, or t
aggctggtctcaaactcacacagatccacctgtctctgcctgctgagtgctgggactaaaggtgtgcttctcatcgccccactactttttcatatttatcagtgtgctttagaacgtggggcttattttctcatagaataatnnnnnnnnnnnnnnnnnnnnnnnnnnnnnnnnnnnnnnnnttatcctggtatattcttttggaagctgcatacaatggattgcttccaatttaagtatctgattgggtcagtctggaaattaacatttgtgaaggcaataccacagtgctttcccatgattcttttattgcttcatagtttttcatgatgtaggtataccataatttttaagttaattttttattgatgggcagttggatgctaatgcacacagtttctgtagttaataatctttttcatgaagcatttatatgtacgcaaataaatgtgaggataggttcccagatgtgagatggctgagccaaagggaagagtacatttgttatttggtggccagtttgcctctaccctttaaagttcttggctgggattcatgtaacaaaagacatgttcccaa

SEQ ID NO: 2216 - DNA, 562 bp, Cricetulus griseus
  misc_feature (2)..(19): n is a, c, g, or t
annnnnnnnnnnnnnnnnntcctcctccaagataagcagcgcgaaaatctactgcgtggcttgtcaggagctcgactcagatgtggataaagacaatccggctctgaatccacaagcggccctctctcaagctcgggaacaccagctcgcctccacgacagagcctgccacaggctctcgtcccacaccccatcccccagtaccccgtccagagcactgtgagggagctgcagcagggctcaaggcagcccatgggcctcccctacctgctgcacctctaaatacagatgtggtggcttacacacagacagccctcctgcagaagctaacctgggcttcagctgagctgggctctaccacctccttggagactagtattcatctgtgtgggcttatccgggcttgtgctgaggccctgtgcagcctgaagcagcttcagctctgagacctctactccaacctgtgttcccctgagaaaaaccctctagaaaaacagctgttcctctgtgcggcttgttcctttcttggttctgagagcatgcaagcccccgctctatacatg

SEQ ID NO: 2217 - DNA, 581 bp, Cricetulus griseus
cagatctccttttccccgaggcttcgctatggcggactgttgtgtaccgatatgcccacggccaatgtgtatccctccatgctatgctgaccttggcaaagctgccagagatattttcaacaaaggatttggctttgggttggtaaagctggatgtgaaaacaaagtcatgcagcggtgtggaattttcaacatctggttcatctaatacggacactggtaaagtcagtgggaccttggagaccaaatataaatggtgtgagtatggtctgactttcacagaaaaatggaacaccgataacactctggggacagagattgcaattgaagatcagatatgccaaggtttgaagctgacgtttgatactaccttttcaccaaacacaggaaagaaaagtggtaaaatcaagtctgcttacaagagggagtgtataaaccttggctgtgatgttgactttgattttgctggacctgccatccatggctcaactgtctttggttacgaaggctggcttgctgggtaccagatgacctttgacagtgccaagtcaaagctgactatgagtaactttgcagtgggct

SEQ ID NO: 2218 - DNA, 578 bp, Cricetulus griseus
ctcttaggcctcgggtggggatcatttttccgggtgtgtttacactgtgaggttgttcctttcaagaattcctgaggagagttcaaagaggccttctctttgagcgatttggagagcgagaatgagagtgagacttgaagagggaatggggccggaggtgcctttatctgcagagaattgctccagctttcctgatagaagctgctgccgcctcttaaacagcttagtgcagtcaaaagacaggctgacttgaaaggctgttttacagcaagatcagcaggggccacgaagcagagagtggagcgatggaggctaagcctcctcagtgggaggggtctatcaaagagaggccctggctgattctgactgcctctgcccctgaaacccatctgcaaaagctggccatctgtcagcctaccctccctggccaggaccaataggcccaactcttggggggttgggtgtggccctgccatgcggctggtgtcagtgcagtgcattgatcgcccgccgggcgggctgggccgcaagctgggcagctcctgcttaatgtgattgaaaggcagttaaaatggcgg

SEQ ID NO: 2219 - DNA, 579 bp, Cricetulus griseus
atttttagcctcttctgactggtccttcttggatttcaaatggcctccagcactttaattttctgactaaatttcttattaaattcacagtccaggcattatattaaaataaaatatgaattgtattggaaataaactattgaagctattgagaatggaaagaatcaggtccatcagagccaccaactatgtacttcattttctgtgtctcggtttttaatctgtaaaatatgggcaataatccttagctcttcgagccattgaaaaggtttcatagttaatccctggcacaccttagaataactgcttctgagtcactccaccgtcctgctgctgtagtcagcgcattctcacgccttcatgaacaccctgacttcccagggcaatgccagcatggactccatccttacagcaacacccagctttcaaattacagaggccgcgtgtgtcagccctcagtgtgccatggtcagtgctagggaagctctcctcatcagagccaaacaaacaaagtttgttttgtgaatgtagaacagcaaacaaaacagattaattttagttcgtagtgtataacattgt

SEQ ID NO: 2220 - DNA, 578 bp, Cricetulus griseus
  misc_feature (409)..(409): n is a, c, g, or t
ttcgaaatggacaacagagaaaaagggagaccagcggttctgtcctttggcagatgaggaggcagcttcttctggagttgatgggcattcttcctacagtgaggagtactcgtattgtagaagaagccgatgtggagatggagcccactgtgtctgtgtactcggggctgaaggaagagcatgttgtgaaagccagtgcactcttacgtctatactgtgccttgatggggattgctggactcaaaccaactgaagaagaagctgaacagttgctgcagttgatgaccagccgccctcctgccacaccagctggggttcgatttgtttctctctctttctgtatgctgctggccttttctacacttgtcagcacaccagatcatgagcagctgatggtggtgtggctcanctggatgatcaaagaagaggcttactttgagagtacatcaagtgtctccgcttcttttggggagatgttgttattggtggccatgtatttccatagcaaccaccttagtgctatcattgacttagtctgcctcaccttggggatgaagattgtgattaagccaagctcc

SEQ ID NO: 2221 - DNA, 529 bp, Cricetulus griseus
tagactcagctcttctctcaactcttccaaaaggccatccagacaggctgaagagtatgacctcatctgattttattttagacagttcataaattttacttgccttaaaaaataaatttttgttaagtattctggtttaagaacatcttggtaaacatgggcaatgggaatgcttaaaatattgggatttactagtcattgtgatttgctctactatgacactatatgtataaatatagttattgtgaatgtttttccatgcctgtttaactagcttcttaatatgtgaaaagtgtcagcctgtgtttctattgtatttcaaatcttaataaatacactatctttttaatgtagccaaagaattgccatagttcagccaaattgaacattgttttaaatctgtcctaatgtggataaaaggtgatagtacattgcactttttgaggcattataattttattataattattgctgtgtgtgtgtatgtgtgtctgtcttgtctacatctaaatatatgtagagatcacag

SEQ ID NO: 2222 - DNA, 580 bp, Cricetulus griseus
  misc_feature (264)..(280): n is a, c, g, or t
tcagttcgatctttaacattgagatggtgaaagacaaaactgcagaggaaatacaacagatttggcagcagtatttttcagcgaaagacacagtctatgcggttattccaaaagagaagtttgatttgatctggaaccgggctcagtcctgcccaacatttctttgtgcactgccaagaagagatggttatgagttctttgtaggacaatggaccggtactgaactccacttcactgcacttataaatattcagacccgagggnnnnnnnnnnnnnnnnngttgattttatatcactatcctgaacttaaggaggaaaaaggcatagtgctgatgacagcagaaatggattccacatttctgaatgttgctgaggcacagtgcattgccaatcaagttcaactcttctacgccactgataggagggagatctttggactagtagagacctttaacttcagaccaaatgagttcaaatatatgtctgtcatcgctgaattggagcaaagtggacttggagcagaactgaaatgtgcccacaaccaggataagacttagagacatcttgattggcccttcat

SEQ ID NO: 2223 - DNA, 579 bp, Cricetulus griseus
  misc_feature (487)..(487): n is a, c, g, or t
gagtacccagagcctgagaaaagtgagaaggagatcaggagagagatccgggctctgctcaagcctcacatgagactggatgacagaaactgggcaatacagaatttccctcccctgggttccgtggtactgctggagcagcttcggacgtgtgctgtagacttcatgagcttctacgcgtgtgcatcttatgtcttcttgcaggagaatactcctatgcggactaatgctgagtatttacttttgaagaagattggcctcagaaggcagaggaagaagagaggcatctgcttgagtgagagtggcctttgtgccctggaagagctagtcagtgtgtgctgcgatggctgccctgtgatcctgttgtgtggcccttgtgacattgggaagtcaacattcagtagaatactgattaaccggttactgaacagccttcccgcggttgactatctggaatgtgatctggggcagacagagttcactcctnctggctgcgttgccttacttaacatcacagaaccacttctgggaccacctttcactcacccgaggaggccacagaagatggcgtattacggg

SEQ ID NO: 2224 - DNA, 580 bp, Cricetulus griseus
  misc_feature (500)..(530): n is a, c, g, or t
ttaatgctggaggccacaaacttgggcttgccttggaactggaggcttaatccagttgaaagaaacctctgggaacggatatcagaagatttggccttaatatatttccatgtgaccagcaggctccccccttccccccagaaggggattaaatcaaagggtgattaaacaagagctgtattttaaatatttagacagtttcctgttggctggtttctagttatcagtgctgctatggtgcagccacctatacattatttaaatgtatttaactgttaaatgtgctacccaccaatgatgaaatagacgtttatgaaaaccgtgccatggtgtgcatgtttgttttatgttcttttaacattgactattgtactgaatgagatggatcagtggatgttttaagatgaagtaaaaaaaatttttttttgttatattcagccgtcattagaattactttggtaatcccaaacatgacaaattatgaataaaacaagtgtacnnnnnnnnnnnnnnnnnnnnnnnnnnnnnnncccgggggggacctccagctttggttccctttattgaggggtattggccc

SEQ ID NO: 2225 - DNA, 581 bp, Cricetulus griseus
agcattgttgcccaatagggcagcaagttatgtgggactaagatatgtaaggaaatgtaggcagagaggaatcatcatgtgatcccacaaagtgacttagttgggcagaaactgtcactagctaaccataaaggacagataggcagggagtgatgtatcctgacagaatcagaatataagcagggacaaacaggaaatcgctctcttctctacagagatgcaaagcagtcgagatgtagcaggcagaggagttgcaggtctggcattctgggtaagataagaccacatggaaatacttagattagtagttatgggttaataaataaaacagagctatccaataagaaaccctagtcactgggcaacaatttcatgactaatatagtgtcttcatgttcatttggggcagagaaaggcggcgggacctgcaggatgggaattactcatgttacagatataaaattatatcaattattagttatagggttggtaaaggtaggaggtagaaaattgcttagcacacataagaccatgaatgaataaataaataaaacatctattttaaaacaccagtatataaa

SEQ ID NO: 2226 - DNA, 568 bp, Cricetulus griseus
  misc_feature (154)..(189): n is a, c, g, or t
  misc_feature (483)..(483): n is a, c, g, or t
tcatagctaggtaagggctttctctttctgccccccaaccgaaccttaagaacggttctgtatatgtgagtgagtgggtgataacttttattttttgttttatcaagaaacagaagtagctttggccaggaatccattcttcctcagcattgcnnnnnnnnnnnnnnnnnnnnnnnnnnnnnnnnnnnntgaaatgataggttgtcctatgtccctgttaaaacattccagtgtcaaaaaactgcagtttgcaggtaagcggtctgaggctgacctaagtgaggatggaccttgggctacttactatacataatcctcgttcttgaagttcaaacaaggctcgaagaaaaagattgcccatgtaattacatctcagcgggttctttttcccatctgtcccacctttgtgtcaccagcgcccatacattggcctcaactattccttacattcacggaacagtttctctcaacatttctaacggncgaataatgtcatttagtggttgctttttgagtccgcatcagggaagcaagccctgctcaatatttaacaatcacttctacctgt

SEQ ID NO: 2227 - DNA, 578 bp, Cricetulus griseus
gcccggccgcgggcagtcgggcccgggtctacgccgaggtgaacagcctgaggagccgcgagtactgggactacgaagcccacgtcccgagctggggtaatcaagatgattaccaactggttcgaaaacttggtcggggcaagtgtagtgaagtatttgaggccattaacatcaccaacaatgagagggtggttgtaaaaattctgaagccagtgaagaaaaagaagataaaacgagaggttaagattctggagaaccttcgaggtggaacaaatatcattaagctgattgacactgtaaaggaccctgtgtcaaagacaccagctttggtatttgaatatatcaataatacagattttaagcaactctaccagatcctgactgactttgatatccggttttatatgtatgaactacttaaagctctggattactgccacagcaagggaatcatgcacagggatgtgaaacctcacaatgtcatgatagatcaccaacaaaaaaagctccgactgattgattgaggtctggcggagttctatcatcctgcccatgagtacaatgttcgagtggcctcg

SEQ ID NO: 2228 - DNA, 579 bp, Cricetulus griseus
tacctccgccggggaaagatggccgcgtgcgggctgtcccgacaggtacggagcttcagtacatccgtggtcaggccctttgccaaacttgtgaggcccccggttcagatatatggcatcgagggtcgctatgctactgccctttactctgctgcagttaaacagaacaagctggaccaggtggagaaggagctgctgcgtgtgggccaactcctgaaggaccccaaggtgtctcttgccgttctgaatccctatgtcaagcgctctatcaaagtgaaaagcctgagtgacatcacagcaaaggagaagctttctccgctgaccgccaacctcatgaatttacttgctgaaaacggtcgcctagacaatacccatggcatcatctctgccttttccaccatcatgagtgtccaccgtggagaagtgccctgcatggtgaccacagcatctgctttaaatgaagctgttctctctgagttaaagacggtgctgaagagcttcctgggcaaaggccaagtattgaacctgaaggttaagactgacccgtcaatcatgggtgggatgattgtccaaattggg

SEQ ID NO: 2229 - DNA, 567 bp, Cricetulus griseus
cttagaagagctcaaccgccgttaccaaccagcactgcggctccagaagcagcaactggtgaatggctatcggcgttttgatccagcccgaggcatggagtacacattggacttgcagctggaagcgctgacgccccagggtggccgctggcccctcacccgaagggtacagctcctccggcccctgagccgagtggagatcttgcctgtgccctatgtcactgaggcttctcggctcactgtgctattgccgatagccgcagctgagcgtgacctggcttctagcttcctagaagcctttgccacagcagcactggagcctggtgacgcagcctccttgaccctgctgctactgtatgagccacgccaggcccagcgggcagcccatgcagatgtcttcgcaccggtcaaggcccatgtggcagagctagagcggcgtttccctggtgcccgagtgccctggctcatcgtgcagacagctgcaccctctccactgcgtgtgatggatctactctccaagaagcacccactagacactctgttcctgctggccgggccagacacagt

SEQ ID NO: 2230 - DNA, 581 bp, Cricetulus griseus
cagctattcgaagagtccggaagacagacaataatcgcattgctagagcctgtggggcacggatagtcagccgaccagaggagctgagagaagatgatgttggtacaggtgcaggcctattggaaatcaagaagattggagatgaggacttgactttcatcactgagtgcaaagacccaaaggcctgcaccattcttcttagaggagccagcaaggagattctgtcggaagtagaacgcaacctccaggatgccatgcaagtgtgccgaaacgttctcctggaccctcagttggtgcctggtggtggagcctcggagatggctgtggcccatgccttgacagaaaaatctaaggccatgactggtgtggaacaatggccatatagagctgtggcccaagctttagaggtcatccctcgtaccttgatccataactgtggggcgagtaccattcgtctgcttacctcccttcgggccaagcacacccaggagaattgtgagacctgcggtgtgaatggtgagactggtaccttggtggacatgaaagagctgggaatatgggagccgttggctgtgaagcta

SEQ ID NO: 2231 - DNA, 84 bp, Cricetulus griseus
cactcaaaagggcggaattggggtacacgcgggctcccccaccttatcgaaggatcaggacacacacacgccctctgcccgcgt

SEQ ID NO: 2232 - DNA, 579 bp, Cricetulus griseus
ttggctgttcgagtgcatcgctcgccacccgagtttcccctgcgggctcccacgcacacccgccagctgttgccttctgcgaacatgtctaagtcactgaagaagctggtggaggagagcagggagaagaatcagccggaagtggacgtgagtgacaggggcatctccaatatgttggatgtcaacggcttgttctccttggcccatatcacacagctggtgctcagtcacaacaagctaacaaccgtgcccccaaatgtagcagaactgaagaacttggaggtgcttaacttcttcaataaccagattgaggaactgcccacccagatcagcagccttcagaaactcaaacacctgaacctgggcatgaacaggttgaacacactgcctcgaggattcggctctctcccagctctggaggtcctggacttgacctacaacaacctgaatgaacattctctccccggaaacttcttctacctcaccaccctgcgtgcactctatctaagtgacaacgattttgaaatcctgcctccagatattgggaagctcacaaagttgcagatactcagcctcagg

SEQ ID NO: 2233 - DNA, 600 bp, Cricetulus griseus
  misc_feature (30)..(30): n is a, c, g, or t
  misc_feature (38)..(38): n is a, c, g, or t
  misc_feature (46)..(46): n is a, c, g, or t
  misc_feature (51)..(51): n is a, c, g, or t
  misc_feature (56)..(80): n is a, c, g, or t
  misc_feature (83)..(103): n is a, c, g, or t
cacagagggacagtgtatcgccgcgtcaanacgaactncactcatnagggncgaannnnnnnnnnnnnnnnnnnnnnnnnggnnnnnnnnnnnnnnnnnnnnncggggcaatgagctgaccgccctgggagctctaccaaggcacctgaacaatataatgccaccgccttcaacttcctaaaccgtccccaactggccccaaggtcctccaacagtcctatatcttcccctcctccatcagtgccctgggagggggcggtcacagaacggggcattaccagccggcacttactcattgggctgccttctggagcaatcctttccctccccaaagccttgctggatccccggcgtgctgagatcccaacagaacaaagcagagaggagaacctcatcccatattctccagatgtgcagatccatgcagagcgattcataaactacaaccagacagtttctcgaatgcgaggcatctacacagcaccatcagggcttgagtccacttgtttggttgtggcctacggtttggacatttaccaaactcgagtttacccatccaagcagttcgatgtcctgaaggatgactatgactatgtgcta

SEQ ID NO: 2234 - DNA, 579 bp, Cricetulus griseus
agcgatcccggggtcagggcatcaagatggcgttgcgcgcggcgtgtgcggccgtgtgccggcgctggcggcaggaattggggaatttgtctgtaaatggttctaagagcagcacagcccaaactggtggcctcctgctcagcaccagtgtgaggtgggctccattgtcacgcttgcacatcgatgttccaaaggatttgaccaagcccacgataaccacgtctgatgagccagacacattgtataaacgcctgtccatcttagtgaaagcccatgacaaggctgtattagacagttacgaatattttgccgtgctcgctgctaaagaacttggcatttctattaatgtacatgagccgccaaggaagattgagcggttcactcttctcaagtcagtgcacattttcaagaagcacagggttcagtatgagatgaggacactctacagatgttttgagttaaaacacttgaccggatgcacagccaatgtctacttggaatatatccagcgaaacttacccgaaggggttgccatggaagtaacaaagacacagatacagcagttgccagaacacatca

SEQ ID NO: 2235 - DNA, 503 bp, Cricetulus griseus
  misc_feature (359)..(378): n is a, c, g, or t
taggctgcgacgaggtgaggcgaggcggcgttgctcggtgggcaccatgtcgaggcatgcgaaccgtggcaccgagagcaagaaaatgagttctgagctatttacgctgacgtatggagcgcttgtcacccagctgtgcaaggacgatgaaaacgatgaagacgtgaataagcagctggacagaatgggctataacattggagtccgactaattgaagattttttggcacgttcaaatgttggaagatgtcatgattttcgggaaactgcggatgtcattgctaaggtggcattcaagatgtacttatgcatcactccaagcatcacgaattggagcccagctggcgatgaattctccnnnnnnnnnnnnnnnnnnnngttggtggactttgtggagcttcccgatagccactcatcccttatttactccaacctcctgtgtggggtgctgcggagagccttggagatggtccagatggctgtggaagccaagtttgtccatg

SEQ ID NO: 2236 - DNA, 555 bp, Cricetulus griseus
ctcataaccaggccaagaagggggagggggcccataaccaggccaagaagggggagggggcccataaccaggccaagaaggggggagagggagctcaaaatcagggcaaaaagggggaaacaaatcaaaaccaggctaaaaaaggtgatggagtccagaaccaagcaaagaagggggaaggaccccagaaccagggcaagaagggggaagcaactcaaaaccagggcaaaaaaatggaaggagcccataaccaaggcaagaagacagagggaaccccaaaccaaggcaagaagggagaagggacccaaaaccaggctaaaaaattagaagactctcctaaccaaggaaaaaaagcagagggggcccagaaccagggcaagaaaggagagggggcccataaccagactaagaaaggagaggggccccagaaccagggcaagataggagagggggcccataaccagggcaagaaaggagagggggcccataaccagggcaagataggagagggggcccataaccatggcaagataggagaggggccccagatccatg

SEQ ID NO: 2237 - DNA, 485 bp, Cricetulus griseus
tttctgattgtgttcctgtgcagtgtttgtacatggagttgtgcactgtggaaatggcacaggggtcctttgtgaatttgccttttcacattgtttgaccatcttcctaattatctagaggctgtgtgatgttttatcagctggacatgccatttaaagttctgttcctgaatagttcatttgggtttaattgttgtctattatcaaaaagattgcggtcagcaaccctatgcatgcaactattatttcttattggagtatttttcttaagatttattttaaactatgtatgactgtgtatgtctgttcacatgagtgcaggtgcccatggaggctagaagaaattgttggatttcttatagctgactagttagtggctcaaagtcacctgatgtgggtgctgggacttgaactaggatcctttgcaatagcaataagcacttatccactgagccatctctccggcccctggattattattattc

SEQ ID NO: 2238 - DNA, 246 bp, Cricetulus griseus
cctctcctcattccaaccggaccacaccgcctgaagcggctcagaacggccagtcccccatggcagccctgattttactagcagacaatgccgggggcagtgatgcttggaaagatgccacccaggttcactccaccaccaggaggagcggcagcagtccgtcctcttcctcctctatgaaccaaagaaggtcttggccccatataggtggggggccatgccactggcaccacatgaggactggag

SEQ ID NO: 2239 - DNA, 567 bp, Cricetulus griseus
ctccaagtgctgtatccacaggaagctccagccccagcactccccagcctgccccccagctgtccctcagtgtctcctccacctgtccccaagcaccgtctcctgcaccccctttggaggctgtgccctgctgtgtgcagccttcatccccagccccagccccagcccagcgtcgcagtatcatctctaggctgtttgggacctcaccagctgcagaagtgtccccttcacctccagagccagctccagccctagaggccccagcaagagtccagaatgttgaggattttgtccctgaagatggccttgatcgaagcttcctggaagacacaaccctgcctaaagacaagaagaaaattggaaccaaaggcccacagcaggatagtgacagtgatgatggggaggccgtatgagggaacccaatggtggctggtttccaagatgatgtggacatagaagaccagccacatggcaaatccctgctgtcctcagaccccatccccagtaagaacatcagtctttccagtgaagaggaagatgaaggactggcaggccaccccagagtgg

SEQ ID NO: 2240 - DNA, 377 bp, Cricetulus griseus
ccctgagaccaactacctcttcatgggagactttgtggaccgtggtttctacagtgttgaaaccttcctcctcctgctggctcttaaggttcgatatcctgaccgcatgagtttgatccggggcaatcatgagagccgccagatcacccatgtctatggcttctatgatgaatgcttgcgcaaatatggttcagtgactgtatggcgctactgcactgagatctttgactacctcagcctgtctgccatcattgatggcaagatcttctgtgtgcatgggggcctctccccttccatccagaccctggaccatatccggacaattgaccgaaagcaataggtaccccatgatggacccatgtgtgacctcttgcggt

SEQ ID NO: 2241 - DNA, 395 bp, Cricetulus griseus
tgtgtatgcttttgtgtgtctgtactgtgtatacatgtgtgtgatatgtgtatacttcgcgtgtgtatatacttgtcttatataattgtagacaatttattgcacaaaaatgccatgaccaaaagcagtttgaggaggaaaggggtgattgtgtcttatacttctgcatcacagtgctttaacaaaaggaaactggggcaggaactggaattagaaacctataggcaggaactgatgcatacactgtggaagaacacttgtttcctggcttgctaagcctgcttttttatagcacccaggaccatcagcccatggatggccccacccatggggaataaagtcctcccccacagaatacgacccttccctatcaattattattaatcaataaaatg

SEQ ID NO: 2242 - DNA, 395 bp, Cricetulus griseus; identical to SEQ ID NO: 2241

SEQ ID NO: 2243 - DNA, 578 bp, Cricetulus griseus
agccaaaccagccctacagatggatatcctacaaacaggtgtctgatcgagcagagtacctgggctcctgtcttttgcacaaaggatataagccatctcaggaccaatttgttggcatctttgctcaaaataggccagagtgggtcatctctgagttggcctgttacacatattccatggtagctgtgcccctgtatgacactttgggagcagaagccatcatatacgttatcaacaaggctgatatccctgtggtcatttgtgatacaccccaaaaagcaacaatgctaatagaaaatgtagagaagggccttacaccaggcctgaagatagtcatcatcatggatccctttgatgatgacctgacagaaagaggagagaagagtgggattgagatattatccctgtctgatgctgagaatctatgcaaagagaacttcaaaaagccagtgcctccaaacccagaaaacctaagtgttgtctgcttcaccagtggaactacaggtgaccccaaaggagctatgataacccatcaaaatattgtttcaaacatggctgctttcctcagattgttggaa

SEQ ID NO: 2244 - DNA, 570 bp, Cricetulus griseus
acggatggtggtagagagtgtggagaggatcttccggagtttccccaggggtgatgctggagaggtcacatccctgctgaagctgaataagaagctggcgcggagtgtgggccacatctttgagatggatgacaacgacggccagaaagaagaggagatccggaagtacagcatcatctatggccgcctggactccaagcggcgggagggcaagcagctcagcttgcatgagctgaccatcaacgaggctgctgcccagttctgcatgagggacaacacacttttacttcgaagggtagaactcttctcattgtcccgccaagtagcccgagagagcacctatctttcctccttgaagggatccaggcttcactctgaagagttaggaggcccaccactgaagaaactgaaacaagaggttggggaacagagtcataccgaaatccatcagcctcccccaggccccgagtcctatgcacccccataccgccccagcctataggaggacagcgccagtctgtctggggagagcctatatggccacttgcaggctgtggggtcgtgcccaag

SEQ ID NO: 2245 - DNA, 579 bp, Cricetulus griseus
  misc_feature (57)..(100): n is a, c, g, or t
  misc_feature (508)..(522): n is a, c, g, or t
  misc_feature (554)..(554): n is a, c, g, or t
tttctagcagaaggccaagacgttagcacatttgtggctgaacagaaggtggaatannnnnnnnnnnnnnnnnnnnnnnnnnnnnnnnnnnnnnnnnnnncctttgaggagctgcgaaagcagctggagaagctgctgaaggaggacagcggtaaccagccggtgtttgactggatagaggccaacctgaatgagcagcagatagcatccaatacattagttcgagccctcatgacaactgtctgttattctgcaattatctttgagactcctctccgagtggatgttgcagtgttgaaagtgcgagcgagactgctacagaaatacttgtgtgatgagcagaaggagctacaagcactctacgccctccatgcccttgtagtgaccttagaacagcctgccaacctgcttcggatgttctttgatgccctgtatgatgaggacgtcgtgaaagaagacgctttctacagctgggaaagcagcaaggaccctgctgagcagcatggcnnnnnnnnnnnnnnnaaatctgtcacagccttcttcaattggcttcnaaaggctgaggaggaggagtctgat

SEQ ID NO: 2246 - DNA, 600 bp, Cricetulus griseus
  misc_feature (30)..(73): n is a, c, g, or t
catcgtgtggaaatgttgatccgcttcaannnnnnnnnnnnnnnnnnnnnnnnnnnnnnnnnnnnnnnnnnnntcgacccacgcgtccgaagctttcctacttgaaaaggcctgtggagaatataggtttatgggaaatttcgaagtcagtcattctctctctcttctgtctcctctctcctctatccctctctgtctctcttccctattaaatttctgaggagactggggtcttgggaggttgtccatgccggccaaccctacagacatgcattattgtttctggcttgctcatttattgactgatttttgcagtgctgggactcagacccaggtacttacgcacgctaagcagttactctgccattgagctaagctcaggttccagttttttcttttacttgatcatgtaagaagtaaaaatacctatgtagattaatctttttgaatatcaatgtcattacccttgctaattataaaataatctttaaattcatcagcttttattttatataaatataggctctatagaactcatcatgattgcataatatgtctgaagtttcatcttaacgctgaataaccaccgaccgtattcgg

SEQ ID NO: 2247 - DNA, 289 bp, Cricetulus griseus
  misc_feature (2)..(26): n is a, c, g, or t
  misc_feature (32)..(52): n is a, c, g, or t
  misc_feature (59)..(128): n is a, c, g, or t
  misc_feature (139)..(185): n is a, c, g, or t
  misc_feature (229)..(253): n is a, c, g, or t
tnnnnnnnnnnnnnnnnnnnnnnnnncggtcnnnnnnnnnnnnnnnnnnnnnccgcgannnnnnnnnnnnnnnnnnnnnnnnnnnnnnnnnnnnnnnnnnnnnnnnnnnnnnnnnnnnnnnnnnnnnnctgggcacctnnnnnnnnnnnnnnnnnnnnnnnnnnnnnnnnnnnnnnnnnnnnnnnaccaagcatgtccttactggctcagctgataacacctgtccgcnnnnnnnnnnnnnnnnnnnnnnnnncactggccctacggaaaaccaactaacccgtccaaa

SEQ ID NO: 2248 - DNA, 526 bp, Cricetulus griseus
  misc_feature (4)..(36): n is a, c, g, or t
tcgnnnnnnnnnnnnnnnnnnnnnnnnnnnnnnnnngtcaccatggacgccgagatggagttcaactgcgagatgaacaagagaactgggcaacccatgatccacatctatctggataaggagacaggaaagcctaaaggtgatgcaacagtgtcctatgaagatgcacgaactgccaaggctgctgtggaatggtttgatggaaaagattttcaaggaagcaaacttaaagtttctcttgcccgaaagaagcctccaatgaacagcatgcggggtggcatgccacctcgagagggcagagggatgccaccaccacttcgtggaggtcctggtggcccatgtggtcctggaggacccatgggacgcatgggaggccgtggatgagacagaggaggcttccccccacggggaccccgaggctcccgagggaacccctctggaggaggaaatgtccagcaccgatctggagactggcagtgtcccaatccgggctgcggaaaccagatctccgcctggagaacagaat

SEQ ID NO: 2249 - DNA, 432 bp, Cricetulus griseus
cccgtgggtgaaagacgagcattacacgaaaactggccatttagggatgagcatggtgaacagagcataactgaaatgatggcttggcaggcgttacgggtagactaggcgcaggatgctgagtgccaggccttgagactacaggtggcagcaggagatggagctgctcatcccctaccagggcaaaatcaagagcgaacggaggcccaccacgagcgccagctggaaaatctagagcatagggtgtgtctgcgcacagcgcatcttgagctaaatattgaagaggagctagccgccctgcaaagagatcgcagcgagagaatcaagattctcctggacagacaagatcgagagacggagacttttgacatggacatgcctctaatgggattagggaattaggggaccttagattttcctaaggaggaccat

SEQ ID NO: 2250 - DNA, 482 bp, Cricetulus griseus
  misc_feature (5)..(33): n is a, c, g, or t
gactnnnnnnnnnnnnnnnnnnnnnnnnnnnnnaagacgagcagacaagaaaactggccattttggcagagcagtatgaacagagtataaatgagatgatggcttctcaggcgttacggctagacgaggcgcaggaggcagagtgccaggccttgagactacagctgcagcaggagatggagctgctcaacgcctaccagagcaaaatcaagatgcagacagaggcccagcacgagcgcgagctgcagaagctagagcagagggtgtctctgcgcagagcgcatcttgagcagaagattgaagaggagcttgccgccctgcagaaggaacgcagcgagagaatcaagattctcctggaaagacaagagcgagagacggagacttttgacatggagagcctcagaatgggatttgggaatttggtgacattagattttcctaaggaggactatagatgagattaaatttttttgccatttaca

SEQ ID NO: 2251 - DNA, 600 bp, Cricetulus griseus
  misc_feature (9)..(63): n is a, c, g, or t
  misc_feature (71)..(72): n is a, c, g, or t
  misc_feature (76)..(77): n is a, c, g, or t
aatacgggnnnnnnnnnnnnnnnnnnnnnnnnnnnnnnnnnnnnnnnnnnnnnnnnnnnnnnnacccgggnncccnncccctcgagggtgcgacccacggcgtgccggaaaaaaaaaaagccaggggattcatgtttgggtatgttataaggggagggacttcatcagatgtggacgatttctatctatatccaactctgcaggttggagttagcataaaacttggaaaaatctactggggctttctttcctgactgtgggtcattttctttggggttctcccttttctgatcaccggttctaaacagctttgccacttttgtgtcccaaggcaataaataggaaacaaaactttgtaaaggggaacaagaaaagttacctgttaccctatcaaagtccactgtctcgggtgacactaacgaggacatggggaaggggacactggagtgtgttatcttggggtgctgatgcaggtgcagggtctcaaatatacaaccaggtggtatttctcaaaagttggccacttggttctgaatcctatcctcttaatttctgcaggaaagttaaagttacatggtgttgcattttgttctgggtggg

SEQ ID NO: 2252 - DNA, 579 bp, Cricetulus griseus
  misc_feature (15)..(34): n is a, c, g, or t
  misc_feature (71)..(95): n is a, c, g, or t
  misc_feature (174)..(202): n is a, c, g, or t
  misc_feature (472)..(484): n is a, c, g, or t
  misc_feature (486)..(498): n is a, c, g, or t
  misc_feature (508)..(539): n is a, c, g, or t
aaaaccagctacttnnnnnnnnnnnnnnnnnnnntaggttaagagcactgcttgttcttccaaaggtcctnnnnnnnnnnnnnnnnnnnnnnnnngtggctcacagccatctggaatgagatctggtgccctcctctggcctgtaggcaacatgcaggcagaacactgtacacnnnnnnnnnnnnnnnnnnnnnnnnnnnnncttaaaaaaataaaataaaaccagctactttttttccaggtgtgatggtatacactcaagtctgctgaggcaggattgttgtaggttctaggtcaagcttcactacagtacccttgtctcacatcccctccttcagtgaaagaaagaaaatacctcttaatcttgttatggaaaagtcagatcttcagcttgcttcatcacttgactataagagatgttttaacttcagaggaataatactccaacaaagctgggcgttggtggcgcatnnnnnnnnnnnnnannnnnnnnnnnnnaaggcatgcnnnnnnnnnnnnnnnnnnnnnnnnnnnnnnnnccagaacgagtgccaagataggctccaaagctatacagag

SEQ ID NO: 2253 - DNA, 532 bp, Cricetulus griseus
ccctccaggaaattagaatgtatccagtgctggaccctggttccctccaggaaattagaatgtatccagtgctggaccctggttttcctttaaagtcagtaggaaagtgaaaacgcaaaataaaggaacttcagtgtaaaattaaaggcgagataaagaatgtgcatagaaaggctattgattttgttttaactaaaggatgataacctgctagaagcaaccgagaaacttgaagtctgagctgcaacttagagctgggttcaaaagtcagaggcagggactgaggattgagaaacaggcttggtatcagccatgctttgatacaaaccagggtgtactgtgtacaaacatcactgtccttcagacttttggtgaaattacacaataaagaggtggtcattgttaactaaggcattaacagcctaaacagtgctgctccgagttcatgggtcaaagtgagggtgcagtgtacagtgttaccgcatcagagaacggctggaaagatttccctaatgacccctacagtttaact

SEQ ID NO: 2254 - DNA, 521 bp, Cricetulus griseus
  misc_feature (39)..(53): n is a, c, g, or t
ctagaggaactcatgggcttctaggactcagtttccccnnnnnnnnnnnnnnnttggccaagggaggagctcagtggaggagcctcatggatggaggctgctttcctctctcctctggaagtcaagagggtaggatggaccctgtcaccccacacagtgacccaccccagtcaatcagcctttcctgagcccatggccccaggattagaaagctcctccatgaagctagctgcctggtggctggtagggagttgacagaatcctccagccacactaaccctgttgtgtacatcctgttttcaataatgactcaccccactaatgtccatcagagcccccaaatggactgactttctttggaaataaggtttttatatgagacaatgctggctttcaatggactttaagaaggccatgtgtagacacagacacatagaaggaaaaagaacagcaatgaccacagccaagaggggagtgaggaccttctgcatccccaaggtgctgggagagccaggaaggac

SEQ ID NO: 2255 - DNA, 214 bp, Cricetulus griseus
  misc_feature (157)..(157): n is a, c, g, or t
  misc_feature (172)..(172): n is a, c, g, or t
ccacctttcactcacccgaggaggccacagaagatggcgtattacgggaagatgagttgtcacaacgactatgagaattacattgagatcgtaaaatacgtgttccgggattacaggagggagtccccactcatcatcaacacaatggggctgggtngaaagagggaccgcnctgcttgcctgctggtgggaccctgatcccgactggttgtgc

SEQ ID NO: 2256 - DNA, 386 bp, Cricetulus griseus
gccctgttgcatttactattgcaacaccagagcccataacaagtacttcaatatggtggagtctcattgtttcttgaatggtgattggataaatttacaaaagcatattagaaggtacagtacagcaaaggacagaaagctctgagtgcttggtaagtctgaaacctaaatgctaaaaaagacaggttggagttttctacaaataaaatggacgatggtgaagaggaagaggatgaatacgaacaggaggaggaataggaagcggaggagggagaggtaccttccctgaaacaagaactccaatgcccagatcatgtttattaattcactaaatatttattaaacatctacagtgtgccagatggttgtctagtcattccatatga

SEQ ID NO: 2257 - DNA, 580 bp, Cricetulus griseus
atctttggctctcagaagagaccgatagtggagttctctttagaggatcgaaggaaacttaaagtaaaggagctgaggatccaacgcagcctgcaaaaaatgtcatctaagcctgtaaccggtaagccccaaaaggagcaaaaagaacatgggaaagacaagcaacagaaagcagtgaggcctacacagaatcccagccaggcttctggagagcagaaagggaaggcccgccccacctcgtggacagggttccagaccaaggctgaagtggagcaggtggagctgcctgatgggaagaagagaagaaaggtcctggcactcccttcacaccgaggccccaaaattaggttgcgggacaaaggcaaagtgaagtcccttcctcctaagaagtcaaagccccagacaggccagcggaaacagaagcagcagcagttaccttctttgcaggcacctaagaagaaagctaaggaaaataaggcagaagcccacttcaaccaactggttgaacagtataagcagaaattgttgggtccttctaaaggaccaccccttatgaagagaagcaagtggtttgatactt

SEQ ID NO: 2258 - DNA, 214 bp, Cricetulus griseus
  misc_feature (63)..(78): n is a, c, g, or t
  misc_feature (80)..(94): n is a, c, g, or t
  misc_feature (109)..(128): n is a, c, g, or t
  misc_feature (181)..(203): n is a, c, g, or t
attattttccttattcttattctattgaccttacctgtaataataactgtatttaacttctannnnnnnnnnnnnnnngnnnnnnnnnnnnnnncaacaattgagctgnnnnnnnnnnnnnnnnnnnncgcactatgcactttagtggagggtaacactgaattgctaattactaattggnnnnnnnnnnnnnnnnnnnnnnngaagctatccg

SEQ ID NO: 2259 - DNA, 580 bp, Cricetulus griseus
aagctaggataagtgattatttgaaagcctaaccctttgctgggtctgagatgagcaccatttgtgatccttcttcaagggcagtgttgtgatccctctagtgtcattataatgatccaaattaaacgaaagatgacaggtgcctagaatggaggcaggcattttatgttgaatataaggagacagcctgtggaccatttcccttcagacaccctttgcagggtttccatgtcttgtatccaatgagtctaagccatagattttgacctcttagacttttcatctctcaactgtgtcatcctgtactgttgaagaagctactggctggttttgccactcctgaactgtttccctctgtgcaagctatcttacttagcacagccccagcacatactggctgcagtgtgtgcctcctttataaaagcactggaatatgagctgtactctagccaaacctgtaggaaggggtgtctttcctaatctgtggaatttaggtgcctcttcccgggcattctgtttgtgtaattagtccaacagaggggcacatttctctgactgtcctcattgtacccatggcagg

SEQ ID NO: 2260 - DNA, 581 bp, Cricetulus griseus
gggagcggcggcggcagacgcgtgtggcgaccggcgcgggaaagcggcttcctagttggggaagcgttagccccggggcagctgtcaccggtgtgctactggaaggccccttcagcgagcttctaggagcttgagacggtcacggtgccctccaactctcagctggaaggaaagatggttgaagcagatcgcccagggaagctcttcattggcgggctcaatacggaaacaaatgagaaagccctggaagcagtatttggcaagtatggacgaatagtggaaatacttttgatgaaagaccgtgaaaccaacaaatcaagaggatttgcttttgtcaccttcgaaagcccagcagatgctaaagatgcagccagagatatgaatgggaagtccttggatgggaaagccatcaaggtggagcaagctaccaaaccatcatttgagagtggcaggcgtggaccacctccacctccaagaagcagaggccctcccagaggtcttcgaggaggaagtggaggaactaggggacccccttcacgtggaggatacatggatgatgggggctattccatgaactttaa

SEQ ID NO: 2261 - DNA, 578 bp, Cricetulus griseus
  misc_feature (507)..(507): n is a, c, g, or t
gatgcttgagttccaaaagtgtgtggtgtttgttcctcctcattctcttctgagactgttgattttaaacacttgattgtggaagaaaagcttgtatgaaccccctcccccccttacccttccatgtcccaaaaaagcaaccaacagtgaagctttgtttcattggggaagtccccggagcaggtgggaaaggccatggagaatggcaatacaactgggtcttgagctaaataaatgggagcttctctggtgcccttacttcctctgcacacttggacccttgagccagaggcagcccctaacaggtgcccaagccacaagttaagggggcttttgtctgaaggtcttcttagggccagactctgaggacactgccaccctagagcacatgcatgcccagccatcgtccctgtttcctggccttggagcatcgtgccttcagctgcccttggaatcatgagagacttcaatcctgcctcactggcttccccatctgtcccctactangtactgtgctttctcagttccccaccacgagcttcatgggccactgtcactgagtgtccctaccatcttgt

SEQ ID NO: 2262 - DNA, 505 bp, Cricetulus griseus
aaacaaacaatctaaaaagcctgaatgcttggagtcataccttcatatccagttgcaatcaccaatagtgaattgaattagtggtttttaggttgatatcaaggagctacttaagaccaaggtcttttaataaccctaatataaaatgtctagttattatttacaattctagagagcagtcatcaggttctatatgatggcatctgttcttaaatgtctctgtttatttttctttttatttagagtaaaattaagaagcggtcatgggttctccatgagtgtttggagagagttcctgaaaatgtggatgctgccaaggagctgctgcagtatggattgaggggcacagacctggaggctctcatggctatagggaagggggcagaccacggcaggttggttctggagatcatgctcactgcagagggaccgggagaaaagtacgctgatacatctaaccaggggaccttaattcaccattgaagcctttgcagggaccacggct

SEQ ID NO: 2263 - DNA, 578 bp, Cricetulus griseus
  misc_feature (569)..(569): n is a, c, g, or t
agctacctgcggcgcgggagtcctcagctctgggtgcgtggcatccacagccggccggagcagcaccaccagctttcataggaggagcaaggcctctggggctgacggaggtggccctcggctgctgtccattgcgggcactcgaccgtcggtgcggaatggacagctgctggtgtcaaccgggctcccagccctggaccagctcttaagtggaggtttagctgttggaacagttcttctgattgaagaagataaatacagtatttattcacctttgctcttcaagtatttcctggcagaaggaattgtcaatgggcatactctgttggttgcatctgccaaagaaaagcctgccgacattttacaggaactccctgcaccactacttgatgacaatggtaaaaaagagcttgaagatgttcataattctaaaacaccagaatcagatgttaacatgaaaatagcctggcgataccagttgcaacccaagatgcaagttgggccagtgtcatcttcacgatttggtcactattatgatgtatcaaaaaggattcctcaggagctactangaagttaaa

SEQ ID NO: 2264 - DNA, 505 bp, Cricetulus griseus
  misc_feature (32)..(47): n is a, c, g, or t
gaaaaagaacagaaaagaagattattacaaannnnnnnnnnnnnnnnacacaatcagaagtactttaaaaaagcatgtgcattacagagatcagaaagaaatgaattctcttcttactgattatgccattgactcaaaatccaaggatgtcaagacaaacgtgggtctcaccgaaataaaaaatgccttaaagaaacagatatacagagacgtatatagagctcaggctgtacgatacaactgcattagaatagataaacagcctgtatacaatgtagaggttaagaatgcagagctccccagaggaatattaaacttaattgaaagcctcatagagggacaattctttaaagaagccattgaagagctttgctctttgcaagcccattatgtccctcctgtgtgccttctccacacccttctagagaatgtcctacaggataacatagatacattttctggtcgatactttcatatattatcagctcttcttcatctgcatcct

SEQ ID NO: 2265 - DNA, 523 bp, Cricetulus griseus
  misc_feature (139)..(153): n is a, c, g, or t
agggccacgtagcttaggcggtccgggtagacggcgcatcttcctcatggcttctgcggacacctggcgtgtgggggacggcgccgggggcgccttccagccttacctcgattccttgaggcaggagctgcagcagagnnnnnnnnnnnnnnngtccgtggcggtggcggtgctcgcggtcctgctgacgctggtgttctggaagttcatctggagcaggaagagcagtcagagagctgttctcttcgttgggctttgtgactctgggaaaacgttactgtttgtcaggttgctaactggccactacagagacacacagacttccattaccaacagttctgctgcatacaaagtcaacaataacaggggcaacagcctgactctgattgacctccctgggcacgagagcttgaggcttcagttcttagatcgctttaagtcttcatccaaggctgtggcgttcgtggtggatagtgcaacgttccagcgggaggtgaaagatgtggctgagtttctgtatcag

SEQ ID NO: 2266 - DNA, 579 bp, Cricetulus griseus
aaactaatctatgctcatgtagaagtctgatctagagcactttcagggagatgactaatataacaaaaaaagttaagataaggtccccatgagactgaaagaaacacatcatataacttttcactagtattgaaatcatactagcttggtatagacaatggataggatgtggggaggaaatccttcttgaaatttttaccggggcttcttttctaccaaatctaatgggggcagtgcagtgatcaaaaaggaaattaattgtgccaatttataccattttaagtcaggagaaccattttaataatgacagtacaactgaaaatcaaacaattgtttggtgtacaattatgaagtcgttcctggaaatgaaagttaaatgcattgtctctctggaaaacactttgagtatgtgtgatcatttctgctgatgacattaaatgacagtcagatgctaactactccctcagtcaactatgagcaccagtaatggtaactaaggaaaaatctatatttagttttcttatctatagtagttctaattaatgaatgctttgttaatgtgcatatatgtgtaccatg

SEQ ID NO: 2267 - DNA, 570 bp, Cricetulus griseus
ccggttacgactagtcctgccatccgcagatcccgagccggggtgcaccatgcccgcggtgctggggttcgaaggcagcgccaacaagatcggcgtgggcgtggtgcgcgacggcaaggtgctggcgaacccgcggcgcacttacgtcacggccccgggcacagggttccttccaggtgacacagcccggcaccatcgagctgttattctagacctactgcaagaggcactgacagaagctgggttaacctcccaggacattgattgcattgcttacaccaaaggtcctggtatgggagccccattggcttctgtagctgtcgttgcccgtactgtggcccagttgtggaataagcctttggtaggtgtgaaccactgcataggccacattgaaatgggccgcctcatcactggagccattagcccaactgttttgtatgtcagcggaggaaatactcaggtgatttcctactcagaacatcgttaccgcatctttggggaaactattgatattgctgtgggaaattgtctggatcgttttgctcgagtgctgaagatttccaatgaccc

SEQ ID NO: 2268 - DNA, 515 bp, Cricetulus griseus
agggataggtacaatcaccaccaccctggaaccaagggtctctcacaccattgctcagtgctgaactataactgccacccatccccacataccaaatagagcagtggcaacctctccctcccccgacctaactcttggaacttagtcctcctcctttcttcccattaagtctgagaggtaagagctaggttatggaaggaagggtttggccagaagtgggaatagccaagtgccccggacctctcatcttccctccgtcctgctttccacctcccttgggtacacacacagccttttgggaacagccggggccaggactgggtcacctatgagctgaatcagcctctcctcctgagtcccagggcccctgcagttcccgagtctgttttgtcctgcagcctcttgccctctggttccactttatatccaccttttccttttgttcaattcttatctttatttcttttattatcaaatgatgtggtctatggaaaaaataaaaatctgacttagtt

SEQ ID NO: 2269 - DNA, 436 bp, Cricetulus griseus
  misc_feature (234)..(290): n is a, c, g, or t
attttagttcactctgttcctcacaagtctcttcagtaaattgtcctgcatctagacttgcagtcattactgaataatagtgtgggttaaattagaatgccattgtggggtaagtgagatggtccagtgagaaaagtcctagcccagaactcacacagtggaaagagacaaactactcccacaaactgccctctgacctccatgcctataccatggtaaatagactagatatannnnnnnnnnnnnnnnnnnnnnnnnnnnnnnnnnnnnnnnnnnnnnnnnnnnnnnnntaaaaatatttagagaataacatcggtgtaaaggattatagggaagtaaggaaagaggtttgggaaaaatgaaaaagtagaataaagcatctgtttggatccagtctagatgaagatacaattcttactattattggggatagaga

SEQ ID NO: 2270 - DNA, 577 bp, Cricetulus griseus
  misc_feature (3)..(15): n is a, c, g, or t
  misc_feature (167)..(181): n is a, c, g, or t
tcnnnnnnnnnnnnncctctttttacattttgaaattttaaaacagccaaacttaggtgtcctgctgtcctcagggtcccaagggaagggaccctgggcaggtctagcaccaagtccaccccactattagctttacgtggactcgcaatgggcagcaagcagtagtnnnnnnnnnnnnnnnacctgcctccagcaataaacttctaaatatctatctctacctccatcaaaataactatggtgagaattaagaggaggaggaaatcagccatacaggagatgcccctctgctgagtgtccaaggacaaaaaaaccaggccactagggaaaggtgtccagatggtaggaacagagtcattaagatgggtggcctgatacacagatttcagatcaataatgacacaagggtaggctaatgtaacctacattagaaggtgtgctgttgtactgagtagacagacccactgattccccaaaccgatttggctctttccacttgccagatatcagggtgggttccctgccttccgcagtacgtcatttagtacttttcagttggttgttttaatgcttcttc

SEQ ID NO: 2271 - DNA, 226 bp, Cricetulus griseus
  misc_feature (165)..(205): n is a, c, g, or t
ctggtaatgagccacggcctgtgggaacctttttctctctgtgaactaaaatctttcaattgtcacagggttgttttgctatcctaggtctgtatacataataattaaatctttttttaaaatgaaggaatatacacacactgagtaataacaaaaataaacaannnnnnnnnnnnnnnnnnnnnnnnnnnnnnnnnnnnnnnnnggttttttgagacagggtttc

SEQ ID NO: 2272 - DNA, 179 bp, Cricetulus griseus
cgctaggagaggtgaggggcgttcggttgaggcgaggcgagggctggagctccggggacttgcagggtttcaggtctcggtggtcccgcgagaaagagaggctagggtcctgggatctcaatccagggcagaattctctactttgaggaagccgggatgaggatctgcgggaccgctct

SEQ ID NO: 2273 - DNA, 574 bp, Cricetulus griseus
ggatcagaagttcaaggcctgcctaggtgccagagtgagtataaggctagatatctggataactaagtaagatcctatttcaagaaaagtaagctgggtggggagtgcgtaggtgtgtgtttagatggctcaccaggaaagggcaaccattgctgagcctgccatagagcagagtttgatccttgaaacccatatgacagaagaagggaacaaattcctgaaagttgtcctctgacctccacacactcaacatggtaggccttggtgccccttctctgtctacatgcacacacaaaacaaagaaatttaaatgtactattttttcaacaagaaagggaggggaaaaaagggctgagaattggtggcagaactgttactcagtttacatgatgtcctgggtttgccctctagcaataaaacaaaaaaatcaatccgggttaaggatttcctttttgtgacttctttgctcaaaataatttaaaagctttcccttgtacttagaaagaaatctaattaatgacttttcattgttctctaagatgataccatatgatctcacctctctgatctcatt

SEQ ID NO: 2274 - DNA, 566 bp, Cricetulus griseus
cacctaagctaatgtctggggtccacaaacacatattcacacgtgccctcaccactttccaacagaagctgcgactggagcaaggaatcagtctggactgcacacctcatcaggaggcgctgtttctcattttccttcattgtataaatgaagtctacattttgagctggactttttaattaatacatgtctcgttaaagatccaacaagacatctctcctttcttgcctttcagaactttgaaattcaagcaccacaggcctctatgttctgtgtaatacatccaagaccctcatataccacttcagatagcagatttgctcagcggggaacgtgcatacaattaacttattaacaataatgaaatgctgtaatcttgtgcatgctcatattagaatctgaagcccatgagtacattccaagtgatgatcacggcagtatccacacattatgttgatattatatatgcagcttatgtgacaccaaaatcacctatcgattatacaaaattaattcaatttgttgtttgtgtcatatgttctctctcactctctctctccctcccc

SEQ ID NO: 2275 - DNA, 455 bp, Cricetulus griseus
acatcaccaatgcctccggcagccaccacgtgttacgcaaagcccacaccagggtggatctggtgaccatggccacttccaagaatggtggcatctacctgctagccaaccagaagggctgcgacggtgaccgcctctactatgatggctgtgccatgattgccatgaatgggagcatctttgcccagggcacccagttctcattggatgatgtggaggtcctcactgccaccctggacctggaggacgtccggagctacagggcagagatctcatctcggaatctggaggcaagcagggtgagcccgtacccccgggtgaatgtggattttgccctctctgtaagtgaagacttactggaagaggtgtcagaacctatggagtggacataccacagtcctgaggaggagataagcctcggacctgcctgctggctctgggacttccttcgtcgg

SEQ ID NO: 2276 - DNA, 564 bp, Cricetulus griseus
gcttcaccaacacacagaacagttggtacaggatcagtatggcaattatgttattcagcatgtactggaacatggtcgacctgaagacaagagcaaaattgtttctgaaatcagaggaaaggtgttagccctgagtcaacataaatttgccagcaatgtagtagagaagtgtgttactcatgcctcccgtgctgagagagctttactgattgatgaggtgtgctgtcagaatgatggtcctcacagtgccttatacaccatgatgaaggatcagtatgccaattatgtggttcagaagatgattgatatggctgagcctgctcagagaaagataatcatgcataagattcgacctcacattactactcttcgaaaatatacatatgggaagcatatactggccaagttggaaaaatattatttgaaaaacagcccagatctagggcctatcggaggaccaccaaatggaatgctctaagggaaaggagaagattcaaccatgtttaaagaatgggttttctttgtgaattatcaaaacacaattcaactatgaatctttgattg

SEQ ID NO: 2277 - DNA, 467 bp, Cricetulus griseus
gagggtcatcctcacgagcacaggcatttcgtcgtccgacatcgagctggctggcttgtctctggccgagggggtggcagcgacgctgtcggtgaacccctgagagctgggcttgggtgggagaagcttgacagggacagacacgggcatgaccataggcgtgaggcgttctgcctcatgagggagcggtggcggcggatgcggaggtggcagtggcggctggggctgaagctgaggcggtggcggtggggccttctctccttcctcctacacagacaataaatgctttgatcctgggctgagagcagctctcccaagggggatacacttgcttctccttagagtttccagggcatcagtggtggggaacaaagtaccacagctgggggtttccttcctctaactctgggtccctgagccacattgaaggtatcatttctatatgaaaatatttttaaaaagttggt

SEQ ID NO: 2278 - DNA, 121 bp, Cricetulus griseus
aaatcttgtcctatctaaaaaccggagacagccagtatccaggcaagcagagtgcctactccaggtatcagccccagagcggatactgggtgattgggctgcagcataagcatgaatacat

SEQ ID NO: 2279 - DNA, 121 bp, Cricetulus griseus; identical to SEQ ID NO: 2278

SEQ ID NO: 2280 - DNA, 567 bp, Cricetulus griseus
cttcttgcatacctgggtcctccggagcacaagcccgtggcagatacacactggtccagccttaaccttaccagttccaagtttgaggaatttatgaccaggtaaaagacaactttaaaagggtgattgtattggggggcggggttcataaacaaaatttaccagcataccacttagtaagtgattgtattgcatttttgtgaccatgtttgcttgttttgatatgttgatttccttataaacataatggtgtcatttgtttgcttatttgtgtgtgtgctggtgtgcccttgtacacagttagcatatgaagtcagagaaccgcctatgggagtcatttctgcccttccatgtgtcccatggatcaagctcaggttgtcaggctgagccaccttgctggctctctttgtcatgtttttcattcaatactttcaagaacatataggtaacattttgttatcataataggaagataacagacataattgacctggattcacacctgattcatgggtcttttgaattcaagttctaaattctttctatcatactaactttgaatccttt

SEQ ID NO: 2281 - DNA, 545 bp, Cricetulus griseus
  misc_feature (85)..(129): n is a, c, g, or t
gacctatctcataccaacattttccaaacctaactgtcttcatagtgtaagatagaaacagatttaagcagggctttggccggannnnnnnnnnnnnnnnnnnnnnnnnnnnnnnnnnnnnnnnnnnnnagttggaggccagcctgctctacagagcgagtgccaggacagccaggcctacacattagagaaatgctgtcttgaaaaatcatacacacacaacacacacagattggacaagttatgcatcctgggatgggaagggggagtgtctgtgatgtatgacacacagcaagggccctgataccccagctcatgcttgctgaaggaatgaactgtgacactcatgaaccatgttggcctagactccctactccctccccagtctctgtacttggattttttacctcctggaaatatttattttcttaaggaaataatagtttattgtgactttttcttttgggaggggcagctgaaatgtcaggctctcggcctgagttcagagtggtgcacatggcagagagtctcctaacaacaaagcc

SEQ ID NO: 2282 - DNA, 483 bp, Cricetulus griseus
gggaaaaattaaaatgattgacatgcctgtagaaaggatgcatcctcatctgtccaaaggctacgcatatgtggagtttgagaatccagatgaggcagagaaggcatctgaaacacatggatggaggacaaatagatggccaagagatcactgctactgccgtgttggcaccctggcctagaccacccccacggcgattcagcccacccaggagaatgcttccaccgcctcccatgtggcgcaggtcacccccacggatgaggaggaggtctcgatccccaaggcgcaagtctcctgtgcgtaggaagtctcgatctcctggccgccgccgccacagaagccgattcagctccaactcctcccgataagcagggacattgattcgtacctctgtaacttatgttccccctactcagttttgtcctttctctagccaaatgtggatccaaagggaaggatcccacaccagggtggtctttgaag

SEQ ID NO: 2283 - DNA, 441 bp, Cricetulus griseus
ctttgaagggagatgattgtgactgtcatcctgaatttctgccacctccaatgaaacaagtacctgatgcaggctagctgggagataagaaaggtctgtttggctcaggattctgaggggtcacaaagtgtgctgcttatgttggctcagttctgctgagggctgtggatggcgatgaccatagagaccaggaaaccgtgagagaaaggaagagtctgacgccccatagcgtctcgagattacccacggtgacataaaggcctgtccgtgggtcccacttccgtaaagccttcacagcattcccgtcctgccacctgggaccttggtgagactaaactgcagcagttgtttccagaaagcactgaggcgagataggactcggcagtcatgagctccattggcttgtgtagggggctcggatgtgacccctgacacccatca

SEQ ID NO: 2284 - DNA, 246 bp, Cricetulus griseus
agacaatcaagctaaaagccccaccactactcagtcacctaaatcttcctttctggcaagcttgaatccaaaaacatggggaaggttaagtgcacagtccaacagcaacaacatctatcctacacgatctgcaggagtcagtggtcttgctcggtcatcctcaaaagacaccatatccaataatagagaaaaaattaaaggctggattaaggaacaggcacataaattcgttgagcgttactttag

SEQ ID NO: 2285 - DNA, 472 bp, Cricetulus griseus
tagtctacatctctcatcccggacaaggtgggaagatgtggtcaagcgatattcttcgcttcgagtacagggtagtaatctggcagaagtcttccaatgagacacagagtattacaaccacttattatacagaaaagatttcaaaactgttgccagagactacttactgtttaaaagttaaagcaatacattcgtccctcgggaaacacagcaattatagtgcagtgcaatgtataaacaccacataggccatcaagatgccagtgccggaaaacatataagtggatgcccgtggtgagagctatgttctgaaatgggactgtgcgtctacagacgtgagcttcagaacgcagtggctccctggctattttaaaagtatctctggaagctcttcaaatgaatggaaaccaatacctacctgtgcagatgtccaaactacgcactgtgtcttttctaaaaacaccatccacac

SEQ ID NO: 2286 - DNA, 92 bp, Cricetulus griseus
cttcttatcaatttactcttccttgcaattgcattctatattttctggctatggcttctatgaaaaaaaatctctggttttctgttttgaca

SEQ ID NO: 2287 - DNA, 455 bp, Cricetulus griseus
gacctcagcttttgcccgacaaccccgtgatgaacttgagcgtgtgcgtgtcagctgcgccatcatcttctttgccagcatcttccagtttgccatctggactgcagccctgctgcaccaaacagaaacactgcagccagctgtgcgatttggtgggcaggagcatgctttcatgtttgccaagcttgcactgtacccctgtgcaagcctgctggcctttgctgccacctgcctgctgagccgcttcagcacagccatcttccacctcatgcagattgcagtgccctttgccttcctgctgctccggctccttgtgcgccttaccctggcggcccttcaagtcctatggaacctccggccagagcaccctcaaccaggccagggtgaacctgaggcacagtctcagctcttgcctgccccctgctaatgccaaggaagccacatgtgcccattgc

SEQ ID NO: 2288 - DNA, 573 bp, Cricetulus griseus
  misc_feature (217)..(245): n is a, c, g, or t
aaaacgtccttctgccttagcttcagagtcgtgttagccttcctggtaaacagaaggttgagtctgcttgaggcagcattcaaactgcagagcaggcagcattggacctaatgttcatagaactaaggttcttgatttggactagctttattttccataggttatttatttgacttttctcgttcagaatgctcctcgggagtttccagctctttannnnnnnnnnnnnnnnnnnnnnnnnnnnnaaaggagaatgttcggactgtggtgaggacagtaactctatcaagcaagcaaggaggtatagtaggtctcaagagttgttgggctctacttttatgtaattgggaacacaatgtccttgggtgatacgtttgttcactttgtagttcttgatcagatatgaggatgaaaattggtactttttaacctgttgtttaaaaagttagaattcttgttcaggcagtcaagtttattggctgtccattttgagtaaagaatgttattacatctttaccgtataataaggacttgtcttaatttggattactattgctatgatcaaacaccata

SEQ ID NO: 2289 - DNA, 432 bp, Cricetulus griseus
  misc_feature (205)..(219): n is a, c, g, or t
atatctatcgctgcatggacgtattgctaggggaactggcaccataatactcagctggaggtgatgtaaagtgctgccctcggatgtgtgcattgtggaacatagtcccagattatatccactgtacctctaagataacatttaggaaattatgtgactattcgaaatgttttcagaggtgtatccttggtcacttctgggagcnnnnnnnnnnnnnnncatcagagccgctcaagaggcttttgttccataatgtttatccaagagagaagatttgaaatagccacatggccagcagcacgaggtggctgatcagattatgttttccacaaatggttctggaactcctgtgactaggcagagcagctcccttcctggaactgatgctctgctgatgtactacacccttacacagaaaactactgctttttc

SEQ ID NO: 2290 - DNA, 150 bp, Cricetulus griseus
  misc_feature (115)..(134): n is a, c, g, or t
caaagcttttttgggaaaaacctacctttgggtgcccgggaacttattttgaaaaccaggcgggccttaacctgaaaaattgcccggcctttgccttttaaaggcggaaataaannnnnnnnnnnnnnnnnnnnccccagggaaaattta

SEQ ID NO: 2291 - DNA, 580 bp, Cricetulus griseus
gatgggctcaggcgatgcctatccacatcagtattctttgaaactggagaaaggagattatacaattcgactacagattcgtcatgagcaaatcagtgatttggatcgtcttaaatatcttccatttattgtttctcataggttgtctaataccttgagcttagatattcatgaaaatcatagccttgcacttctaggaaagaagaaatcaagcagtttgacattaccacccaaatataaccagccattctttgttacttccttacctgatgataaaatacctaagggggcaggacccggatgctaccttgcaggctccttgacattgtcaaagactgagcttggaaagaaagctgatgtgatccctgttcattactatctaattcctccaccaacaaagacgaagaatggcagcaaagataaagaaaaggattcagaaaaggagaaagatttgaaagaagagtttactgaagcattgcgagatcttaaaatacagtggatgacgaagctcgattctagtgacatttacaatgaattgaaagaaacataccctgcttaccttcctctgtatgttgcacgg

SEQ ID NO: 2292 - DNA, 429 bp, Cricetulus griseus
  misc_feature (398)..(411): n is a, c, g, or t
  misc_feature (413)..(427): n is a, c, g, or t
accactttgcacctgccattatgtacagtcataactgtaattagtcaaataaacaaaaacagacccaaaagcaaaagttaaaataacaaacaagtcagtatcacccccctcccacggccagccgtctgccggtctgtccatctatctgtcttcttggagaagtgtctctttagaatgttttttgggttgtttattcttttgctgttgctttgagctaaaaagagtcacttctgggcgttcactcctcgtgaggtgtacacattcctccccttttccgaggcgtctctgcctctgtccctcatccctctgttttatggcttggtgtaatcccatgcatctgtgctttttgtcccctgcactgtctaaaacatcctcacacagacagtatcatgttgcgnnnnnnnnnnnnnncnnnnnnnnnnnnnnntg

SEQ ID NO: 2293 - DNA, 530 bp, Cricetulus griseus
atagctgaggaccttcagctctttgccttccgaggtgaggcgaaagtccggtccctagagcgcggagagcggcggtgccaggaggctcggtgggctccccttcaagtgtacgtctgtgagcggcctatgctgtttggcactcatgggtgtaagcaagttagatattctataccggagacttcttctcacaaaacttttcatcagaggatggggaaggccagaagatctcaagagactctttgaattcagaaagatgattggaaatcgagaaaggtgccagaatctggtttcaagtgactatccagtacacattgataaggctcctgagggttcaattttccaacattaaagaagaatattaaagaagactagttgaagaacagtcagattgtaagatcctagatggacactttgtttctcccatggcccactatgtgcctggtatcatgccaattgaatctgttattgcaaggttccaatttattgtgcctaaggaatggaacagcagatacagacctgtgtgcattcat

SEQ ID NO: 2294 - DNA, 500 bp, Cricetulus griseus
  misc_feature (214)..(214): n is a, c, g, or t
  misc_feature (232)..(254): n is a, c, g, or t
agttcttggccaaagcaccagggggaggaaagaagagggacattacatccaattgccacccatctccccactgccgtggccacgccctctctcagcactgtcccttcatctctatttcttgttgtagcttctcaccctcctgctcatttcctctggcatctcctgctctgaagaccaaatgactccctccttcctaagcacccatttgtcttanctccatgttctctgttgnnnnnnnnnnnnnnnnnnnnnnntttctggttcaggtgttatgcagtgctcccaggtattgagggagaccatcagtgacacttgaagcaatttttgctgttctcaaatttaaggttccctttacctgaaaccactctattgcctaccttccctggcttcttaagctcacttttcctcccccaccagagttaaatatctgaaagaagcagggatgaacagtttccatggctgtgtgagtttgtgttctggagtgctggtggaatcatctc

SEQ ID NO: 2295 - DNA, 578 bp, Cricetulus griseus
gggattaagagcacatactacttttgaagaggacaacagacaaaatgacaatgttgaaggaacatgtacaaatagaacttttaaccatcactaagtagatagtagcatgatgtcaccattctggaaagctgtgataattccacccccagtatatgtattgtgtgagtattttaatcccataaagatttaatgacataaacagaagatcaagaaaaattataagatagagtataatgataaggacaaaaactcagccagggctgattataggctgacaccccagttttaagagggtaaggtagcaagactataaagtcatgacaggtcaagtttaagaccacccttgaaacttagtgaaattctatgtcaaaacaacaaaatgggctggagatgtagcttggtgatagaagatttgcctagcatcttagccagtagaaagcctggaaaactgaaagaaaaatggttattccactgattaaaatttgatacagcatggctactgagcatgaaaacagtgttacacgtctctgggaatgtagctcattagggtgcttggccagcattcacaaagcccttgg

SEQ ID NO: 2296 - DNA, 541 bp, Cricetulus griseus
aaagataggtgaaatgggtcagtattcctacagaactctttttaactcaaataactaatttcagaaaattaagaaaactaactttgtatttggaattttgaaatatatggttgttagcatttggaataatgcttaaagtatgcctaaaaaagcacccaagaaaaatttcagttcatttacagaaaaaggtattttgtaatagtatagtagtgtattgcatagtactgttttaaagctgtaagtggagtttgtataaattcacaataattgatataaatagatctacagggatgatctgagatggattctttatcactcccatcccactgtgcctgtcatgggtgctgccagtaattcctagatggttgagatacgatggaggtgccgacagataccactgtagcattgcagtaaccttacacagcaagaaagggaataaaatactaagttcctaacagctgctttgtagctgtaaagttgttcaactagtcactcctgtttaaaaggaaggaggcttttttttgtcaccgacacagttcta

SEQ ID NO: 2297 - DNA, 513 bp, Cricetulus griseus
  misc_feature (68)..(105): n is a, c, g, or t
  misc_feature (219)..(236): n is a, c, g, or t
gatactgaacagacctgacaatgtattacattgcttctataaagcgaaggaatctagtattcatggtnnnnnnnnnnnnnnnnnnnnnnnnnnnnnnnnnnnnnnttatttccttattatatgaaatagcctaaaacatagaacagtggctaagaacaggagaaattgggctggagagattgctcaaaggttacaagtttccagaggtcctgagttcgnnnnnnnnnnnnnnnnnnatgaagaaattacaggaagtaagtgtgagagaaccatattccaggagggaaatggttataaatgttagagccacaagaaacaaaataatttcaaaggaaagacaagaaaagaagcttaaaactaattaaagaccctaatcactaaacaattctgaattaccattgaggaattagaaattttagtagagatagggagggtactgaagacagtatttcttcaagacaggcatgagagcctgtgcctgtaatctgagcaatcagtaggtagagcaagaag

SEQ ID NO: 2298 - DNA, 564 bp, Cricetulus griseus
  misc_feature (458)..(458): n is a, c, g, or t
tacttactggtgatgttctgtttattaagctgggtggtcttccttactctacttacatactccatgaaaattcagactctgtcatcatttatcatcagctgtagcttttggttgtcttttgcccattgagtttacttatgtaaaatgtcaagcaagcatgagagagaatgtgacctccctacactaatatgaaaatcccttaaagtctcttgaacatatttaaagtagtagtcgcattgtcttaaactctgccataagcttaagagttacttctttcttaaaggggtaaggcgcaggtttactaaagatatatgccaagagcctcacaactgtatagcaagactctccaagctttctttcctcccatgagatgccctcatctcactacttttactcatttctgccttcaggagttactcggagcacctgccctcttggcttgctatcaaatcacttancagggaggtgacatggctggggaggaaggctcttgggggtgcaaatgagaatagaactaaagtataggtgcagatatttctttccccaagtcccttattacaaaag

SEQ ID NO: 2299 - DNA, 554 bp, Cricetulus griseus
  misc_feature (19)..(36): n is a, c, g, or t
  misc_feature (38)..(54): n is a, c, g, or t
agagggagggagagagggnnnnnnnnnnnnnnnnnnannnnnnnnnnnnnnnnntggaaggagaaaagaaatatggggctggaaagagatttactatttatagtaacaacctgcacggtctagcacaaaaacagacccacagaccaatgatataaatccgcacaggtacaattacccaatttttgacaaatatatcaaaaatataaattggaaaaaaagctataccaaataatggttggaaaactagctgagattttgtagaagaatggaacagatcagactcttttaccctacacaaaaataaattcaaaatggctcaaagtcctgtaacgtcaaaattgacagaataaaatatgggtaagggccagtaatatggctcagtggaaaaagggcacctgttaataagcccggagacttaagattgatccctggaattcaggtatggaaagggagaagtgattcccactagttgtgtttagatctctacatgagtgctatgacacatatgaccacacacccaccaaatagtatacttaaaaaaaaaaaaattctca

SEQ ID NO: 2300 - DNA, 555 bp, Cricetulus griseus
cttttactgaacagtggacagatggttttgcatttcaaaatcttgtgaaacaacaagaatgggtgaatcaacaaagggaagatattgaacggcaaaggaaacttctagctaaacgcaaacctcccacagctaataattctcaggcacctgctaccaattctgaaccaaaacaaagaaaaaacaaggcagtcaatggagcagaaaatgatccctttgttaggccaaatttaccacaactgctcactctggcagaatatcatgaacaagaggaaattttcaaacttagactaggacatctcaaaaaggaagaggccgaaatccaggcagaattggagcgtttggaaagagtcaggaatcttcacatacgagagctcaagagaataaacaatgaggataattcacagttcaaagatcatccaacgttaaatgaaagatatttattacttcatctgcttggaagaggtggctttagtgaggtgtataaggcttttgacttgtatgagcaaagatacgctgctgtgaagatccaccagcttaataaaagctggagagacg

SEQ ID NO: 2301 - DNA, 342 bp, Cricetulus griseus
cctccccaggtcgcctgcccgccttcctccgcagtctggagccaggcggagcccagacctggcggggacagctgcatccccggcccgggacccaaagcctgccgccaccaccaccaccgtccatcgttggtaccggcaatggccttcgtatcgcccgatgtgcttgtgactgatttgaacccaaaatattgagaactcacgtctgtccccatcttaaccgtgcccgcccttaaggcttaactgcagcgccgctagactgtctgactttgagagcaccatggaccaaagtgggatggagattcctgtgactctcatcattaaagctccgaatcagaaatacag

SEQ ID NO: 2302 - DNA, 483 bp, Cricetulus griseus
acctacactctttgattgatccatactcattcttcaaggatctgcttaagcatcccatctttgaaacggcttttctggggccagagagatggttcagcagttaagagcacttgctgctctgcagatgactcaagttcagttcccagcacccacatggtggctcacagctatctgtgactccactgccaaaggatatgatgccctcttttgacctccagcaggcatcaggctcacacgtggtgcatatggtagacacacacattaaggcaaaacagccataaatcattacagagagagagttggtgaggcactgggatcatgaggagatgttttagtgggtaaagtacctgctttgcatgcgtaaagacctgtgtattattctaacaccctctttaagaagcctggtatggtgctgcacactgtaattgtagttctggggccatgcaggtggttccctggggtctgctgaccaactagcctggc

SEQ ID NO: 2303 - DNA, 483 bp, Cricetulus griseus; identical to SEQ ID NO: 2302

SEQ ID NO: 2304 - DNA, 553 bp, Cricetulus griseus
ttttgactgcaaccaattaagccgaccagtttcctctcgtggtggaccctggtgtgcaatggctgcagacagcaacctcctgggtagtgtacgcaacctattccttgtataggttgctctaagggacctaggagacaaatctttccagtaggtgttcttgtctctgatctcatgccgtccagaattgagggtccagacaggtatacgggatgactttgggaaaccccgggcttggtagccagggttcacactggccagatcattctgtacctctgcacctggttgcttagtaaagaataagtgattgaggtctcagatgggagaggtggtagtttcctggtccctagaatatcctgtatctcaagcaagtggggcttttccatgcatgattgtgaatctggtggtgtggcggctagggatatagcttagtgttagagcactgtgcctagcatgcttgtccttagcttccgccccagcacctaggggtagaaaaaaaactcttaaatcattgttaagaatgtaacaggaaggctgtgtggagtctgttcctaag

SEQ ID NO: 2305 - DNA, 523 bp, Cricetulus griseus
  misc_feature (421)..(442): n is a, c, g, or t
catctgacacagtgattatccttttgaggctgaatccattactgacttggtgtctaggtttttactccagtagggaggatttttgagtctgtagtacttacatgattattattgtttaaaaacaaaggctgtttttttcaaagacaaattgaagacccttgttggtgaaatcagccagatctggtgtacatacaggttcccacaggatgtgatagggtaatttaggatttggagacttaataaccagggctacccaggaaagtgacttgatgacatagtaccattaaataagagatgctcactcagtttgcttttgccactttcaaaatttaacttctcaggttattaatcagattattgtataagttagccagtagtctttagattaaaacaacagatgggaggtttgtggagtgtctcnnnnnnnnnnnnnnnnnnnnnngcccggaccctttgttcttcatttgaagaacatttgttccatagttaatcttccttccccaagtttgctattcaaatcaga

SEQ ID NO: 2306 - DNA, 536 bp, Cricetulus griseus
  misc_feature (152)..(168): n is a, c, g, or t
ctcagataattcattggaagtgagagagaattcacttcttttatggtattttgtttcagtttaccaccgtattttccactttgggatacttaaagatgtcataattaaagctgggcatggtggccccacatctgtactcctagcatgcaggnnnnnnnnnnnnnnnnnaactacatagtgagtttgcagccagcatgggctgtatgagtaaaataccaaactggggtgggggtgggtggcataaactgaagtaactcattctctccttaaagtagggtttcattactagtttatcaaatgtgcagactatacatccccaacctctagcacctcagcaataacaattccttggacttcagaggaatgggtttccaggtgttctaaaagaagtcattgttttcttcaacagtaaaaccaatacaatatgcaagaagtgtgctcagaacgtgcagctgtatggaacgcctaagccttgtcagtattgcaacataattgcagcatttattggcaataaatgccagcgctgcacgaattca

SEQ ID NO: 2307 - DNA, 498 bp, Cricetulus griseus
agtggctgggcgtggggggtaagccgcgcgcgcgaggtggaggccttcctgcgggcggtgcacgcgggctgtggaaacgcagttcgagactgcctcccggacgatgcctgaaataagagtcactcccttgggggctggccaggatgtgggccgcagctgcatcctggtctccatttcgggcaagaatgtcatgttggactgtgggatgcacatgggctacaatgatgacaggcgctttccagacttttcctacatcacccagagtggccggctgactgactttctggactgtgtaatcatcagccatttccacctggaccactgtggggcactctcttacttcagtgaaatggtgggctacgatgggcctatctacatgacccaccccacccaggccatctgccccatcctgttggaagactaccgcaagatcgcagtggacaagaagggagaggcaaacttcttcacttctcagatgatcaaagactgtatgaagaa

SEQ ID NO: 2308 - DNA, 578 bp, Cricetulus griseus
gttgcagcacatcaatcctttgttacccacttgccttaacaaggaggagagcagaacttgtaagtttgtgtccagtttcatgtctgagttgtctccagtcagagcagagctgcttggattcctcacacacgcgctcttgggagatagtttggctgctgaataccttatattgcatctcatctcaacagtatatacaagaagagatgttcttccactaggaaaatttacagttaacctgagtggctgcccacaaaatagtaccttcacagaacacctatatcggatcattcaacaccttgttccagcctcttttcgtctacagatgacaatagaaaacatgaaccaattgaaattcattccccacaaagactatacagccaatcgattggtcagcggtctcctccagctgcccaacaacacgtccctggtcattgatgagactcttctagagcaagggcagttggacacctcaagtgttcataatgtgactgcgctgagcaacctgataacctggcagaaggtggattatgacttcagttaccaccagatggagttcccgtgcagtatcaatgtgctcg

SEQ ID NO: 2309 - DNA, 580 bp, Cricetulus griseus
  misc_feature (84)..(103): n is a, c, g, or t
catgacaatgcagttcatcagccaccgattcccagaagaccatgaccccaccattgaagacgcttataagatccggattcgcannnnnnnnnnnnnnnnnnnnctggacattctggatacagctggacaggccgagttcacagccatgcgggatcagtacatgagagcaggagaagggtttatcatctgttactccatcacggatcgtcgaagtttccacgaagttcgggagtttaaacaacttatttaccgcgtccgacgcacggatgacacaccagtggttcttgtgggaaacaagtctgacttgaagcagctgagacaggtctccaaggaagagggattgtctctggctcgagaattcagctgtcccttttttgagacctccgctgcataccgttactacattgacgatgttttccatgctcttgtacgggaaatacgtaagaaagaaaaggaactagttttggccatggagaaaaaatctaaacccaaaagcagtgtatggaagatgctgaagtcaccattcaggaagaagaaggactctgtaacttgaggggagtgtaaaggatctgctgtgaac

SEQ ID NO: 2310 - DNA, 553 bp, Cricetulus griseus
taacaggtggtgtcactatatttgtggccttatatgattatgaagctagaactacagaagacctttcctttaagaagggtgaaagatttcaaataattaacaatacggaaggagactggtgggaagcaagatcaattgctaccggaaagaatggttatatccctagcaattatgtagcacctgcagattccattcaggcagaagaatggtattttggcaaaatgggtagaaaagatgctgaaagattacttctgaatcctgggaatcagcgaggtatattcttagtaagagaaagtgaaaccactaaaggtgcttattccctctcgattcgtgattgggatgaggtaaggggtgacaatgtgaagcattacaaaatcaggaaacttgacaatggtggatactacatcacaaccagagctcagtttgatactctgcagaaactggtgaagcactacacagaacatgctgatggtttatgccacaagttaacaactgtgtgtccaactgtgaaaccccagactcaaggtctagcaaaagacgcttgggaaatccc

SEQ ID NO: 2311 - DNA, 333 bp, Cricetulus griseus
gctctgtctaagcgggagctggatgagctgaaaccatggatagagaagacagtgaagagagtgctgggtttctcagagcccacagtggtcacagcggcattgaactgtgtgggtatagggcttggataagaagaaggcggctgatcacctgaaaccttttcttgatgattctactctccgatttgtggataagctgtttgaggctgtggaggaaggtcgaagctctagacattccaagtctagcagtgacagaagcagaaaacgagaactaaaggaggtgttcggtgatgactctgaaatctcaaaggaatcatcaggggtaaagaagcggcg

SEQ ID NO: 2312 - DNA, 544 bp, Cricetulus griseus
attcagctggattctccagctcagccccattccaaactaatcccactctctcagaaagaccaccaaaagtccaggattttctcccaaagctactatgtgctcaagacctcacctgcagggtatttaaacccaatcttcaagaatggccaagtgatttcttcttctccctttccctgcctcatctttgaaggctggaaaagtcacctcatagtacttggctcaataaatctggtctttctaatttggcttgatctggcctactactttggcagagaaacatattatcagggtatgaaacctatcagtgactaccctaattgtcctcagagaacctttatccagtaattgatgaaagcagatgcagagatccacagccaagcagtgggctgagcattgggagtcctcttgaagaaagggaggtgggattgtttgagctaggggttaaggccatgatggggaaacccacagagacagctgaccagagcctgtgggagctcatggactctataccaacagttaggaagcttacatgggaaagacttag

SEQ ID NO: 2313 - DNA, 600 bp, Cricetulus griseus
ggccctcaggtgttttatacatctggcagtcgtgagctcttaaaattgtttaaccttacatgagtgatagatctagtctcttctactgacttaatatcctacagacacttggatcttttgagaacaccaatgtcagttgcattgaaggtaactatcaacaaggtttcctttgggcttatatttgcatgacatggggattaagattatatttaacatacaggaacagctgtggatgtctatgcaagttcacctcacagcatgccactgccaagccttttaagccaacttgcatttgctatgtaacagtgtctcttgcatctgtaggatgaggggtcacagctcttgagatgtctttttaaaaagaaaattaaaatatattctttgtatatacactttcgtgccccctgacaaaggaatatacaacagcccaaactcgaccctcccaattcctccagttttacagctcctcccatcaacccagccccaggcaactgctgatatagtttcttcctctttttaagaggaagaatcccagctgtgcaggtggaattaacatacagacttctgggtggggttcctttcatttatttaactgctttt

SEQ ID NO: 2314 - DNA, 538 bp, Cricetulus griseus
aactcaggaggactggctggtgagtgtgcttccagagggatccagggtcggtgtggacccactcatcattcccacagattactggaagaagatggccaaggtacttcgaagtgctggtcaccaccttgtccctgtgaaggagaaccttgtggacaaaatctggacagaccggccagagcgcccctgcaagcccctcctcacactgggcctggattatacaggcatctcctggaaggagaaggttgcagaccttcggttgaaaatggctgagaggaacatcgtgtggtttgtggtcactgccctagatgagattgcatggctgttcaatctccgaggctcagacgtggagcacaatcctgtgtttttctcctatgcgattgtaggactagaggctatcatgctcttcattgatggggaccgaatcgatgcccccagtgtgaagcagcacctactccttgacttgggcctggaggccgaatatagaatccaggtcctcccttacaagtccatcctgagtgagctcaagaccctctgctcg

SEQ ID NO: 2315 - DNA, 536 bp, Cricetulus griseus
tagaaaaagtaccatttgggcgtgagtccactttgtgaccgtcagactgagtctatcgccaacatccagattggttttatgacttacctggtggagcctttatttaccgagtgggccaggttttcagacacaaggctgtcacagacaatgcttggacatgtggggctgaataaagcgagctggaagggactgcagagacaacagcccagcagtgaggatgccaatgctgcatttgagttgaactcccagttattaactcaagaaaatcggttatcctaacctgaaccagtgggacaaactccctcctgcgaggctgtggaaatgtgaaatgggtccccaagggaagagccagttctgacagccgacatttccaaggaaatgatgtcagcattatttatcatcgagatttcttgtgttggtcatttgagcccactttttagtgatgagatctgagtatacagcaatatgcacctggcttttgtgtgaaaccctgaacggacaaaggacagcaggggaaccgagaggattaacaagga

SEQ ID NO: 2316 - DNA, 514 bp, Cricetulus griseus
  misc_feature (110)..(132): n is a, c, g, or t
aatgtgttgaaagtgagatggttgcagtgagagacggagtgacactgccctcctgtgcaaatgctgaatcaacggtacaggaaaccttggtataggtcagcagacgatgnnnnnnnnnnnnnnnnnnnnnnnagaagtgagctgctgtcagtcacgcaagagagagatgattacaagagacagtgtcatgtgtacaccgagcagataaaagtcttacagcagaggatattagagctgaatgacaagtgcgtgaagaaggaaacttgtcaccagtccactgagactgaccctgtgttcttacttgaaagtgttaatggtcagtctgaaagtcctgaccacataggttctcagtatcagcaagctctggaagagatagagaggctgaagaaacagtgcagcactctgcagcatgtaaagactgagtgcagccagtgctctggtggtgagagtaagagcgaaatggatgagatggccgtgcagcttgatgacgtgtttcgacagctggacaagtgct

SEQ ID NO: 2317 - DNA, 426 bp, Cricetulus griseus
  misc_feature (342)..(366): n is a, c, g, or t
ctagacttgggagacaggaaataacaattgggaatcctaagcattggggtataattaaaactaggggtgggagagaagctggctgccctgacagagtaccaggaacacaaaattaggattagatctggagggcgggtctcagccaccaagatggctcatcaggtaagacacttaccaccaagcctaaggacttgagttcaagccctgacacccacatggtagaaggagagaagtaaccctgtaggttgtcctttgacctccacatgcatgcaatatacacacatcagggctggagagatggctcaaaggttaagagcattgattactctttcagaggttctnnnnnnnnnnnnnnnnnnnnnnnnngtgactcacaaccatctataatgaaatctggtgccctctgctggcctgcattcatacatg

SEQ ID NO: 2318 - DNA, 201 bp, Cricetulus griseus
  misc_feature (117)..(186): n is a, c, g, or t
atatttgcacacttcttacgtactgacaaagaatgtgataaaaatagcaaacacttggtaatgaccacatgctaggcacttccttagtgttttaatccttaaagctacttgtaccannnnnnnnnnnnnnnnnnnnnnnnnnnnnnnnnnnnnnnnnnnnnnnnnnnnnnnnnnnnnnnnnnnnnnctatatatatatttc

SEQ ID NO: 2319 - DNA, 403 bp, Cricetulus griseus
acctcagaactgtggctagaatatgtaatgataaagcatccagtgggaggtctgttaaacattccagaaacgttcatttctcagaaaatgggttgctgttctctttttttttgctccttttaatggatccttaaaaccaaagtaggggacccttttgaacccacacttttggtaattccttgattacttcccacacatggaaggaatgtcttttgaatgtaccaatctctttagtagtatttgatacaaaatgtacctggctttcaaaaaagcacttaacctgatttctgtttaccaacctttgaaaaaaaccagtttcatttattaaagttaaatgttttgtaggcccctgtggttatgtctttgtcacagcactataccatttaaataatttttttttctc

SEQ ID NO: 2320 - DNA, 449 bp, Cricetulus griseus
  misc_feature (18)..(35): n is a, c, g, or t
caccgcacccggcgggannnnnnnnnnnnnnnnnncagtaatgcccgggaaactcctctggggggacatcatggagctcgaggcacccttggaagagtccgagagccagaagaaggagaggcaaaaggtgcgctgcggctgggccgcgcctccctcgggctgcgctggcctgggcggggaggggagcggtccctgaaggggacgacctgtcagtaccgggcgcgagcttcccagggaaggcttcccctcgccttgctcggccctctgaggtcccggagaccgtccccgtcgccactctcccggacctggaggaggacggaccaaggcttgagcccggcatccgtggcacttcagcccgacgtcggcctctgcgcctggatccctcccaagagatgggcagactcgagctcccgtcgccgcggaatctgctcgttctccctttgctcggc

SEQ ID NO: 2321 - DNA, 372 bp, Cricetulus griseus
attcttccatggagcgtggactccgagacctggaagaggaaattcagatgctgaaatcaaatggggctttgagtaccgaagaacgggaagaagaaatgaagcaaatggaggtgtataggagccactccaaattcatgaaaaataaggtagaacaactgaaggaggaactaagttcgaaagaggctcaaggggaggagctgaaaaagagagctgctggtcttcagtctgagattgggcaggtgaaacaagagttgtccagaaaggacactgaactgctagccttacaaacaaagctagaaactctcacgaaccagttctcagacagtaagcaacatattgaggtgctaaaggagtctctcactgctaaggaac

SEQ ID NO: 2322 - DNA, 569 bp, Cricetulus griseus
  misc_feature (523)..(537): n is a, c, g, or t
gccttcaaccaagccccatcaggtcctgttgcttccagtagtgagctctttggcagtgccccacagcctgcagtagaactcatcggtggctcacagccaactttaggcccacctcctgctgcctcaaactcttccgacctatttgatcttatgggctcatcccaggcaaccatgacgtcttcccagagtatgaatttctctctgatgagcactaacactgtggggctcggtttgcccatgtcaaggtcacagaatgcagatatggtccagaagtcggccagcaaaaccctcccctctacttggtctgaccccagtgtcaacatcagcctagacaacttactacctggtatgcagccttccaagccccagcagccgtcgcttaacacaatgattcaacaacagaatatgcaacagcctctgaatgtgatgactcaaagctttggagctgtgaacctcagttctccatcaaacatgcttcctgtccggccacaaactaaccctctgatggggggacccatgcctnnnnnnnnnnnnnnngtgatgacgggcaccatgggaatgccccctct

SEQ ID NO: 2323 - DNA, 515 bp, Cricetulus griseus
ggaactaagaagacaaagtggtgttcctgaagagaatttacctcctattcgaaatgggaattttaggaaaaagaagaaaggcaaagctaaagattcttccaagaaaaccaaagaggaaaacacaaaaaacagaataaagtcttacgattatgatgcttgggcaaaacttgatgtggacagtatccttgatgaacttgacaaagaagataacacccacgattctgtgtcccaggaatcggagtcagaagatgacggtgttcgagtggattcccagaaggctcttgttctaaaagaaaagggcaataaatacttcaaacaaggaaaatatgatgaagcaattgaatgctacacaaaaggcatggatgctgacccgtataatcctgtgttaccaacaaacagagcatcagcttactttagattgaaaaaatttgctgttgctgagtctgactgtaatttggcaattgccttgagcaggagttacaccaaggcttacatcaggcgaggtgctgctcggt

SEQ ID NO: 2324 - DNA, 542 bp, Cricetulus griseus
gcgagcgccccccttttttttttaatgaatgaatgggcttttatagctcctttgtctatcctgagacctaattggctgttcaaaaaagtgacatagttccccactttataaaaaaaaatgcatttttgctgcctattttttgctcttttcccttctttgctttctttcccacctccccctttcttccctgtttcttataggggtactggaaattgaacctaggatttgcacatactcctacactactgagctatattccaaattatttttgacaagacgccactctgtaacccaggttttggccttaaacatgtgatcctcatgttttggcttcctgagattgtaggctggtgctaccagacttgtgataagaccttgtcccaaaaaacaaaaagccaagacagcagtttgttaaagtagcatttgaaggcaagatgactatggagtgattcgtaaataactaaccctttaaaaataaaaagtaggaaactgtttgatagcataagaagagccaacttcttttatcttcttcctatcaaaag

SEQ ID NO: 2325 - DNA, 579 bp, Cricetulus griseus
aaactattaccgtgaatttttagagaatacaaaggacagcgaaaggcttctcgtgtaaagctgagatctctggctttctgaccctctcctcacttcctctttctagtttggcttcattgcttctcattaggacagggtaggctaagttccctatgctgctagcatcctaagatgatacctttgtggaaataattgtgaatagcatgattcatttcgagcagaggctgagtttaggacagcagcttccattgacaagatttctgtgacgtgcattttaatgacctcttggctcccatacacagtatagcgacatatctactaagagaacccatgaattttttcagatagtgccctaaagacaattttatatgcctcactggtggctcttagtccccacacccccttgactttatcattgtttactagtaaaaagcagcattgccaaataattcccgattttccactctgaaaaatgcaatgtttaagcttttgaagttgtaggttaaacctgctgtcgttagtccttgctgtttgtgttgcttccctttatctggaatgtggcagttgccgctttacttt

SEQ ID NO: 2326 - DNA, 503 bp, Cricetulus griseus
  misc_feature (49)..(67): n is a, c, g, or t
caacagatattgcccttctcctccgagacctggaaacatcatgcagtgnnnnnnnnnnnnnnnnnnngaagatccgaaggcgaatgccagggacagatgctcctgggatcccggcagcgctggcctttggatcacaggtatccgacacactcctcgactgcaggaagcacttgacatgggtggtagctgttctgcaggaggtggcagctgcagccgcccagcttattgcccccctggcagagaatgaagggctgcctgtggctgcattggaggagctggctttcaaagcaagcgagcagatctacgggagcccctctagcagcccctatgagtgtctgcgccagtcatgcaccatcctcatcagcacgatgaacaagctggccacagccatgcaggagggcgagtacgatgcagagcggccccccagcaagcctcctccagttgaacttcgggctgcagccctgcgtgcagagatcacagatgctgaaggtctgggtttgaag

SEQ ID NO: 2327 - DNA, 497 bp, Cricetulus griseus
ccaacatcttcagcattccgtatttccagcagactggggtccgtggctttgcacgcagtatgcccacaagtggagccctggatcgggtagcaaacgccacaaaggtcgctttgtatgagaccccaactggctggaagttttttgggaacttgatggatgcaagcaaactgtccctttgtggggaggagagcttcgggactggttccgaccacattcgtgagaaagatggactgtgggctgtcctggcctggctctccattctggccacccgaaagcagagcgtggaggacatcctcaaagaccactggcaaaagtttggccggaacttctttaccaggtatgattatgaggaggtggaagccgagggtgcaaacaaaatgatgaaggacctggaagccctgatgttggaccgttcctttgtggggaagcagttctcatcaaatgataaagtctacactgtggagaaggctgataactttgaatatagtgacccggta

SEQ ID NO: 2328 - DNA, 252 bp, Cricetulus griseus
gtcccgcttcctgagggcgttaaaggaattctccgctgatcagtattgaccgtatgcgtcgccgttccaaatctcataagcgcaaactttgttaccgcgccgcccgtcgtaatgctcagcgtcgcaccgagcttaacgcttgtcgctacagtgttgatgacgggacgggtgcgtcgcgttccgtctgcgttgagcagatatggcggcacgaagatctcggcgtcgaagtgatttgtagcgcatgtgccgcag

SEQ ID NO: 2329 - DNA, 553 bp, Cricetulus griseus
ttctttttgcttttagtggttgcattggtggtaataggtgccaatgtgaggagtagaaggggtgtaagaacttcaaatataggatcattagaattttaataaacatttaaatgaattcaagtggctgtgtcttagtatcatggttttttgttttgttttagtataaactagatactaactgcattttattccattctccacattctttggaatattctttcattgaggaaacttaattaacctcccctttcttctatctcttaacctcttttcatttccatcccaccacccccattctactatgttctcttctagaatgactccaagaccacacactaaatgtctgacatgtaaatcaggcatgaagtttgacatacagataagtgtgatgttctgcttatagctgtctgccttctcagaaattctaagacatgtttctcatattcaggataatccaagggaaacagcacacatgggcataattttgcttaatgaccacttttaaaaatgggttatatcttaaaatggggatacccttacccaaaatgtttta

SEQ ID NO: 2330 - DNA, 580 bp, Cricetulus griseus
  misc_feature (459)..(478): n is a, c, g, or t
aggcagtgtggatcatgttggataaaaaggacccaggttaagagacaaacaggacaaatgtgcactttttatacaaaagatggagtttttcttcctggggattctaggatgctgcctccacttcaggaagcctgtgtcaagttcgccacccaaaggggtgttaattatgagttatttattctcttctgcatccattcaggaagagggagcagcagttatcccccctcacctgatgccgtcgtgttgcatgcacaggcaccaagatccacacgtgtggactcacacttcccaatccccaggcggacagttatttattacttaactttatggtggggcaagtatggacgcctcacattgtgtactattacaacagcgaagactccgagttgaaggacgtattttctctacagtaagagccggcagaaatgaagtcttgatccagtgaggggagttggactnnnnnnnnnnnnnnnnnnnnctttgcagacgcctagctgaggctggtgcagcagcccagtgactttgtgttgaattcacgagttcttcctcacacagcaccacttgctgacagcgttctagc

SEQ ID NO: 2331 - DNA, 537 bp, Cricetulus griseus
  misc_feature (181)..(197): n is a, c, g, or t
ggcttcaactccagctacctgaagaagtggtgtcctactggaggaacgagtttgactggaggaagcaggtggagaccctcaaccagtaccctcacttcaagaccaagattgaagggctggacatccacttcatccacgtgaagcctccccagctgccctcaggccgcaccccaaagccctnnnnnnnnnnnnnnnnntggcctggctccttctatgagttttacaagatcatcccgctgctgactgaccccaaggcccatggcctgagtcacgagcatgtgtttgaagtcatctgtccctccattcctggctatggcttctcagaggcatccagcaagaaaggcttcaatacggtggccactgctaggatcttctacaagctgatgtcacggctgggcttccataaattctacattcaaggcggggactggggctccctcatctgcaccaacatggcccagctggttcccaaccacgtgaaaggcctgcacttgaacatggcttttatctcaagaagtctctacaccctgacccctc

SEQ ID NO: 2332 - DNA, 78 bp, Cricetulus griseus
atctaaatcaagggagctcttttctgaagagactgcttgcccaaacccactccagacttacctcatagaaagaaatcc

SEQ ID NO: 2333 - DNA, 557 bp, Cricetulus griseus
tgtttaacaggagtataacaggttgaaagcagagcacattgctttttatctgtgataactaagagatgaatatgattggccaggactcagaaattataagttcaccttgacaagacatctagcaacaccagaactttaccactgaacttaatttgccactaactcaaatagcctcacagacctgtttgccaagtaggaggctggttttcctgtttctcatcaccaatgtggtgaggcactgatcaatctgacttgaatggaaatgctgtggtgaatcccagagtatgatgctaatggaaattattaggacattactcctagtgatttttgagtttgattaccaaggaagaatcacttcagctactataagtcaaccttatgagcaaagattaagctctttgtacctggtcttaatcctggatgttgttttttttattgcccaatgtccattccatctcactataacaacttcctggagttttttggaaccatctcttccaattttcagtccatgtgatttagacagtcttgttgaatcttgtgctggacatgttatt

SEQ ID NO: 2334 - DNA, 546 bp, Cricetulus griseus
  misc_feature (407)..(425): n is a, c, g, or t
gcgatgctccctaaccctgcgaagcactcgcagactcttcccccactcacctagcgcggacttaggcacctttcccttcgctgagttccgtagtttcagggcctgggaggcctttgccctcgccctccgggtccgcttcaccggagctccgctcgtcttggcctggccgggggcggcacgagaggctgtagggaaaggcggcgaaggaccgagtcggagggtgtgcaccaccccgtttccaccctcccagtcacttccctcgaggcctcctgcacagcgcgacgtctcaagggtggcggtactcaccctccgatgcggccagaagctccaggccgcgccgcagcaacgccgccgacatgctgccgagccctgcccacacgcccagccttacttccgctctggtagtnnnnnnnnnnnnnnnnnnngcggagccggaacctatggttccgcagcgggcggaagtacgcccttatggctcctctaacttgggaagagcaggaactggaggcatgtacaaagcgctgaagccacattagttgtctaatt

SEQ ID NO: 2335 - DNA, 475 bp, Cricetulus griseus
  misc_feature (85)..(461): n is a, c, g, or t
tttcatttcactgttggtgaaagcaagaaggcatctgccaaagtttcagatgggatttctactcagtacccagttgtggatcatnnnnnnnnnnnnnnnnnnnnnnnnnnnnnnnnnnnnnnnnnnnnnnnnnnnnnnnnnnnnnnnnnnnnnnnnnnnnnnnnnnnnnnnnnnnnnnnnnnnnnnnnnnnnnnnnnnnnnnnnnnnnnnnnnnnnnnnnnnnnnnnnnnnnnnnnnnnnnnnnnnnnnnnnnnnnnnnnnnnnnnnnnnnnnnnnnnnnnnnnnnnnnnnnnnnnnnnnnnnnnnnnnnnnnnnnnnnnnnnnnnnnnnnnnnnnnnnnnnnnnnnnnnnnnnnnnnnnnnnnnnnnnnnnnnnnnnnnnnnnnnnnnnnnnnnnnnnnnnnnnnnnnnnnnnnnnnnnnnnnnnnnnnnnnnnnnnnnnnnnnnnnnnnnnnnnnnnnntcatcggtgttgct

SEQ ID NO: 2336 - DNA, 580 bp, Cricetulus griseus
caatctaaaaacagtgcaaaccagaaaggggccaacttgagtcaggatgagtgatttttagtcagccttgcaaaggcccactattaaaccctattcatattttgtaaaaaatgattatactgcccttgagtcagatcagctataggaaaatcgctgttttatatatatagctactttccccatttttttccttcagattttgttaatttacaaaaggttttttagattagtgtctagtatctcagcatgtgtcttttaaaataacgagtaagaaggggaattcctgcgagttcaaggaaaaattcatttttcaatagttccttcagtgaagaaagcactttcacagccttttcagaagtagaaatttttgtttctacattttctctacctgaaagacttaactttgcccctggaatgttgcattttaagaattttttatgagctgggagtggtggtacatgcctttaatctcagagttcaggaagcagaggagatggatctctttaagctgaggctagcctgtagagttcaagggtgaccagagatacatacagagacagtctttaaaagaaaaaaaaaa

SEQ ID NO: 2337 - DNA, 190 bp, Cricetulus griseus
  misc_feature (18)..(47): n is a, c, g, or t
ctggaaaacaatctggcnnnnnnnnnnnnnnnnnnnnnnnnnnnnnncgactggcacatggacatggatctcctcattgatctgaacaaagcaaatgaagaagagttggaacgctaggatgaagacctggatgatgcacagaagaatccgggaaagagtgaaattcaaaatgcaatgatggcaaaagcgg

SEQ ID NO: 2338 - DNA, 231 bp, Cricetulus griseus
caaacttaattaactttttttcccttatataaaaaccctttatgggggggccacagttgcaccctgggtcctttaaacaaaaactttggggggggctttcacaaaatggtcagggaattcctgataaggaaactgggggaacacattttttttccaaagggcgggggttaggtacctttaggttttgaaaatggcatcaaagggggccttggcaaatttccccaggggggc

SEQ ID NO: 2339 - DNA, 544 bp, Cricetulus griseus
cggaagcagcatagtgactggggtgacaataagagctcgaacctggtcactttcccctcagaaagcgttgttgcgggccagctcggcaccctggagcccagctgtgacctctagggcagcatgagtggtctcaggaacctgaacaaagctggtgccagcctcttgtggtgacaccatgaggaggaccttgccttctcttccaaagctggcagccccgacctccccagcctccagtcgcagagcagcagctgacccaggagggcagaggtgccaaaaagagaggccaggaagacgattgcccacagcccagctcctctgtgagcacttggggcattcaagggcggggtatgctaagcactcctctgtccccttggggagaattgcttcgcatggattgtgatctggaaactgaccagaccctgggggagttattaagttggcaaacccggaacactgcatctaacctgagccgtagggggtaaaggagtcagtcggtgctccagtgtcccgggatgtggtaaagttctttcttaacctggatagt

SEQ ID NO: 2340 - DNA, 434 bp, Cricetulus griseus
  misc_feature (38)..(60): n is a, c, g, or t
tgaagcagcactacattgacctgaaagaccgtcctttnnnnnnnnnnnnnnnnnnnnnnngaactcagggcctgtggtggccatggtctgggaggggctcaatgtggtaaagacaggtcgaatgatgctgggagagaccaatccagctgattctaagccaggcaccattcgaggggatttttgcattcaggttggcaggaacatcattcatggcagtgattcggtgcaaagtgcagagaaagagatcagtctatggtttaagcctgaagaactgattgactacaagccttgtgctcatgactgggtatatgagtagaggtggataacgctgggtctttttccacattactgatggatccctggacacggctcttcattccacagaataaatggatcatcttttctaaaataataaagacaaagactttggaagt

SEQ ID NO: 2341 - DNA, 512 bp, Cricetulus griseus
agaacactttgaggtgaatgtggtgcctctcaccattcaactgtcacatcatttcttccataggatgatgggctttttctttcctggtcgaatgtggaagatgatgacgttggtgatgaacaggataagtctaaactggtgacaactggaataccagtactgaagcctcggcagctgatatcaacagacgatgcatccccactacgtcctgggaagggtgtgacacatggcttgacccggagttccagggtcataagatcatttcgcaaattacctgagcacccaattgatgatattgacaagatgaaagagcgagctgcaatgaacaactccttcatatacataaaaatcccacaagttccactgtgtgtcatttataaaggtgagaagaacagtgtggactggggtgaccttaatttggtgctaccctgtctggagtaccacaacaacacgtggacatggctggactttgccatggctgtcaaaagggacagccgaaaagctctggttgc

SEQ ID NO: 2342 - DNA, 513 bp, Cricetulus griseus
ccggagccgtgcagatcgcgtctctgtctcctctcctgtcgcttgtctcctcttctctcgctcttctctccgcctcgtcaggttcggctaagagtgagtggcaagatggcggcgcccatgtatgccaccctcccggctgtcgggcgttatggtgccagcacccatccaggacttggaggccctgcgcgccctcaccgcgctcttcaaggagtaccgtaaccgggaaacagcacccagaacgatcttccagagagtcttggatatcttaaagaaatctactcacgctgttgagctggcctgcagggacccttcccaagtggagcacctggcttccagtcttcagctaatcacagaatgtttcagatgtcttcggaatgcttgtatagagtgctctgtgaaccagaattcaatcaggaacctggatacaattggcgttgccgttgatttggttcttctctttcgtgaacttcgagtggaacaagactctttgttgacagcttttcgttgtggcct

SEQ ID NO: 2343 - DNA, 544 bp, Cricetulus griseus
tgtgcagtcacttctcggcttgctgggacatgataatacagatgtgtccatagccgtggttgatctgcttcaggagctgacagacatagacaccctccatgaaagtgaagaaggggcataatttctcatcgatgctctggtggatgggcaggtggtggcactcctggtgcagaatctggagcgcctggatgaatccgtgagggaagaggccgatggcgtacataacaccttagctattgtggaaaacatggcagagttccgtccagagatgtgcacagaggctgcccagcaggggctcctgcagtggctgttgaagaggctgaaggccaagatgcccttcgatgccaacaagctgtactgcagtgaagtgctggccatcctgctccaggacaatgatgacaacagggagctgctgggggagctggatgggatcgatgtgcttctgcagcagttatccgtgtttaaaagacacaatcccagtacagcggaggagcaggagatgatggagaacctgtttgacgcgctctgctcctgcttgatgctc

SEQ ID NO: 2344 - DNA, 255 bp, Cricetulus griseus
  misc_feature (3)..(24): n is a, c, g, or t
ccnnnnnnnnnnnnnnnnnnnnnncaaaagaaaaactttattctttatttccatatttctaaaataaaactggctgattaggttgctctgagggatcagtcaaacaaaccaaatcccatatcctcatttgattcctccgacttttccttggtttcacccttccctggggctgcagcggcaccaggaccaccagggggggcagcacccccaggaccagcacccccaaatgcaaatggatcacccaaaaaggccttg

SEQ ID NO: 2345 - DNA, 385 bp, Cricetulus griseus
tattaagttgggaatacttttaaaaaattaaccagtggaatcagaggagttggaccttacagggtagtagagaagctgaggagtctgggcatgtctgtaggaatgagaatttcattctgggacactcacatgagtcctgcacttccattttttcatctgcagagagagcatgacaggcagcacagctgcgtctcagggttgttgggaaggtgaccatttaaggggttagtccaatacctggcatgttaggagcaggcagtaagttttatctgtacctagcttacacccgtacttggagataaagcataaatcataagattttcgtatttgagatttaaaaggctgatttattttctgctgtgtggtctgttttcagaacaagctg

SEQ ID NO: 2346 - DNA, 497 bp, Cricetulus griseus
cttttatgtagaacccaaggaatgccttccctgtcttattttagccaaaacaactggttacatgccttccttgcagtgagcactacaatggatgtgattgtcaatgtgaatagcttagagtactacaaagggtaagctaattgaatgccttgaaagtattatccactggtcatatggtaaactttttttcagtattatttatagttgcacttgattacagttctgaggcgctggagcatttgtgcacctcacctgccttggcaagcctatttttgtgacatggcagcacagatttaacactatgcgttaaaagcacttttttttttaatgtgtttaatcccttaaaaagaatgccaattaagtttcattacctgtcattgatttatctagtacctcagggttcattcctcttacctgaatatcttcttcaataactgtgttgacatctttggtttcccattgagtatacactactgaataaatgtaggagttttatg

SEQ ID NO: 2347 - DNA, 454 bp, Cricetulus griseus
agcgagccgcagtacttgcgattactggctctggttccttcgagaggaacgcggcggcggcagggtcatcgcagctttagccagcggctgctgtcatgacgacccaggggggcctggtggccaaccgaggccggggggtcaagtgggccattgagctgagcgggccgggaggaggcagcatgggccgaagtgaccggggcaggggacagggagactcactctatccagtcggttacttggacaagcaagtgcctgataccagcgtgcaagagacagaccggatccttgtggagaaggtacagagcgctgctgggacatcgccctgggtcccctcaagcagattcctatgaacctcttcatcatgtacatggcaggcattaccatctccatcttccctactatgatggtgtgtatgatggcctggcgacccattcaagcacttatggctatttca

SEQ ID NO: 2348 - DNA, 574 bp, Cricetulus griseus
  misc_feature (515)..(568): n is a, c, g, or t
gatccctttactgttcatatggcagcaagaattattgccaagttagcagcttgggggaaagaattgatggaaggcagtgacttaaattactattttaattggattaaaactcagctgagttcacagaaacttcgtggtagcggtgttgctgttgaaacaggaacaatctcttcaagtgatagttctcagtatgtgcagtgtgttgctggctgtctgcaactgatgctccgggtcaatgagtaccgttttgcctgggtggaagcagatggggtgaactgtataatgggcgttttgagtaacaagtgtggctttcaactccaatatcaaatgattttttcaatatggctcctggcatttagtcctcaaatgtgtgaacaccttcgccgctacaatatcattcctgttctctcagacatccttcaagaatctgtcaaagaaaaagtaacaagaatcattcttgcagcattccgtaatttcctagaaaaatcaactgaaagagaaactcgccaagaatnnnnnnnnnnnnnnnnnnnnnnnnnnnnnnnnnnnnnnnnnnnnnnnnnnnnnnagcaga

SEQ ID NO: 2349 - DNA, 579 bp, Cricetulus griseus
  misc_feature (181)..(195): n is a, c, g, or t
ggtgtagacaagaggatcagcaggttcattctccccattggggccaccgtgaacatggatggcgcagccatcttccagtgtgtggccgcagtgttcatcgcccagctcaacaatgtggacctgaatgcagggcagattttcaccatcctagtgactgccactgcatccagtgttggagcannnnnnnnnnnnnnngggggagtcctcaccattgccattatcctagaggccattggattgtccacagattacctctctctgatcctggctgtggactggattgtggaccggactaccactgtggtgaatgtggaaggggatgccctgggagccggaatcctcaaccatctgaatcagaaggcaatgaagaaaggcgagcaggagctgcaggaagtgaaggtggaagccattcccaattgcaaatctgaggaggagacatcacctctggtgacacaccagaatccatcaggctctctggtcactgctccagaactggaatccaaggagtcggtgctgtgatggggctgggtcttggcccagcctgctagttaccagcaacccaccctggtagcctgccgc

SEQ ID NO: 2350 - DNA, 528 bp, Cricetulus griseus
tagttgcccacaaactgccctttccagcaaaggctgtaagccgtgagactctagaaaagatgcgccaaaatcaaaaagaaagagaaaataacaaccaaaatccctggacctttgagcgcatagccacggccaacatgcttggcatacggaaattcctgagcccatatgacttgacacagaaagggcagtattggggcaaattcttcctgcctaagcgtgtgtagtcaaagcccaggaacccacgtgcacacagacccttgagactgagtctgcatcttcactgtctttaggatctttggtggttcttggaccatagctaagcacatgagtaaatgacttctgaaaagttatgtcatctgattgttcctaattaaactctgagtgtaacctcaaggtacaacttctcattggtcagtttcagttgctcaaaagattaagaatgatttggcatagccagctgtggtggagcatgtcattaatcccagcactcaggagtcaaaggcaggcagatctcaattaagttcaagg

SEQ ID NO: 2351 - DNA, 496 bp, Cricetulus griseus
tactgggcttttgaaagccactcatttgcttcatttcattttactctggtgcctgggaagagccaggttgactaatgagagtgtggatatgtccttccctgtgtttttatgccaccactctaccagcacccaggagaggtccaggataggacttcacagactcacatgggccagcctgttgaccacgggggttacattgattgtttaggagcactgtctagggccctgccctctcacaaacattccaaattcgcattccttttaatcctcttgattattccaatagtatgcccattttcaccctaatataacatataatcataactggtattttaatgcactagtatttcataactctaatgtttactatttataaatcagaaaaggtgtttccacagttttaaaagttgtaggtgggataaactcaaatatttatgagagttgaaagtactttttaagcttgaatgtcatcccttttcctcttccactacaaaag

SEQ ID NO: 2352 - DNA, 536 bp, Cricetulus griseus
gctgttggccatgagtaccagtcaaaactttctaagcattgctcacaagtggactcggtccggggcttcggaggcaagtttggtgtccagatggacagggtagatcagtctgctgtaggctttgaataccaggggaaaacagagaagcacgcctcccaaaaagactattctagcggcttcggtggcaaattcggtgtgcaagctgaccgtgtggacaagagcgccgtgggctttgactaccagggcaagacagagaagcatgagtcccagaaagattattccaaaggttttggtggcaaatatggaatcgacaaggacaaggtggacaagagcgctgtgggctttgagtatcaaggcaaaacagagaagcatgaatcccagaaagactatgtgaaagggtttggaggaaaatttggtgtgcagacagacagacaagacaagtgtgcccttggctgggaccatcaggagaagctgcagctgcatgagtcccaaaaagactatgccaaaggatttggcgggaagtatggggtacagaa

SEQ ID NO: 2353 - DNA, 560 bp, Cricetulus griseus
  misc_feature (291)..(308): n is a, c, g, or t
ctcatcatgatacaggaggatgaagtcactgtcaactccagctcctccatggtgcacaagaaggatcatgtattcgtaagggatgaggcgggccacggcgatcccaggcctgagccgcggcctacccagtcagttcagagccaggccctccactatcggaaccgagagcgctttgccacgatcaaatccgcgtctttggttacacggcagatccacgagcatgagcaggagaacgagttgcgggaacagatgtcaggttataagcggatgcggcgccagcaccagaagcannnnnnnnnnnnnnnnnncaagctgaaggctgagatggatgatcaccgtctcaagctccagaaggaggtggagacgcatgccaacaactcgtccatcgagctggagaagctggccaagaagcaagtggctaccattgaaaaggaggcgaaggtagcctcagcggatgagaagaagttccagcagcagatcctggcccagcagaagaaggacttgacaactttcttagagagtcagaagaagcagtacaagatttgcaaggaaaaaataaa

SEQ ID NO: 2354 - DNA, 396 bp, Cricetulus griseus
aactctggaaagataataaggactgtttatctttgctaatgaagaagtctcttgagtctatgcccaagtgagcttcctgaataccactctgtgaacagcaatgaagccagaatctaggcataggggtccttgaaagttcatgcatatatattccttttcctagtatagactgtacttggatgtggctattgttatttatattacccattattagactggtttcttcaaaacactgattaattttattaatatgtgtagcaatacttcggaagtggctgtctcacaattctaaattgtgcaataaaagccatgtatgtatgactttggaatatgggcttgaactttgactaggatgcgggcgtgtttatgttctgtgacttcaaaatactggcttgt

SEQ ID NO: 2355 - DNA, 485 bp, Cricetulus griseus
tgctgttctgtcatgtgagccgtcggggcgccccattccccggtcccgtccttcgctccacactccacccagcagcccggccctccccggcgcctgcccaccctcaccctccgcctcacgggccccagacacctgtgtgtgtgtggtccctgtgcacctcgagtcacgggtggggggtgctctgcccgtcaccacactccacactcaccccgaacctctgagccgtgtgtcttcccttggtgagagacaggccgacccacctcatatcccctaaggttggggactcccaactccaagtcactgcaggtttacacagacggctcatgcccaccatggtctcaacctggtgtccccttgttgccccaggccagcctgtctgtgccttattgctactttggggagtctctgaggggaccaaatgagagggtctccctggccaatgcgccatcatcctggtgtgggcaggtggggtgaggccacacttc

SEQ ID NO: 2356 - DNA, 579 bp, Cricetulus griseus
ctgtctgcggaattcaagcatctgaccctgagggagcagagatgtgggaatgggggccgtgccaattgtgacgcctccttgattgtgacggaggagctgcatctgatcaccttcgagactgaggtataccaccagggcctcaagattgacctcgagacccactccttgccagttgtggtgatctccaacatctgtcagatgccaaacgcgtgggcatcaatcctgtggtataacatgctgaccaacaaccccaagaatgtgaacttcttcacgaagccaccaattggaacctgggaccaagtggcagaggtgctcagctggcagttctcatccaccacaaagcgagggctgagcattgagcatctgactacactggccgagaagctcttaggacctggtgtaaactactcagggtgtcagatcacatgggctaaattttgcaaagaaaacatggctggcaagggcttctccttctgggtgtggctagacaatatcattgaccttgtgaaaaagtatatcttggccctttggaatgaagggtacatcatgggcttcattagcaaggagcgggagcgtgcc

SEQ ID NO: 2357 - DNA, 520 bp, Cricetulus griseus
  misc_feature (180)..(207): n is a, c, g, or t
cttagggagaaaaactaacagatgaagaagtagatgaaatgatcagagaagcagatattgatggagacggacaagtcaactatgaagaattcgtacagatgatgactgcaaaatgaagacccactttcaactacttttccctctagaagaatcaaattgaaatcttttacttacctcttnnnnnnnnnnnnnnnnnnnnnnnnnnnnttcatttattcattctgtttctatctagcaaaactgaatgtcaaacgtaccttctgtccacacacaaaatctgcatgtattggttgggggtcctgtcccctaaaaatcaagcccccacatcagttttacagtataaatactcgtactaccttctaaggaagcacctaggggactccttaaagttccatttgctaatgattaataatacactgtttgggctggccagtttctcatgcatgcagcttgacaattgagcacagtcaggcctttgttttaaaaccaaaacagaaaaaaaacaaattcaaaacctcag

SEQ ID NO: 2358 - DNA, 423 bp, Cricetulus griseus
gctttgaggtgctgaagaaagtgaagtcactctgcctccgtcaaaacttaattaaatgcattgagaacctggaggaactgcagagtctccgagaactggatctctatgataatcagatcaagaagattgagaatctggaggcgctgacagaattggagattttagatatttcttttaatctgctgaggaacattgaagggattgacaaactgacacggctgaaaaaactcttcttggttaacaataagatcaataaaattgagaacataggtaccttacgtcaactgcagatgctggagctgggttcaaaccgcatccgggcaattgaaaatatcgacacgttaaccaacctggagagtttatttctgggtaaaaacaaaattacaaaacttcataacctggatgcacttaccaacctgacag

SEQ ID NO: 2359 - DNA, 438 bp, Cricetulus griseus
gtattcctgtgcccaaacttttccttggttgtggccagtcctcatatgtgaaggtagataatttggagaatttgtaatttgttcacatgagcttaaacctacagtactctgctccacggtggccattgttagagggtggtttgtggggggcaatattgagtgaggtttatatctcctgtggccagagccatctttcccttcattcacagatactcaaagatggtaaagctaatggtgatgagggctcaacagcaggtaagggcatttgttgctctttcagaggacccaggtttggttccccatgctctcatggtagcatacaaacatttgtagctctacttccaagggatccagtgccttttgacatatgtgacgtatccattcattacataattaaatctaataaaatcaaaaaccttatggtggcatagctgtatt

SEQ ID NO: 2360 - DNA, 195 bp, Cricetulus griseus
tcttctcacgaagacgacgaggagggtccattctacagcgcactgtcaggtaaatccatttctgagagccatccatggcatgttcctgagaacccttcccatcccaagcatcactacaaagcaatggaaggtgacgggactgtaacaccttttttttcagatgccagcaccccttacaaaccggcctatgtgaag

SEQ ID NO: 2361 - DNA, 164 bp, Cricetulus griseus
tttaaaagtcccggccgatattccctaacgccatgtccaggccgtccctcatcgcatttactccagccaccgactccagcgacctctggaaagatgggcagcagcaaccacagcctgagaagccagggccagtcctggatggggccgcagcccgggctttctac

SEQ ID NO: 2362 - DNA, 551 bp, Cricetulus griseus
actgtgaaaaaaatacttagtgacattgggttggaatactgtaaagaacatatagaagattttaaacagtttgaacctaatgacttttatttgaaaaacactacatgggaggatgtaggactctgggacccttcacttacaaaaaatcagggagaagttctgagcagcattcttacaagagaaggccttcctagagaaggtttggttttgaggacaggctctttctatccttggctatactggaactcaaaaatccgcctgtctctgcctccccagcactgggattaaagacagacaccagtacaccacctgaggagttggtggcaatccagagaactcaaaaccttcaggaaaaaaacaggagaaaagatgactgtttatcatgtgtatatttacctatttgagatagtaattctgaaagctggtctctaactagtatgctgtgtagtaaaccatggcttctgacccctttgccctgtctataaaacagtcagttaactgaagctgggtttctctttgtagctttggagaacctgtcctggcactcggat

SEQ ID NO: 2363 - DNA, 557 bp, Cricetulus griseus
agggcttatcctctcaggctgacttgaaatctgtcaactttctggctgtttgcacttttttggacttgtgaattgatgtagctgactctgtgttttccaggaaagtataaatttactctgattttaagaaaaacccaaccattcttttatttcccattaaaatatatgtattgggctgcagcagtggcaacacagaaactctgtttttgcagaggacccagcaggctcaattcccaatgcccaatacctatgtggcgacttacaaccatctatgtatgactccacttccagggatcaaatcccctcttctgacctgacctctgagggcaccctgcatgtgcatggtgcatataggtacattatcaggccatcatttatacacataaaataaatctaaagtgtgtgtgtatacagtaagggcatttaaattccatagaaccggttcagacagtgaataacttcacataatcttagtaagctgaagaaccctcttgtattctactcagcctgactttaagccatcttaatcatgagctatgcagtctgaaccatgggtc

SEQ ID NO: 2364 - DNA, 590 bp, Cricetulus griseus
agtgcaactctcctgtgtctcggcctgcacagctcaaccatgtccgggacatcctccaggagcctggggaaaggaagctcgcctccgggtccggttccagagggcctgatccgcgtctacagcatgaggttctgccccttcgctcagagggcactgatggtcctgaaggccaagggaatccgacatgaaatcgtcaatatcaacctgaaaaacaagcccgagtggttcctcaagaagaatcccactgggctggtaccagttctggaggacagtaagggtcgcttgatctccgaatctgtcatcatttgtgagtacctggatgaggcctaccctgacaagaagctgttcccagatgacccttatgagaaagctcggcagaagatgaccttagagtcattctccaaggtgccccctttggttacaaggtttattagggggaacaaggaagaccgctctgccctaaaggaagaattgaggaaagaattctacaagctggaggatgctttgactgattgtcagagcgaattccgtattggggatgctgtctctatgactgattatcttatgtggccttggtttcaacgactggg

SEQ ID NO: 2365 - DNA, 431 bp, Cricetulus griseus
tgtggaggtcagaggacaactttcaggagtcagttctctccttccaccatgtgggtcctgaggcttgaactcaagtgatcaggcttcccagcaagtaccttgactcactgagtcatcttgctggcttgagaaatgtgttttaaaactctgtttatagaggtcagggacatgagcacaggatacagaatctcagtcagaagatggctaaggtctggcgtgtttgtggacagcaagatgagtctaaatgttaagagagtagaagaccttaaatattctcaccagtcccaaatggtgactatgtgaggttgtagagtagatggtaattaatattttgcatggtatgcatgcatgcaccaagttgttgccttctacactttaaatacataattttatgtgccaactacaacttaatgaatctagagacattgaca

SEQ ID NO: 2366 - DNA, 494 bp, Cricetulus griseus
tcctcttctgctctttggctatgatttcccaagctcatgtgtgacaagaggatagataggcagcagtggagtgcctgggagattattgcagttattcaggtagactaggctccagacataaacatagaaaataagtgattatctattcttcccctgactcattctcctagctccctcccccctcttcccatgctcccaattttctcaggggatcttgaccctttccccttcccaggggaccatgtctgtctctcttaggatcctccttgtttactagcttccctggcagtgtggattgtaggctggtactctatgtctaaaatccacatataagtgagcacataccatgtttgtctttttgagattgagttacctctctcagaatgggttcttctagttccatccattttcctgcaaattttaagattccattgtttttttttcagctgaatagtacctcattgtgtaacagtaccacattttctctatccatc

SEQ ID NO: 2367 - DNA, 389 bp, Cricetulus griseus
ggccactcgtcgagctctgcacttcgtcttcaaagtggggaaccgcttccagacggtgcatttctttcgagatgtcctggggatgcaggttctacgccatgaggaatttgaagaaagctgcaaagctgcatgtaatgggccttatgatgggaaatggagtaaaacaatggtgggatttgggcctgaggatgatcattttgttgcagaactgacgtacaattatggcattggagactacaagcttggcaacgacttcatgggaatcacacttgcttccagccaggctatcagcaatgccaggaagctggagtggccactcaaaaaagttgcagaaggagtttttgaaactgaggccccgggaggatacaagttctatttacaagatcaaa

SEQ ID NO: 2368 - DNA, 479 bp, Cricetulus griseus
  misc_feature (406)..(406): n is a, c, g, or t
cgaaattggggcttgcccttctgcctctaagctgctgctgggaactgagaatgtgtctggggccctagctactggtgtcagaacatggagactgcagcccggtgcaatgctgtcgaccattgcaaacgccatgtgtggaactaattttccagcttgctgaagttgcagcctatttgtgggtctaggataatgaacacacaagatctatttgacttcattctaagtaggacccctactaccctacccccctttttttgtccttcccccatcttatagcattgctgtcttgtaagaggtgctgatggcccctttcagtgttccccttctgcctgaaggatgaggacattcagggcatcagctctccagctgccctttcacccacctgctggagggggtgctgagccanagagcaggaaggccttctgagccctgacttggtgtacggggtggggcttctgtggccacctcctatcttgaag

SEQ ID NO: 2369 - DNA, 561 bp, Cricetulus griseus
  misc_feature (32)..(73): n is a, c, g, or t
ctcttcgagagctgactggctccctcctggcnnnnnnnnnnnnnnnnnnnnnnnnnnnnnnnnnnnnnnnnnncttttccttcacgatgctgcatttcattaagaaccagctagaaactgctccaccccatgagttaaagaatacattccagctactacatgagatactggtcattgaagatcccatacaagtagagcgagtcaaatttgtatttgagacagaaaatggcttactagcgctgatgcaccacagtaaccatgtggacagcagccgttgctaccagtgtgtcaaattccttgttactcttgctcaaaagtgtcctgctgctaaagaatacttcaaggagaattcccatcactggagttgggctgtgcagtggttacaaaagaagatgtcagagcattattggactccacagagcaatgtctctaacgaaacctcaactggaaaaacctttcagcgaaccatctcagctcatgacacattagcatatgccacagctttattgaatgaaaaagagcaatcaggaagcagcaatgggtcagagagcagtcctgcca

SEQ ID NO: 2370 - DNA, 535 bp, Cricetulus griseus
ctctggaagatcttgtggtcaagagcaatctgaatccaaatgcaaaggagtttgttcctggggtgaagtactaacatatttgagtagacggggccctcttttggtggatgtagcacaatttccacactgtgaaggcagtattagaagacttcattgtaaaagctctctcgtcactgtgttacacttatgcattgccaaagtttttgttagtcttgcatgcttaataaaagtgctgagactgttacgaagtaagaagctgtcacacagttactgaaagtagaatggccccatggcttaatgtaaagacagcaatggaagaagcaccagtcaattgtgacaaagaaccaaattaaataaccttcaactctcactgacttgtctgtctttgaggctaaactggtcccttaggattaattgatactttttaatgtctacactttgcaaaaaataagtaaataagcaagtttaagttaggttctgattgttaagcagatttctcaattgcatttgtccattgaaaatacccttttctgaa

SEQ ID NO: 2371 - DNA, 474 bp, Cricetulus griseus
ctggacagctgagctctttcagaggcgccaggaactttcctcaagcccagccaggtaaccatcccatggcttgaattgggaatgaaatcttctaaaatatcagaacagaaagctttttgttcaacatggaggacaaaagacggcgagcccgcgtacagggagcctgggctgctcctgccaagagccagcctactgcccagccaggtactgctgctaggaaccatctttcccaaacaccagggcaggcctggaggagcaaggagcagcaactgcctgacagagagtttgtgttcaaagagcctcagctggttgtgcggacagccccagaacccagagtgattgacagggagggtgtgtatgaaatcagcctgtcacccacaggtgtgtctagggtgtgtctatatcctggctttgtggacttgaaggaagctgactggatattggagcgcctttgtcaggatgtcccctggaaac

SEQ ID NO: 2372 - DNA, 581 bp, Cricetulus griseus
  misc_feature (421)..(421): n is a, c, g, or t
  misc_feature (515)..(515): n is a, c, g, or t
ctggatatccccatgacattgggacactcctgccttcttcactctgactgtttgctacttctctatctttgaaacgctgccagaacacttgtgatcctcccttctccgtttgtaaggaatgtgattgtgggacctgcctgttctccttggctatcttggacttttgttctggtgctaactggcccaggcactgtgcagcagactcatctgggagtccccgactttctgcagactttccgcatcacgtacacctggagaaggctttgcttcctagtaaggcctcgaagggaggcggggtaccgcagggaggcagggtacctggccttctgtcccgtgtccatgagctcacagctgccctcctgcctgctgtacagggaatgtgtagcttttccccggggaaatgcacacaaagaagactcantgtctgggctgagagcggtgtcctgaaggcagacactgctcggagggaaaggtgaagctccctcctgcacatgggtgtgagggtgggggctcanggaccccggttctccagccatcagctgaaggaacgttctgtggctatcattctcctgaccttggaa

SEQ ID NO: 2373 - DNA, 525 bp, Cricetulus griseus
aactgcaaaaattatctccagagaagtgtcggatggcattgttgccccaggatatgaagaagaagccttgaagatactttctaaaaagaaaaatggaaactactgtgttcttcagatggaccagtcctacaaaccggatgaaaatgaagttcgaacactctttggtcttcgtttaagccagaagagaaataatggtgtcattgacaagtcgctatttagcaatattgtcaccaagaataaagatctgccggagtctgccctcagagacctcattgtagccactgttgctgtcaagtacactcagtccaactctgtgtgctacgccaaggacggacaggttattggcatcggagcaggacagcagtctcggatacactgcacgcgccttgcaggtgataaagcaaactcgtggtggctgcgacaccatccacgagtgctttccatgaagtttaaaaccggggtgaagagagcggaaatctccaatgccattgatcagtatgtgacggacaccattggtgagggaga

SEQ ID NO: 2374 - DNA, 392 bp, Cricetulus griseus
ggccggcagatgtgtcccctgtgtctgtgtcaggagagctgagtgcaagcaaggtaggtaaaaccaaccaaaggtaaatgtgtttaagatggcagtacagtggccttccacaaacagggcaagcattctgcatagtgctgtagagggtgaaaaactgttctgtcccattggtatttgcgtccctgctcttttgaggcctgtgatagtgtacattaaatggttggatggcaacagaatttcttttgcctgtaaaatgccatgtctatttagttattgctacaagtagctatattcatttctgtgtttggtatgtaaccatcaaaagactatgatgaaatacaatctcatgagagagagagtgccaataggttaaggtagtttatgtctactta

SEQ ID NO: 2375 - DNA, 230 bp, Cricetulus griseus
ctctgggccgccacctgcctggccgcgctctgcgtggagacagtgcaccaacagaacagcaccgtaaccccaactaccaacgtgaccgatccctggaccgtaaccaggcaacccaccccgacaacactaacgcccgccacgctgccagaaacctgcgataaccgcaacatctgggcttactgagtggatgtcaccattaataatactacctgcttttggattgaatgcaa

SEQ ID NO: 2376 - DNA, 566 bp, Cricetulus griseus
caatgtccgcttcaatgtcgccaaatccctacagaagataggacccattcttgacaacagcacactgcagagtgaagtcaagcccatcctggagaagctgacccaagaccaggatgtggatgtcaagtactttgcccaggaggctctgactgttctgtctcttgcctgatgctggaagaagaaccattgccggcctctggtgtccactctccaacccccaccatgtacctcccatagggaggtggtgggggccatgactgtcactccctgtgcatggtctgaccccaggcccctccccccagcacggttcctcctctctgtagcctggagagacttatctgtccacctcccaaggggctggggcagtgcaagttggggcagggcagcggcctgaaaggaagagctggctgttcctgcccacactgggagagacggagcatcctaggtcactggctcctgctgctgtaatagggaaccctcaccctctacttacaccaccaccctttctcagacccccaaccatggtttttttgtgtgtgtcaactgtgccatttttattttattcc

SEQ ID NO: 2377 - DNA, 487 bp, Cricetulus griseus
  misc_feature (218)..(218): n is a, c, g, or t
catgaccaagtgggagcagaagtatttggaggaacgggccatgaggcaatttgccatggatgccgccgctaccgcagccgcacagcgcgactctactctcatcagacactcccctcagccctcacccagcagcagcttcaacgagggcctgctggcaggcaaccacaggcaccaggagatggagagcaggttgaaggtgctccatgcccagatcctanagaaggatgcagtgatcaaggtccttcagcagcgatccaggaaagaccctggcaaggctacccagggcaccctgcggcctgccaaatctgtgccatccatctttgcggctgcagtggggattcagggctggcaaggactctcatccagcgatcggcaaaatgatgcacctggccggctgacagtggaccgtgtaccggcagaggagcccccggccacagctcctctccctacccacaccaagcacgggagcagagatggaagcactcag

SEQ ID NO: 2378 - DNA, 503 bp, Cricetulus griseus
  misc_feature (347)..(347): n is a, c, g, or t
gtcagccaagtcgattcatccacttgccttacgtccctgggatattacagtacttgttaatttgtataaagttcatgggcgtcttcccgtgcatggaagtactgatggtcctgagtgcccaacagcattcttggaacgactgtgttttgaaatgaaaaaaggattcagggagactatgctgcaacttgtcctatcacccctgaatgtatttatcagtgataactatcagcagcgaccacctgtggatgaagtactcagggaagggcacatcaatttgtcaggtctccagctgagagcacatgctatgttctcagcagaaggtcttcccttaggaagtgactctttanaatatgcatggctgattgatgtgcagactggaaaccttactgctaaagtcacagcaccacagctggcatgtctcttagaatgggggcaaacatttgtttttcatgtggtatgtcgtgaatatgaactggaaagaccaaagtcagtaataatatgcc

SEQ ID NO: 2379 - DNA, 564 bp, Cricetulus griseus
tactccaaagtcacgggaaagaactgattgaagagctcattgcaaagtcaaagcaagagaagaggagagacaggctcaacgagaagataaccttgagctcacagagaagctagaccaagactggaaagaaatccagactcttctgtgacgtaaatctcagaaatcagaaaacaaagagaaaaaggaaaaaccccagccagatgcatatgacataatggttcgtgagcttggctttgaaatgaaggctcagccctctaacaggatgaaaacagaagaggaattggcaaaagaggagcaagagcggctcaagaaattggaggctgagagacttcgaagaatgcttggaaaagatgaagatgaaaataaaaggaaaccaaaacatatgtcagcagatgacttaaatgatggatttatactagataaagatgataggcgtttgctttcttacaaagatgggaagatgaacattgaaaatgtccaggaggagcagagcaaggaagcaggtggccaagagagtgaccagaaagaggatgaagatgagagtgatgaggaagagggtgaaga

SEQ ID NO: 2380 - DNA, 146 bp, Cricetulus griseus
  misc_feature (90)..(90): n is a, c, g, or t
cgcccacgcgtccggatgtcttggatgaccttgtaaccttgcataattttaggaatcagttcttgccaaatgcattgagtagaatttttntcgtcacattcatgctccggaagaacgtggggagtaccttgaaactctcataacaa

SEQ ID NO: 2381 - DNA, 484 bp, Cricetulus griseus
  misc_feature (362)..(390): n is a, c, g, or t
gagataagaaagcccatgagaagttgacagagaggcgccctctgcacactgtggtgttggcattacccgagcgcgtcgagccagacagactgctgagcgactatattgagaaggaggtgaagtatttaggtcagttaacatccatacctggctacctgaacccctccagtaggactgaaatcctgcatttcatagacaaggcaaagcggtcccaccagcttcctggacacctgacccaggagcatgatgctgtgctcagtctgtctgcctacaacgtcaagctggcctggagggacggggaggacatgatccttagggtgcccatccatgacatcgctgctgtctcctatgtcagagatgannnnnnnnnnnnnnnnnnnnnnnnnnnnncccaggacccaggcatctctccgagccaaagtctatgtgcagaaagttctagaggcctcagcgcatgttccttgtcagatagtgcagtgggacc

SEQ ID NO: 2382 - DNA, 260 bp, Cricetulus griseus
agagggaagtgggagtgatgaagatgagaatgatgagggcaatgaagaagaccatagcagccctcctagtgaagtgggctgcaagaagaagaagggtaaagttcttagcagaaacagtgctgatgatgaggaactgaccaatgatgggctgaccctatctcaaagcaagagtaatgaggactcgctgattcttgagaagagtcaaaactggagttcccaaaaaatggaccatattctgatttgctgtgtttgtcttggag

SEQ ID NO: 2383 - DNA, 419 bp, Cricetulus griseus
agacataagcaactgtgcgatgtcattttagtcgctggcgatcgtaggattccagctcacagactggtgctctcctccgtctcagattatttcgctgctatgtttactaatgatgtcagggaggcaaggcaagaagaaataaagatggaaggtgtagagccgaattcgttgtggtccttaattcagtacgcatacacaggccggctggaactaaaagaagataacatcgagtgcctgctgtctacagcatgccttctccagctttcccaggttgtggaagcatgttgtaaatttctaatgaaacagctccacccatccaattgccttggaattcgttcttttgctgatgcccaaggctgcactgatttgcataaagtggcccacaattatactatggaacatttcatggaagtgatcag

SEQ ID NO: 2384 - DNA, 431 bp, Cricetulus griseus
atgctccctctgggtctcttctctaggcaccactctgagaagagctccttcaggaggagggtagcccaataaggcaggagccaacgaggtccaaagtccagaatgtagagaggggtgtcagccagagcaaccccggcagccacaatgcgtgcactcaatgatgcgaccctgtaacagaggatggggacatttgcatacactgctacagccctgcacatacctactgggacctgctgtacagggtgctggtgggacacatcttgaggccactggagcagtaggtgtacacttttaagttcctgtggccagaacagtcttgtaccaagggcatagtggctggctgtgggactggagcaatgctgtctttactttgttttctggagaccaagaactcattttaagcaaataaagttctctggtaaaactctgct

SEQ ID NO: 2385 - DNA, 579 bp, Cricetulus griseus
aatcaaaggtcatatgtctacttttgatcatctacattacagtaatccctgggatttcttacccagttttaaatgatgctgctttcatctgtttagcaaatgtacctgatggtttcctctaactagctcagttgacctttttaaaaggtttgatccttgagcaccttcaacaaaaattgaacactttgatcaggatattttatttattccactgtgcaaataaaaccaaatgctttgtcaacaagatggaatccatggtaaaaaggaaagaagtcggttacaaagacaaattagagggaagtttgtcctgttaaccaagtggggttattccttcattccaggttactgacttactatctgggattgatgggtaagacagcttgttgacagtgtcttcctgtttggattgttacagtgtcttagtgtgcccctcctgttacagctttccacactcaacctacttgcttctgtatttctgcttcctgtatattcttactacatatttttgactccagaagaatgacatctttagactgtttcagagccaatgatgatatttcctttagacaattattacat

SEQ ID NO: 2386 - DNA, 479 bp, Cricetulus griseus
  misc_feature (296)..(310): n is a, c, g, or t
gcctgaagaccattactttcttttgactgaacctccactgaatactccagaaaacagggaatatactgctgaaataatgtttgagtccttcaatgttccaggcttgtacattgctgtgcaggctgttcttgccttagctgcatcctggacctcaagacaagtaggagagaggacgctgacgggtacagtaatagacagcggagatggagtcactcatgtcattcctgtggctgaagggtatgtcatcggcagctgtattaaacacattccaattgcgggaagagatataacatacnnnnnnnnnnnnnnnctgcgagatcgagaagtaggaatccctcctgaacagtccctggaaactgcaaaagcagtgaaggaacgctatagttatgtctgcccagatttagtaaaagagtttaacaagtatgacactgatgggtcaaagtggatcaaacagtacaccggagtcaacgcaatctcaa

SEQ ID NO: 2387 - DNA, 114 bp, Cricetulus griseus
actttgaagaaaaacacagataaacgtggagagatattttcacataaacctaatactcagaaccacactgctttgattcgtaaacaaggaaacagcaattgcaatgaaaaaaaa

SEQ ID NO: 2388 - DNA, 356 bp, Cricetulus griseus
cgcgtccggtgcgtatatatttttgccactcacttttcaggtgattaaactcgatcaagtttattttaaggatctataaaagaaacagggaaagatttcacattggcttcctcttcgctgggttagctgcagccctgttagcagaaatccacaggaaatgggggtctgaggtgattgggttaatagagaagctttgggagttctgtgttagaatctggatgtcagaagctttggaaaagttttatatacagatatttgtattattaaatttggagccatagccagaagactcagatcataattggcttatttttctatttccttaactattgtaatttccacttttataataattt

SEQ ID NO: 2389 - DNA, 490 bp, Cricetulus griseus
  misc_feature (58)..(75): n is a, c, g, or t
aaatgtattcttttatgacaccttccatactgatcatgtagatcactaaacttcaggnnnnnnnnnnnnnnnnnngaaagattcagcatgccttaagatttggcatgtcagctgtgcctttagttcaagcacttaaaaggcagaggcgagaggatctctgagtttgaggccagcatggtctatctcatgagttccaggacagctagggctacacagagaaaccctgtctcagaaaataaaaacaaaaatagaaaccaaaaccaaaaccaaagtgatcatcaccaccaccaacaaagaggagttgggatgtctctgcagttaacagcactggctagtcttccagaagacctgggtttgattcgctgaatccacatggtatctcccaactgtcagtaatcctagttacaccctcttctgtcattggtagataccaaacaaacatgtacatacattcagacaacatgtcctaccacatgataaaaaagaaatg

SEQ ID NO: 2390 - DNA, 490 bp, Cricetulus griseus; identical to SEQ ID NO: 2389
  misc_feature (58)..(75): n is a, c, g, or t

SEQ ID NO: 2391 - DNA, 472 bp, Cricetulus griseus
  misc_feature (9)..(37): n is a, c, g, or t
cacgtgcannnnnnnnnnnnnnnnnnnnnnnnnnnnntataggctatcttcctcactcaccctccacttcagttgttcaaactgagtctcttactgaacccaaagctcatccacttggctagactagctggccatcaagtccctaggattcctgtctcagtctcccagcactggattacaggcttttcacatggtactcagttccttatgcttcacaacaatcattttaccaatagccatctgcccagcttccagctccattactggaagaaacttaaagcatagaattctgggtccctgcataaaaattaaaactatctactccaagtcagacatgtggccctgtgtctataatctcaactactcagcagtctaaagcaagaagatggagggaacatttgaggccagccgagagctacatacacacacaggctctacctccaaaataaataaataaataagactgctctag

SEQ ID NO: 2392 - DNA, 513 bp, Cricetulus griseus
ggactcgggtgaagatggcggcagccgaggccgcgaactgcatcatggagaattttgtagccaccttggctaatgggatgagcctccagccgcctcttgaagaagtttcctgtgctcaagcagaaagcagtgagaagcccaatgctgaggacatgacatccaaagactactactttgactcctatgcccactttggcatccatgaggagatgctgaaggatgaggtgcgtacccttacataccgcaactccatgtttcacaatcggcacctcttcaaagacaaggtggtgttggatgtgggttcaggcactggcatcctctgcatgtttgcagccaaggcaggggcccgcaaggtcattgggattgagtgttcgagcatatctgattatgcagtgaagattgttaaagccaacaagttagaccacgtggtgaccatcatcaagggcaaggtggaggaggtggagctgcctgtggacaaggttgacatcatcatcagcgagtggatgggctact

SEQ ID NO: 2393 - DNA, 531 bp, Cricetulus griseus
cgcaagaatttggttaaggaggaacaagaaaagtcagagaaggtttccaagcgagtcagtgcagtggaggaagtacggagccacgtgaaggtgctgcgggagatgctgagcatgtaccgcaggcccggccaggccctgcctgaccaggaggccttgcaggttgtgtatgaaagatgtgagaagctgcggccaaccctgttccggctagcaagtgacaccaccgatgatgacgacgcactggcggagattcttcaagcaaatgaccttctcactcagggggttctgctgtacaaacaggtggtggagggacgagtcaacgtggggaatgcagtggccgctccagtgggagaagttactgtccctagagtttttcctaatcaagtggcctgtgggaagaactgccccctcattgacctggagggaccctctttgcttcatcatgacctggcagccttagggatcagcgatattcccactacgaccaaggttgtcattccaagttgctgtaaagacaagaaacagcctgctgcc

SEQ ID NO: 2394 - DNA, 436 bp, Cricetulus griseus
tttgtttcatggtttctgtttcaatttcagttttgcaatgaaatcgggcatgcaaatatctgtccagttagacttgaatttccaaagttgttatgcaaatattagaccattttcacccagaattcccttagtggactagtgatagatatgatgtgtaatctcatgttaaagtgatatttcaaagccaaatgctggatggttgctactttaattacaagcatatcctagagtcctttttcttataatgaactctacatgtacatctttgatatctgtttgccagtcatctccttcccacctgtgtccacttgtctcatctagggagggctaagaaaaagatggattttgtcattataattatataacgtgacaatagattttaaagagcatgtgaacaaaataattgtcccaaaagactgagtatggagaaatcact

SEQ ID NO: 2395 - DNA, 509 bp, Cricetulus griseus
tactgtgtcgacataggaactggctgggtgttatagccatgagaccctggaccgtacatttgtccggtggatgggccagccatgtaatgtgggctgggctgggctgacttcacttgcacattgaaggtgggccttgaaggtgtggaggctgtagtgtaggaggctggaactggctgagggtgtggtttgagagttccgatgggagccactgggatgggtgcagcctggggtgcaggttgtggtttcatcgcagacttcttggttgctgtcagaggtggctggtttggaatgaccattctcttatgccctgtgacaggagtagggactgcaggagaggatgttgcactagtggaagcctgtgggggccgaggcttgtagggagagctgcactccagatcagccaggatactggtcaaggaatcaatttcggcgtccagactggaccgcctttcctccagggtcttgcctccaggatttccctgctgtactttgaaagcgccttcatccat

SEQ ID NO: 2396 - DNA, 352 bp, Cricetulus griseus
cccgggatctctaaaatcaaaatatctaaggagccttactgaatccaggatagagcagcttactgtgtctttatggcagtgccatccacttccccctggtaaagaatggaatgagtaacagcaaacactgtcctttgcattaccatctcaccacccctaaagcttcttaggctgtattcttcaaaacagaaggaagcacacttaagtgcaaaagagcactgctgccttggtattcctcctttttaatacactttgctctcaagttcaccctttctaggaacctagtcaagtgacttacatatactaggaattctcattaaatgtaacacaaagccttagcatataggcaaag

SEQ ID NO: 2397 - DNA, 546 bp, Cricetulus griseus
  misc_feature (219)..(233): n is a, c, g, or t
gaacagggagccccgcggcgccgtcgaggccgagctggaccccgtggagtacaccctccggaagcgacttccccaccgcctgccccggaggcccaatgacatttatgtcaacatgaagacggactttaaggcccagcttgcccgctgccaaaagctgctggacggaggcagcagggggcagagcgcctgcgccgagatctacatccacggcttgggtcnnnnnnnnnnnnnnnccatcaacatcgccctgcagctgcaggcgggcagctttgggtccctgcaggtggctgccaacacctccaccgtggagctggtggatgagctggaaccagagattgactctcgagagccactgaccaggatccggaacaactcggccatccacatccgggtcttcagggtcacgcctaagtagatggagtgaagccagactgtcatacaccaactcctgggagcacacacatccgggcgtcatgtggctgaggttgctgctagttcataggactcttgttctcatatggacctgttgtcagagccttgtaagaa

SEQ ID NO: 2398 - DNA, 372 bp, Cricetulus griseus
ttggaggaaagcaactgaagtccaaaaatgaggacacaggggtagaagttcaaatccgtccacatcacaaaaataccaggggggtgtggcagcccacctgtgaccccaaaatgcaaaacaaaaaggctaaaaggacctgaaagcaagccagctagcaaaacaaaaccaagtgacagtaaaatctgggttcaactgaaaaaccctgccttcaaataaagggcaaaaagagtgatccaagatggcaaacatctaccttattttggacacatggacacacagacccagacttggatggacggacacacacacaaatgctgaatacttccataagataaataaaccaaaagacaatggcacaatggcaaaagctca

SEQ ID NO: 2399 - DNA, 353 bp, Cricetulus griseus
  misc_feature (31)..(48): n is a, c, g, or t
  misc_feature (187)..(209): n is a, c, g, or t
tgacatgtaaaacaattttgtttctaattcnnnnnnnnnnnnnnnnnntgtagtatagcttccttgcccttattgtttatccaatgcagagtggtcatgccctggaaaccatatacacccaaacaacaaaaaacgggttcactagggggggtttatatatatttgggcatatacatacattatatgnnnnnnnnnnnnnnnnnnnnnnnttgtcaacttataagcggggaaatatgaggggtctggggggtatctgggaggggttgaaaggaaaaaacacaatagaaagggataggattctatttatagtaaaaaaacaaagattttaaaataaaacatgatttggtactaat

SEQ ID NO: 2400 - DNA, 579 bp, Cricetulus griseus
tctctcccttcccttccagcctgccctctcccctctttgtttccttccctcccttcttctttccttccttttcttctttggatttccttccttctctgatttgaatggtggggatcaatgctgtttcactcaaaggtgttgcatgcaaacacttctctttattctgcatttattgtgatttttggaaacaggtatcagccttcacagttgggtgaacaagttctgtcctacagatgtccagtttatttgcattttaaacattagcctatgatagtaatttaatgtagaatggagatattaaaaaagaagcaaattatttgaagctctctaatttgtggtaaaatattgcttattgtgactttggcatgtatttttgctagcaaatgctgtaagatttataccattcattggttgtttttgctattatttgtacacagtacagtaagcacaattggagttgtacatctagaagtattactgtagaatctctgagcagaatatgtgtaaccaaaatgagaaagaatataagaaatattcctgaagctaggtatgtctcacgattttgtagaatcttacagc

SEQ ID NO: 2401 - DNA, 395 bp, Cricetulus griseus
agtttcactctctagataagccctaaatctagcagcagtcttcctgccttggtctccccaggacccatgtcaagcccagaacaaggtatttttcatactgcgttcaaagaagagacagatttgtttttgctaacaaaaatgatagctggagagtgtcctatacgttctcacttgtgtttggtgggaatagaaaggtaattgcatagcttttaaattacagatgggttggggagatggttttgtgggcaaagtgcctgatccacaagcatgagaacctgagtttatgcccctagaaccaaagtaaaaacactggatggggcatcatgtacctataagcccagcactgatgagagaaaaggtagagacaggcagatcctggaggttcattggtcagc

SEQ ID NO: 2402 - DNA, 507 bp, Cricetulus griseus
ggaaaaatttagacttagagcacagttgcatactgtgccagactgtttttctcctggtgttaagatcttatgcatccacagggcatttgtcaagaccaggaagttggtgtcccacacccattaacactgacttgtgttctagtccagcatcagatccagaatctggacccaaatttagctctcatggctttattcccttgcaataaattagtcttccgccttcatttcctatgaccctgacactttggcatacatttaccatttggtgggatatcccccagtttaggtttgcagtcagtacattgaggttttgggaaatactttgtggatgatgtctgtgccctttttgttcatcatcatcaagaggaacatggtggttactggctagggtagcctctcccttgcagctcttccgtggcgctatcctttgttagcgctgtctctcattacaccttagtgagttgcacacagcactcatgactgtggtacttgttttatggtagtttg

SEQ ID NO: 2403 - DNA, 550 bp, Cricetulus griseus
  misc_feature (54)..(72): n is a, c, g, or t
aagtatgctgaggagcgttgggaggtggtcctgcacttcatggtgggctctccnnnnnnnnnnnnnnnnnnngacctggctcagctcctcagccaggctgggctcatgaaaagtgctgaacctggagagccaccttgtatcacttctgctggcttccagttcctgctgctggacacgtcggcccagctctggtacttcatgctgcagtatctgcagaccgcccagagtcggggcatggacctggtagagattctctctttcctcttccagctcagcttctctactttgggcaaggactactctgtagagggtatgagtgattctttgttgaacttcctacaacacctgcgtgagttcgggcttgttttccagaggaagaggaagtcccggcgttactaccccacacgcctggccatcaatctctcatccggtgtctctggggccgggggcagtgtgcatcagccaggcttcattgtcgtggagaccaattaccgactgtatgcctatactgagtcggagctacagattgcgctcatcgcacttttctctg

SEQ ID NO: 2404 - DNA, 510 bp, Cricetulus griseus
  misc_feature (40)..(58): n is a, c, g, or t
  misc_feature (92)..(109): n is a, c, g, or t
ttatctaaaagcagtttggttttgtggggaggctgcggtnnnnnnnnnnnnnnnnnnngctttggaggctgtcatggaactagtgctggtcnnnnnnnnnnnnnnnnnnacttgcctctgcctcccaagggctgggattaaaggcatgcgccaccactgcctggcacctaaaagcattttgaaaataatagttaaaaacaggagaacacacaactaaaattgttctttaaaaagtgggaatatttttatatcacacaacagaaacttcagcagtgtggtagactttaagctttgctaaagcaggctctgccatgcttatgcaatagcgttgtcctcctgcttgccagcagcttcagaccttacatgcacataatattgtcacaggcaagattgtctaacaagcctggtgggtactttcttcatctgggcactgtggcagccattagccacaagtagttgtattccagaaatatgctagtacagctgagagaataaatttttaatcttgct

SEQ ID NO: 2405 - DNA, 461 bp, Cricetulus griseus
tctctggtcccggcggtaagatggcggctaccgcggagtgcgatgtggtaatggcggggaccgagcctgaactgctagaggacgaagaagcaaagagggaggcagaatccttcaaggaacaagggaacgcatactatgctaagaaggactacaatgaagcttataactattacacaaaggccatagatatgtgtcctaaaaatgctagctattatggtaatcgagcagccacactgatgatgcttggacggttccgggaagctcttggagatgcgcagcagtcagtgagactggatgacagttttgtccggggtcacctccgtgaaggcaaatgccacctctcacttgggaatgcaatggcagcatgccggagtttccaaagagccctagaactggatcataaaaatgcccaggcacagcaggagttcaagaacgccaatgccgtcatggagtatgagaaa

SEQ ID NO: 2406 - DNA, 437 bp, Cricetulus griseus
  misc_feature (412)..(432): n is a, c, g, or t
tgtgctaaaaaaaaaactactgaaagaaatgagggcaaaataatcggaaggaattttatgttcatggactagaaaaataatatagtaaaaatgtctttatcacccaaagctacacactaatcctatccaaataccagcgatgcggatggagacagggctcagtggttaggaggacttttgctcttgtagaggacccaggttcaattccaagcactgaatggtggctcacaaccatttgtaactctagttccaaggggtctgatgccttctgccctctgaggatgctagacacacgtcgtacacatataggcagaatactcacataaatacatctgaaaaccattaaaaccataaatgattttctttacagataaagaaaaatagtcataaaactcatagggaacctcaaccnnnnnnnnnnnnnnnnnnnnntttta

SEQ ID NO: 2407 - DNA, 429 bp, Cricetulus griseus
ccgcaaatgtgaaaaaacctttagccagaactcccatctaactcagcatcagcaaattcatacagaagagaagccctataagtgcattgaatgtgacaaatcctttacccagagcatgcacctaactgaacatcagagtattcacactggagaagaaccttacaattgtcatgaatgcccaaagactttcagccagagcacatacctcattcagcatcagaagattcattcaggagagaagctttttggatgtgatgactgtggaaaagccttcaggtgtcgctctgctctaaccaaacaccagagactgcaccctgggatagctgctctaggaacatcataaatgtagctgctgttttcactttgggttttatagtgatgaatcagagcggggtaaggaacccctaaattattttaaatattccctat

SEQ ID NO: 2408 - DNA, 359 bp, Cricetulus griseus
cctcaatctcttagtaacgaagcattaatgaggagggctgtgtctttggtgacagatagcacctccacctttctgtcccaaaccacatatgctctgatggaagcaatcactgagtatacaaaggctgtttatacgttagtgtcactgtatcgacaatacacaagtttacttggaaaaatgaattcacaggaggaagatgaagtgtggcaggtgattataggagccagagttgagatgacgtcaaagcagcaggaatacatgaagctggaaaccacttggatgactgcagttagcctgtcaaagatggctgcagaggctgcctatcatactggagccgatcaggcctctataaccgccag

SEQ ID NO: 2409 - DNA, 445 bp, Cricetulus griseus
atggggagcctgagttccactactctgagcgcgtgatggatcttggcctgtctgaagaccacttttcccgccctgtgggtcttttcctggcctcggatgtccagcagctgcggtttttttttttagagtgcaagcaggtgattctggagctgcccgagcagtcggagaagcagaaagatgctgtggtgagactgatccacctccggctgaagctccaggagctgaaggatcccaatgaggaggaacccaatatccgggttctcctagaacaccgcttctataaggagaagagcaagagtgtcaagcaaacctgtgataagtgcaacacgatcatctggggcctcattcagacctggtacacctgcacaggatgttattaccgctgtcacagcaagtgcctgaacctcatctccaaaccatgtgtcagctccaaggttagtcacca

SEQ ID NO: 2410 - DNA, 527 bp, Cricetulus griseus
atgtgaaaccttttttaagatttttctcaaaagttttgaaaagctattagccaggatcatggtgtaataagacaacgtttttcctttaaaaaatttaagtgcgtgtgtagagttaagaagctgttgtacatttatgatttaataaaataattctaaaggaaattgtgtaattatagactttttattttaaataagttaaggagtgggtagtataattaaggtccattgcaaagttgttgttgtatttgtgtaagataaaatgctggtcagttttaagtgtgttgtctgcaattcatcaggattaaattatctagttaacttaagggatatctctgcaaggagaaacacctttttagatcttttagatgctgcttcttcaatgcaaggaaaggaaataaccccagcgaggtactcttcagggacacaggtctagtacaagagaactcttgacgactaagctcagccagtcttaagaaactgtgctgtgtctacaaagcttaaactacagtagttgataaggatgccaa

SEQ ID NO: 2411 - DNA, 80 bp, Cricetulus griseus
ctgtatatattctctgtacttgtaacttgatctctcactgtctccttgactagttctgaccttgaaagtcttctgctctg

SEQ ID NO: 2412 - DNA, 531 bp, Cricetulus griseus
  misc_feature (316)..(316): n is a, c, g, or t
tttttactagagtcagcacacttcctgcaaccagcacccggcagtgccatctcctccttgatgtcttcaactccacagagcacgagctgacaatctgtgccaggaacaactctgagcttgtcttgcatgccagcgagtgccagcgaatggctattcaagtggacaagttcaactttgaaagtgtcccagaatcccctggagagaagggacacttgacaaatctgaagcagctagaataagagaggcaggaggcacgaggcctggagatcagcagcaagctggacatctgctggagaatcccatctctaaagcgcancggtgaggcgagcgtggagggcctcctgaaccagctcgtcctggaacacctgcagctggcacctctgcagtgggatgtgctggtggatgggcagccatgtgactgtgaggtggcagctgcctgccaggttggtgaccctgtgcacttagaggtgcggctgacgaatcggagtccctacagcgtggggccctttgccctcactgtggtccccttcc

SEQ ID NO: 2413 - DNA, 312 bp, Cricetulus griseus
  misc_feature (216)..(311): n is a, c, g, or t
tttctgcctcagcccaggctctgtcctttgtgttcaccagattcctggagaggcctggctttcctgctgacctgacacatgtacctagggcacacatgctcattggtactgagggactgtggtgagctgcattcctaggggtaggtggcagggaaaggctggcttcagcggtagcaggtaccatttcctggcctgacaacatctgaggcctgacannnnnnnnnnnnnnnnnnnnnnnnnnnnnnnnnnnnnnnnnnnnnnnnnnnnnnnnnnnnnnnnnnnnnnnnnnnnnnnnnnnnnnnnnnnnnnnng

SEQ ID NO: 2414 - DNA, 523 bp, Cricetulus griseus
  misc_feature (370)..(389): n is a, c, g, or t
gaattagggagtggttatgaaaggaacccaccctacttacttatgagggaacccaaaatgtccaccagaaaggttctggtggcttataggttgctcctgtcctggaaatccttacttgctcagtgttctgagtagctgggatggtgcagttgtggcttgctttctcttgtggtaaaagtggttcagagggaagatctcatggcactttccctcagaagtcctttcaggtccttgcagttaaggaaggcagagctcccaagctccagctcagtttcattgtatagacagtgaaggtttcgttcaccccttttggggctggttgagacacgtttgtaaattaactcaccagtggtgtgcgagccttcgttgnnnnnnnnnnnnnnnnnnnntaacagagaagactagaaatgaagtctatggtatcacctgacgctgtcttttccgtctcaaggcatggactgtgagggaggcttgctagagaagggaggcaatgctaacgagtctcgttgtcacgactcacagg

SEQ ID NO: 2415 - DNA, 532 bp, Cricetulus griseus
ccgcgaggtgactcctgaccagaagcttctgtcccggagactcctgaccaagaccaacaggatgccacgttgggcagagcgactgtttcctgccaacgtcgcccactcggtgtacatcctggaggactcgattggggacccacagaagcaaaccatgaccaccttcacctggaacatcaaccacgcccggctgatggtggtggaggaacgatgtgtttactgtgtgaactctgacaacagcggctggaccgaaatccgtcgggaagcctgggtctcctctagcttatttggcgtctctagagctgtccaagaatttggtcttgcccggttcaaaagcaatgtgaccaagacaatgaagggctttgagtacatcttggccaagctacaaggtgaagccccttccaaaacacttgttgagacagccaaagaggccaaagaaaaggcaaaggagacagcgctggcagctacagagaaggccaaggacctggccaacaaggccgccaccaagcagcaacagcagcagcttgtgtag

SEQ ID NO: 2416 - DNA, 480 bp, Cricetulus griseus
  misc_feature (269)..(294): n is a, c, g, or t
gtaaggcatttttcctaatgtccaaatggaatatggcttcttttcagtggccctagccatgtcttcctcaactttatgctctgtttatgagcaaactgcaagtttttcagatccattttttttgtcttttgccaccagttctcactataaacttggataaatctgacagtagtgacaatgccaaagcctgaatgatgagctgactgggtttcccttgccttattaatctgttacctatgaatttagcctaagagtctcaggaccccgannnnnnnnnnnnnnnnnnnnnnnnnnaatatgatatcgaatggcctctagttcagttcccagtagtcctgttcccatctggaacccctgtctgaaagttctgcttacaccactctgtgctcactcacttatctaagcctttccagcaagccagctctaaaggcttacacaatgatgtgatcagggttagtcacagcaatgcccctactccca

SEQ ID NO: 2417 - DNA, 579 bp, Cricetulus griseus
  misc_feature (178)..(178): n is a, c, g, or t
ctgtggttctggcttcttgtggcagtgagcaggcttttgctctgtacctgtgggaggctctgcacacaatctttctgttctctgccctgctgctgcttgcccagcactcagctgaagtagaagaggctagccttggcatttgtgttctgctaggagcatgtggaggtggttgacatancctaagtgcatgctgagtgcctggaggaatgttctaagggggagcctggcacagcctcactcctgggtccttccttagtctccatgcttttctactccgtttctgttgttttccccagcttttgaggagttcagtgtgggttctggaatggctctctctaagggctgtgggtcagtcagttcatgaacggccaggacagtgtccttgttcttcctgttaccactgctgcctggaaagcaacaggacctgtgttctgcctcctaactggcagtgccccacagcttcctgccttcttatcccgggctgctttctcctcagctccctgaagagaggccttcagacagtctcccagtgcctgcaccgctcaacgtgcatcttcctgcttctatgtgtctcctccc

SEQ ID NO: 2418 - DNA, 379 bp, Cricetulus griseus
ggactgccctgttccttacaaagaaaagagaactctccccggggctcccgccggcttctccgggatcggtcgcgttaccgcactggacgcctcacggcgcccatctccgccactccggattcggggatctgaacccgactccctttcgatcggccgagggcaacggaggccatcgcccgtcccttcggaacggcgctcgcccatctctcaggaccgactgacccatgttcaactgctgttcacatggaacccttctccacttcggccttcaaagttctcgtttgaatatttgctactaccaccaagatctgcacctgcggcggctccacccgggcccgcgccctaagcttcaaggctcaccgcagcggccctcctactc

SEQ ID NO: 2419 - DNA, 405 bp, Cricetulus griseus
gaatttttttccttgctgtcttctccatctttcccttcttttgttctttgtttctttgtgcttttgagacagtatctgttagttaacccaggctggtcttgaactcctaggcctcctgcctttacctcctgaaaatgaaatcatatgctacgttgcccaacttcctctccagtaccaaatttgtattactaaacaaatgcccatgcacacagaaaatggagatgacttcataagtgtgataaactttactttttgaagagcagggtttattttattctgaaacttatgaaatccatttaatatgtatattggcctacctggctggttacgttattgggacaacgggttttttcctatctgaatttttttttgtgactgttcatttactcctttgtaaaatacttg

SEQ ID NO: 2420 - DNA, 378 bp, Cricetulus griseus
attcaaagcaagcggcagacaccttcccccaggctggctctgtccacccgctacagccctgatgagatgaacaacagccctaactttgaggagaagaggaagttcttgactttcttcaacctgacgcacatcagtgcagagaagaggaaagacagagagaggcttgttgaaatgctccgtgccatgaagcagagggcactgtccgcagcagtggcagactcagtgacaaactcctcgagggacagtccttccatctccctgagtgaaccagccacacagccagctcctctagagacagatcaacctgccggagtccctgcctccttgtcagatgtcccaaaggccgtggagactgggagactggaacagctccggcct

SEQ ID NO: 2421 - DNA, 578 bp, Cricetulus griseus
acataaacataaaataatcttaaaagaaacaagctatgtggcggtgcagcgtcagctctgtgaagaggtggagagcctacctcggtcactctgggatagaacccttgttgtatcagttgttgcttgataataacacatcagaacaagaaaccctccctctgctgagcgttcctgggctgtggagacagctttgagaacaaactaggcaaaagggtagaaggacttcatgtcagctccactttcagtttgctttaagggaattaaaagtacaaagctgcccctgtaaattcttttctttgccttcctagctctgtgttctacagagtccagtgtcctttcttcaaaattgcgaccaaggccagtggcctctccgaagacagcagttgctttctaagctatttagagcaatagatactttttggtcacatcaagtccaaggccttcgccaatctttcatgtcctgacctaaataaggtataggaactcttccttgctgagtgggtttcttaggaatatgcaaacgctgcagtcacaggcaatgggcccaggaagtggtttcatggacccgtcatcatagc

SEQ ID NO: 2422 - DNA, 540 bp, Cricetulus griseus
tttggagtgagacagaaatgggaccagaagtcacagaaaccccgagactcttcagttgaagttcgcagtgactgggaggtgaaggaggagatggattttcctcaactgatgaaaatgcgctacttggaagtgtcggagcctcaagacatcgagtgctgtggcgcactggagtactatgacaaagcctttgaccgcatcaccacgcggagcgagaagcctctgcggagcatcaagcgcatcttccacaccgttaccaccacagacgaccctgtcatccggaagctggcaaaaacgcagggcaatgtgtttgccactgatgccatcctagccacactgatgagctgcacacgctctgtgtactcctgggacattgtagtgcagagagtcgggtctaaactcttctttgacaagagggacaactctgacttcgacctcctgactgtgagtgagacagccaatgagccccctcaagatgaaggcaattccttcaactcaccccgcaacctggccatggaggccacctacatcaaccacaacttc

SEQ ID NO: 2423 - DNA, 566 bp, Cricetulus griseus
ttagtgtaggatgtaaaaatacttaagcatattcagttgttatattttctaggctttttcatgttcctttagagcatgttgatgatggctaaggcactgtgacctctgaggcatggaaggatgacctaagtttgtgagctttatttgacttggtaagggcataggtattgagggtaataatggtatctgtgattgttaattaacagtgagttaaaaacaaattgagtaaaaacaagttacttttatcaaaggcatttataaatgtttaatttttaggatgtattgtggaattacataccagaattctataattaataaaatgttgtatagcaatgtagtgtaactttctcagtatatagttgtagtcagtggaacaaagccttctagcatttatgagttactgattttaagacttaagtttctataaaatgacaactttaaatgctatttcctcctgctgactggtaatgaatattgacattttaccaataaatagaacttcagtgttcatatgcaaagttcttagtgtgttgctagtttgtatccctgtatttaagccaattgag

SEQ ID NO: 2424 - DNA, 479 bp, Cricetulus griseus
  misc_feature (257)..(276): n is a, c, g, or t
ttttgtgctttgagaatacagtttaaaacaatacttgcaattttaacatttcattgctttcctttttaacgaaatggcattggtttctcattgagaacccaacttactgtaattacagttataatactcgttagtgattttgtgctactgttgttaatcttttttgattctttttgtttttgagacaggatttccctgtgtagccctgactatcctggaactcagtgtgttggccttgaattcacagagatctgctnnnnnnnnnnnnnnnnnnnntgcgatcaagtgtttaccattactgcctaacagaattgattcttaattcagtcagttgaatgaaattaaagttggaatttttatcacagaattcctaattagagctaaaattcaagtatcttttatgtctattgctttttgtcttctaccattgtaagtcgtgtctgtgttgattattatctatgtgtgtatgatcatccgat

SEQ ID NO: 2425 - DNA, 579 bp, Cricetulus griseus
  misc_feature (2)..(15): n is a, c, g, or t
annnnnnnnnnnnnngagctcaaagtggcccagacggacggtgccaatgtggacatgcacctgaagcagattgaaatcaagaagttcaagtacgggattgaagagcacggcaaggtgaagatgagggggggcctgctgagaacctacatcatcagtatcctctttaagtctgtcttcgaggtggccttcctactcattcagtggtacatctacggcttcagcctgagtgccgtctacacctgcaaaagagatccctgcccccatcaggtggactgcttcctctcgcggcccacagagaaaaccatcttcatcatcttcatgttggtggtgtccttggtgtctctcgctttgaacatcattgagctcttctatgtcttcttcaagggcgttaaggatcgcgtgaagggaaggagcgatccttaccacgccaccaccggcccactgagcccctcaaaagactgtggctctccaaaatatgcctacttcaatggctgctcgtcaccaacagctcccctctcgcctatgtctcctcccgggtacaagctggttaccggtgacagaaacaattcctcctgccgc

SEQ ID NO: 2426 - DNA, 484 bp, Cricetulus griseus
taagccacaggatagagatcttatatggcagcgtaaggggagtgtctaggggtacgcacaggctcaggattggtgtgcctccaggcttggaggacttgccctgtgttgattggtcaactggttgttatggcccatatgccctcccagggctgttgctatgctctgcatgcacttgtccgtcagctaacttctgattggttccttgctacgaggccgccatctgacctcctagtgaccaaggcaaggtcaggcaagcattgttaagctcttatggctgccgaaatggggagctggtcccttcaaaatcactcttccttatttaacttgtatgtatatagattcatgttccatcatcagaattacagatgtctctcacacttacatgcttatgtgggatttttatttctggtcatctgaatagctgacagagattagaaattgtttgtgatatgggaacttggggttattttcctccccagtttgt

SEQ ID NO: 2427 - DNA, 147 bp, Cricetulus griseus
catatggttatattaggctatgtaggaggcacaaaggccttggtactcacagtaaaagcacaaggggagcctggaaagctaaacacacagggttattcctttgaaggaaggaatgtataatttagtggttcccaacctgtgggctgt

SEQ ID NO: 2428 - DNA, 147 bp, Cricetulus griseus; identical to SEQ ID NO: 2427

SEQ ID NO: 2429 - DNA, 283 bp, Cricetulus griseus
gtgctacgttcccctcctgtatgccggcatttgcaaagtggggtaccacgggatgtgctgctcttccagcatgaacggggccgcttctttgccatccttggactgttttgcgctggtcagggcatcttctggacctccctggctgttgcatcattgtcccgacctctgatccgggttcctgcagaggctcccaaccggggctacacggacctgtgctctgcactctggcgctacgggctagctattggttgcggcacgatgggagccttggtccttggtgctg

SEQ ID NO: 2430 - DNA, 120 bp, Cricetulus griseus
gtaggtgaaagacccgagctaacatgtggttagcttgttaaattacaataaagcctcatgcagttttcagcaagctctcaaatccgcctggtgattggggtgaccttggtcagggcctgt

SEQ ID NO: 2431 - DNA, 580 bp, Cricetulus griseus
  misc_feature (16)..(39): n is a, c, g, or t
  misc_feature (410)..(410): n is a, c, g, or t
ttattaaggcatgatnnnnnnnnnnnnnnnnnnnnnnnngatcatcctaaaggcaactccgttccccaaggatgggtccttcccccgatccccagcaacgacatctgggcaacagccgttaagcttcattaagaccctccaggagtgtggtccagcaggccagcactgcagctctagatgtcagtgatgctgccgtctcacgctgtagtcttctgcacaacttaaacttcatgcggcattgctgtagctggaagtcctgcttctctctattctctgccctggccagagttacctcttgaatcaagaggttgataaagttcttctggaaagggcctagatgaactgaagttattagcatgggcagtggccttcactcactaactgcctctgttttgagaggcttggcctantgtggcctacttatctgttctaagcttgttttgaattggcgggtaaatacagtcagcacacttggttactccttgaagatgttcacggagtagagttagcaggcactactccttattttcctctaccaactgccctccagcttccaggtcaaagtttgacctacagttct

SEQ ID NO: 2432 - DNA, 576 bp, Cricetulus griseus
actgcaggacagagagcgtgcgctcagagctcgagaggacagtctggagcagaaggagcgtgaactttgtattcgagagagactagcagaggacaaactggccagagctgaaagtttggtgaagaactacagcttgctgaaggagcagaggttcctgtgcctggctagtgacccagaccttgatcatccatccttagtaatgaggaagaaggttcatttccgtggggaaagcaaagagaacaccacaaggagtgagaattctgagagccagcttgtcaaatccaagtgcaaggacctgaagaagaggcttcatgctgcccagctgcgggctcaggccctgtcggatattgaaaagaactaccagctgaagagcaggcagatcctgggcatgcgctaggccagcaaggcatggagctgggccagtggtgggtactgccagcccactagagatttgtactcgactgctgtagttttgtgtgtctggttctgagctttgcctttgtgtgcagtgagcatgacgctgggattgtttgtgctctttttcagcagcaagtctacaataaggacatgtctccc

SEQ ID NO: 2433 - DNA, 522 bp, Cricetulus griseus
ctgtgtgaagaggtttaccacagaggaatgggtgaagctccagatggacaccacaccagggtcttccaaggaaaatgataaacagacccttcaatcaagcatcccaccactctgggcctgtagctgttttgctcatgacatcccggaagttcagcaacagagggctcatcttccagtggtgtttagaaaggtgacatgctctccagaagccctcttcatggaacagttctcagaatatgagcgatatgagcggttactttggacagagctgggctcacttcgtcaaggaatgctggtcatctctaagacctggactttggatcctggctcacaggagaagcaggaagtcatcttggatatgcttcatatttcccaggacagactcctgaccctgcacagctttgtcctgggagatggggagctggaagacacagcactgttctgagggaactaggtgctaagttaaagaactattgtaaacaaacggcactaactttaaagcagatgctggtaaatcatgct

SEQ ID NO: 2434 - DNA, 211 bp, Cricetulus griseus
tttcaataacactggcagtttccctcaaaatttcaatgaatattcgcacaaagaaccaagttgttgaagatttcctggtttgtgttttttttcccccccagggtgggggtggagattcgggcaaagcattctcatcccttcacacacaagtccagctggtggtaatgctgaaaatatctcatatgctctcacgcccggagcaccacccagc

SEQ ID NO: 2435 - DNA, 250 bp, Cricetulus griseus
gtcgtcttcgctttgctccgggtctcccgtgaccgccgagccgcggagctcgaccggcgtctgcccgcccgtgcggccctcgcgttcccgcggcagtccaagtctgtggagaaacattcgctatcatattagatgaccaaaatggacattcgaagggctgtggatgctgcagtcccaactaacatcattgcagctaaagctgccgaagttcgggccaacaaagtaaactggcagtcttaccttcaagggc

SEQ ID NO: 2436 - DNA, 578 bp, Cricetulus griseus
cattcaacaatgatgctggcttcgtggctgcactagataaggcttgtggtcgcttcataaacaacaatgcagttaccaaaatggcccagtcatccagtaaatcccctgagctgcttgctcggtactgtgactccttgttgaagaaaagttccaagaacccagaagaggcagaactagaagacaccctcaatcaagtgatggtggtcttcaagtacatcgaggacaaagatgtgtttcagaagttctatgcaaagatgcttgctaagagactggtccatcagaacagtgcgagtgacgatgcggaagcaagcatgatctccaagttaaagcaagcttgcggttttgagtatacctccaaacttcaacgaatgtttcaagacattggtgtaagcaaagatctgaatgaacagttcaaaaagcacctaacaaattcagaacccctggacttggacttcagtattcaggtcctcagttccggatcgtggccctttcagcagtcttgcacgtttgccttgccatcagagctggagcgcagttatcagcggtttacagccttctacgccagtcgccacagcggc

SEQ ID NO: 2437 - DNA, 580 bp, Cricetulus griseus
  misc_feature (525)..(525): n is a, c, g, or t
  misc_feature (552)..(552): n is a, c, g, or t
catagctccggtgtgagacatggtgttgtcggagctggcggcgcgtctcaattgcgctgagtacaaaaactgggtgaaggcagggcactgcctgctgctgctgcgcagctgcctgcagggcttcgtcggccgcgaggtgctctccttccatcgcagactgcttactgcagtccccggccttggtcccaacgccacctgccgcggcggttcccgatgcaacccgcgagctcgccagtttcagcctcagtgtcaggtgtgcatagagtggaaacgtgagatcttgaggcatcacatcaacagaaatggagacgtgcactggggaaactgccggcctggcctctggcctgtggacgcttgggaggtagccaaggccttcatgcctcgaggactggcagacaaacgaggacccgaggaatgtgatgcagttgctcttttaagtctcatcaattcctgtgatcacttcatggttgaccggaagaaagtcacagagctgttgacatctgactgggctgtgcacattcctgnagaagatgaacgagatggatgtgaatntgaaatgggaagttacttgagtgtgagc

SEQ ID NO: 2438 - DNA, 438 bp, Cricetulus griseus
cactgtcccagataaccatcggaacaagtttaaggtcattaatgtggatgatgatggaaatgagctgggctctggcataatggagcttacagacacagaactgatcctctacacccggaaacgcgactcggtaaaatggcactacctctgcctgcgacgatacggctatgactccaatctcttttcttttgaaagtggccgaaggtgtcagactggacaaggaatctttgcatttaagtgtgcccgtgcagaagaattatttaacatgttgcaagagattatgcaaaataacagtataaatgtggtagaagagccggttgtagaaaggaatagtcatcagacagaattggaagtccctataacacctcgaacacctacaactccagggtttgctgctcagaacttacctaatggatatccccgatacccctcatttgg

SEQ ID NO: 2439 - DNA, 380 bp, Cricetulus griseus
agtgttgcactgtaatctatcatatagagctatatgtatggaaatttttgatcagtttttttaagagatgtatcctgtttgcaaaggcacaataaaattgcatcttctagattataggcaataaaggtaacaataaaccttacttaaatcatactgatactctctgctcatttgattttttgggggaaaaaaagtctaacatatccagtagtttcagggatttcatttaacttaaaaattctgatatatttaatttataaatttcggacttatataatagagtttggaaaactataagaaatgctttgttaatgtgtgtattcctatgtaaaacacatggcttctcccgtgtatattttttaagattaaagaattgcaca

SEQ ID NO: 2440 - DNA, 177 bp, Cricetulus griseus
cttagggaacaagtccaagacctgtttaacaagaaattggtgaagccttgggcatcaaatacccagtgcaggtcccctacaagcgaatcaaaagcaatccaggttcagtcctcatcgagggcctgcctcctgggatcccattccgtaaaccctgcacctttggctcccacaacctgg

SEQ ID NO: 2441 - DNA, 151 bp, Cricetulus griseus
ggcactcctccccagccccttggaattgcagcctccccgagggccttccgactatggccgacccctcagcttcccaccaccccgcatcagagaaagcatccaagaagacttggcagaggaggctccgtgcccgcagggcgggcgggccaac

SEQ ID NO: 2442 - DNA, 523 bp, Cricetulus griseus
gcaaataaagagaaaaatctggagcaatataataaactggatcaggatctcaatgaagtcaaagctcgagttgaagaactggacagaaaatactatgaagtaaaaaataagaaagatgaactacaaagtgaaaggaattacttatggaaagaagagaatgcagagcaacaggcactcgctgctaaaagagaagacctggagaagaagcagcaacttcttagagcggcaacagggaaggccattttaaatggaatagacagcataaacaaagtgctagatcattttcgtcgaaaaggaataaaccaacatgttcaaaatggctaccatggcattgtaatgaataattttgagtgtgagccagctttctatacttgtgtggaggtcactgctggtaacaggttattttatcacattgttgattcagatgaagtcagcacaaagattttaatggagttcaataaaatgaatcttcctggagaggtgacttttctgcctcttaacaagttagatgtgagagataccg

SEQ ID NO: 2443 - DNA, 514 bp, Cricetulus griseus
atctttgaaaaatgaaaccttagttacagaatttaaattccaggtataagcccatggtttaagacaagagagtctagtttaaatgacaaggtctttagtcattagcttgtttacttcttactctattccaaatataatcctgttatgtcattatcaactatcgctggattttaaggtttcaatttttttgttgtaataatgaatttttctttccaacacaattttaaaatcaataatgatgatttaaaaaataaacaaatcaagaagttatagataacacatagagtgatgattaaagcataatcaaaatgtaaactgaagaactgcaagtgaattaaattagtgtgctacaaatagtgaacaaaaaaagcagtagataaaggtattttctgtgcacacaacttcaccacaatagaatctaccctcacatgtatcaatattaaattaaagtaatgaagttactggtaagaagtatagattaaaatcctaattataaagtcacaattgcagagta

SEQ ID NO: 2444 - DNA, 398 bp, Cricetulus griseus
taaaaatgtaaatgcaagttattgtcttaagtacatctttataactttaagcacactcacatatatttcttcctatgttatctattaatttttttcatttatttctgatatagtttctctctatgctgctcagtgagtgtgcagctgaaatattaaagccatgcttgttttctgcatactgagctcacaatggtggagaccaccttcctgagctaatggtattttaaaaacacctgcttccccattttattctggatacttgattactcatttacataataatattaaaatttaaattttgtcatattctggaatttgctgaagtctttggacctaagaacattatttgattattgagtgcttctctttacacaaagctatgtaccttcacaaaatag

SEQ ID NO: 2445 - DNA, 335 bp, Cricetulus griseus
  misc_feature (3)..(38): n is a, c, g, or t
cannnnnnnnnnnnnnnnnnnnnnnnnnnnnnnnnnnntgcctgcactttgagtctcctggaattcctggggactacctcatcactgccccctgcccttgcttctataagctaactcatgcaagaatacagtgttgaatattcaatgcccagagtctcaaaagttgcctggctttctctgtttaccagagtgggcagtgggacagaagaagttttgagttcctcatctataaatggatagtaagactgcccaatttctacggagtcagtttttatcctgtgaaaaattggaaggctgtgtggaacgcattgcatccctgctatggactaatttgc

SEQ ID NO: 2446 - DNA, 329 bp, Cricetulus griseus
  misc_feature (116)..(137): n is a, c, g, or t
gatcctttgttcttccacagacatgtctgctctgatttcactcaggaaacgtgctcagggtagagaagcctttggctggtgctaaaatagtgggctgtacccacatcacggcccannnnnnnnnnnnnnnnnnnnnnagaaaacagagggacttctaataaaaaaaaagggaagaaaacattttttttattaaaaataaacatgcctttccttcctacctagccagtccaattgctgttagatagaatacaaccccctgttcaaacaatggtgtagcatgttttgcttttgttcatatactaaacccatttttagcacatctgcctgag

SEQ ID NO: 2447 - DNA, 418 bp, Cricetulus griseus
cactgaccgaggcaatgacaactggctgattaaatatgactgcccaatggataattctagctgccgggacacagattgggtggtggtgaaggaacctgtcatcaaggtggctgccatagacaatgggctagctttcccactgaagcaccctgactcctggagggcatatcctttttactgggcctggttgccccaggcaaaagtcccattctctcaggagatcaaagagttgattcttcccaagatctcagaccctaacttcgtcaaggatttggaagaggacctatatgaactcttcaagaaagatcctggtttcgacaggggccagttccataagcagattgctgttatgaggggccagatcctaaatttgacccaggccctaaaagacaataagagtcccctgcacctggtccag

SEQ ID NO: 2448 - DNA, 569 bp, Cricetulus griseus
ttttacaatgactacagtgtaaaatcagcttcaggcactgtggatagcgcattgagaaagttcagacttaagatttttttcagacaatgatccttgtgtatgacccctttcccagtgagataacaattgctttcacagtgatgcgggaagtgcccttcttcacgggagccgggggaagccatcacatcacttctttgccacactggcaacagctttcttggcagcatcctccaggtccgcagctgatgtgatagggaggccactgtttctgaggattttctgagcctcttggacattagttccttcaagccggactactagtggcaccttgagttctaactcccggcaggctttggtgatcccattggcaatgatggcacagttgacaatcccaccaaatatattgacgaggatggcttccaccttgggatcagatgtgatcagtttgaatgcttgatagacttgggcttcctttacaccacctccaaggtccaagaagttagctggcttccctccattcaggaaaattatgtcacaagtagccatggctaatccagcgccattcacga

SEQ ID NO: 2449 - DNA, 563 bp, Cricetulus griseus
tccgataagaatcccaaagacagacattggagttcaagctgatgatcagaaaagcaaagcagccagtgctcaagagttctcacctctagcaatgctcagaccacaggggtgatcccctaaacctcagattgcatctgcagactgcactgccctccatcaagtctcaggatcccagactgctatgctctcctcatcgtgactggagactaattgccacacgagacccttttcttcttccttatatacatctctagtgctaggattaaaggcagtaaagccttccattgggagtcaacaaagtctgcataccaagttgaagcaggaccattctgccaccccctgcatatcaaggctgaccaagacttcatccagcagctgatagaagtagaaacagacactcacaactaatcaccgaactgaactggaacccagatgcagagaaggaccagtgaagagcacaggggtccagacaaggctggtgaaacccacagaaacagctgacctgaacatccaggaactcttgctccccagactgatagctggaataccagcatgggactgat

SEQ ID NO: 2450 - DNA, 454 bp, Cricetulus griseus
gtactacagtcctgagaacatgggacttcttgatcctgcgaccagtgatgggagagttattttcttcttgccttgggagaagatgactattgctggcactactgattcgccaacagacatcacatctcatcctattccttcggaagaagacatcaacttcatcttgaatgaagtgcggaactacctgagttgtgatgttgaagtgagaagaggggatgtcctggcagcatggagtggtattcgtccccttgttaccgatcccaagtctgcagacactcagtctatctcccgaaatcatgttgttgatgtcagtgagagtggcctcatcacaatagcaggtgggaagtggacgacatatcgctccatggcagaagatgctgtggatgcagctgtcaaggtccacaacttgaaagcaggaccgagtaggacagtggggctgttccttcaaggaggc

SEQ ID NO: 2451 - DNA, 233 bp, Cricetulus griseus
  misc_feature (126)..(141): n is a, c, g, or t
  misc_feature (143)..(159): n is a, c, g, or t
gaacagtcagtaacaatgggccctgacagtactttacaaatggcaattagattaagttggtcaatagatccagttcatgttgggcagttttggcacatgcctttagtccttagagtattagtgcannnnnnnnnnnnnnnnannnnnnnnnnnnnnnnnaccagccagttctacaagagttccaggacaggctccaaagccacagagaaaacctgtcttgaaacctcccccca

SEQ ID NO: 2452 - DNA, 554 bp, Cricetulus griseus
ttcttttattttcctgtaatacatctgtatcatcggagttttggaccaatcgaatacaaaggccccatgagtgctgtttacattgagaagtttgttcgccgggtgatgaaaccacttctctacatcccatctcaatcagaattgctagattttctctcgaactatgagcctggagtactcggctactttgagttcagtggttcacctcagccccctggctacttgaccttcttcacctcagcactgcactctttaaagaaagattacctaggaacaatacgatttggggttatcacaaataaacatcttgcgaaactggtatccttagtacactctggaagtgtgtatttacatagacatttcaacacatcacttgtcttccccagggaagtcatgaacttcacagctgagaacatctataagtgggcctcagaaaaccaggagacactcttccgatggctgcagccccatggaggcaagagtctgctgttgaacaatgagctgaagaaaggaccagcactcttcctattcataccttttgatcccttatctga

SEQ ID NO: 2453 - DNA, 153 bp, Cricetulus griseus
ctgtgccgccgcgagagacctggacacgccagatggacttcatcatgtcttgcgtgggcttcgccgtgggtctgggtaacgtgtggcgcttcccctacctgtgctacaagaacggcggaggtgtgttccttattccctatgtcctgattgccc

SEQ ID NO: 2454 - DNA, 105 bp, Cricetulus griseus
aatggatgcagtcccagacaaagtccacttcttcaacagcttttttcatagacagctggtaaccaaaggctataatggagttaagagatggactaaaaaggtgga

SEQ ID NO: 2455 - DNA, 509 bp, Cricetulus griseus
  misc_feature (192)..(251): n is a, c, g, or t
  misc_feature (479)..(479): n is a, c, g, or t
gatgaaactgccccccagaggtactgttgcccacccagaaggtcaatgatgaagaaagacgagcagaacagaggaagtatggggtgttcttcgacgatgactatgactacctgcagcacctgaaggagccatctgggcccgcagagctcattcccagtaccgccttcagcacaaacagcaatgatgagaaannnnnnnnnnnnnnnnnnnnnnnnnnnnnnnnnnnnnnnnnnnnnnnnnnnnnnnnnnnngaggatgttggattgttaaacaaagcagctccagtttcaggaccgcgactggatttggatcctgacattattgctgctctcgatgatgattttgactttgacgacccagataacctccttgaagatgacttcattctccgggcaaataagccgacaggagaagaggcaatgggtttgccggaatctgagagtgaagatgacaatgagtgggaagacatggacattgangaagggagcagtgatggctgtagctctgca

SEQ ID NO: 2456 - DNA, 463 bp, Cricetulus griseus
tttttgaggctgtatatgagcagaccaacgtgccccccaaacaccaggagtacctctttgagggtcacccttgtgtccttgagccaagcctctcagcgcagcacattgcccctacagccgccagcagccccctggttctgttcagcatggccagtgacacacccaagggcctgaccttcagggaccctgctctggacgtcgcaaagttcgtccccaaggttgacctacagtcagattacaacacagctaagggggtgctgggcgctggttaccaagccctgtggctggcgcgggtcctgctggatgggcaggtgctgatgcttcgagggttacactgggtcctggagatacttcagagcacgtgccagcagaccctggaggtcacgcggacagccctccccttcctcagcagcagcctgggcattgaaaggctcagcagtggggctgagatgcccgacttcca

SEQ ID NO: 2457 - DNA, 501 bp, Cricetulus griseus
ttgctaggacataacaagaacattcgcacaatagtgacaggcattgagatgttccacaagagccttgagagggctgaggcaggggataacctgggtgctctggtccgaggcctaaagcgggaagatttgaggcgaggcttggtcatggtcaagccaggctccatccagccccaccagaaggtggaggcccaggtttacatcctcaccaaggaggagggtggccgccacaaaccatttgtatctcattttatgcctgtcatgttctccctgacttgggacatggcctgtcgtgtcatcttgcctccaaggaaggagcttgccatgcctggagaggatttaaagctcagcctagttttgcggcagcccatgatcttagagaaaggccagcgtttcactttgagggatggcaacaagaccattggcactggtgttgtcattgacataccagccatgactgaagaggacaagaacatcaagtggagctgaatctggacttctcag

SEQ ID NO: 2458 - DNA, 450 bp, Cricetulus griseus
agggccgtgcacgtgttatctgtgcagcctctctctttggagaacttatctctgaggggctgctgtcaagatgcctggttcctttctggcaagcagcaggtagctaaagaaaaccagcaggtagcaaaggatgtcacactacatcaggccttgcttcgtctgccccagtaccagactgatctcttgctcaccttcaatcagcccccgtaaggaaggaaagggtgggaaactcgcgatctcccccgagccccctcgcccccctgacaattaggctgggtaggacaagcaggaagaaggaagattggctggtggattccttcaaggccgaggtcctctagggaataggaactgtaatcctgcaaacctaatgccggtccattgtctttctccctctgttccctcaccctaaactctaacaggaggtctcttggccctgaaaatctatcatgt

SEQ ID NO: 2459 - DNA, 578 bp, Cricetulus griseus
  misc_feature (562)..(562): n is a, c, g, or t
gcgatgctgatctttttgattcccatgacgacagagatgacgatggggaggcagggtcggtggaggagcacaagagtgttatcatgcacctcttatcacaagttaggctcggaatggatcttacaaaggtagttcttccgacgtttattcttgagagaagatctcttttagaaatgtatgcagacttcttcgcacatccggacctgtttgtgagcattagcgaccagaaggatcccagggatcgaatggttcaggttgtgaaatggtatctctcagccttccatgcaggaaggagaggatcagtagccaaaaagccgtacaatcctattttgggtgagatctttcagtgtcactggacattgccaaatgatactgaagagaacacagaacttgtttcagaaggaccggttccgtgggtttctaagaacagtgtaacatttgtggctgagcaagtttcccatcatccacccatttcagccttttacgctgagtgttttaacaagaagatacaattcaatgctcatatctggactaaatcaaaattccttgggatgtctattgnggtacacaacatatgc

SEQ ID NO: 2460 - DNA, 90 bp, Cricetulus griseus
cacgagcagttcaagtgtttctacatttgtgtctggagtcttagtgtcggagtatcacattcacagctcatacacactaacacacaaagg

SEQ ID NO: 2461 - DNA, 430 bp, Cricetulus griseus
  misc_feature (131)..(174): n is a, c, g, or t
  misc_feature (238)..(273): n is a, c, g, or t
atggcggcgtccatgttctacggccggcagttggccgctgccgtcctgaggagccaccggccgcaggctacactgcgggccgccgcccaggttttgggaaattctggattgtttaacaagcatggcctccnnnnnnnnnnnnnnnnnnnnnnnnnnnnnnnnnnnnnnnnnnnnttgagtatggaattattgcaggaagctggtgtctctgttcccaaaggcttcgtggcaaagtcannnnnnnnnnnnnnnnnnnnnnnnnnnnnnnnnnnntcaaaggatgttgtgataaaggcacaggttttagctggtggcagaggaaaaggaacattttcaagtggcctcaaaggatgagtgaagatagttttctctccagaagaagcaaaagctgtttcctcacagatgattgggaagaaattgatcaccaagc

SEQ ID NO: 2462 - DNA, 296 bp, Cricetulus griseus
gggagctaaggccgcgttggggtgaggccctcacttcatccggcgactagcaccgtgccggcagtccgcaacatggcctccgtctctgagctcgcctgcatctactccgccctcatcctccacgacgacgaggtgacagtcacggaggataagatcaatgccctcattaaagcagctggtgtcaatgttgaacctttctggcctggcctgtttgcaaaggccttggccaatgtcaacattgggagcctcatctgcaatgtaggggctggtggacctgctccagcagctggagctgc

SEQ ID NO: 2463 - DNA, 578 bp, Cricetulus griseus
  misc_feature (102)..(102): n is a, c, g, or t
  misc_feature (387)..(403): n is a, c, g, or t
  misc_feature (497)..(512): n is a, c, g, or t
taatacaaataaaccaagaatttgttagaactttacaatataatataaaactcttaatctttccctaaaatacagtctcagaaatgtatttagggtacatantaggaaaaatacaaacgaatgtgaacatgcatttaaagtcatgctatagttatgtagaactcttggaatttaacttgaaacatggaggattttaatttgatccttgaatttgggtcctttgaggaagaagtaaagttgcatgttcgaatcgatcagataatcactttctgtgactaaacttcaccgaattgtcaatgttttcctctgcatctaatgtgtccatcttgggcattcatgaagaaagtaatagctatactgtagtttaagaaccaacagcactgcatnnnnnnnnnnnnnnnnntcttttcagtttttaagtgataatttcatgactggcattttaaaagactgcagcagtatcattttgtttaagaaacatggattttgaaactgannnnnnnnnnnnnnnngacacacccagagttataattacaagtctgagaactggacagttctggaaggacattaactgcata

SEQ ID NO: 2464 - DNA, 428 bp, Cricetulus griseus
gtgcctggacctccgcgaccgggacgtcactctcggggacctgcccatccagtcaggtacgggcaccggccgggaccggggaagggtcacaaggtgccggtgggccagccgggggcctggcggagcccagctccgtccgtccgtccgtccgtccgggaaggcagggcaagtgtcaagtctcttcgctgcctgggagggaggagagcccggagccttgaacttcgcgcttccctgagccggcttccgcgagaccgccccattcgttttgtctcctctgctttcccaaaggacagcaggacccctatttctctctgtccccatcaccagcaggccagcagttgtgataaccgattttaaccaattggtgtgttttgggttttttttttctctctctctccggttaatttgtttttatagttttgtttcgt

SEQ ID NO: 2465 - DNA, 490 bp, Cricetulus griseus
ggcagcggtggaacacacctttaatcccaaagaataataaataatgtatgtgcctgtaatcccgggctgaagcagaagctgaaccaagtctggattgcataagttccagccaggtgagagcctgtctcaaaaagaagatgacagaaaacaagtatctcacagtagaaagggccattcctcatttcaccttgccgaggttacacttacagggttacaatcaaaattgtggctccttaaatttgattgtgaaatcttgctctttgttattctagacttaatttctttttttccttgtcctttttctttttaagatgcaagaaaatggcacagggaaaaaacctccaaaaaagagacctgatccagatacccttaagggcaagaaaaggaaggccctgccagctacagagatcccaggagctttggggcctgtcacctcggggaagaaacaaaaaaaagatgttcgggaaatcagaaagccaggagccaagtt

SEQ ID NO: 2466 - DNA, 494 bp, Cricetulus griseus
acagaaatggatttgatgtaaagttttaaatattttgtaaatatggactgcagttacagggtaaaagctacatgttgtgggaagctaggttttgcaagtttaatgcattcattggaagcagttctcacaggaagcactttgtgaataaaacatttgtttgaaaagacagattggtccaaatagccaaagaaagttgaaatagattatttataaaatcattttaaacagtgtatgttagtatgtgtgacagtactgtaaacactgaagcgggccgtgtgagacatatgtataagatacatatttttaaattgcaaaatagcatgcccaataagtctagagaaatggcaggccaactatttggaaagatgctataagttatggacttggaaaaaaataaatatttgaggatcttggtaaggggtagtagttgagagttttttaaattgttgtaaaatgagtcttaccccatttttctgggctttttaactcactgt

SEQ ID NO: 2467 - DNA, 146 bp, Cricetulus griseus
cgttctgttcggaaagtcttctgatgttcaagactcgtggagtcaaagagcttatctgtgttgtccttggacgcggtgacaaacatggtcatgtctctagatagctggatgtcattgatctgccgggagtgttccttatcgctcac

SEQ ID NO: 2468 - DNA, 119 bp, Cricetulus griseus
gtctggagcgggtcacctggcactcaccctgtgaggtgcttcataagatcagtgagagtgaggccgtgcatcctgtgaaaaactggatggacatgaagcggcgtgtggggccataccgg

SEQ ID NO: 2469 - DNA, 538 bp, Cricetulus griseus
ggtgtgtagtgcccacagaagccagaggccatcatcatatacccttgagctggaactatagatagctgtgagtcaaaccctggtcctctgcaagagcagcgagtgttcttaactgctgagccatctctccagaccctcaactcagtttttgtgcagaactctttcgctcacatttcgtaagtttctgagggttggaccgcatcctttcaattcaagtagataaacaaaatggatcttacctagaattcagctcaacaggtaaaagctggaatgcatgggagtgagcactgggtggtgagtgagttcagtgaaggacagggccgcaagtggcctctgtggtgttgagtgtaaagggatttttgcaccatctctgtccttcttgtgtctaggaaagtgtctggacaatatgtaattccccacaacttcaggtgtctctgttaaaggaatggagtgcaggagcacacagcttgtgatgtctatggaggaaagtggccctgacagctagagatcccaatgaagggcgccctccccccccccc

SEQ ID NO: 2470 - DNA, 490 bp, Cricetulus griseus
aggcctggcctctggctctgcagagacattgcctgccaacttccgggtcacctcctctatgtcatctccctctatgcagccaaagaaggttcaaatggatggtagtgtgtccggagcacagaggctggactctgccacagtcaggacttactcctgctagagcctcctgctgtttacccacactacttctacagatgacgacgccacggcagagacggtgcagagctcggtggagccccatctggcaacactcgctatatggacccaagatattttattacagagtttttaaacttgtgggggaaaaaatcacaaataccatagagaaaatattttagaattgactgtttcttatatttatgtaaacttacacttcctcatttatatagttacttactctttcatgtatatccaagctataaatatccttttgagtcaattcatgttcttatacctaattttagtcttttaaatgaatgtactgtaatgc

SEQ ID NO: 2471 - DNA, 146 bp, Cricetulus griseus
cactctgtgttatacacagtgggcacatctgtgtgtggagcccccgggcgctcaggtctctgggtcccagtgtgaagacactgtcgggggggggagtgccaatatcattggtgaccctttgaaatgaagggaatatagtgtaaaca

SEQ ID NO: 2472 - DNA, 146 bp, Cricetulus griseus; identical to SEQ ID NO: 2471

SEQ ID NO: 2473 - DNA, 577 bp, Cricetulus griseus
  misc_feature (522)..(522): n is a, c, g, or t
cacagatcagcaaatgctggtgacatttttctaggcaagaagaacttaaagttacttcacttcaaaagagactggatgtgacttcatactaaggcagcattaggtactgcatggaaataggtcattaactttaaattcttatcaaaatataatttaccagttcccaggatttccaatacaagaccacctgaagagaagccattgttcaattccagttcaatgtagatgacaaagtgaaatttagaagtaaaattgtctgttatttcagtctttattaactaactattcctttaaattttgcctgtcagtctatattgctgtttttactatacacaagattctttgtacaacttgtgagctttatgtgttatgtttttattatgtaaatatcattataaataaacttatttataaatgagagatttgttaattattggagctcatactttttaagacatcctgactgcaaaggtgctaggcaagctgttagaaggttgatgtcatcatacagtgctttggttntaggtatccaagactctgaacttttgactcaatagatataatcttgatactatat

SEQ ID NO: 2474 - DNA, 432 bp, Cricetulus griseus
ggtgacctgactcctggagacatcctttgcaggtgcagaagtcggcctcgcagttctcaataatgtcggaaccaatcagagtccttgtgactggagcagctggccaaattgcatattcactgttgtacagtattggaaatggatctgtgtttggtaaagaccagcccatcattcttgtgctcctggatatcacccccatgatgggtgttctggacggtgttctgatggaactgcaagattgtgctcttccccttctgaaagatgtcattgcaacagacaaagaagaggttgccttcaaagacctggatgtggctgtccttgtgggctccatgccaagaagggaaggcatggagaggaaagacctactgaaagcaaatgtcagaatcttcaaagcccagggtgctgccttggagaaatatgccaagaaatcag

SEQ ID NO: 2475 - DNA, 312 bp, Cricetulus griseus
tcggggggggggaccctgggacgcctagagctggtccgagtgattgaaggcaagatgcaggaccccaatgcagacaccgagtggaatgacatcttacgcaaaaagggcattctgccccttaaagaaagcctgaaggaactggaaaaggaggaagcagagaaggaggagcagcaactcctccagcagtcagtggtgaaaacatatgaagatatgactttggaggagctggaaaagaatgaggttgagttcaacgaggatgacgaacgatctatcgaaatgtaccggcagcaaaggctggctgagtggaaagca

SEQ ID NO: 2476 - DNA, 579 bp, Cricetulus griseus
gaacttcgaggagatccgcaggatgatgtaaaagatggcacctcgaggccttttgccctgccacctcagagccagggttggctccctgcagaggaagcagtttattagtgttctttagtcttcacacttgtctaaggatccactgttagggcttgcccgcgtgattctagatgtaccctgcgctgctagagtaagcactttacttccacactaagcagagcccacggttgtcacctcctctcctgcagcaagtgggactccgggggcatctggcctccacctggggctattagggtaactgggccctggcatggttagcacttctgtgtgttcccagggtgcactgtttctcatggccaggccctaacttgcagactaacttcactgtaataacagcaacccagagctttaggaaccacgtacccaaggagcacaagaatcccagcaccctactgcttgggctcctgccctcctggagatgaaggcctgtgacagacacttcaccaactccccttgacccagttacatagtcaccatccctagtggggtccctgtgggtagggttcccacagcaggcac

SEQ ID NO: 2477 - DNA, 537 bp, Cricetulus griseus
  misc_feature (144)..(163): n is a, c, g, or t
aaacacatctagcatgtattgttatgtagggggtagcgtgctatgttgtgatcacgagccattcacaaactccgtgataaaaaaaagtaatggctttcactgtaagcaagcaactgttacttaggaagatgagtatgcgtggannnnnnnnnnnnnnnnnnnntttgtgtattcgtttgctgctgtgcggtgtgcatctgcatcccgtggctttcctgaccgcctggaaagtgccgttctcctgcagtgcaagcgctggccgcctggtggcacatggcactagttcatggcactagttcatctgcctcccggactctgtctcctactctttcttaacacttttagagaatactccatattacagttcatccatcaaacatcaatagcaccctaaaaaggatactaatattttccacattccagaaattatatttaagatttgtttcttttgtcagaattgtacatagcaataagagctttaaggagaagaaagaaaaaaatagctttaaggttggacaaatacagatataatatagc

SEQ ID NO: 2478 - DNA, 564 bp, Cricetulus griseus
cagttcactaatgaagccagagaaatgggtgttattgctgccatgagagatggttttggtttcatcaagtgcgtggatcgtgatgctcgtatgttcttccacttcagtgaaattctagatgggaaccagctccacattgcagatgaagtagagtttactgtggttcctgatatgctctctgcccaaagaaatcatgctattaggattaaaaaacttcccaagggcacggtttcattccattcccattcagatcatcgttttctgggcactgtagaaaaagaagccaccttttcaaatcctaaaaccacaagcccaaataaaggcaaagacaaggaggcggaagatggcattattgcttatgatgactgtggggtgaaactgactattgcttttcaagccaaggatgtggaaggatctacttctcctcaaataggagataaggttgaatttagtattagtgacaaacagaggcctggacagcagattgcaacttgtgtgagacttttaggtcgtaattctaactccaaaaggctcttgggttatgtggcaactctgaaagataat

SEQ ID NO: 2479 - DNA, 360 bp, Cricetulus griseus
gtaaaactaaccctttgttttccagttgtaagaaacttgtgcaacaatgaacaggtaaactaacagcagtgctcagaaccccagtacagaagcggggagccagcaggatgggaatgtgttacctttaacccttgaagagaaggagaacaaagagtacctcaagtcattatttgagattctgatcctcatgggaaagcagaacatacccttggatggacatgaggccgacgagatcccagaaggcctctttgctccggataactttcatgcgctactggagtgtcgaatcaattctggagaagaggtcctgatgaagcgctttgagaccacagcggtgaacaccttattctgctctaaagc

SEQ ID NO: 2480 - DNA, 587 bp, Cricetulus griseus
  misc_feature (514)..(514): n is a, c, g, or t
tactggagctgtcttctaaaggaaactttacccagctcatgtgatcaaacttccaatccacaggccttttttcttcctcctaaggactgatgcaactttgtaagtatttggcgtagattccttccccaccagctctggggaggaacagttatgactgcagtgtgactcacttgactaccactgtgcctctggttctgattggccatcaccctgctctatccatctggctgtagagtactctaacctgcatctctttggttcttgcctctgctgttccttgccattgcactgagagcaggtcctgggctttgtgccttccttgtggttcacttcaataggcagtaatcaggagaacatactctagttcctaacgatggctatagaggagagaacaccctgtccttctgtgcctggacactacttagtttcctgtgctgtttccttcacagttccacccttccccaccccccctttccctttggcatgtatcacccttccgttttcctcctagttnctctcctcttttttttaatattaaaaataaattaggaatctctctctctctctgatggggaggaagactgaaa

SEQ ID NO: 2481 - DNA, 580 bp, Cricetulus griseus
cataggtctgagtttccttgagggcaccaaaagtgttctaaaaataggtcatgaacgaggttcttggcacttgcctgcatttttagcactcaggatgctgaggcagcaagattgagaatttgaggccagcctgggctatagtcaagaccctatctttaaaacaaacattagcaaaaatgtcatgatgtttccaaaaccccgaggacattaaaagaacacactgaaccatattctttaaatgggtgcattttgtggaatgtgccatcccgttgaagctataaaaatgttcttatacacacagaatcaatttctacatttcttgccaggtattttagtgacagccatgccatagtggacggtcatggacaatgctatccagcaaagcttgtcttggctctgctgctgctgcatagccagttcagggcagctgcatgactttagacaaatgtctctccctggacccccaactattgatctatagaaagaagttggctttagagacctctgagatcctcctgtccaactctgagtgtacttgtgttttcagggaggtgagcaaataccaagccatctttgtccc

SEQ ID NO: 2482 - DNA, 508 bp, Cricetulus griseus
gaatcaccttatgtgcgtttttgttttagactttgtatctccagtctctgatcttgagacaggaaaatagacactcaatagctcatctcctggttcaaagtactaggtgcaaataattgtctgtatagatagccgtccatttatgcttgtggagcagtagacattttttaaactgcttagtactctattctatataaccttttctcagttaacatctaagaaacccggccccttggaaaatgtcctaagataaaataaatttccctgagtactgtggtttctgcctgctgaagtttttttccatgactgttcttctcagctgaatattcctctaaaatctgagtgtaagtcttcagccaaaatgaacacccgtctgctcatccttttgtggcattattccaggtatggcatgttagtgtccaaggtaggaagactaaggcttcctcttcacctgcctctcttgctttgtagcctttgttgctgggggcacatcaccaccgtgttagag

SEQ ID NO: 2483 - DNA, 535 bp, Cricetulus griseus
  misc_feature (74)..(146): n is a, c, g, or t
acaggcgccatggttgtgctgcacgtgctgttcgagcatgcggtcggctacgcgctgttggccctgaaggaagnnnnnnnnnnnnnnnnnnnnnnnnnnnnnnnnnnnnnnnnnnnnnnnnnnnnnnnnnnnnnnnnnnnnnnnnntcgtctggtcgccttctgtccgttttcttcatcccaggttgccttggaaaatgccaatgccgtgtctgaaggtgttgttcatgaggacctccgtctgctcctggagacatacctgccgtctaaaaaaaagaaagtattgctgggggttggagaccccaagattggtgctgcaatacaagaggagttggggtacaactgccagactggaggtgtgatagctgagatccttcgaggagttcgtctgcacttccataatctggtgaagggtctaacagacctgtctgcgtgtaaagcccagctagggttgggacacagctattctcgggccaaagtgaaatttaatgtgaaccgggtggacaacatgatcatccagtccataagccttctgg

SEQ ID NO: 2484 - DNA, 568 bp, Cricetulus griseus
  misc_feature (368)..(386): n is a, c, g, or t
  misc_feature (524)..(524): n is a, c, g, or t
atagctcagtgggtaaaggtgccttcggccaagcctgatgactcaagttccgtccctgggacccacatgatggaaggaacaatggactctttcaggttgtctctgacctccacatgcatgccacaatgctcacacacattcacacaaagcggatgaaatactgaaaccaaaaacacaaggcatatggaggggagaggaaaggtcttaaatgatttctggtgtcttgtgtccatcaaaaacagacataaagaagaaagtgaacaaaaacgagcaaaataacacagcacagtcagcctcaccttgaacttgccattcccctgccacagcctcccaagtgatcaggtgtcaagcctggtcaccacatccannnnnnnnnnnnnnnnnnnatgctcccttacaccttgatgaaagatgaaccgagagactcaacagagaaccggaaacaagtaaacagaaatcttgtgcaaactggaaaactgacagtggattgaaactgaggcttaaaggaatcaatagccacttanagacagcttcatggagagctggaaccggaatagggagtgagaag

SEQ ID NO: 2485 - DNA, 334 bp, Cricetulus griseus
ttgcaggccaccctgatctataaagtaagttccaggacttccaggactgtttcacagagaaaccctgtctacacttgcctatctatatagataattaatacaaaggaagtggttttggacaatctagttttcactctaatcaatttcaatcacctttcctttaaagacatttttttttgtttgtatattctctaattcattgtctatcgtggtaagttagctttactgtaacaaataaaataagagaagtcacttcattccaatgagctcaaattataatcagatgtagaaaaataatttgagtgttctggaaatgaagtatgctggaaataca

SEQ ID NO: 2486 - DNA, 557 bp, Cricetulus griseus
gttacagaggaactttgagtgactgtccaggtagcaagatgtctctgtcaattctaaagtttatatattatacttttgtggtctttgatggagttgaagacagatagttatgattatagttttctttagttattataaaagataagctacctataagaccttcgactcacaaagataagatgatagaatattttctttaaatcttgctgaatgttaatgaactaaatatcgtaactatggttcttacttgataactgttttgttatgtattttactatgttaatggtaaaacccttctttcatttagacagaaaagaggagatgatgggggaggtccttctatgtatgtgtttgtcttattggttgatgaataaagcactgttggccaataaggaagcaagatagatgagactatgagtcgaggaggattctgggaaatgtagtagggaagagccgccatgtgatcccagaaagacatgacacattctgccggcgtcctcaataagtaagataagtttataaaatatatagattaatagttatgggtgatacttaag

SEQ ID NO: 2487 - DNA, 579 bp, Cricetulus griseus
  misc_feature (550)..(550): n is a, c, g, or t
cggctgccagggtcgtgccatgctgcagaatggaatctcatttgaatcaagatggattgcctagaccatcttatgtttttagtgctgacccaattgcaaggccttcagaaataaattttgatggcattaagcttgatctctctcgaaagttttccttagttgctgaaaaccctggggcagacagtttgggatctaaaaattacctccaagtttgtcttcgaataagaccatttacccagtcagaaaaagaacatgaggctgagggttgtgtacaagttctagattcgcagaatgttctgctgaaagatccccaaagcatccttggccagctaagtgagaagaactctggacagatggcacagaaattcagtttttctaaagtttttggaccagaaacttcacagaaagagttctttctgggttgcattatgcagccagtaaaagacctcttgaaaggacacagtcggctgatctttacatatgggctgaccaattctggaaaaacatatacatttcaaggcacagaagaaaatattggcattttgcctanaacactgaatgtattgtttggtagtcttc

SEQ ID NO: 2488 - DNA, 507 bp, Cricetulus griseus
gataaaagcggagctgccgagtccgccgccgtcgcgatggaggagcgagacgcggaagaggccggggggagaagccgcaggaaaaagcgcagccaccgtcagcgccgcctcccgccaccgtagaggttgaggccgcccatgggaaatcaaggaagtctgtcgaatcactttgaggaccaaggccctccccccatatctaggttgagcacggtatcccaccaaagagaattggccccacaaagccagttcaagcactagggataaatcctggtcccactgccagcggccacacagactgcccaagccacactactgtcacccacatttagggggccaaattggaccctatgcaggtttacccctttctccttggcctatagcaagaatgccccttactccacagcaggcgcactctgccatgggccaaatcgccttgcttcatgggaaaaccttgtttgtcattcctgccactgatggggaccacatgacacttccactcgtcaccca

SEQ ID NO: 2489 - DNA, 570 bp, Cricetulus griseus
ggaaccctgaactataaaccacccaacacagaagaattttattccagtctgataaatgaaatccacagaaagatgcctgaattcaacaagtacccggagcaccttctgacctcccttcttggcttggctttttctgaatactttccgactgagttcatcaatgttgctctaagtccagaatttgtcaggttagctcaagagaatagtaagtttgaactcactaaggaactgtatactcttgatggtacagttgccattgagtgtccagattacgagggcaatcgtcttaattctcaccttcagcaagaggcatctgtaaacctgtggaatttagcacgtaaggatatgaggtcaaagcccgagttcttagaagctctctgtttacttgagaccatcttaggtggcccccagtacatcaagcatcatatgattttgcctcacatccgatcttctgacttagaggttcagcttgatgctaacatgaagccactgccaattaacatcgaagtaacaccaacagatgatgtagcccaattacggtttaagcaggtgggagtcagcctcacagat

SEQ ID NO: 2490 - DNA, 423 bp, Cricetulus griseus
cgacttggtatactcgcaagcctgcagctggtttcagaatctaagagacagatttcgaagccaaatccttcaacactttgggtcaatgcctgaaagggaggaaaacctccaggcaacccccaatggccctgcatggtgttggtggctgctggcagtccttcctgtagaccctcggtatcagctctccgtgctgtcaatgaagtccctggaggaacggctgacaaagatacagcatatcctgacttacttttctagagaccagtctaagtaatgaactgcttggatctcacctagcttgctcttagccctgaggctgagaagcggttggatctcattctaaagtcaccctaatctggccccgttgtaggccagattgtccgctgcctttgcacacccagtgctggtttagaaattaaggaaaca

SEQ ID NO: 2491 - DNA, 583 bp, Cricetulus griseus
gttgcctgctaccgagggaggtcagaacagggcatctgatttcccctggaactggagttacagaaggttgtaagccaccatgtgggtgctgggaattgaactcgggttttctggaagagcagccggtgctctttaccagcccccttgttaagttttaaattcacaatcttttcaaccctgggcatgagatttggttaagcattttagtgggttgggtttttgtttaatttctaccctagtatcgtgtacatgataggtgtttgctggacttgttgatgttttgcatcattctgtgcattggtgcttgagacccatacagacttggggtgggactaacaagtaacaaggtgtggtgtttctgaagtcacccttttccgtgggttggaaaccacacactatatagtgcctgcctgcctttaccctatgaggtgatgatgggaagaactgctttgagcaagcaggcagctttatctggaagtagttggagaacatgtaaccctacagcaggcttactctgaggtggttttatggaggtggccagtgattggccaaacttgatggaccatcttaaagttgggttaag

SEQ ID NO: 2492 - DNA, 438 bp, Cricetulus griseus
aggggccaccccagtaccctctcctcttagctgtgtataaagtaaagtgcggctggacgggccacgcctgtgtcgggtgctacagctcccttccctactgctgacgggtcccagtactgaactaagcttttctagcataaacaagccactgctcttctgtctgttactaggaagtggaactgtggttcggctggaacttgtgaaagctgtgtgtgtgtggtagaggagcccctggtcttgggatggaagcttggggagtcgtgcaagcctcatagatcttgagctctaaatgcttttggaggtgcaatcaaatggctcgtttatgagaatggattagttctaggtgcactggacgtagcggaagaagcttgtttttctcctcagtgttagggaactttcttgttggggcaattcttaatgtcactcttgtctttcctt

SEQ ID NO: 2493 - DNA, 216 bp, Cricetulus griseus
  misc_feature (2)..(53): n is a, c, g, or t
annnnnnnnnnnnnnnnnnnnnnnnnnnnnnnnnnnnnnnnnnnnnnnnnnnnctcagcgctggaagatgccggcggtgatggccggctgacagaatggtggagatggcccgtgggtcgggccaggaaaggaggacgcccgctccggtggtgacccgcccaggtgtttactagattacctgagggagagggtgggatggggcgggggctggggggt

SEQ ID NO: 2494 - DNA, 577 bp, Cricetulus griseus
tttgcagccgtttttcacgttgcagttggatattcagtctgacaagatacgcacagtccaggatgcattggaaagcttggtggcaagagagtctgtccaaggttacaccaccaaatccatacttgagttgaagtcagtcgcagagtgactctggagaagctccctcctgtcctcgtgttgcacctgaagcgcttcgtctatgagaagacgggtgggtgtcagaagctagtcaagaacattgattatcctgtggacttggagatcagcagagaacttctttctccaggagtcaaaaataagaattttaaatgccacagaacctataggctgtttgcagtggtgtaccatcatggcaacagtgccacgggcggccactatactacggatgtcttccagattgggcttaatggctggctgcgaattgatgaccaaacggtcaaagttattaaccagtaccaggtggtgaagccaactgctgaccgcacagcctacctcctgtattaccgccgtgtggacctgctgtagccgtgtccgtgtgcctgtgtgtgtgcctgacgctgcttcctacaattcccaa

SEQ ID NO: 2495 - DNA, 428 bp, Cricetulus griseus
catttatttcgggtaaaaaagggatttttttatcgttggctcttttctaaatcttaaggagtggaggagccctgatcccatcactccttggagaacccgggtaaaatcccaaattcactttcccgggccccaaaattcccttttacccccacaacccagccagattttttttattttaacgaaacacagaaatccccatgggtttctttaaaccgaaatcccttttaaggggggtttttctccaaaaaaaccacctgttggaaataaaaggccccccttttttttggttttaaaaacggaacagaattttattccttattcccaaattaaataaacccaggggcacccagcacgggaccctttccaattcctgccacaaatggccctgaaacaaagaacccgggtttttaaaaaaattgggttttaaa

SEQ ID NO: 2496 - DNA, 422 bp, Cricetulus griseus
caacacctcactcaacccgcaggagctgcagcggcagcggcagcttcggatgttggaagatttgggcttcaaggaccttaccctgcagccacggggccccctggagcccatccttcccaagcccagggcccaccaggagccggggcagccagacgcagcaccagagtcgccaccggtgggctggcagtgccctggctgtactttcatcaacaaacccacacggcctggctgtgagatgtgctgtcgtgcaaggccagagacctaccagatacctgcctcataccagcccgatgaggaagagcgagcacgcctggctggagaggagcaggcgctgcgccagtaccagcagcggaaacagcagcagcaggaggggaactacctgcagcacgtgcagctggagcagaggagcctggtgctgaata

SEQ ID NO: 2497 - DNA, 512 bp, Cricetulus griseus
gattgctgcactttggaggctagcttgggctgcatagcaatttgaggcaagcctgtgctacatagtaaaaccctgtctcaaaaatgccaagaaaaaatttttttaatatgacacattaaaaaatgtaaatttttagtagctacttaaataaaaatctaaaattttacagtaaaaccttgaggtaggtaattgtcttaaagatgaattcttgtcctatggagagggagctagaaaaataagttcaattcagaattttaagtgacttgtttaaattcattcagctagtaaatattagactatacttcagcattatgtaacacaaaagcctattcagttttcaggcttagttaaattctataaatagttatttccattaagtttatttatcttagtcctgccaaaccacaaatgaccaagagcaaaaacttccagcattgatttaaaagaataaaacaatagttcaaagtcagaattaggagaagaaactcaaaacaggccaatgtggctgttga

SEQ ID NO: 2498 - DNA, 486 bp, Cricetulus griseus
tcgccagaaggaagatcctatctactctgtggagaatggattggaacaaaaaaagaccatgcaggaatcaactgtagaaggccaggccagaagacaccatcagatcttctgggatggaattacagagctgccatgtggaaacaagcacgacactgagagggacccacgcatgtgaatggagacccagctgggagaaggaagagatcctgaagggaacactgtcaatattgattcggtccccatgcctcccagtctaacggtcaccttggaacatctctgtccatcactttgaggggcaagcatcctttgctcgagtgtctatctcaggaactgacatgggacaacaacatggaaacaggaaaggtctcagccacagagaaatcccccggggcattgggctgctccttgccatggcccttatgaatgtgcttctttacctctgcctcaaccagtttttcatttcccctcgttctactgaggatgcta

SEQ ID NO: 2499 - DNA, 580 bp, Cricetulus griseus
  misc_feature (282)..(300): n is a, c, g, or t
gcagcttctaaaattctcaaagcctggaccaaaccatggagctgcctaagtatttgcgttatctcactggcttcttagcagtttagacttatttatatgatctgcatataccccctccctgtcagagttatacctccatagagcctcaaggtctgtgaaacacgacaccgtgtttcaagcagtgtctcagcttcaaaatcctgttagtagaaactattgtatataatggagtttgttttgagacagctgggcgtttgtgctgttattttcttgttcttttcnnnnnnnnnnnnnnnnnnnctttgttcttttcaaagatggaaaggcagactgttgtagacagggccatggttgtaggtgtagggcattgcagcaagggtttcttgggcaaggggtttcttgggattaagtgcagctccctagagataggatttaattcttaggtttttaatccatgtacattttagtcagtttaatttttaatccctttagattctttagagctattctgttttaacaattgtcattcctaaatgtttatacaactcttttgaaaacattgtataactaatgtttatta

SEQ ID NO: 2500 - DNA, 552 bp, Cricetulus griseus
  misc_feature (457)..(457): n is a, c, g, or t
tcgcgatcccacgcgtccgcaaaaagctgatatgtaggttactttacactttttgtgtatcttaatctttgtgagtttgtatttgtaatactgctaatacagtagtactcttgaatggaataactagtaaagatataaagctctgattttgaggtaatatgttaaagcagttgtatatccatgacccattttcccctgtatgaggttcaaggcagggaaattttgttcttatgagtagttatttatgccatacagcgtctaatttttaaagcttaagctctccatccaggtcagtaagctttctaaattctgagtagaggatggtctttagactagttgcaatcagaaaaacatgctatgtgagggagaaatggaataagaggcagatctcctttctacttcctactatcaccctcctttcagattttttttttaatttatttattatgtatacagncttctgcctgcatgccagcagagggcaccaaatctcattcaaggtgggtatgggccaccatgtggttgctgggaattgaactcaggaccgctggg

SEQ ID NO: 2501 - DNA, 577 bp, Cricetulus griseus
cacgacgttctttctgtcttcatttctcaagcagttcaagaccaagcgttattttcctaccaaggtacgatcaacaatcagtgactttgctgtgtttctcacaatagtaataatggttgcaattgactaccttgtaggaattccatctcctaaacttaacgttcctgaaaagtttgagcctactgatccaagtaggggctggatcataagccccctgggagataacccttggtggacattactaattgcagctgttccagctctcctttgtaccattctcatctttatggatcaacagattacagctgtaatcatcaatagaaaagaacacaaactcaagaaaggagctggctatcaccttgacttgctcatggttggtgtcatgttgggagtctgctctatcatgggcctgccatggtttgtggctgcgacagtgttgtctataagtcatgtcaacagcttaaaagtagagtccgaatgttctgctccaggggaacagcccaagtttctggggattcgtgaacagcgggttacagggctgatgatttttatcctgatgggcctctctgtgttcatg

SEQ ID NO: 2502 - DNA, 513 bp, Cricetulus griseus
cacacagggggaaagccaagtgtggtggcacttgtcactccagactcagacacagagagctcctgcctctgcatcccaagtgctcagattaaagatgttaggcacaacgcctagtccatgtgctttgtctttttgagtccctggctgacctgggattcattatgtggaccaggctggcctcggactcctatagatctactttcctctgcctccccagtgctgggattcaagacatgcaccaccacacccagcccatctgggaattttagagaaaaaagtttagccagtttctattggctgccctcttggggcacagtgtctggttcaacccagaacccagggatgaattctcacatggtttccaacacctgctgggatctgcagttccctagagagtggcaacagggaccttcctttcttcggtggcaacctactatgtaacaaagctttgtgaataggccctatgggccacgggaccaaacacccatggacaccactctaccatgccatgga

SEQ ID NO: 2503 - DNA, 418 bp, Cricetulus griseus
  misc_feature (6)..(36): n is a, c, g, or t
  misc_feature (221)..(247): n is a, c, g, or t
gacagnnnnnnnnnnnnnnnnnnnnnnnnnnnnnnngcgagacagagacagagagaaacgggaggtgggcagggcccttttaaaagggaacatagtgaatatgcacaggtggtgctcttagtggctgcaactgagggcgtatcctgtcagaatcccaaggacaggcaagtatagatgcccaaatactaacattttgcccaagacagtgccgagtgcatcannnnnnnnnnnnnnnnnnnnnnnnnnntcattgtttgaaaagaagggacagagttgtataagccatacatttgtgtttgtctattaatcagcataaaagttatattgctgtaacaaatagaccaatattcccaatgtttaatacaacattttatatttctcacataagctgcaatgatagcatgggtctgcttgttga

SEQ ID NO: 2504 - DNA, 467 bp, Cricetulus griseus
  misc_feature (94)..(94): n is a, c, g, or t
tgattttcacaggctgcacatcctcctattcttgaagttgcttcatacatattcacttgagtattgtctagcaattctaggtgattcctgcacnctctagagaaaaagtgttttatgacaacatgatgctttgggttcagagatgaccggtctgcgtcttcatttttactgtttaaccaagcaaaacctcatagtttttcaaaaactttcttcacatgattatgtgtgtaattggctttagtaataaattacgaaacacctcaatatgttgctatactctcatatcttaataacattaaattactagggtgggttttcccctagtcctatgatcttttgtaaactattcattttttaaaaaaatgttgttaggtcctttaaaacacaatcttgtattatgtttgtttcatgtatgaataggtaggttatatatatcttatatctcagatgatggatttttgatatat

SEQ ID NO: 2505 - DNA, 523 bp, Cricetulus griseus
  misc_feature (228)..(247): n is a, c, g, or t
agtgctgctgcttgcatacaagcccatggaagggaactttgaagagattgcccgagactttaatcccaactggatgagtgcagtggaaatcttggatgatgacaatttcctgggagctgaaaatgcctttaacttgtttgtatgtcagaaggacagtgctgccaccactgatgaggagcggcagcacctacaggaggttggtctcttccacctgggcgagtttgtcannnnnnnnnnnnnnnnnnnnctagttatgcagaatctgggcgagacttcaacccctacacaggggtcggtgctttttggcacggtcaacggcatgatagggctggtgacctcactgtcagagagctggtataacctcctgttggacatgcagaaccgactcaataaggtcatcaaaagtgtgggcaagatcgagcactccttctggagatcctttcacactgagcgaaagacagaaccagccacaggcttcatcgatggtgacctgatagaaagtttcctagatatcagccgcccc

SEQ ID NO: 2506 - DNA, 579 bp, Cricetulus griseus
gctgataatattttataagcatgtgcttgttgcttatgaaaataattcctaaaatgggtttggggaacacaggcctgtgaacatttgggaaccataagctttctcaggagggcctacgtgtgtgtggcgcatgcctttaatcctagcacttcagagacagaggtaggtggatctcttgagttcaaggccagtttactcacaagcctggactatgtagagcattgtttctcaacctttgtaattctgggaccctttattacatacagttcttcatgttttggtgactcccaaccataaaattattgctacttcattactgtaattttgctgctgttatgaattgtaatacaaatatctttgttttccagtggtcttaggcgactactgtgaaaggattccttgaccccaaagggtagggaacctcatgttgagaaccactgatatagagagaccctttctcaagaaagctctttcttgtaaatctagttactacaagagcttgaaagataagaaggaaccttgaagggtatgctgattggttttcatctacttactttgtatttctgtcatttgagtgtc

SEQ ID NO: 2507 - DNA, 579 bp, Cricetulus griseus; identical to SEQ ID NO: 2506

SEQ ID NO: 2508 - DNA, 600 bp, Cricetulus griseus
  misc_feature (555)..(555): n is a, c, g, or t
agagcagcgggagctgcgcaagtacacctatgccctactgcgtgtgcgcctgcccgatggctgcttgctgcaggggaccttctatgcccgggagcggctgcctgtgctcttccagtttgtgcgcgaagcattgcagaatgactggctgccctttgagctgagggcctcaggtggacagaggctggtggaggacgaggccctggccctgaacgagtgtggactggtaccctctgccctgctgaccttctcctgggatgcttcagtgttggaggacatgagggctgcaggagccgagccagccacatgtgtgttgaggcctgagctgcttgcagccatcgagcagctctcctgaataaaagcaggctcggcccagcatgcgctgtgtcataccgtcccccaaacccattccttaccctgagtccccaccaaatagaagggacactagtagcagtagagttgggaacagggtcccatctcaagaactgagtcacctgggctgcagggacaggtctgccccttcctgaagagtgtggagcctctgggagcccagcacangtggcagagcgggtctgcagcatgggcacaggcctcacagactat

SEQ ID NO: 2509 - DNA, 356 bp, Cricetulus griseus
aaagccgaggacttcgccagccctgcaccccgagcagaaggcagaccggtattttgtgttatacaaaccgccccctaaagacaacattcccgccctagtggaggagtacctggaacgcgccaccttcatagccaatgacctcgactggctcctggccttgcctcacgataaattctggtgccaggttgtttttgatgagactctgcagaagtgcctggattcctacctacgctatgtaccccgaaagtttgatgagtgggtggccccgacccctgaggttgctgacatgcagaagcacctacaccgaagcattttcctcaccttccttcgaatgtccactcataaggaatccaaag

SEQ ID NO: 2510 - DNA, 556 bp, Cricetulus griseus
ctttggaggagccaggtggagacccaggctcagctgcagaggcctttgcccacaactgcgacgacagtgcctccatctcttccttctccctcggtggggcagccagtagtgcctccctacgaggcacacggggtctaagccctgagcaggaagagacggcttctctggtgtccactggcactctggtccctgagggcatctacctaccccctcctgggtaccagcttattccagataaccagtgggagcagcttcaggtagaggggcggcagctgcagaaggacctggaaagtgtcagccgtgagcgggatgagctgcaagagggactgagacggagcaatgaggactgtgccaagcaaatgcaggtgctcctagcccaggtccagaactcagagcagctacttcgaactctacaagggactttgagccaggcgcaagaacgtgtgcagatgcagatggcagaactggccacttctcacaaatgcctgcacaacgaggttaaaagactaaatgaagaaaatcaagggctccgggctgagcagctgccatcctccac

SEQ ID NO: 2511 - DNA, 539 bp, Cricetulus griseus
  misc_feature (448)..(464): n is a, c, g, or t
acgatccgtgtccccaaggcgggagaccgggtccacaaagacgagtgcgctttctccttcgacacgccggagtctgagggtggcctctacatctgcatgaacacattcctgggctttggaaaacagtatgtggagaggcatttcaacaaaacaggccagcgggtctaccttcatctccggaggacccggcgactgaaagaagaggacactagtgcaggcactggggatccacctcgtaagaagcccacccggctggcaattggtgttgaaggtgggtttgacctcaccgaggagaagtttgaatatgaggaggatgtgaagattgtcattttaccagattacctggagatcgcccgggatgggttaggggggcttcctgacattgtcagagatcgggtgaccagtgccgtagaagccctactctcagctgattcagcttcccgaaagnnnnnnnnnnnnnnnnnggatggggaagtccgtcaggtgtctaagcacgccttcaacctcaaacagttggagaaccctgctcggatccctcc

SEQ ID NO: 2512 - DNA, 552 bp, Cricetulus griseus
attaagtcttagaacggggcttctattttcttgctgttgtgcaggatgtttgttatctggctcatttatagaattgcatgcctatcttttccaaaagtctaatcattaggcccaatctgtcatttctagaccattttctaagttaacggccatctggcaaatgcccatatatttaatattgcttgaagccctaaatgccaaagcgaaagctcatatttatcagctaaaaggcatgtgtgggcctcaactgcagtcctctcccttgaccacactgctttaagcatacagagaacatctgagaaatgtcagcaattttcctacatcacacaatagcagattaactactaacttcttgccagtagggcttcccaccagaagactgcaaaggtaatcctaatttaaaggtaatgacaacatcaaaattcttggctttagttcctagcatctttggaaccagatgggtcttgattcaaatgtctgaagataattttatagggtagaaaatgtactgatgcatgctgtgtctgttgcccctcccatttgccctctact

SEQ ID NO: 2513 - DNA, 567 bp, Cricetulus griseus
  misc_feature (19)..(36): n is a, c, g, or t
aaccagcaagctggtgggnnnnnnnnnnnnnnnnnntccttctggtcaccctgggagccttcatctttggccaaaccacagccaatgccatctttgttgacctcttggcatgaacactgccttccagaaaacatgtcaccaagaaccatctctcagagctgtgaagctaccccaagtcccacatcctgttccagctggtgacatcaggacacatttttccatggacagtcatgggacagaatcagcctcaaatctgtggacagctccccacccagctgccttcctgctccccaaccttggcattgtcatagatggtgacaggaggtcccacgtcataggagcttccccctcacccaggtctcaacttcagtcctttgggacctgttaatggagagtgtcagtgagtcacagaagagagagaccattctgacttccctctggaaaaacaaagtcttatacatagtgctggcatccaccacagagcttgtcaggcctgtgctttcagtaccttggggtttagtgcctgcccatgtctctcagaagccaatgatgacttctcctgggacc

SEQ ID NO: 2514 - DNA, 521 bp, Cricetulus griseus
aaatgctcaggtgtagaagtaagtagaacgatacacagcggccagagtagcttaattcatgtgtaggctgacctgactctgcccccacagatacctggaagaggtgggctacacagataccatcctggacatgaggtccaagcgtgtgcgttcccttctgggtcgctccgtggagctcaatggggccactgagcctatcgaggggccacccagggcttcaccaggccccggaggacttagcggtggcgagtctctgctggtaaaacagatcgaggaacagatcaagaggtgagcccccgagcaggcatgatgttcttcctccctgcagctgttctgccggccctgctagattgtgtggtaggctccaccattgctaggcttcccctgtaggttgtcacacggcctttgttcctagctgaggatagccctcgggtggtttgattgcagcgggaaacaggtgaggaggcatatctactcttgtcttggggctcattttgttcatcttcccatgggtagttggt

SEQ ID NO: 2515 - DNA, 539 bp, Cricetulus griseus
  misc_feature (198)..(221): n is a, c, g, or t
  misc_feature (244)..(264): n is a, c, g, or t
aagcaaaatagttaaaaacaatgtatagttctttctgggtctctatacaataagcctctgtaggtcacatagcattcatcagaggttaataatctagccaaaactaaccctgaaactgagtggtggtacagattttaagtaatcccatctctttaagagctgaagctgggctgggcagtggtgatgcacgcctttagnnnnnnnnnnnnnnnnnnnnnnnnaggcagatggatctctgagtttnnnnnnnnnnnnnnnnnnnnntcaagttccaggacagaggcagggctacacatagaagtctcaaacaaaagagacgaaagcaggaggatcaggagttcaatattaaattgaggggaaacttgctcttttccagtctcaggctctgaggaactgcccattactttgtagacattgtcaattctaagaaccacacaaatataaccagtccagaaatagcatcaagaaacccccttataaagatacagtctaaagggggttgactccaaatacctgatgggcatgttactttgtcaaga

SEQ ID NO: 2516 - DNA, 522 bp, Cricetulus griseus
ttaggtaatggggaagcggagactaacagtggatcctgggggcatggagtggagcacagcagagcgcagcagcatagccccttgtgaggtctgctgagaaggctggaaagataggttgtgcctaggaagccttaaacagcaaacaggaagttcacgttttactctgctgctaagcatgactcctttggggagttggattctgatttgttgtggcagtagagtgaaataagaattcctttaggaaggtcactgaggcaactttatggagactagattgaagagtaagaaactcaggaagacttcaatggatgttaaaataactaagaaactgtgtgggtgagttgggctagccagtggcagcactgcagtaggcggctgcagctccatgctgagaggacaggagtttagacctgtctcaggtagaatatttagtcatttaaccagaagtggtattttttacatgcaatgcatgcagtgaatcagtgaggaaacacaggtggaaaagctcgcatttgcttgccg

SEQ ID NO: 2517 - DNA, 501 bp, Cricetulus griseus
  misc_feature (46)..(88): n is a, c, g, or t
tggaacagaattttggtacaaaatttttgagaataataataacatnnnnnnnnnnnnnnnnnnnnnnnnnnnnnnnnnnnnnnnnnnntgatttgagctcattttaaaatcaccaaagacttaaatgagaaaatctggttacccaaatggagggcacacatggacagcatatgaagcacatggacagtgctcagaactgttagtcatcagagaagtacaaatgtttgactcactagctactgtagtaccctaatgaggatgatggaaatgaacaatattggaaacctggttggtaaggaaacggaatcagagctattgcattgctattgggagaaagtggcattagtttgatgtaaataaaaggatcacgaatgcttgtgttctcagaagatattttttcctgaggggtattgtgtcttccaaaaatgatacataatatacatttaaattcagactttgtctttagaaagtcaaaagcagaatgtatgctcatttgagagc

SEQ ID NO: 2518 - DNA, 570 bp, Cricetulus griseus
agcgacgccgatggaccgccgcgccgagttcgggcgctggaaggcgcatagcctgggcaaggcggacctcagccggaaaggcagcgtggacgaggacgccgtgcgggtggtgcagctcctgaacgcgcaggaagagttcttcaccaccagctcctgcgccggccgaatcctcctcctggacgcgagcacaagcgattctgggattcagaaacagcactgctgctggctcctggtgacacacaaaccttgtgtgaaagatgatgtgatggcagctctgaagggcgcaaccagcaatgctgtcctgaagtttgaaccatttatcctccatgtacaatgccagacactgcaggacgcacagaccctgcactcagcggccgttgcttctggcttcaggaactctggcatcaccgtggggaagcgaggaaagaccatgctggctgtccggagtacacatggattagaagtcccattaagccatcagggaaaactgatggtgacggaggaatatattgagttcctgttaactatagcaaaccagaaaatggaggaaaacaagaaaagaattgaaag

SEQ ID NO: 2519 - DNA, 570 bp, Cricetulus griseus; identical to SEQ ID NO: 2518

SEQ ID NO: 2520 - DNA, 474 bp, Cricetulus griseus
  misc_feature (439)..(457): n is a, c, g, or t
acaatcccaccgcatgcacacaccatagcaaaataaaaaatttaaaaaaagaaaagcagtcaggactgctgagactggaggattgctgcaagtaaaaggccagtcaggaccacaaagtgagtaccaggctagcctgggggtacagaataaggccttgttccacaccctccaccacaaagtagttgacatgacatatgaagtcatcatttgatgtgatctcagctatacgtaggtaaatagagctatttaccactgctaagcatgatgaatggtaaagctatgggtaatttctaatgactttcctttaaaatttttgtttattattatgtggcatggtgtgtgtggggtggtgtagggtgggtgggtgctcctgccacaatgcaagtggggacagctccatgcagttggttctctcctcccacctttatgctcacttcannnnnnnnnnnnnnnnnnnttctctgtgagttcgag

SEQ ID NO: 2521 - DNA, 558 bp, Cricetulus griseus
atcatatcataaagtcaagaagcttattgtagataaatctgagaagttcaatgcaaggtgaagagagagaggaaaataattactataaaaacctttatagtcttaatatgtgattctaggaaggaggaaagaacagtttagtccagttagcttcaaataataaaattgtgcatctgttctccttcccataacttctgtattctaaatggacatggtagcttagtgttatattgaaaaaaaagctaaaagggattaataatctatccatattgaagatataaatgagatttattattctatacttatgttactacttatgataagatatattatttatttagtcataattatatacaatatgatgtatgttccactatacccatgaaataaggaataaaagcaaaggactggaagaatcattcaaggaaatcagcttaaagcctgaagccatgtttattttgctgtgctcctaggaacactgcacacaggacagcatgcacagaacagacttgagaggtatttgctagtaaactaaatgcacaaagcaccaactgtagt

SEQ ID NO: 2522 - DNA, 452 bp, Cricetulus griseus
aggaaagagtgctggaggaaccacagacctctgagtggggtttatgtgacccacctggtggcacaccctgcctgcactgcctgggcaggacagctttgcctgtgcccagcttggatctgccattagggctgctgcctcaggagctgtcccctcgtgtggtactgaagctgaaatcaaggatgggcttctgagcctgggagcctgtctccaaaacctgcaaaccagttagttgagtgttatcccaggtaccaagcacctgtgggccacagctctcatccctgggcctcctcaagttgctagaagggataccgcctgaagagaggctgccatgcaggtttgttctttctcagagcttgcagctttgtgaagatgtcaatgggctgacaagctgcctcactgctgtaccctgtaccacatatagcctgaccaagggaggaaggagggccctccag

SEQ ID NO: 2523 - DNA, 435 bp, Cricetulus griseus
tgaaaacaggcagccttctgctgaagggaaaacctctgtagacagcctcataatgtaggaagaacacctgatgggtcagttcccctcactgtacatcagccacccaaggagatgtgctctagagtgacacactcagccccaggctctgcacagtcattctgactcagtggggcaagagtgctgctccaacatggcagatctggggaaagctcccccagcaggcttctgacacagtcaaaagccggttaaaagtcatggtcttcaacagccaaagcccctcagctttgccagtccatctcccatctgtgctggtgacagggaggtagggttgattgaggactgagatcaagattgtaatatctgccaaaaaacagaacaggataacacttaggatgtaaacaaaagaatccttcaccttggcatacgggataaaag

SEQ ID NO: 2524 - DNA, 381 bp, Cricetulus griseus
ttccctaccgctgcttagttggtgagtttgtaagtgatgcccttctcgtccccgacaagtgcaagtttctccaccaggagcggatggatgtttgtgagacacatcttcactggcacacagtcgccaaagagacgtgcagtgagaagagtaccaacttacatgactacggcatgctgctgccctgcggcattgacaagttccgaggggtggagtttgtgtgctgcccgttggctgaggaaagcgacaacatcgattcggctgatgcagaggaggatgactccgatgtctggtggggtggagcagacacagactacaccgatggcggtgaggacaaagtggtagaagtagcataggaggaggaagtggctgatgttgaggaag

SEQ ID NO: 2525 - DNA, 559 bp, Cricetulus griseus
tgacagtgtggcgtcagatgaagacacagacgtggaaaccagagcaagcaaggcacaccggcagaagcttcaaacactccagtgtgagaattcaagcctcaggaagcaggcgacaaccagtgcctgtcaggtacagactggccctgactacccagacacttcgagccactcgtccttaaagcgccggccatctgcccggggcagtaggcctatgtccatgtatgagactggatcaggtcagaaaccgtacctccctatgggggaagctaaccgccctgaggaggccaggacgagacttcaacccttccctgctcatattgggaggagtgcacttgtggcctcctcttcgtctctgccttccttcccctccacactttcctggtccagggacgaaagcgcccgaagggcatccaggctggagaagcagaacagcacaccagagagtgactatgacaacactccctatggcactgagccagatgacacagtgtcaaaccggaaggggcggcaaaggagtatggtgtggcaaggtgatggctcattgccagacacaacagag

SEQ ID NO: 2526 - DNA, 528 bp, Cricetulus griseus
  misc_feature (53)..(72): n is a, c, g, or t
gccaacctgtacagttttgaccctgtatcagaatttttttaaaaaaatacaannnnnnnnnnnnnnnnnnnnagctcagtgataagactcttgcttcatatgtgacaggctttgttcaataccacaaaaagaggaggggggtttaaaaattaagactcaattttatttggagagtaatgtcagagaagaggagaaacctaaaagatctatgaatattcagatttgacagcactgtaactattctgtaaaaatgaaaaagagaaaaatagaaaccctatgtaaaatctaaaatgaaaaaataaaaggcagatacataggatgaaggacattagaacaaaatgttgctgtactcggacttttctgttccgcctgccagctcccaaataaccacacagagacttcttattgattatgaaagcttagccagttggggcttgtttctacctcttataacttaaattagcccatatcttttaatctatgttcttacgtgtgactctgttacctttactttttaaagccaatgct

SEQ ID NO: 2527 - DNA, 526 bp, Cricetulus griseus
catgacatcatctccatcaagctgttccagctcatggtagaacgcacgcctgaggaggaaagtattgactggaccaagatcgaacctggggtcaacttcctcaggtcccctaaagacaacgtggatgaccccactggaaatttccgaagcggtcccctgacggggtggagagtgttcctgctgttgctgtgtgcactcctgggcatcattgtctgtgctgtggtgggcgccgtggtgtttcagaagcgccaggagcggaacaaacgcttctactgagtggccagtctggctggaagggcctgaccttgggccagagctcttaaatgaactttttttctactgggattgtaaaatcaaccaaccaaccttatttcttaactgtttcaaagaaataattaaagtattttcatacatttatgcttctggcccagctgagacagctggcaggactggggctcagggctcccctacagctggaggctcttgccccatctcgaggcatgctcctgggagcaggggagtctgt

SEQ ID NO: 2528 - DNA, 445 bp, Cricetulus griseus
  misc_feature (8)..(26): n is a, c, g, or t
  misc_feature (73)..(89): n is a, c, g, or t
  misc_feature (91)..(120): n is a, c, g, or t
gttttccnnnnnnnnnnnnnnnnnnngctttggaggctgtcctggaactagctcttatagaccaggctggtcnnnnnnnnnnnnnnnnnannnnnnnnnnnnnnnnnnnnnnnnnnnnnntaaaggcatgcgccaccacccccggccaaaatttttttagatatatactttgtggccttttgcaaggatgagttagccctgctttgctgaggaggaacaatatgcagttttgttaccctgtgaattcgccgagagggaatagtgtgtgtgggagatgagactagaggtgtggtagactctggatagacagtgtaacgttcctttgtttcatcccaacaccaaaatcacctggcccttatgagacagagggctggctacagatgtgctgggtctgtgggctgtagacagcacctgaaaggagagacaggaaatactcaactccccc

SEQ ID NO: 2529 - DNA, 537 bp, Cricetulus griseus
gcgagggagaggacttttagcccatcaaaacctgcaaaatctttacatacacagaagaatagacagttcttcaatgaaccagaagaaaatttctggatgatcatggttgttcggaatcctatcatcgaaaagcaaagtaaagatggcgagccaattgtggaataccaagaggaggaactgttggacaaggtgtacagttcagtgctgcagcagtgctatagcatgtataagctttttaatgggacgtttctgaaagccatggaagatggaggtgtcaagcttctaaaagaaagattacagaagttcttccatcggtatttgcagaccctacatttgcagtcatgtgacctacttgatatttttggtggaatcagcttcttcccattggataaaatgacttacttgaaaatccagtcctttattaacagaatggaagaaagcctaagtgtagtcaaatataccgcgttcctctacaacgaccaactcatctggagtggattagaacaagatgacatgaggattttgtacaaatatctc

SEQ ID NO: 2530 - DNA, 495 bp, Cricetulus griseus
tttcaagctgaagacagagacgacatgctatcatggatcaagactatccaggaaagtagcaaccttaacgaagaggacactggagttaccaacagagatctaattagtcgaagaatcaaagaatataacagtctgatgagcaaaacagaacagttgccaaaaacacctcgccagagtcttagcatcaggcaaactttgctcggtgccaaatcagagccaaagactcaaagcccacattctccaaaggaggagtcagagaggaagcttctcagtaaagatgataccagtccacccaaagacaaaggcacttggagaagaggcattccaagtattgtgaggaagacatttgagaagaagccagctgccacagggacctttggagttaggctggatgactgcccgcctgcccacaccaaccggtatattccattaatcgttgacatatgttgcaagttagttgaagaaaggggtcttgaatatacaggtatttacaga

SEQ ID NO: 2531 - DNA, 531 bp, Cricetulus griseus
  misc_feature (390)..(405): n is a, c, g, or t
gtgagcagctcttgacaaatgttctggaaactctccgtggtgatggaaatgttctaatagcagtggacacagccggcagggttctggagcttgctcaacttcttgatcagatttggagaactaaagatgcaggccttggtgtttattcactggccctcctgaataacgtcagctataacgtggtggagttttctaagtcacaggtagaatggatgagtgataaattgatgagatgttttgaagacaagagaaataatccatttcagtttcgccatctctctctgtgccatggtctttctgacttggctcgagttccaagccccaaagttgtacttgccagccagcctgacctggagtgtggattctcaagggacctctttattcagtggnnnnnnnnnnnnnnnnactcaatcattttaacttatagaacaactcctgggactttagctcgtttcttaattgataatccttctgagaaagttacagaaatagagctgacgaaacgcgtgaagcttgaagggaaagaactcg

SEQ ID NO: 2532 - DNA, 547 bp, Cricetulus griseus
aggttctggccatgttcacagtgctaaatacaggaagccaagaactacggcttcacctggcccaaagatgcctgctaccacctagtttgggccagaactggctacttcctggactggtcctttgggttttggcccttggctccagtgagctctgcagtaaaccctgcagttgaaagctaagctaatgtaatgtgaactaatagtttgccatgccaaaaagcacttcagaaagcagagtatgttactgggaaggcaagatcctacttagaaaactcacagctcctctggacgacatgatggccccatatattccacaggctgtgaattggcttcttccatctgctgagctgggatgaggcaacacctactttaagaaaccactgaaatcttgtgctgtctaatgcatgccttgagtgtgtttgttgtttaaagactcttcatggtggaaggctgctggtggtgtcatgtgcccaggtagcctgaacacccattccccgtgtgtacttgtgggctatgagatgcccctcttgattggcctttggtccca

SEQ ID NO: 2533 - DNA, 557 bp, Cricetulus griseus
ttgacgacattgtggtgctgggcataaacctcagcaagtttaacaagctcacacagtttttcatatgtgttgctggagtttttgtattttacctaatttatggatacttacaggtaaaaagtagtcctttgtttatcatagtattagttatcttagcacttaatgtccatgttggttttgactacttgttttcaccatgatatttttatttacaggctaacggttgactcaaagcttgagatttttgtagaacaatagtctcttaaaaagactactaagagtaaaggtcagaccaacgaagttaaatattttaagttggaaaggaaggctatcttgtaaaattcaagttatgaaagtaaacttataaatatttaataaaacaggtgattgcagctgtgtgttcatatctttaaagacttaattcacttattttttatttgtatgagtgttttgcttgcatatatggaagtgtaccacatgtgtgcttgttgccccacgaagccagaggaagtagggcattggatcccctggaattggaggaggtagggcattggatc

SEQ ID NO: 2534 - DNA, 142 bp, Cricetulus griseus
tatctttcccaccaatatctttggtttcctttttcttgaaaattatgttacgattctgtcatttctttgcaagtgactggtctttcttctttaattgcattataggtcttttttttctgttattaattggtatcacataact

SEQ ID NO: 2535 - DNA, 343 bp, Cricetulus griseus
tgccgcgcgtcctggtgttggtaggaaactgcgagaggaattcagtcattgaagggggcgcggcaccactgagcgatcttcgcggccccctgcagcagccatggcgaaaggccgagtcgccgagcgaacgcagacgggggcgttgcactcgacctcggcggggcaccgggcaacggggacgcgtggttcctccactcctggcagcagagaccacctgaagggtgagtagacctgcgggccggagctgaggctactccaaaggccggaggggcgggtaccccagcaggtcgtccggaaaaacggacctttcagctcccaaggaccgcagcaggagagtggtgta

SEQ ID NO: 2536 - DNA, 288 bp, Cricetulus griseus
  misc_feature (131)..(148): n is a, c, g, or t
taaacagcaagggatcctgtttcacaggctgttttatttgtgttaagggaagaaccctgggcaggggattggcggttacacattcgtttaagaagtcaggctactgtaaaaattaaaggtgaattcccaannnnnnnnnnnnnnnnnncttcgtcagggaagagggaaaaaaaagtttccttctaaaaaagattgggaatttagagggacttccattggctttaattcagtattttcccagctaaaatcattggaattcagttttatttccttcctttccttccgttg

SEQ ID NO: 2537 - DNA, 377 bp, Cricetulus griseus
aaaacctgaacaggctttcctctttctgctcagctgcaactaatgcaaactcaagagttgttatagtattgagatgtaaatgataataaaggaattattttaaggaatattagaaatgctagaatgtgctttacagtgcatttgtggaaatatcttctactttcatagtcacctaagaaatgactggtttctaatattaaaagatattgctctttatatatgaatgttttgtctagttctcattgcatcacaaaatgtcatttttttcctgtggaagtattctatctgaagctatataaatatgtaaccactctgctgtgtcttaatccaattggaaaagacatttttgttttgtttttatagtaacactgtgagac

SEQ ID NO: 2538 - DNA, 580 bp, Cricetulus griseus
aaattgaggagtgggtggcagctggagttgctaggtactgacccttgacctcggggtgctcccccatctctcaggcgtgatggctacgggcgcggatgtacgggacattctagaactcggtggcccagagggagatgcagcttctggggaccatcagcaagaaggatatcatcaacccggacaagaaaaagtccaagaaatcctcggagacactgaccttcaagaggcctgaaggcatgcatcgggaggtctatgccctgctttactctgacaagaaggatgcacccccactactgcccagtgatactggtcaggggtatcgcacagtaaaggctaaattgggatccaagaaggttcggccttggaaatggatgccatttaccaacccagctcgaaaggatggcgctatgtttttccactggcgacgagcagcagaggagggcaaggactacccttttgccaagttcaataagacggtgcaggtgcccgtgtattcagagcaggagtaccaactctaccttcacgatgacgcatggactaaggcagagactgaccacctcttcgacctcagccgccgatt

SEQ ID NO: 2539 - DNA, 580 bp, Cricetulus griseus
acagaagcgagaatcttgacaaccccatccagacagtgtcgctcggccagtctctcttcttccacttcccaccgctgctccgagacggcgagaactatgttgtgcttctggactccacgctctccagatcccagtatgactacgtcctgccgcaagtctctttcactgcagtgggctaccacaagcacatcactctggttttcagtcccacgagaaagctacctgagcaagacattgcacaaggttcctacatcgccctgcccctgacattgctgctcctgttggcaggctacaaccatgacaagctcattcctttgctgctgcaactgacgagtcgtcttcagggagtcagagccctcggccaggtggcctctgatagcagtggcccagaggacatgaagagacagaccaagaaacagaagaccagacgcacgtgaggaagaaaggctcgtcccctgcagatggcacaaccagggctgccacctgcctgggacaaaagcacatactcactcacttcaggcaggccctgggccctgtgacccttcttttggtgtcctgcctgtctgtcctctcctgtgta

SEQ ID NO: 2540 - DNA, 487 bp, Cricetulus griseus
attcatgcccattatcatgggctacaaagtagttttgtagagggtcacaggcatacagcccaatactttccatccaaggtttcatttcttacagcttccactttaactggtcaagctacctccacagaccttgaacatttcattgtgttaaatgaacaacctgctagaatccagagtgtttgtggaactggcctgagaatgggggaggggagagtagaggatttcggactggtctgtttttattcatttttgtatttgtaaatcaaaatacctcctcctgggattgctggagactggaaagagggacctttttttgtaaaggcagaagaatagctctgtggatcacaagttcttgctgccaagtccagtgacctgcgtttgaatcctgggaaccacaaggtagaaggagaaactgattcccactcacattgtcctatgacctccacgcacagcatggcatgcatgcacctgcaaacagacacacaaa

SEQ ID NO: 2541 - DNA, 545 bp, Cricetulus griseus
gcatcgggacaccgcgcgttcctacgtgggcgctctggatcccgcggcgtcttccggcggccttgaggtcgccactctggccgctctggctcgcctggcgctgggtgggcggcacagctgcgcccacatgaaccattggcattgtggccgcaatggtcgcggtcggggccgagacttcgccagccgtgccgcacccaagaagaaggtcagcaaccacatcccggaaagatggaaagactatcttccagttggacagcggatgcctgggactcgtttcattgctttcaaagttcctttgcaaaagaaatacgaagcaaagcttatgccagaagaatgtttttctcctttggatctttttaataaaattcaagaacaaaatgaagagcttggattgataattgatttaacatatacgcagcgctattataaagcagaggatttgccagaaactatttcttacataaaaattcttacagttggccatcaggtacccaacagcaacactatttttaaattcaaaagtgcagttaaagagtttttaaaga

SEQ ID NO: 2542 - DNA, 485 bp, Cricetulus griseus
atctactcttaaaaagcaactactaattttaaatattttacattggattgaacttttgtatattgtatacaaatgttgtatattgatacaaatttgaggttaatttttctaaaacatactgtacatacacttttaatattcaatgtattgtatctatacagctcatttaacaatgtaatacaaattctagtccttgaaagttattatcaaccatataggacaataaggaactgtagtttagtaattagtcaactataacagtcggacttgtagtcactttagatatgtttacaagtgtcaaactaatatattctaaagacaggtcatcttcagacacttcagcaatctactgaatatagcatttaacatgttttaataatataggttctttttttatgacaatgagacatgctgctcctggcagcaccaatctatgttagagaaaatgataggcatcaaagaaactccacatggagtttaatttc

SEQ ID NO: 2543 - DNA, 285 bp, Cricetulus griseus
accttaggtggctcaaatgatccctctgaatgcaaaagtattgattgggtgctgggttaatgggcttcataaaccagggtcattttatttctgggtgaaactctctcttgctcttttgaccatctctcagagggaggagtagacagtcaactactattttgttcttttgacttgagtcttgagacttttcacagtcatgatgttaatcagaatggcgttcgagccctctgaagctggttagatgctgcagtgatgtccttgtgtgactgctgtgacatcttcagt

SEQ ID NO: 2544 - DNA, 452 bp, Cricetulus griseus
aagctattcaatgctataccgaggctattagtttgtgtcctactgagaagaatgtagacctttctacattttatcagaacagagctgctgcctttgaacagttgcaaaagtggaaagaggtggcacaggattgtacaaaggctgttgaacttaatcccaaatatgtgaaagctctctttagacgtgcaaaagcccatgagaagctggacaataagaaggaatgtttggaagatgtcactgctgtgtgtatattagaaggcttccaaaatgagcagagcatgctgttagctgataaagttcttaaacttctcgggaaagagaacgccaaagaaaaatacaagaaccgtgaacctctgatgccatcgccacaatttattaagtcttacttcagttctttcacggatgatatcatttctcaaccaatgcttaaaggagagaagtctgatgaagat

SEQ ID NO: 2545 - DNA, 410 bp, Cricetulus griseus
  misc_feature (128)..(156): n is a, c, g, or t
agtgaggatatctggaagaaatttgagctgctgcccaccccgcccctgtcccccagccgccgctcggggctctgctctccatcctatgtgacggtcgctgcgtccttctccccgagggaggacgacgnnnnnnnnnnnnnnnnnnnnnnnnnnnnntggcaacttctccaccgcggatcaactggagatggtgaccgagctgctgggaggagacatggtgagtcagagcttcatctgcgaccctgacgacgagaccttcatcaagaacatcatcatccaagattgtatgtggagcggcttctcggccgccgccaagctggtctccgagaagctggcttcctaccaggctgcgcgcaaagacagcgccagcccgagccccgcccgcgggcacggaggctgctcctccacct

SEQ ID NO: 2546 - DNA, 324 bp, Cricetulus griseus
ctgcctgccagcctggagtctctgatcacctaagctgctgcagataccatttgcttctctccttcctggaaagcttccctttatgttttattttgaccccagatgttcagatgttttgcagtgtctgggacttgtgccccgtgttctttgttctgcttctttgcccccttccctcttcatggagtgattatgttgacaataatgtgtaatgcgcgttcttttcactggtttatctacagaaatttctctgggctttttttcggtgtttgattcaacactgcgcttaagtggggggatgttccattgaataaaagagcagtgtgg

SEQ ID NO: 2547 - DNA, 579 bp, Cricetulus griseus
ctttctaagatcagttctaaaactaggtattgcttttggaatgagtggtaaactccaatttttaaagagtgaaaaagacatggtagattgaattaatcactgttaaggcattagtgaaaagtataatatgctttaataatatgcaaaagagaagtgacagaaaagttagcaagttaactagggcagggggacgactcaccaggtgaggttcttgctgcacaaccttgaaaatctaggcttgaggatctcagttcagattcctggaacctgctgaaaaaacaagttagacatggcagtgaatgtttgtgactccgaactggctgggtggacatagacaggtagatcctaggaggtggttgaccatacaggctagccgaaactgccagcttcaggtttagtgagagatgctatctcaaaaaatatgatgagctgggcatgatgtcatactcctttaattgtagctcttgggaggggatcctagcctgatctacattgcaagttccagtgtagccagggctatacagtgataccttatcccaagcaaaaccaaatgtggtggagagtgacagaggacgacac

SEQ ID NO: 2548 - DNA, 600 bp, Cricetulus griseus
  misc_feature (346)..(364): n is a, c, g, or t
gataacctccaatggcactgagtcaccacccttatctaccctccaatgtcactgctcctgggtgccaagtctttggtctcagactacatgataggactacccactttcctagagccttcttctttcagtctccatagttgtatgaggtacattctatagtaaatctcctcaacaagcatatctttagcatatacgtgtgtgtgacctgtccattatctttccccggagaaccctgagtggcagaacaaggagccgtggctcatggtcgtcaggtactctgggcttgttcactgccctaaaggagcaatcagagatactctaggtgatgatgtatgctttattagannnnnnnnnnnnnnnnnnntgcagaagaaatgagcagtcattagatagctctctcctagatggctattatctccttactttaaagaatgccttcagttgagtggaatgtcagctaccctttaatttcttcctgtttcttggctctcagcatccttctgctccagcgcttctatactgatctttctgctttggtctttctgccacaccaggactcagagatgccctggtacccattgctgaagggctgtggttgtc

SEQ ID NO: 2549 - DNA, 600 bp, Cricetulus griseus
  misc_feature (560)..(560): n is a, c, g, or t
acaggcttttctagacttcaaagaataaagtcttgggtgaggtccattggtatagaaaggaactttgagccacccacacaaaattcacttggagggaaatcttgtcaaggacacttcgaggcagttgtgggtcacctgtgtctatcaacagaagggataccgtccctgaggaggggccccaggcccttgtcacctgtttgtcccatatacccatttctttgcttcacaggttttaaactggttttttgcatactgctatatatttctgtctctctctgtttatctcgcccccctcccctcccccctcctctttgcccagcattcttttgaattccttcatccttttctgtcccccatatctatgcaccccccccaggcaaagcagttctctgaatatcacatcacacaaggaacaaactcgaaacacacacgaaccagcctcagctgacacttggttactcaagcgaacaagagtcgttggcacgaaagtgggaacccaccaaaccaaccagccaaccaaacaggaaaattccataaaggaagaatgtactttgtctttntacattttggtatataagccatcagcatttagtgaaatta

SEQ ID NO: 2550 - DNA, 273 bp, Cricetulus griseus
  misc_feature (128)..(140): n is a, c, g, or t
  misc_feature (142)..(196): n is a, c, g, or t
  misc_feature (199)..(218): n is a, c, g, or t
  misc_feature (221)..(236): n is a, c, g, or t
  misc_feature (248)..(265): n is a, c, g, or t
atttcatctggatttgattacttaattcaaagaccatattttagctggccatataaccaagaagctatcagccagaaaacttgaaagttataagcatttcttgaaaataagattttcaaatgtagccnnnnnnnnnnnnngnnnnnnnnnnnnnnnnnnnnnnnnnnnnnnnnnnnnnnnnnnnnnnnnnnnnnnncgnnnnnnnnnnnnnnnnnnnncannnnnnnnnnnnnnnntccaaaacaatnnnnnnnnnnnnnnnnnngaaaaacc

SEQ ID NO: 2551 - DNA, 498 bp, Cricetulus griseus
  misc_feature (452)..(452): n is a, c, g, or t
cattaacattgtccgaaaacggttgaaccggcctctgactctctcagagaagattgtatatggacatctggatgacccagccaaccaggagattgagcggggaaagacatacctgcgtctacgggccgaccgggtggccatgcaggatgcaacagctcagatggctatgctacagttcattagcagtgggctgcccaaggtagcggtgccatcaactatccactgtgaccatctgattgaggcccagctagggggtgagaaagacctgcgcagggccaaggacataaaccaggaagtgtataatttcctggcaactgcaggtgccaagtatggtgtgggcttctggaggccgggatctggaatcattcaccagatcatcctagaaaattatgcataccctggagttcttctgattggcactgactcccacacccccaatggtggtggcctangaggcatctgcattggagtagggggtgctgatgctgtggatgtcat

SEQ ID NO: 2552 - DNA, 533 bp, Cricetulus griseus
ccccttggccccggcgggggtcccctgcgccttctcgccggacggccaggcctacttcgccttagcctctagtgacggtcacttgcgggtgtgggagacagccaacaaccggctgcaccaggagtacgtgccttccgcgcacctcagcggtacctgcacctgcctggcctgggcgccagcgcggctgcaggccaaggaaagtcatcaaaggaaaaaaaggaaatcagaagttataggaacgagtgaccaggttgatttgttggctcttggcacagcagttggtagcattttattgtatagcacagtaaaaggagaattacacagtaaattaataagtggtgggcatgaaaacagagtcaattgcatacagtggcatcaagacaatgactgcatatatagttgttcagatgataagtatattgtggagtggagtatacagacatgcaaagtaaagtgcaaatggaaaggagacaatagcagtgtcagttccctgtgtatcagcccagatggaaagatgttactttcagctggtc

SEQ ID NO: 2553 - DNA, 491 bp, Cricetulus griseus
tagcagttaatgcatgcaggattatgggagcttgctccttaatccagcagttattagagcctggcagaaaagggaagctctccgactgggtatagcggtatatacctgttatcccagcacacaagaggtagagggaaagaggaccaggagtttaaggctatcctgggctacatagcatgtctaaggccaacttgggctatatgtaaccctgactcaaaaacaaaaacaacaacaaaaaaggacattagagaaattagacttgctccagtattcttaggatgtttttattcatccctatcgcctctccccttactattcagtgcttacgtaccttcaacactgcccataatccaaacctggacttttaactttggtaaacttttacaagcactgcagaaaaatctttagaggcctgtgtaggtaagccccagcagaggaattctatttgaagttcattcttactttcatatgggttggcccaaccatgtgtt

SEQ ID NO: 2554 - DNA, 579 bp, Cricetulus griseus
  misc_feature (248)..(274): n is a, c, g, or t
  misc_feature (359)..(377): n is a, c, g, or t
agggaggctctggcagagagtgaccgcgcagcagagggcctaggggttgcgattgaagaggaggggcacgacggagtccgcattgggggaagttccccactcttgagtcatcccagcccagtgtggatgaactattcctacagcagcctgtgtctgagcagtgaggagtcagagagcagcggggaggatgaggagttctgggctgagctgcagaatcttcggcagaagcacttatcggaagtggaggnnnnnnnnnnnnnnnnnnnnnnnnnnnttgaggacttgtacagccggcttgggaagcagcccccacctggtatcgtagccccagctgccatgttgtcctgccgccagcgccnnnnnnnnnnnnnnnnnnnccccacttcccggcgcaacagcctgcagcgctctgatctccctggccctggtgagatgacagccacccagctttcatctttcccttgagatttgttccctattggcaagatcttttcaggccctggtggtctacccagtctggggtactggcccccctcctggctgccccttccttcacttagtactctccctccctcatcc

SEQ ID NO: 2555 - DNA, 536 bp, Cricetulus griseus
  misc_feature (479)..(479): n is a, c, g, or t
tagaagactggtttgtttcatgtgtgtaagatagggtgcattacatttgacaaagttagagatgggggtgaaggcaggacaggttaaaccctgtgctttgtaggtgaaggtgaggtgcattcgggggttttacttgcttctaaatttgaaggcagggggaggcacgggcaactcaacacagagaagtggcgggcgctcgcagtggcactctgtaaagagcacttaggcagtggtgtgcaacagttggcagaggccattatcaggccattaaagtcatctgcctgagagctgaagacaagctgcacttagcctgtggcatgctgaattcaagagctgtgtgtgcaccacccttgccagaactcatcagctgggaggatggagaagagcgtggggaacgaccctgcaccaggcaccgtggcacatggtgccagccttgtgtgggcagcagactggggcaagagtagaggggcctcttgcantattgggaagtgaggatggtgagtggagggtgaagctgggtggtcctgtctttctag

SEQ ID NO: 2556 - DNA, 373 bp, Cricetulus griseus
  misc_feature (99)..(99): n is a, c, g, or t
  misc_feature (350)..(368): n is a, c, g, or t
atagaactgaaatgactagaggtagaactgtaaagtgcaatatgataaaatatcctaagttgtatcaatgatcaaaatgtatatacatcaagatagttntatatttgtgcgtaaatatcgtaaacagaagaccctaagcagtcaacatacaataatctaacaatttaagttatctgtagctaacagttgctaaagttagttcactagaaaataggttaattacctatattccatcttaaccatacctttcccatccatatccttaaacttatctaaaagtctgagagtctgctcatcacattccacagcccccaaccctttctgaactcatcttatttttctatccattnnnnnnnnnnnnnnnnnnnatcca

SEQ ID NO: 2557 - DNA, 487 bp, Cricetulus griseus
  misc_feature (51)..(77): n is a, c, g, or t
tcaaggccatcctcagctacatagcctcattgaggccaacctgggctacannnnnnnnnnnnnnnnnnnnnnnnnnnacaaagtaattatggcagcatgatggctgagtgaaaggagagaacttattctacaaggtgaccattgaccttcacatatgtgcatgtgtgcatacaaaaaataaataaatgcataagaataaaaattaaaaggaaagaaaatcagaaaatccaagaagtatttccaaaatcatttgtgaataaaggagtcgagccagaattcaaacccacatctttcagaggccatactcattagcttccaagggcatgactctcatagataaaaggagagcatgtcagttttcagggacaggaaatgtccaagcttttaaaaatgttcaatatgtgctggaaagacggctcagtagttaagagtgagttctgctcttccagaggacctgagctctgtttccagcaccatgtgcgatggg

SEQ ID NO: 2558 - DNA, 348 bp, Cricetulus griseus
  misc_feature (101)..(118): n is a, c, g, or t
tatttatttatctcctacaaaaaggagaatttcattatttgacttttgctgtttgaaggcttttgccaaatgcttaacagtctgtaggacttgatttcccnnnnnnnnnnnnnnnnnnttgctctgaaaacaagggtctatgtaactaaaaggggtttgtttttgtttaagtcattcaaaggggaaatcttctcttgtccattgttaaaagaaaggtttcaatcaaaggagagttctcctcattctaaaatatacaaacagttctttgaaatggatgccaaatcaaactctaaaagggacgttttttttgcaaaagttttgagttaattctgtgtgcagggcttgagt

SEQ ID NO: 2559 - DNA, 254 bp, Cricetulus griseus
  misc_feature (161)..(161): n is a, c, g, or t
  misc_feature (201)..(249): n is a, c, g, or t
ctgactgaaaccagctgtggccaggaccacagaacatctgggtccatatcctgacctatttactcccttgctactctaggccaggggtactcagtgttgttttaactccattacactcagttaggtgtgtgtgtgtgtttgtgtgtatgtgcatgctgtangtgagagagagagtgagtctgtgtgcatgctgtaggtatnnnnnnnnnnnnnnnnnnnnnnnnnnnnnnnnnnnnnnnnnnnnnnnnntatgc

SEQ ID NO: 2560 - DNA, 538 bp, Cricetulus griseus
  misc_feature (66)..(86): n is a, c, g, or t
ttgagacaaggtttttgtaaccctggctggcctggaattcacagaactccatctgcctccaactcnnnnnnnnnnnnnnnnnnnnngtgtgtgtcaccactacctggcaaaatttctctttttattatgttattggaactagaaaaggatatggctttttcttctcaaaaactgttttaagttataagttgactccagatcactttgtggtaaggtgtaagtagtttccttgcaaagaagtaataactctggagtgacttttttattttcaagttagaattattcagtttagtgagtattctaatattcttcttagtgttgtctaaggtctgcagaaagaacatccattttatgctgtcagttacaaagttgtatgcagtaagtcttcttctatcccaacagccagctcccaagtaatgacatggagatttataattaattataaagcctatagcttaggcttgttcctaactaactcttgtaacttaaattaacccatttcattaatctacagtctatcgtgtggcgttacctttct

SEQ ID NO: 2561 - DNA, 483 bp, Cricetulus griseus
agttggcttcaatcccaaaaaggacattcattttatgccctgctcagggctgacgggagcaaatctcaaagagcaatcagatttctgcccttggtacattggattaccatttattccatatctggataatttgccaaacgggaatagatcagttgatggaccaatcaggctgccaattgtcgataagtacaaggatatggggactgtggtcctgggaaagctggaatctggatctatttgtaaaggccagcagcttgtaatgatgccaaacaagcacaacgtggaagttcttggaatactttctgatgatgtagaaacggattctgtagctccaggtgagaacctcaaaatccgactgaaaggaattgaagaagaggagattcttccaggattcatcctttgtgatcttactaatctttgtcattctggacgcacatttgatgcccagatagtgattatagagcacaaatccatcatctgccc

SEQ ID NO: 2562 - DNA, 543 bp, Cricetulus griseus
  misc_feature (17)..(43): n is a, c, g, or t
aaacccagggccagatnnnnnnnnnnnnnnnnnnnnnnnnnnnaaaaaagctaacaacaaatttccctaaattattccataaaatggaaaatgaaggaacatttctgaagtctttctaaaaagctattattacattgacaccaaaaccagacaaagacacaacaagaaagaaactgtaggtcagtatgtgcaaaaattctcaattaaaaaaagaaaaacctgcaaacaggacagattttaagttgaaggttttgtggctgggttgatgtcgcagtctcactgctgggagccttgcccagctatataaagcagtcaattccagctctctatcccccattactaggagagttcactaagggcactccaggagtaaagtggtgtagaactttgtgggagggaccaaccaatgattggtccaacttgaggcccacaccgcaagagggagtcgtgcctgacactgcctggatagccaggaaccagaggctagacaacccatagacccaggatagaaacaacacacaactgacaaattttttttttaaa

SEQ ID NO: 2563 - DNA, 475 bp, Cricetulus griseus
  misc_feature (105)..(207): n is a, c, g, or t
tggcggaggcaatggcgacaccgataccagctccgggagtcagtggctccggcatggacacgcgactggagcaggagaccgctcagtggctgcgctgggaccggnnnnnnnnnnnnnnnnnnnnnnnnnnnnnnnnnnnnnnnnnnnnnnnnnnnnnnnnnnnnnnnnnnnnnnnnnnnnnnnnnnnnnnnnnnnnnnnnnnnnnnnttcgagctcctatgggagctgggatttcgagaatgaatgacttgaccatcatccataccacacagggattttgcaggtacttggaaaagcagttcagtgacctgaagcagaggggcgtggtgatcagcttcgatgctagagctcatcctgccagtggaggcagcagcaggaggtttgcccggcttgctgcgactgcatttatcagccaaggggttcctgtgcatctcttctctgatataacccccaccccatttgtgccctacacagt

SEQ ID NO: 2564 - DNA, 501 bp, Cricetulus griseus
taaaatgcagaagaaaacgttatccctcgtgagaggacattgcaactgttagcagaaatcctgaaaaccagcaaccaggaggtgccctttgacgttcctgagttgtggtttgaagatgacagctcgtccctgagtgcttcatcaccccctgcagtagaaaccatcactgagaagatgttgttggatacctgcaataggcgcaagaacaaagacgcatataatatcttcctcaaagctcaacgacaaaacattgtatttagcagtaaaacttacagcacattgataagcttgctgctgaggagagacagttttacagaagcaatgcaagtgaaagattttgctgagacccacatcaagggcttcacactgaacgatgctgccaacagcctcctcatcatagcgcaagttaggcgggattatttgaaagtggctctggaaactctaaaagcagccttggccctgcagcatgccccctctcaagtagcgatcacccgcctcatt

SEQ ID NO: 2565 - DNA, 173 bp, Cricetulus griseus
taacacaggggaatcacatgctcctccctccccttcatcctcatcaaaatgaggtgtctctcctctcccatgcagggtaaagcaggagattgtcaccaaagttacatcaagctccattggcccttggaatgaagagctggagaaccgacccccagcagcacaaataggcccct

SEQ ID NO: 2566 - DNA, 244 bp, Cricetulus griseus
  misc_feature (40)..(58): n is a, c, g, or t
tacctgtactagaaataacagcatctaaagtgaagacttnnnnnnnnnnnnnnnnnnntagcgactcctaaattatccttaggactctgcattaactttataatgtccttgctattaaaaaagcatatttgtcacaaaaatttagttcccggtttacaactgaacatgtttgggggttgcttaaataaatgtaatccctgtaaacatctttttgatctgggattttgtttttattttaaaaggg

SEQ ID NO: 2567 - DNA, 566 bp, Cricetulus griseus
gaactgactcctttgacacccgggtgtgagtcaccactctgattctctgttatttccctgattgacataagggagatatggtctgttcccagagctgagtctgccaggggttcagctgagtggatgacaatggaaaaggaacccaatctatagagactgtgatacgtgcagagggtgtgagaaaggatgagttggggggtgttgtacaccctataatgcattgtcaggttttcatttccctcagctcacttctgaacaatgaggatgctgggagaacctttgtctgagggtagtttatgtttgggaatacttggaatttttccagagtctcatcttcttattctacccacacatacatgtacaaggttgctaatatcaggaattgtaggtgataggggtacatactggaacccctggctctctgcatgtagctcagaaccacgctaaccactggcccaagtctgcaacattgtcttgagtgactgctgtctggatggcataagatcccagttgcttccccctttcacccatcagccacagttccccaaggatgctctcaggaaaga

SEQ ID NO: 2568 - DNA, 506 bp, Cricetulus griseus
  misc_feature (157)..(157): n is a, c, g, or t
aactgcacattagagttagctactctaggtgaggacatgtatccaaggaaaggtttttatataatatgtctttgtgatgaattactaagaaagggtcagagctttcagtgtgaagatccttttgagtgctttgtaacattgttcaatcaaggcttantctaaagtttaaaattctgtttccttaaactatcagttttctgaacctttgtcacactgactagcttatgctcttggtttgagagatgggttcagttccgagtttgatctggtaactgtgtgaatttggagagtgcttacctagtatgcataagactttgggctccatctccagcactgcattaacccagcatgattatactcccatcacttggatggaggtaggaatttcaggagttcggggttattcagctatataaccatttccaaaccaaccaggactacagaacgccctatctcaaataaataaaaaacgcatttaccaagtagttcacttaattaaaaattaa

SEQ ID NO: 2569 - DNA, 330 bp, Cricetulus griseus
  misc_feature (259)..(278): n is a, c, g, or t
cctcttctgcataattcttgtagttgctttttacaagtataagtgcccttcaccttccctcttcccattctctctgttgacgaccttaggcctaagtcttgttagaaaaagcctgaactggaagaaaagcctacctgtagctttttttgggtgaccaatcagcttccaggccatcaccatgaccttgacctatggtgaatcttgcttgttctccaccacacatgggctataacagccactgctgcccctcttcaaccannnnnnnnnnnnnnnnnnnncccgtgagagcacacgtgagattcattgctatccttttgtagaaagtactgt

SEQ ID NO: 2570 - DNA, 580 bp, Cricetulus griseus
cgctggctagcgtgttgcagcggccgatgccggtgaaccagcatgggttttttggattcggaggtcgtgcagatctgctggacctgggtccggggagtcctggtgatgggctgagcctggccgcgcccagctggggtgtcccagaggagccgagaatcgaaatgcttcatggaaccaccacactggccttcaagtttcgtcatggagtcattgttgcagctgattcccgggccacagcgggagcttatattgcctcccagacggtgaagaaagtaatagaaatcaacccttaccttctgggcaccatggctgggggtgcagcggattgcagcttctgggagcggttgctggctcgacaatgtcgaatctatgagcttcgaaataaggagcgcatctctgtcgcagcggcctccaagcttcttgctaacatggtgtatcagtacaaaggcatggggctgtccatgggcaccatgatctgtggctgggataagagaggccctggcctctactatgtagacagtgaggggaaccgcatctctggaacagccttctcggtgggttctggctccgtgtatgctta

SEQ ID NO: 2571 - DNA, 520 bp, Cricetulus griseus
aggtgtcaaaaatggagagaaaatcagctgaaatcgggaccccacagcttctttaaggttattaaggccacaaagccgaaaaaatgagaagaaaagtgtgcattgaagtcaactcatctaaaaggcattttgttgaagaattttaatactgcttcttgaaccagattgagttgcctgaggagagcagtttacagcctcatcatcttatcctgttagttcaaaaaggataaatactacaaaaatactctgtcagatgtatagcaaaacaatacaaatacaaaaatctaataaaatcccaacaccaggcatgagaaaccctcttatgagtagttggtcagggttgtctaagagactccccaaacattacaggctattctattgctattgtcccccagaggtgatgataagtttatattgctgaagataccatgtacttcagacatgagattcagaggcttgagctttaactgacctgacaatcttctacccaagtattgattatctttcatgatcacagaag

SEQ ID NO: 2572 - DNA, 513 bp, Cricetulus griseus
tatatacttagtaatttataaaaccattgttgtaccacaggcatttaaactacactagtcttgcatttggtgaagaaaaatttgtttagggaaactttttatatatgttttaggtcacattgtattggttatattccttacaaacttgagaaaagtttgacaaactattctgagtcatgcattatggcagaagcaacccttcaatattaagttactaagttatttatcttttgtactagctctcaggtggcgatagtttattaaggtatgtctgtctgatctcattatatattggattgtacctctaatactgtggaacttttttggctattgagactctttggcatgagtacttaagaggaacttgaggcagaaaaacagaggagtctctcagatggcccacttttttgctcttgcgccctcatgtttaccagattctctttctttaaccactgacctcggaaaagatacatatgtagatttattaactctaaattgaactggagttagaat

SEQ ID NO: 2573 - DNA, 526 bp, Cricetulus griseus
agccatctttgcattgttcccgggtcctcctcctcctccgcggcggactccggcagctctctcgccagagtcctcgagctccagttctcgcctccctcgctgcagcgcatcaccggcgtgccccaccatgtcagacgcggccgtggacaccagctccgagatcaccaccaaggacttgaaggagaagaaggaagttgtggaggagacagagaatggaagagacgcacctgccaatggaaatgctaaagaggatggagatgaagatgaggaagctgaggctcctacgggcaagcgggtagctgaagatgatgaggatgatgatgttgacaccaagaagcagaagaccgatgaggatgactagacagcagaaaggaaaagctaaacttaaggccaccgtgacctattcaccctccacttcccgtctcagaatttaaacgtggtcaccttcgagtagaggagcaggccccgcccttagcgggcagtgccacccacagatgacatgcgctctccaccaccccaccaaaac

SEQ ID NO: 2574 - DNA, 533 bp, Cricetulus griseus
cggcgcggatgtggcgaggctgctgaacgcaggttccgcggtatggcggggacggcgctgaagaggctgatggccgagtataagcaattaaccctgaatcctccagaaggaattgtggcaggccccatgaatgaagagaatttttttgaatgggaggcattgatcatgggccctgaagacacttgctttgagtttggtgtttttcctgccatcctgagtttcccacttgactaccccttgagtcctcccaagatgagattcacctgcgagatgttccatcccaacatctatcctgacgggagagtctgcatctccatcttgcatgccccaggcgatgatcccatgggctatgagagcagtgccgagcggtggagccctgtgcagagcgtcgagaagatcctgctttcggtggtgagcatgctggcagagcccaatgatgagagtggagcgaatgtggatgcttccaagatgtggcgggatgaccgtgagcagttctacaaaatcgccaagcagatcgtacagaagtctctggg

SEQ ID NO: 2575 - DNA, 345 bp, Cricetulus griseus
tcacagacatctctagacccaaggacttgtgccccaggaggagccgaggctaatgggtgcccgcctcagccctgaggccaacgctgaggtgccccgtgaggcccgcgaggcccttagtttccacggggatgccactggcacacaggtgcatctggatgaccagaggagcacagcgcataggctatccacgtttcatgatggcattgtgttcagccagcgtccagtgtggcccggtgagcgtgtagcgctgcgcgtgctgcgacaagaagacggctggtgcggtggcctccgcgtgggcttcacgcgcctggaccctgcaaatgtggccgcatcctgcctgccgcc

SEQ ID NO: 2576 - DNA, 221 bp, Cricetulus griseus
gtaactgctcttagctctgagagcaatcgccgccgctttcccggaacttgagtggatacaatcaagtggtatttaaaatctttctggaactaaagacatgaggctgaagatatctctcctaaaagaaccaaagcatcaagaattagtgagctgtgtaagttggacaacggcttgagagctggactcatgcagcgatgatcaccagatagtgaaggggaact

SEQ ID NO: 2577 - DNA, 555 bp, Cricetulus griseus
tgctggagatatgttgtcttctgttcccagctggcagctggctacacctggaggagacatggagcagcaagatgatgaatccctggagtccccgcaggcctgtgtggagaactttgttctaccccaagagatgatcgtcgaagtggagggagaagacgctgggtccctggacaccatgccccagctctagcaatcaactcgccaggatatttgccaaggaagctgccaagtcacctagcctggagtatgcagtatgataaaaagaaaactctgcctcaggacggaaagcaagagccagagcctgagattgttcctctgagctcagcatctctctgtggtgcatgaaggctcctgctctatcatatgcagacacatgatggtaccaactgattaaaacctcggggctggagacaagccccagtgattatgagcactgactgctcttcccgagaacccaagttcaattcccagcacccacatatcagctcacaagagtcagtaactccaatctaggacatctgatgctctctccctgcctctgcaggcacggtacat

SEQ ID NO: 2578 - DNA, 580 bp, Cricetulus griseus
ccatcaacgtgggacgtgctggagcagccagcctggatgtcatccaggaggtggaatacgtgaaggaggaagccaagatggtgtacctgctcgagtgcttgcagaagacacccccacctgtgctcatctttgcagagaagaaagcagatgtggatgccattcacgaataccttctgctcaagggggttgaggctgtggccattcatgggggcaaagaccaggaagagcggaccaaagccattgaggcatttcgggaaggcaagaaggatgtcttagtggccacagatgtggcctccaaaggcctggactttcctgccatccagcatgtcatcaattatgacatgcctgaagaaatcgagaactatgtgcaccgaattggccgcaccgggcgttcaggaaacacggggattgctaccaccttcatcaacaaggcctgtgatgagtcagtgctcatggacctcaaagccttattgctggaggccaagcagaaggtaccgcctgttctccaagtgctgcactgtggggatgagtccatgctggacattggaggagaacgtggctgtgccttctgtggaggcct

SEQ ID NO: 2579 - DNA, 578 bp, Cricetulus griseus
ttttcacttttgaaggtttaaccccgatcccagtgttgaaagactagaggctgaagggggtgagggaacttctgccccaggattttactgagaccagcttgggggcatacgaggcacaaggaatccagcttcgtgtcctaaaagccatccacaggtttcctacagatcgtcactgtacacaatctgggtccttttgtcccggtggcagcccttagggctgttctggacagcaagggaaccccagacagatttgccagtagcagcatccagcatgggctgtttgcgggctatgttgactttgagctgcacggattccacctgggtcccattgagctcagcaacggcctgatctgcaaactccatcttttcataggtgacgaaggcacagtttctgggtgggtccatggagaggtcaatgatgtttccaaagggagagaaggcccctcggaggagggtgggcgtcatgtcctctccatacacataaagtgtgttccccttccgaggggccctcctttcggggaatgagtctgacctgcggaaagggccctcgcgctctcggtcccgttcgcggtctttgt

SEQ ID NO: 2580 - DNA, 566 bp, Cricetulus griseus
atatgacacgtgtgccaacagtgagtcactgggctggctggggccttctctacactttgtgtgcactgcattccacaggaagagcattgcttctgctgggcaacatcacctatttgtggctatgctagtttttagactaaatgccttctctttttcaaatactaattccttatagtccagatactaacagttataattaccgttacatttatgttttgcctctataatccactggaattggaagctcaaagtgaggcaaatatctggtttaatttttccaaatgcctgtttcacacacacacacactgttatgaaatagacagcttatttctcatccccttagtttaaaaaaaaacactcaatgaaaatttactttctactatctaccagacatggtgttaaatgtagattatgttggttttgagcaatgaggacatggatgcattaaaaatgaactataaatgattaaccaacattaattgtgcatgtatatcactacatgaatacaacttacaaaagaaaaataaatagctagctttaaaagttcaaatactctattcatcgtg

SEQ ID NO: 2581 - DNA, 558 bp, Cricetulus griseus
aaaaaaagaagacctggtttatctgacgtcagactctcctaatgtgttgaaggacttatatgagtcaaaggcttatgtgattggagggttggtggaccacaaccatcacaagggactcacatttaagcaagcgtccagtcatggaattgagcatgcccagctccctcttgcagactttgtgaagatgaacagtcgaaaagtcctggcagttaaccatgtgtttgaaattatcctggagttcttggaaacaagagactggcaagaggcattttttacaatcttaccccaacggaaaggagctgttcctgcacacaaagcctatgaaaactcttctcaggaccagcagccccggccagaaggatgggacagttccagcgagggagagaactgcaggaatgaccccgcctcaccacataaagaagagcagggtccgcagagcagcccggtgtcctcagtgagttctgtcccacagtgaccaaccttcctagctgcccttccaagagaacctagagagcgtggcacttcacaggatactcagactacaagaaagttgattct

SEQ ID NO: 2582 - DNA, 578 bp, Cricetulus griseus
accagctgtgacagcctctccctgtcgtccacattccctccacgcacccctgcttggcttcactgtcttctggtctcggtgctactgaaactgcccccagaacttgaattctgattgaccctttctccctactgccctccagggagcccaagttcctgagctagctggaaactgggttcctctcgtgaccaagtacagctagtggcccaaagtgtgctgtccctggagggtgatactctgcagccaggcccttgtgagccacagacaccaggtgctgtatggaagctcagcacgtcttatgttaactcccgaggtgactcccccacccagacactgctcttctgccatgtgttcactgtcagtgctgttctggggctgctcttgaaaatgatgtgtgtcttacgtactggatactcctgaggcacactgggtggctgtcctccttgggctgggctcctctctaatgcttcaatgtagctggtatctgtcctcactgttcaagggttgagtgcctaccttcagttacttgccgaggtgtacattctagtgtggtgtatactggtgatactggtgggtgt

SEQ ID NO: 2583 - DNA, 600 bp, Cricetulus griseus
  misc_feature (411)..(456): n is a, c, g, or t
gtcgacccacgcgtccaggagacctgagttcagatctctagaacccatataaagctgagtgcagcagacagcatctataatcccagtgcctctacagcaaaatggagtggaaataggagaatccctaaaggatcacaggcctgctagtgtggcatgtgcagcagtaaacaacagaaagacctgtctcaaacaagatggaagaaaagaaccaccagcctaagttgtcctctgacctttacatacacaccatggcattcataaacatgtatgcatgtacacacatcacaatacacacaaagtattttcagttgcctaaacatacataataaagtggcaagtaattgaggaagacccttggggttgatctctggtctccacacacacatacaaaggaacacatgtgtgcatgannnnnnnnnnnnnnnnnnnnnnnnnnnnnnnnnnnnnnnnnnnnnnggtgttcacatccacaaaagaagcaaggagcctttgtggaagggatgggtgtgtcttgtcttgatgtgattatgggagtttcacagatatgtgcaagtgtccaagaacatcagattacacatattcatatgtgtagattgtgca

SEQ ID NO: 2584 - DNA, 280 bp, Cricetulus griseus
atctaaataagcctctggaagtgccaggctgccactgtcagctagatttgccaagtcatatacgcacatccagtccctaagtgcctatttggttgcttttgcattgtggggacacatggcacgcatgtggcattccctgctgtgcttcagggacccttcatttcactgttgagcaatacctggctttggttgcaggttctgtagcctaacacatgccattgccaactttggtcagactcacaaagatagaagggccagcatgtgatagcatacctgtgtc

SEQ ID NO: 2585 - DNA, 578 bp, Cricetulus griseus
  misc_feature (535)..(535): n is a, c, g, or t
aaaagccttatcagtgtggtgaatgtggaaaacgcttcaatcaaagctcaagccttataattcaccagagaacccacacaggagaaaaaccttaccagtgtgaagagtgtgggagaagctttaataacagttctcatttcagtgcacatcggaggacacacacaggagagagaccccatgtgtgtcctgactgtggtaagagttttagtaagagttctgacttacgtgcacatcacagaacccacacaggagagaaaccttatgagtgccacgattgtggcaagtgcttcagtaagagctctgcccttaataaacaccgagagatccacacacaggaaaagctgctgtcacagtcaatgtctaagtaagctcctgcggaaagacatcagtaaaagtattgtttgacagtcccctcctgttctgtgctcagctggcttaggaggcacttcttgggatttttgccattgtttgttcctatgcttcccaaacgtagccgagtcagatgtcagtggttttaagataaaaagtagctttntgtctaaactgatggtaatgacgtcttccaactcggggcctgt

SEQ ID NO: 2586 - DNA, 579 bp, Cricetulus griseus
  misc_feature (443)..(457): n is a, c, g, or t
cgttcagactggacagggtggtccctggttcccactatgtagctctgactggaatgctgtcagcttctatcaccgttggtgttacgtatccctgatcacctggtggagcctctaaagagaagaattactacactcatggctggcattttacgctcagtatttcagaagcctccaggcagactgcagactgtgaataaaggtgtggagtctctcattggtacagattggattcgtcacaaatttaccagatcaagaattccagataaagtgtttcagcctagccctgaagatcatgaaaaatatggtggggacccccagcatcctcataaactgcacattgtcacaagaataaaaagtacaaaaaggcgtccatactgggaaaaagatacaatcaagatgcttggactacagaaggcacatagccctcaaattcacaagaacannnnnnnnnnnnnnnaaaagttgaaagtggttaaacacttgatacgaatccagcccctgaagctgccacaaggacttcccacagaagagaccatgtctagcacgtgcctcaagagcaatggggaattggtggtacag

SEQ ID NO: 2587 - DNA, 556 bp, Cricetulus griseus
gttttccggttttttgggcgcggaaagcatgaggcgcgctttctgaggccgggagtcaactgcgatgagtggagaaagcgcctaagcgacgggtggatcccgaaggggatggattttgagcatcaggcgttcgtggtaaactctgtcgtttttgtttttttttaagggcaatgtctaatgtccagattaggtctctgccacccggggcagcggcttgagatcctcggtcctcgttcctgaagctctgcacccggtccaggagcgcccgactgtctctccaaacttcgttctcctttgtagccggcagataaaggtctaaactgagataagtcggcttaaattagcttcagcaaaccggcagggaaaacaaacaaacgaaaaagtccagtgccttggtgccgttttcctctcctcccagaaacattcgactctgaaccgagtggttcatggaacgaaaagagcactcctgtgagctgccaagaagtcacttgagtgcttctttcctgttcctcctggaatattcgcacacctgcaacagggacagaaatcatgacgc

SEQ ID NO: 2588 - DNA, 368 bp, Cricetulus griseus
  misc_feature (51)..(65): n is a, c, g, or t
cccttacccacctaaacttattttgatgcctcgtttttcaaagaggggggnnnnnnnnnnnnnnnttaaccggtacctcaaaaaaaaaatccctgaattttccccccccccccctcctgttggtttttttttcccctttcccccttccccaaggaaaaggtttttttttttttaggggccctggaattgaaaccaccccaaaaaccccgtggccccaactttgggtgtttaaaaccttttttccccgttttagaccttttttccaaaaatccccctcgtggggaaaattgtgggaaccaatccctgtttaaaaaaaaaccaaaaacccaacccaaaccacccccctcccgggaaaagggagggaaaaa

SEQ ID NO: 2589 - DNA, 569 bp, Cricetulus griseus
ttacagaaagaactccagacttgtgatcaagtgtctcttaatacctcacaaagtgagtccagtgatttggctggccgaatgaagcggaagaaactcttgaaggagtattatagtacagagtctgagccgttgacaaatggtggtcagagaccggcatcagaaacctttctacagttttcctcttcgtcttcagatgcagatgttcatgtcctggtgcgtgttcataaacatgtcagcatgcagatcaatcactaccagtatctgctgctgcttttcatacacgagtcgctcgttctgctttcggacaccctgcggaaggatgtggaagctgtgactggcagccctgcttctcagacttccatttgcattggggttttacttaggagtgcagagctcgccctgctgctgcatcctgtggaccactcgagcactctgcgctctcctgcttctgaaagtgtgagcccgctgcttcctgactacctaccctcagaaaatggggggtttttgtcttcaaagaggaaacaaggtgggagtagtatacatcgaattagaaatgctactcttaatca

SEQ ID NO: 2590 - DNA, 579 bp, Cricetulus griseus
agtgaaaggatgtttgaatttagcctctagtggcaattatctagtcaactaatgcctacatggctgagcccccataaaacccctaagtgatgatgttccttgatagtctgtggaagtgctagaacggtgcagccctgccctcatccttagcccatgtcctatatatcctttctgttttgctgtcctaagttaaagactttctaatatattggtggtagtgttactggaattttctgtcataaagcttgactctgggtctcaagacttgctctaaccccacattaagagaaaaaggatatttatacatgtaagtttatgggaatgtgaattcatttacagtttggccaaacctggtgaaacaggtattcacaattttcctctgccttgcccatagcagtgctttaagttataaaaaacggggaaatctatagatttggttatggattgtggttagttttcttagacgaagacttttgaggtggatgttgtttcctgtatgggccacattacagtacaaagacactttcttgagtttggtaagttctagcaaattactggcccctggtgggtatgttgtac

SEQ ID NO: 2591 - DNA, 579 bp, Cricetulus griseus
tttattagaaggggcaaatgcttatcattgtgaaaaatgcaataaaaaggttgataccgtaaagcgtttgctcattaaaaagttacctcctgttcttgctatccaactaaaacgattcgattatgactgggaaagagaatgtgcaatcaagttcaatgattactttgaatttccccgagagttagacatggaaccttacacagttgcaggtgttgctaagctggagggggataatgtaaacccagaaagtcaactgatacaacagaatgagcagtctgaagagaaagcaggaagcacaaaatacagacttgtgggtgtgcttgtgcacagtggtcaagcaagtggaggacattactattcttacatcattcagaggaatggaggagatggtgaaaagaatcgctggtataaatttgatgatggagatgtaacagagtgcaaaatggacgacgatgaagaaatgaaaaaccagtgttttggtggcgagtatatgggagaagtattcgatcacatgatgaagcgcatgtcatacaggcgccaaaaaaggtggtggaatgcttatatacttttctatgaacg

SEQ ID NO: 2592 - DNA, 579 bp, Cricetulus griseus
  misc_feature (397)..(421): n is a, c, g, or t
gacaatcaccctcatgcaaaattagtgtaaatcacaaaataccctataactggaggcactatgatgcaaggcttcatgttctaagatgggctttctatccgtggagacccacacggaaagcttgagtgttgtcgattctatgcaatgcaagattgatagacctctgttctgtccatggcacacatatcacatctgttctgaggtgatggtgatgaggtgttaagggatgctctgttgatctctcactcagtaacactacaaatgtcaaatacaagaactgacacaactttgccttaaagagcaccagactgggattggtcgcattgtgttaataaggaacacttaaagtgttcattgatgtttacgattttaatatttctgaaagccgttacagtgnnnnnnnnnnnnnnnnnnnnnnnnncttttaaattttttggtttttttaaacaaagaaatattttaaataaatcctatttcaacacagaaattgttgaaaactgtctcatagcaaaagataaaaatcatatttaagttttttgttttgtggccagtatagggaatggaagtgtcttgttaccc

SEQ ID NO: 2593 - DNA, 579 bp, Cricetulus griseus
  misc_feature (563)..(563): n is a, c, g, or t
attgtttttctataaatttagggtggtttttgaaaaatgacataagagagatatctgtcttagaagtgtgttatactgtacatttttgtttcctcatttatttgctttgagacatggtttgcctgtgtagaccatacatggcctcagactcatgtatgagcctccttcctcagcctccaaagtgctgggattgcaggtgtgtagtactgggtctaccgtgtactgcattttgaaaaccagaatattccagcatcagtttgcctattcttagaataagcagtcttttaaaaaattttttattacctgtttttggagtagaaatagttgtaaactgatactgtgttcagttcaaattctgtctctgccaataactaaccagtttcctgaagtggttttccctgtcctgctgaagctccctcatctgtgcagtgtgcagatggtctcttaagcaccttctcgtttcagagtgctgggtttttcgactttagtttttaatagattttggtgtaacacactagataggtatatgatttagatatttttatttcatctctacatatganaatgaaagtgaaaacc

SEQ ID NO: 2594 - DNA, 349 bp, Cricetulus griseus
aggcggaaactgagaactcttttcatctaaaaatatcttttaaaagaaaatctgtctgatgttggttaatatttacctcaattttattttaaacagaacatttggttatagtttcaaaagcttggtcttgatgccctgtatcacatgactatactgtgaggctgtgttggtcattttataacaatcctctaatcttaataggcattattaatgcactagacttaaaagtactaattctgccttttaagatcattggaaatattccccctaaaacttttacaaagttttccatgaattaaatcgattacacattcaaaatgatcatacgctcttgcaaggacagattttg

SEQ ID NO: 2595 - DNA, 576 bp, Cricetulus griseus
  misc_feature (271)..(292): n is a, c, g, or t
gaaagacagagatacagagtcagagagagacagagactgagagacagagaatttagtaactgcaggactgggtgggtagatatgcgcatgtgtagccagaagccaactctgtggtttctaatgctctccgtccacagttccatggcttctggagatgaaaaaggaagcatgctcttgcttacaaagattagtttctgagttccaagatgagtgatatatccttacacaaaggttcaccaagtaccaagtacgtatgaggtttaaactaacnnnnnnnnnnnnnnnnnnnnnncacacttacgttctgtggtgaaaagcaaaacgatggggtagaatgaaaagcaagaggcctcatctttgaggctggttctgtctccatacttccattctccacagcactaaaatccagtttgccatcatctttacttcctatggcttttagtccttgtgaaagaatgtcacgtaaatcctgataaacaggtttctcagtgtagtccagtaatttcacagtttgcatgtacttagcaatttcacctaaaacaataacacaatcattgtattactctaattcacaaa

SEQ ID NO: 2596 - DNA, 576 bp, Cricetulus griseus; identical to SEQ ID NO: 2595
  misc_feature (271)..(292): n is a, c, g, or t

SEQ ID NO: 2597 - DNA, 578 bp, Cricetulus griseus
  misc_feature (289)..(335): n is a, c, g, or t
ccccaggagaggagcagcggcgctgggaggaggcccggctaggtgctgcatccctcaagttcggggccagggacgccgccgcccaggagcccaagtaccagctggtgctggaggaggacgagaccatcgagttcgtccgagccgctcagctgcagggagacgaggagccgtcgtcagttccacccccatcagcccaggcccagcagaaggagtccatccaggctgtccgccgcagcctgcccgtgttccccttccgagaggagctcctggccgccatcgccagccaccnnnnnnnnnnnnnnnnnnnnnnnnnnnnnnnnnnnnnnnnnnnnnnnatcccgcagtacctcttcgaggagggctacacaaagaagggtatgaagattgcttgtacccagccccgaagagtggcggccatgagcgtggctgccagagtggcccgggagatgggtgtgaagcttgggaatgaggttggctacagcatccgctttgaggactgcacatcagagcgaaccgttctccgctacatgacggatgggatgctgctacgggagttcctctctgaacccgaccttgca

SEQ ID NO: 2598 - DNA, 554 bp, Cricetulus griseus
cggtcgctgcacacttccaccgttgccttgcgagcttttgaccccgaggtcggagtctctgcggacagaatgaggcatttaaagagaacttactgtcctgactgggatgaaagagattgggattatggaacgtggaggaacagcagcagtcataaaagaaagaagagatcacatagcagtattcgagaacataagcgatgcaaatataatcactccaaaacgactgatagctattatctgggaagcagatccatacatgagagagagtatcatagtcgacgctacattgacgaatacaggaatgatgacatgggatatgagccaggctattattactatggagaacatgaaagcagatatcagaaccatagtagcaagtcctctggtagaagtggaagaagtagctacaaaagtaaccacaggactcaccaccgcacttcacatcatcgttcacttgggaagagtcaccgaaggaaaagaaccaggagtgtagaggatgatgaggagggtcacctgatctgtcagagtggagacgtactaagtgcaagatatga

SEQ ID NO: 2599 - DNA, 555 bp, Cricetulus griseus
  misc_feature (460)..(460): n is a, c, g, or t
cctgtcccagcctaaagtgagaccaactcaagccaggcatggggtgatggtaccacagggaagacccaacaggtagcactgtcctccgggtccccgccatgtgggattcctatctctgagaagtaccagccagttagcagtggcctagaatgtgaagtgagagccagcctcatgtgcagcaaaagagaatttcatttcagttgttcaattaagtttcattttttggttgcctggggaaaactaaagaaaggttttcttacttttgtccctcgctctggttcccaccccactagcgaaaaactgagcaattccacattgttgaaatggctaggttgtgtttgtattggctgaattaagcctctataattatatatttcctctcttttgtctgttagtgcttcaatattaatgtgggacagaaatttcatttaatgaggacatgattttcccattgtcttanggttgtttaaaccacagctcatctccattcaagattccccatgttgtagccctcaactctgaactgacactgaattctgttctcacaagccgtgc

SEQ ID NO: 2600 - DNA, 568 bp, Cricetulus griseus
gaatgaagtatggaggacaagacttttgggcagatttgaatgccatgactgtatttgaaacaactgaatttgaccaactacgaaggctgtgtacaccaccctgtagtaatacaaacgctatttacaacacatattggaaattcttctgtagagaccactttggatggagagagtatcctgagtctgttgttcgattaattgaagaagccaactctcggggtctgaaagaagttagatttatgatgtggaacaaccattacattctccacaactcattcttccggagagaaataaaacggagaccccttttccgatcctgtttcatactgatcccatatttacagacacttggtggggttcccactcaggcttctctgcctcttgaagcaacttcatcacaaatcatctgcccagatggagtaacttcagcaaacttttaccctgaaacatgggtttatatgcatccatctcaggacttcatccaagtgcctgtttctgcagaggataaaagttatcgaatcatttacaatctttttcatagaactgtacctgaatttaaatatagaat

SEQ ID NO: 2601 - DNA, 578 bp, Cricetulus griseus
gactcctccgctgtggggtttgattacaaggagagattggccaagcacgagtcccagcaagactatgccaaaggatttggcgggaagtatggggtacagaaggatcgaatggacaagaatgcatccacctttgaagatgtggcccaagtgccctctgcgtaccagaagactgtccccattgaggctgtgaccagcaaaaccagtgatatccgagctaactttgaaaatctggcaaaggagagagagcaggaggacaggcggaaggcataagcagagagagctcagcggatggccaaggagaggcaggagcaggaggaggctcgaaggaagctggaagagcaagccatatccaataagcagacgccccctgcatctcctagttctcagccagctgaagacagaccaccctccagccccatctacgaggatgcagcgccgttcaaggcggagccaagctaccgaagtcctgttggtggaagtgagcctgatcctgtgtacagcacagaggctgcaggtgtccttgaagccagcagccagcaaaacttagcttacacctcagaacctgtctacgataccac

SEQ ID NO: 2602 - DNA, 427 bp, Cricetulus griseus
ccactcctcaggctctgccacgcttgctgtgtggggagtggaaagacctgagaaagtccttgtgctgggatctgatcagggaaagaatgcccttcaacatgaccttgggacccgggcagccagggggagattttaccacaaaaccaccaggcactaagtaagtgcttagcttagtgcagggtggctctggtcctgatagcacctgatgctctttcccttagaattggggtgacccacgaggcagacagggcacatcaaaccaccattgccttgaacacacctaaagtaaggcccatgtactttgccatatcctccaagtcttctactctaaggacagttaaattatgtgggcctgagaaactgacaagcttactattgggaacctgttcagaaaaccttgcccattctttaagtcaaataaagacta

SEQ ID NO: 2603 - DNA, 578 bp, Cricetulus griseus
  misc_feature (570)..(570): n is a, c, g, or t
tatttggcactggacattcagcaccatctgccagtccagcatttggtgctaacccgaccccaacatttggacaaagtcaaggtgccagccaacctaaccctccaagctttggctctatatcatcttcaacatcgttgttttctgctggttcccagcctgcaccaccacctacttttggggcagtgtcaagcagcagccaacctcctgtgtttgggcagcagcctagtcagtctgcatttggctctgggacagctcctaattccagttctgttttccaatttggcagcagcaccacaaatttcaacttcacaaacaataatccgtcaggagtgttcacatttggtgcaaatcccagcacgccagcagcctcagcccaaccctcaggttcagggggctttcaattcagccagtctccagcatcatttacagtggggtcaaatgggaaaaatatgttctcttcttccggaacttcagtttctggtcgcaagataaagactgctgtcagacgcaggaaataaaggtcacgaaggtgttatacccaacagttttatcaacggctggtgcctgctntcagatac

SEQ ID NO: 2604 - DNA, 580 bp, Cricetulus griseus
ctgtatagaccaacttgttttcttgcttcagtggtggttctgttgctcagctgcagtgagccagttcaattttgcaaaggtgcagtacctctccttttcaaggggttggtttttgtcttttgtttgttttctttttttcttcttatttggctgaattgcagtaactagccttgcctttctattctgtagaaatgacagggtcttcacaatccttcaacagtggctactaagctataattagctgaatagaaagaatgtggaagtggtctgaggcatatagagtatatgccaagaacactaccatatatggagtcagctttggttaccagagaaattttcttagtcattagaccatataacagtaatatatcatatgtaaatctttagatatcaatttgagaatcctccaaaaaaaggagcaaagaatgcataagctatgtgttggcaaaagtaatttatattaaaattttgacctgcctttgtaagattaagtggtaaatgtcatagaggtgggtttttaatgtctaaccaatctctaaagtttatttctcctacaaggggtggttcatggcctctcttc

SEQ ID NO: 2605 - DNA, 568 bp, Cricetulus griseus
  misc_feature (408)..(408): n is a, c, g, or t
gactacaacacaaagctcactgtgaggctgtatacctggaggtcattgaagcctttgtgctctcttatgacttcaagtgctgtgattaaagcaggggaggccacgattctctacaaggagccagtacctgagctgctaaagagatgtcagggatgcacgagagaaacctgtgtggtttccttccacctttcaactgacagtgacctcttcagcccaaccaactaccatttcctgtcctccccgaaggatgccaaagggctggtcaaggccaacatcactgtcagcatctcaaagaagggtggtttgtttgtttttaatctgaagacttctgctgtggctctttttgtttggttggatgtaggaagcatcccaagaagatttagtgataatggctttctcatgactcanaagatgcattctgtactgttttatccttggaagctcaccagcaagagtaagctgcaggaggctttgagtgtgacctccctgacagatatctactgatgggacacgtgtggattgtatttcatcggacactgagaatgaagcctttctaaagcatggctgc

SEQ ID NO: 2606 - DNA, 267 bp, Cricetulus griseus
  misc_feature (139)..(159): n is a, c, g, or t
  misc_feature (237)..(237): n is a, c, g, or t
  misc_feature (243)..(245): n is a, c, g, or t
cttgaaggagaagaaggaagttgtggaggagacagagaatggaagagacgcacctgccaatggaaatgctaatgaggaaaatggggagcaggaggctgacaatgaggtagatgaagaagaggaagaaggtggggaggannnnnnnnnnnnnnnnnnnnngcgacggtgaggaagaggatggagatgaagatgaggaagctgaggctcctacgggcaagcgggtagctgaagatgatngaggannngatgatgttgacaccaagatgc

SEQ ID NO: 2607 - DNA, 580 bp, Cricetulus griseus
  misc_feature (96)..(111): n is a, c, g, or t
gaacctgcagcaaatgcaagcgaaggtgaggaaactggagttagatattttacctttacaagaagccaatgctgagctaagtgagaaaagtggtannnnnnnnnnnnnnnngaagctcctagaagaggatgtcaagcgttggaaagcacggaaccagcatctggtaaatcagcagaaagatccagatacagaagaataccgaaagcttctttctgagaaagaaattcacacaaagagaattcagcagctaaatgaagaagttggacgacttaaggctgaaattgcaagatcaaatgcatccttgactaacaaccaaaatttaatccagagtctaaaagaagatttaagcaaagtacgaaatgaaaaggaaaacattcagaaagatttagatgccaaaataattgacatacaagaaaaagtcaaaacgatcactcaagtcaagaaaattggacgcaggtacaagactcagtatgaagaacttaaagcccagcaggataaggccatggagagttccattcagtcttctggagaccatcaggagcagcacatctctgtccaggaaatgcaggagctcaaagat

SEQ ID NO: 2608 - DNA, 469 bp, Cricetulus griseus
actgcgtgatagtgtgacataatccctagaagtagccaaagttacctcactgtatgctcagctatgtctgcgattggcagaagatgcaccaaactttgatggcccagcagcagagggtcaaccaggacagaagcaaagcacaacattcagacgcctcttgatttccaaattgcaagatgaatttggaaaccgaaccagaaatgttgatgtctatgataagcgtgaaaatcccctcctccctgaggaggaggaacaaagagccattgctaagatcaagatgttggggaacatcaaattcattggagaacttggcaagcttgatcttattcatgaatctatccttcataagtgcatcaaaacacttttggaaaagaagaagagagtccaactcaaagatatgggagaggatttggagtgcctctgtcagataatgaggacagtgggacctcgattagaccatgaacgagcc

SEQ ID NO: 2609 - DNA, 523 bp, Cricetulus griseus
tgcaaaagcaacaaatgctcttaaaccctgagccatctctctctagcctcatatgctggaagcatttgataactgtcaggtttgaaagagatcctcagaaccaagtgtagagagcagtgtgaaactgctaaaattgtagcagactatctctatgtatgtttgcagctcaggaaactaggacagggattatgagaaggaaaaagtaatcttaagggagatacaaggtagtgatggattacaagtaaaaggaaagcagaaaggaagactcaggcacccaacccaagaactactgctgcctgtagcagcagtttaaatggtggtgcacacagcaaagggcttcatcacctttgggggactgtgtggtgccccccagagtgaataaggaggttctacagtcctggggaaaaaaatgaaaggaggcagaaagggaaccagctggaggagggaacaattgagaacaaagtatgcggatacacatacaaagatgctgtgatgaaacccagtgctttcatcttagtaaaag

SEQ ID NO: 2610 - DNA, 385 bp, Cricetulus griseus
attctggccttgctgcctatccagggacactttaagtgacctacagcttacgaaacatttgcaaatgctttccatgtgcttcattcactgacaagatggtcaagacgatttgatttctatttctctcccaacaatgttcgtgcgtttaaaccaaaggtaaagccaaagcactttttcccgtgagttttcctataaagacctattgtgcggccacgaagagggtcatatcgatatataggaaactgggggctcgtttctcggggtaaatagagagaaagagaaactatactgttgctttatcaacttcccattgggccataagggaagctacgactactctaaggggagattagcattagatccgagtggggtagattatgccttt

SEQ ID NO: 2611 - DNA, 579 bp, Cricetulus griseus
caccaaaaaaaaagaaacagactaatgagatggctcagtgggtgaaagcacatgccattaaatgtagggaactgagtttagttgcatggcatgtgaccctccatcccatcaaaaattttaattaaaaaaaaggtggtggggctggagaaatggctcaaaggttaagagcgctggctgtttttccaaaagtcctgagtttaggtcccagcaaccacatggtggtttacaactttccataatgagatctggtaccctcttctggcctacaggcatatacacaggtagaatactgtatatataatcaatcaataaatcttaaaaaaaaatagaaaagccttgtcttgtggtataggaggctaaggtaggaggaacgagtttatcaccagcttgtgctgcatagcaagtccctgtcttaaagagaatcaagaggagactgagaaaagtgcgtgggtaatgggagtggacatctgaagacaacagtaagtaaaatggggtggtaggatgaaggtggtcacaaaaggccttcttgaggaaacggccatgtaaagatacgagcctgtacaaagactaaggcagatg

SEQ ID NO: 2612 - DNA, 554 bp, Cricetulus griseus
atcctctgaaagaacagcagctgctcttaagcactgagccatctcactggccccatcattttatagcttttacatgtacaggcctgaactgtagtttttagccactgttggggggtccagatagtctccattattatcccattctgtagtctttcaccaagcccaggccctagtgtgtcatgtgtcttagacttttttgaacccagtagcatgaacaaatacattttctctgaaacagcatttgtttccctgccttctgaacagtaaaatgaatgttattttctttctttgcagacatgtttccttcactaacatttatcccttgtcctagtcttatcctcctatagggattagtgactcttaggacagtgcttagtgttccaaataacagtacttgtccattatcttcttactgaatgagtgtgacaatttgacaattcttatttgcctggtcctggtctcagctctggagatacagtgattgaagcacacaaacctttgttgattcttccctgcatttgagtgtgagccagtatatctggcacaattcgagg

SEQ ID NO: 2613 - DNA, 579 bp, Cricetulus griseus
  misc_feature (551)..(551): n is a, c, g, or t
  misc_feature (571)..(571): n is a, c, g, or t
agactttatgggaagggtgggtggcagtagtgaacaaatgtcactctgtcccttataaaaccagtaaaagggagtattggagtttgaatgttggcagcaggtcatcaggcagggtgcaccttccacagaggagtacaaggtatgcccagccaacattctggagtcggttgagggaaggggatgtattaattggcagcacattgcctggcactcactccacagagtggcaggtttgatggcactagttaaggccactcataccccctaagaaatgatgttggggatgggcagctgtgctgggctgtctgtctccctgcctggggccacatggtgtccacatacagagcgtaatggatgggagtcaggaccagagtcacctcttataatgccagcagctgttagactctgatgtctacaaatgacaaggaaagttgtgttttcactttctgggaactcctataagccctggctcaaggactttgcattgtgtgtcatgtacatctttttaagtgttctttgctgttctggaattgtcgttggtttttccttanctcatagatcatagacacangaatatta

SEQ ID NO: 2614 - DNA, 579 bp, Cricetulus griseus
atagttgaagaaaaatggcaagagatcatgtcctcagaccaggtggaattacttaaaatttaaagcctgaaaattccaattttggcggggggtggatggaaaaggaacccaattttcttatggacagatatttttaacataatggcacaaagtcttagaatattattatgtgccccatgttccctgttcttcgtttctgcattttcttcacttgcagacagacttggctctcgatgaacttttatcacaaattgaaatatatttttttcaactgccagtcaaggctgagaggctcaaccacctcaacattggatacatcacttgccaatgtacataccttgttatatgcagacatgtatttcttacgtacactgtacttctctgtgcaattgtaaacagaaattgcaatatggatgtttctttgtattataaatttttcccgctcttaatgaaaaattactgtttaattgacatactcaggataacagagaatggtggtgttcagtggtccatgattctgtaatgcttcacacaggcagttttgaaatgagaatcattttcccttttcttatgatggag

SEQ ID NO: 2615 - DNA, 578 bp, Cricetulus griseus
ttcttcagtcttccccacaaaactcgggactgatttattcatttacagtgtattatcagattccattacatcttttcttattgattattatgataaaacatggcacaaacgttatcattttagtcattctaagtgtacagttcagtggcgtttagtctccttattgtacaagtatcatcaccaccatgctcacaattttttcaccttctcaaattgaaactcggtcctcatcaaccacggactgctcttcattacattcccattctttgaatctgggaattctagggactttatataaatggaattgtatgatgtttgtcattttatgaccatcttacttgacttggaggcagcacagtgtgctgacacttcagccacagtatagcatatgtccaaatttccctgtttttaaagctgaatagtgcttccttgtatagatgtattatatttcgttccactgatggttgactgatagacattgagattcttgtcagcttttggatattgtgtataattctaccatgcatgtgtgttatatattaacaaatacctgtgtcagctctgggctttaattcttt

SEQ ID NO: 2616 - DNA, 566 bp, Cricetulus griseus
  misc_feature (508)..(508): n is a, c, g, or t
ctgttccagtgtgtggcggccgtgttcattgctcagctgaatggggtgtccctggacttcgtgaagatcattaccatcctggtcacagctaccgcatccagcgtgggcgccgcaggcatccctgccggcggggtcctcacgcttgccatcatcttggaagccgtcagcctccctgtcaaagacatctccttgatcttggctgtggactggctagtggacaggtcctgtaccatcatcaatgtggaaggtgacgccttcggggccggactgcttcaaagttatgtggatcgaaccaagacgccgagctcggagcctgaactgatccaggtgaagaacgaaacgtctctgaatccactgcccctggccccagaggaggggaacccccttctcaagcagtaccgaggacccgccggggacgctgccgcgtgtgaaaaggagtctgtcatgtgaatagcaggaggggctttctgtgccctggtggcgtctcattggaagtggatatcatganggctggagaaactccaggggaggagtttacacagaccgggaaactaggggtccctgtc

SEQ ID NO: 2617 - DNA, 413 bp, Cricetulus griseus
  misc_feature (5)..(22): n is a, c, g, or t
ccttnnnnnnnnnnnnnnnnnncttcttctttcatttatattttttgactcttacctctatatttttgttgttaataaaccaactgccacagggcgggacacacgatggagttctaaggacagaagggactagaagaaggaggagtcgcgcgacaatggatcttactgatcccaaaggaaatgttaaacccgtattacggcgcactttgaatattcagctacgaataattacaccctccaaataaatccaaactcgcggcctgtgtaatgaagatcacctgtcttacttcaagactcattgtttactgaggctggaatggctgttaatcatggcaagctgctagactagctggttacaccaccccttttacaagatgatgcttcagaagccgataaccctgcatgacatggcc

SEQ ID NO: 2618 - DNA, 571 bp, Cricetulus griseus
agttcaggaagcttcaaatgtgtccagaataagcagcatcccacatgacctttgtcataatggcgagaaaagcaaaaagccatcaaaaatcaaaagccttttcaagaagaagtctaagtgactcaatggcatctgtgaactttatctcccaccctccactccgtttttaattttaattttaggaatgtaactccattggggctttccagagttgatgccatagaggaaatgtccttaagggcaactgtctactgtctgctgatttaacagactacgccatcaattttatcaagtctaacattactgaaaagtcatcaagaagagacagtttacagttatttccacctatttatttctgcattgatgttagtgatgtatacacagcattctgttgaaagccgctatggacttacaagctttaatggactgtaagccagcatgggcttgcaaaaatttcttgtttaccagaatatcttcttatctttccacagagctgtttccatcatggactaaataacttaaacaaagtaaaactaattgcactactgttttccagactggaaaaaatctc

SEQ ID NO: 2619 - DNA, 569 bp, Cricetulus griseus
ttagtcaggagaagaattgaggagaacaagaaaagatcagagggagccattataggtttaaagagaattctggtactagggaaatgtccagagatctacgagtttgaccccaactaacaatctaagcagtggttgagaggctgcctaaatgcccttctccgataatgagattgatgactaccttatatgtcattctagagccttcatccagtagtcgatggaagcagaggcagatacccacagctaaacactaagttgaactctggaatccagttgcagagagggaggagtgacaagcaaaggggtcagaaccagactggagaaacccacagggacagctgagttgaacaaggggttgctcatgaaccccagactgatagctgggaaaccagcataggaagaccccctgcaggaggatgtcagtttggaggtctgggcaatctatggggcctctggtagtggatcagtatttagccctagtatatgaatggactttgggagccctctccacaaggagggatactctctcagcctagacacacaggggagggtctaggtcctgctccaaa

SEQ ID NO: 2620 - DNA, 579 bp, Cricetulus griseus
tctgcccacacccagacctcactgtccccctttcccagagtggtcttctccaaagctaacccttgcccctgtacagcttgacccttcttctccaaggccaggaaagcagttgaccccttgggagctctgtactgcgggtctgggttgtgggaaggggaaagacacttcctgtgggcagagccaaagccccctagctattgccagccttcactggctacatggaatacaccaggccactgagctctccaccctgtctctgttgctcactgggacccaggggggaggccacctggctaggagtccaggagtcttgtcaggatccagaatttgtgctgggacattgaacaaatcattccatgagttttcaggcctccacctcctcatctcttcagggtggctcctaagacagagaactgaagagctgacctagtgttccagcccacaaggatgcctgcttctccgtgccattatctgggtccctcttttcaggtgagaggaggctgccaataggtctgctcctgtgcacacacaccatcccactccggtacagcaaggcccagtgcagccctgctgtgctca

SEQ ID NO: 2621 - DNA, 579 bp, Cricetulus griseus
gagtgcatgtcagctgttaacaagtggtttctagtacattcttggctttgctatatctatctagtgcctgttttgtgctttctttctgttttctttctcttccctttcacttctgccctctccctgctccttcccacatagtgtggccaggcgtggaaggtgggctgaggtgctgctccatctttctttgctttctctctttacatgccctggccatgccccaggcgtgctgtcctctgcttattctcggagcttctctccaacctgcatgtcgagttctgtgttgctgtggcttctgggaaagagctggagccactgctatgtggctggtggtgacttggtatccagctgagatgggcatgcagaattggaggcaccttgctttcaaaacaaggaaacctggctgctggtcctgacaggtgctgtgtttggggacctatcacctgcccagcagcctgttcaggcacagtaggctcctgtcaaacagtgaggccagaagggtgcaggggaatctggacattctgcactggtggtgacctgcgtgccagtggccatgtggctttgctcctgctcgctctt

SEQ ID NO: 2622 - DNA, 581 bp, Cricetulus griseus
gcctcaggacctagtcgtcacctgcaccgcgccggtcaacatcgcggttatcaagtactggggaaagcgagatgaagcactgatcctgcctatcaactcctctctgagtgttacactgcaccaggaccagttgaaaaccatcacaactgctgccattagcaaggacttcacagaagaccgcatctggctgaatggtcgagaggaggatgtggggcagccacggctccaggcctgcttgagggagattcgtcgcctggctcggaagcggaggagcacaggagatggggatgcacttcccctcagcctcagctataaggtgcatgtggcctcagagaacaacttccccactgctgcaggcttggcatcctcagcagcgggctacgcctgcctagcctataccttggcccgggtctacggggttgagggagacctctctgaagtggcccggcggggctcatgcagtgcatgccgcagcctttatgggggcttcgtggagtggcagatgggggaacaggcagatggaaaggacagcatcgcccagcagatagcaccagagtggcactggccccaactccgagtcc

SEQ ID NO: 2623 - DNA, 566 bp, Cricetulus griseus
aatttctttttaaaaccagttttcaaatgtttgtttttattaacatttgtacttaaagagcttcaatttagaattatttctaagcaaagcctgacaatgtaaagttcttgttttataaaagatgctaatctgttacagtttgtgttttcagaagttaagtttaggatgttgatagcacacacctttaagctcagggtgtagatggcacacgcctttaatcccaccattcgggaggaagaggcagatggatctttatgagttcaaggcctgcctggtccggcagatagaattctagaacaggttccaaagtcacagaaaaaccctgcctcagaaagaagttaagctactgtttaagaaatataagatagctctatatagttttaagttcagctgtattacagaagtaagacttcacctagccacctgtgtgcttcttgtatgcttaaggcaagtaattaaaacagacctctagtgcttcagagatcttcagaatatggcatttaaattgttatctttaaagtttataatgtcagacagaccgccagatccggacagtgacccatagt

SEQ ID NO: 2624 - DNA, 485 bp, Cricetulus griseus
  misc_feature (447)..(447): n is a, c, g, or t
tgtatatatactgttctccatgtactaataaaccaaattttctgctagaatagtgagctgctactcttcaaagcaagataatgaattgttaactctgggtttcatttgtagtgtaagataatgtagcaacaataactgcatattttataattaaatatttttgcacacattaacctacattctctagtagatctcctgaagtgtcatgcaggaatggtggaaatacttgtacttaatttatgggtgagatcagcagcatccttaccaaaactcacataagcacatttcatgttctctgagcatctcatatgggaaatgatttacttaaagagtttattaagagcctcttttacatccttattcctcaggctgtagatcaaaggattcaacatggggaaaaccacagtgtaaaatgttgaaacaattttgtctgtatctaaagaatanctggtgcgggggcgagagtagatgtaaagaatggaacc

SEQ ID NO: 2625 - DNA, 279 bp, Cricetulus griseus
aaggaaaagggaaagggaaagggaaattggtttgccttttgaaaccatttgtccctattttgacctattaaaaaaatttaaaaaaaaagccttaattcaacccccccccctttttttgggaaaatttaaccccccaattttcccccttttccaattttcccaaacaaaaccttaccaaatttttagggaaccttttccgggaaaaattcttcgggttttacctaaattggccttaacaaacttttttaaaactttccccccaaccccaaaaaattttcc

SEQ ID NO: 2626 - DNA, 546 bp, Cricetulus griseus
  misc_feature (452)..(469): n is a, c, g, or t
tttcagagaagaagccaacaacagaagtggatcccactcattttgaaaagcgtttcctgaagaggatacgtgacttgggagagggccactttgggaaggtcgaactctgcagatatgatcctgagggagacaacacaggggaacaggtggctgtcaagtccctgaagcctgagagtggaggtaaccacatagctgatctgaagaaggagatagagatcttacggaacctctaccatgagaacatcgtcaagtacaaaggaatctgcatggaagatggggggaatggtatcaagctcatcatggagtttctgccttcgggaagcctaaaggaatatctgccaaagaataagaacaaaattaacctcaaacagcagctaaactatgccatccagatttgtaaggggatggactatctgggttcacgacagtatgttcaccgggacttagcagcnnnnnnnnnnnnnnnnnngagtgaacaccaagtgaagattggagactttggtttaaccaaagccatcgaaactgataaggagtactacacagtca

SEQ ID NO: 2627 - DNA, 580 bp, Cricetulus griseus
caccaagtgacgtgagcgtccactccgagctcacggtccgcaggtttccatcttccgcaatctgctgtgatggctgcctcggtccctgccgccgtttccctctccccactgctgtctattctcctgggcctgctgctcctctctgctccgcctggcggcagcggcctgcacacgaagggcgcccttcccttggacacaatcactttctataaggtcatccccaaaagcaagttcgtcttggtgaagttcgacacccagtatccctatggtgagaagcaggacgagttcaagcggctggctgaaaattcggcctccagcgatgatctcttggtggcagaggtggggatctcagactacggtgacaagctgaacatggagctaagtgaaaaatataagctggacaaagagaactacccagtattctacctcttccgggatggggactttgagaaccctatcccatacagtggggcgattaaggtcggagccatccagcgctggctaaaggggcagggggtctacctgggcatgcctggttgcctgcctgcgtatgatgccctggcaggtgagttcatcaaag

SEQ ID NO: 2628 - DNA, 530 bp, Cricetulus griseus
aagaactcaggaagagcttgtactcatgctgaggagcaccaagcagggagaaacagtgtcactggtcattgcccgccaagatgggagcttcctgccccgagagctgaaaggagagcccgactgctatacactctccctggagacaagcgagcagctcactttggagatccccctaaatgattccggctcagctggcctcggggttagcttgaaagggaacaaatccagagaaactggaactgacttggggatttttatcaaatctatcatccacggaggtgctgcttttaaggatggccgtctgagaatgaatgaccaactgattgctgttaatggggaaactcttctgggcaagtccaaccatgaagccatggaaacactgaggagatcgatgtccatggaaggaaacatccggggcatgatccagctggtgataattaggaggctggagagaccactggaggagcttacagagtgtggggcactttccagaccatgttttgaaaactgtcaagaagctctgagcccct

SEQ ID NO: 2629 - DNA, 480 bp, Cricetulus griseus
ggtgagaatttctgttccagatttattcaacaggatgctgagtttctggtagatgcactgctgtcctataaatcagcattcaatatggaggctcaagctgttttctttccctttaacacatgttttcctagggtcttaaatccactgtgtgaaatggccacccattcagcaacaaggtgttcatttaaaaaggaagatagatctatggtttggaatgtgactcagtgactctagcatttgcctaacacacgggtagccatatgttaagctatgttggctctcttttaagtcagtggtggctcacacctgaaatacaagtactcagaggagactgatgcagtaggattgccagaagttctaggccggcctgagctgtggagtgaatgtgaggccagtcttaactacagtgtgagacattgcctacgaaggacaaagatgctatagtgcatgtgacatgggaattggcactatttctgacag

SEQ ID NO: 2630 - DNA, 579 bp, Cricetulus griseus
tattggtgttgtatgtgtgtgcaccactgcaggtgaaaggacaagatatggtagtacatgcttaatcccagtgcttgggaaactgagaaagattatgaattgaaagccagcctgggcttctagtaagttatagaccagcctgggttagagatagagctcagtcggtagagtacttgcctaacctgcaagaatccctaggatcagttcccagtactacataaaagcaaacagtagcatgtatctgcaatcctaggactcaggaagcagaggtaagagaatcaagagttcaaggtcaaccttagctacatagcatttcaaggcctgcagggggatactggtgttttaatattttccaattaaataaatttttaatgaatacagtttgtagaacaaagtaggttcacctcaaaacaaagtccgaagctctagcacaacctgattgataaccctccagcagcttcccctatgaaactgtacagtccagctagaaggcctattacagagcaaataagactaaactcacctttgtacagacagccctcaaacctaatctgtgcctcccagtcttggtgataacat

SEQ ID NO: 2631 - DNA, 547 bp, Cricetulus griseus
cccactcccctttaaatctatggtcaccagaaaggactatatacataagactgtttcctcttagtgatttgagtcttgacaagggtatatgtggtgcagacttgtgcacaggtgtgcacaggctgctaatacctttagacttgtggggcttgcagtgtttcatttggggggtggacaggatcttaactgtgtaacccaaactagcctcaaacttaacggcagccctcctgggtcagcctcccaaatccagcattggcttataagcatgagccaccatgtctggtagtgtggttttgcacttgaagggagtttcttagctgtccccttctgagcacatctactctctagttacagaaccaactcttagaacatagagactctcaaggctgagacagataggcatggtcacctgtgactaacttaagtcagtaggacaagctaaagctttgcctgatgtgacttcacgtcttgtgaaggcctgtggagaagatcaggatcaggagattgtgattgtgaccgggtggaatacagcttgacccaaaacaca

SEQ ID NO: 2632 - DNA, 496 bp, Cricetulus griseus
agcccctacaccccgcttcttgaggactctctcagcggacagtccgccagtgccatggcctgagcccccagatgtcacacctgtctgcacagcacacatgcgcccaggcgtgtgcaaaatcactcagggaccagggacagacccgctgctgaaggctccagctgagtcacaggcactctcttctaagtggcctgtgagccaggctgtggggattgcaactgccaccagcccctcccatggggagctggccttgcccaggccctcgacttcatgctgcccttgtcttcctccctcaggctaaaagctgtagtccccatggaagacagaactgtcactcctaggggttgggtgtgcatcagcctcttgtgccaaggccaggcaagcagttccagggcctgacgggtctgcacatgtactctggagctgggtctggtccttttcctccaatctctgctatgtcacctaaacactgaattggccactgtaagtggccaag

SEQ ID NO: 2633 - DNA, 578 bp, Cricetulus griseus
catgtaattaagttgacctccaactcaaatttctctggcctttgggtccaaattgttggggttacacatgttcactgccatgtctagcaacaggtgtgctttcccaattgaatgaaagctaattcattttactaattaattagattactaattcaataataataaattagattactaatttaatctactgagagattaaaatgaatccattgttatttctaaaataagagtaatatcccaaatcattacatttttagagaagtcacatcactatatatttaacaatcaaacactgagcatggccaacttaaacccatgattccaatatgaatttctttaatttctaatcattgtgctaaaatgaaaaaataactagaggaaaaacataaaagaaattgaaagaatatctaatatgtgtagtttaccatacaaggttcatttttagtttctttcataatgaaatacttactataaatgatggactttcagtgagttagtcttccactgtaaataaaataatcaattggtaattttcttgaagtgctcataaattaatccattattaatccattataact

SEQ ID NO: 2634 - DNA, 260 bp, Cricetulus griseus
gaaactgaggctggtgctagggctgaagcaaggataggaatggaagctgaggtaagaatggggactgaggctgtagctgatgctgaggcaaggataggagtcggggctggaactgaaacttggggagaggaagaggctgtgagtgcggatgaagtagacactggaacaggatttgaggctgaagctggcactggagctgggcttgaagttagaacttgagctggggcagaggctggaactagagcattggctgatgccag

SEQ ID NO: 2635 - DNA, 555 bp, Cricetulus griseus
atggccgcggagccgggtggaagtgctccgaggctccgggagccggctctcggggccgagacatggcccggggccccggacagctaagcgggccgcattcggacactgtcgccatgcccaagagaggaaagcggctcaagttccgggcccacgacgcctgctcgggccgagtgaccgtggccgattatgccaactcggatccggcggtggtgaggtctggacgggtcaagaaagccgtggccaacgctgttcagcaggaagtaaaatctctttgtggcttggaagcctcccaggttcctgcagaggaggctctttctggggtgggtgagccgtctgacgtcatggacagcagtgatgagatggatgctcaggaggaaagcactcatgaaagatcagtctccagaaaaaagaaaagcaagagacacaaagaggacctggatggggctggaggagaagagtatcctatggatatttggctgttgctggcttcctatatccgtcctgaggacattgtgaatttttccctgatttgtaagaatgcttggactgtcactt

SEQ ID NO: 2636 - DNA, 418 bp, Cricetulus griseus
ctctgcactgcacactgctgctcaagacgctgggtggctactcttggaccctgggtcctgctcaaaccccactggacccaccccagtcctcagacactttgatctctgtggaccctgcagaggatgaagcccagcagactgcagcccaagtcgcaggggtcctgggtggcctgcttacacccctcttcctccgtggcgtgctggcctacctcatttggtggacggctgcctgccatctgctctccagcctctttggcctctatttccaccagcacctggcagcttcctaatgtgatgccactaggtgctggcatctgattcctgtccaccagggctgggactgtcccctgtgtatgtacttcaaaccctagatgacctagggataagggtggggactccccaccctctctcacctcag

SEQ ID NO: 2637 - DNA, 483 bp, Cricetulus griseus
ccccttttctcctttttttcttttcccaaacccctttcactttcttccatgtcttctttctcttgactctaaagactttttctctattgttactcttatttttattatcaatttttatttaaattaaaaacaattttattttacactccaagttccatctccctcccctcctcatattcccccatcatcctctcatcctaccctcatctactcctcagagaggatgaggcctccccaagggagatcatcaaagtctgtcatatcatttggggcagggctgaagccttcccccgtgtgtctaggctgagagagtattcctctatggggaatgggctccaaaagcccattcatgcactagggataaatactggttccactgccagaggcctcatattctgccccattcccccagatgacaccggcgttcaaggggcctggttcggtcttacgctagttccctacctgttggtctgtgtatgtgcg

SEQ ID NO: 2638 - DNA, 425 bp, Cricetulus griseus
ttggccagtagacaagtctgttgtgcattctcttgattaaagactgatgtaggtaggctgatctcatgggatgtgattccacccgtgggtaggtggtcctgagtgattaaaaaaaaaagtgggctgagaaagccagtagtagcattcctccacggcccctacttcaaatcctgcctcaaagttcctgtcttgagtttctgctctaacttcctttggtgaatgactgttaatgtgaagtgtaagtagaaataaaccctttcctcctcaagttgcttttggttatggtgctttatcacagcattggaaacccaaactaagacagaaattggtattagattatatggtgtgctgctgtgacaaacctggctttgtgtttcagggaggattgtggtagcatttggactttgggccaggaaagccattaa

SEQ ID NO: 2639 - DNA, 425 bp, Cricetulus griseus; identical to SEQ ID NO: 2638

SEQ ID NO: 2640 - DNA, 494 bp, Cricetulus griseus
catgaatggcaagcctgccaagagcaaggccagtgatgagcagcgaccaaaggaggccccagctccggctccggctccggctccggctccggctccagctccggctccagctgcagtcccagcagatgccttggctccagttccagcttcagtagaggccccagtggaggacccagttctatcttcagcggaagctccagtggaggctccagcagaggctccagctccagcagaggctccagctccagcagaggctccagctccagcagaggctccagctccagcagaggctccagcagaggctccagctccagtggaggctcaggcagaggctctggcacaagctgaggcccctgccccatacccaagcaagcgcctgatccagtccacatctgaggagaatcagatcccctctcatttgccagtctgcccgtcactccagcacattgccagtcttcaggggcgtgccatcatcgagctcttccacaacagca

SEQ ID NO: 2641 - DNA, 243 bp, Cricetulus griseus
gctcaattcctccgagtgtgagaggcaaagtatggagcttggccattggcaacgagttgaacatcacccacgagctctttgacatctgtcttgctcgggccaaggagcggtggcggtcccttagcacgggaggctcagaagtggagaatgaagatgctgggttttcatcagcagacagataggccagtctggagcttattaaactggacatttctagaacatttcctaatctctgcattttcc

SEQ ID NO: 2642 - DNA, 527 bp, Cricetulus griseus
  misc_feature (50)..(119): n is a, c, g, or t
  misc_feature (148)..(165): n is a, c, g, or t
  misc_feature (176)..(194): n is a, c, g, or t
  misc_feature (318)..(350): n is a, c, g, or t
aacagttcagcatgagtgggatacatatacatacatatacatgtatatannnnnnnnnnnnnnnnnnnnnnnnnnnnnnnnnnnnnnnnnnnnnnnnnnnnnnnnnnnnnnnnnnnnnnggcacttgctctggagaccaggctggccnnnnnnnnnnnnnnnnnngcctgccgatnnnnnnnnnnnnnnnnnnncgccaccaacgcccagcctatgagtgggttattgcatgtgaactgctcttgctttcatcaggaggctcatagtgagccaggccccaggtacctagctcctcagctcactaattttttatttttnnnnnnnnnnnnnnnnnnnnnnnnnnnnnnnnnagccttggctagtgtggaactctatgtagatcatgctgaccttgaattcagagatccttcctatttctgcctcttgagtactgagattaaaggcatgcaatatgcaccctgatccctttcaatttaaccctttgctttggtgatacaagttatacccacacagatccacctagtttc

SEQ ID NO: 2643 - DNA, 565 bp, Cricetulus griseus
gtgaggagaggcggaggtggtgaggaggaggtctgctgctgtggggcactttgtagagttggtaattttttagttgttctcgatccaaagcttctctctgacatcgaataccgtctgcttctcctgtcattactctcattttctggggactgggaaataggcagtggggtatgaacttcgggggtgttactccgctcttcaagaagtgcctggatctcctcagaggcctgagaatctgaggtggtatcgatactgggactgctagatcgggaggagtccgaagacatctgagaggagtgctgggaagctgcactggacttttcagaagatccacaggatgtggcactgaatcgactgtttggtgtggattctagtcgagcaattttaattggagggtcataatcctcatcctctatgaaccgtcggggggttttgatgatcctcgaggagatggcgctgaccacaggcatgatgaactgccggatatttttgacctgtgtcttcaccttcctcccttgcagctgtgctgcttctttctcgattttcttctgtgcccccttctttg

SEQ ID NO: 2644 - DNA, 579 bp, Cricetulus griseus
  misc_feature (559)..(559): n is a, c, g, or t
tttgtaagcttctcagaagttttcagcagtcatgtgggaaagatatccaggttggagtaattggtttcccaaatgtggggaaaagcagcatcattaatagcttaaaacaagaacggatatgtactgttggagttcctatgggacttacaaggagcatgcagattgtcccgttggacaagcagatcacagtcatagatagtccatgcttcattatctcaccatgtaactcctctgctgcacttgctttacggagtccagtaagcattgaagtactaagaccattggaggctgccagtgccattctatcccaggctgatagtcaacaggtggtattaaaatacactgtcccggggtataaggattctctggatttttttactaaacttgctcagaaaagaggtctgcaccaaaaaggtggaagcccaaatattgaaagtgctgctaaactgctatggtctgagtggacaggtgcctcattaggttactactgtcaccctcctgcatcctggaatcctccacattttaatgagaatattgcagcaaacatgaagaaaggctntaatctagaagaactagaaa

SEQ ID NO: 2645 - DNA, 580 bp, Cricetulus griseus
ccggtgaggcttactcgtggcttcacacgcttgcttcccggtcttatggccggtctgactctgtttgtgggccgcctgccgccctcggctcgcagtgagcagctggaagagctgttcagtcaggtcggtccggtgaagcagtgcttcgtggtgaccgagaaagggagcaaagcatgccgaggctttggctacgtcactttctccatgctggaagatgttcagagggcgctcaaggagatcactacttttgaaggttgcaagatcaacgtgactgttgccaagaagaaactaaagaacaagtccaaggaaaagaggaaaaatgaaaattcagagtccccaaagaaggagccaaagcctaaaaaagccaaggtagcagataagaaagccagattaattatccggaacctcagctttaagtgttcagaagatgacttgaaaacagcatttactccctatggaactgttctggaagtgaatatcccaaggaagccagatggaaagatgcgtggttttgcttttgttcagctcaaaaaccttcttgaagcaggaaaagctctcaaaggcatgaacatgaaagaga

SEQ ID NO: 2646 - DNA, 464 bp, Cricetulus griseus
aaactacctcaaactcactgaaatctgcctgcctctgcccctgcccctgcccagacccaagtactgggactaaacaaatttcattatataaagaggattttagttaattttatctgacttatattttaaagattagtcaacatttagcatatactataccatctagtctgattcttaaatttttttttttattatcacttttttgttgttgttacttttttgaaatagggtctccctaatattaactctgcctggcttggaatttgctttgtagcccatgctggtcttgaactcttagggatctgcctttctgtgtttcctgagtcctgggattaaaggtgcatgcaccatgcccagcccgattgttgtatttattttgggtatatatgtgtagctcacatactacgatgtgtatgtggaggtcaaaggacaacttggggaaattgtttctttccttctgccga

SEQ ID NO: 2647 - DNA, 493 bp, Cricetulus griseus
ccctcccaataaacacagtgggagacttctatggatgctccaaagaagcccacagcttccaagctctcctcaaactgaagagctgccaggacttgaacatacactctgtccaaaagcacaggagaaatcatgggcttcggggcatggggcctgtggatgagggtgcagcttcccgtctaaggcagggttccagcagggctgagatcactgtccacagcagtgacctcttcagccatacacaattcctccacttcccactgcctggctcttgctttttgaggtcattctttagatgccctacgtgaatctgaatttaaagtgagattcgaatagcctgactgagggttgagccaccctagaggatctcagtggcagtgttcagggcaagagaactgtaagactggggaaatgggactgacactccagggaagaggtgaggtttccactagggtagaatttgaatggtaataggattgttttatgtgtgtatgtg

SEQ ID NO: 2648 - DNA, 258 bp, Cricetulus griseus
  misc_feature (237)..(255): n is a, c, g, or t
tttccctggatatcctgtgagtatttctatcaaaatactaaaatcatttttatcttttgtctgttttcagtcctgttgtcttgccttacagcaagtggaggagaggtctgagacattgagtccagctttttggccagggagaaagtttattgaacaaaggaagaatctcttccactcttaaaacattgtcagtatgactaagatccacaatgctaggctttgtgtgtgactagttannnnnnnnnnnnnnnnnnnatc

SEQ ID NO: 2649 - DNA, 490 bp, Cricetulus griseus
  misc_feature (173)..(232): n is a, c, g, or t
aagaaaaacattgtttgaggattcctttcaacagataatgagcttcagcccgcaagatctgagaagacgtttgtgggtgattttcccaggagaagaaggtttagattatggaggtgtagcaagagaatggttctttcttttgtcacatgaagtgttgaacccaatgtattgcnnnnnnnnnnnnnnnnnnnnnnnnnnnnnnnnnnnnnnnnnnnnnnnnnnnnnnnnnnnnaatccagaccacctgaaatatttccgctttattggcagatttattgccatggctctattccatggaaaatttatagataccgggttttctttaccattctataagcgtatcttgaacaaaccagttggacttaaggatttggaatctattgatccagaattttacaattctctcatctgggttaaagaaaacaatattgaagaatgtggtttggaaatgtacttctctgttgataaagaaattctgggtgaaattaat

SEQ ID NO: 2650 - DNA, 251 bp, Cricetulus griseus
gtttgactttgaagaaatgaagcgcaagaagaatgacatttatggagaagactaacagcagtacatattatgtaattaggacaaacttaaaatttggcaaataatgtatattatatgaaatcaatattgcaagcccgcttttatgatcaaaatggagattgaagagtgctataccagtaaatactccttcccttcacttttctaatatcatgtattaacttgttttcatggaatggctagtcagaattggt

SEQ ID NO: 2651 - DNA, 430 bp, Cricetulus griseus
  misc_feature (333)..(350): n is a, c, g, or t
ttggtctagttttgcgtcttatttgcttcataattgtatgtgctgtctttagtttcatttttcctgtctccttctcttgtattttctgtgttctgtgtttactggttttagttttgctatctgtgccacagacagccattgccattgccaccactgcttgctttagctgctttgatggccagggctcagaatttatctctgagctttctggtcactggattcagtttagcagggattcaaatgtcttttgggtgtggataatattaaaattgttttatattgttctactatgttgaaaagctggctctggagttgggttatggctcttcattnnnnnnnnnnnnnnnnnnttatttaaaagtttcctctctgtcccatgctaggtgatccacgtgattttgtgacagggaaatgagagcgaagcaaaaca

SEQ ID NO: 2652 - DNA, 364 bp, Cricetulus griseus
  misc_feature (311)..(351): n is a, c, g, or t
aatcttcaaactaacacagtagcccaagaagaacagatttcattttttgcagcacagaactcaatttctccacttcagtcaacatcaaacaccgagcagcaagctgcttttcaacagcagcctccaatctcacacatcccaacccctattctttcccaggaacaggcacaatctactcagcaaggtttatttcagcctcaggtggcccttggctcccttccatctaattcaatatctcaaaaccagcaaggagcaattttccaaacacagcactcaatagttggcatgcagagtaactctccatcccaggnnnnnnnnnnnnnnnnnnnnnnnnnnnnnnnnnnnnnnnnnagcattttattca

SEQ ID NO: 2653 - DNA, 522 bp, Cricetulus griseus
gacgtgaccaaaggccgcaagttctacgggccggaggggccatacggggtctttgccggaagagatgcatccaggggccttgccacattttgcctggataaagaagcactgaaggatgagtatgacgacctttctgacctcactgctgcccagcaagagaccctgagtgactgggaatctcagttcactttcaagtatcatcatgtgggtaagctgctgaaggaaggggaggagccgactgtgtactcagatgatgaagacccaaaagatgagaatgctcggaaaaatgattaaagcattcagtggacgcatatctatttttgtattttgcaaaatcatttgtaacattcgagtctgtctgtctttaaaacatagtgatttcaatatttagaaaagttttgaacttgctgtaattttttgttaattaatatcactagtgacactggtaaaattgtcttagaatgcatgatacgtttgtgtcacaaatccaagaagtgaactgcagtgctgccatgcaactgt

SEQ ID NO: 2654 - DNA, 298 bp, Cricetulus griseus
tgcagtgataactgacatgtgacagtgaggcaaaggatagtttattaaagacagatggaaaccatgtgtattgcatgcctgtaattcaagcctagggaggtaaggcagactatgctacatcataagatctgactcaaaaatactgggaaaagatgcactggataattcaaaatttctccattgtctatcatagtaaacagctctatgtatttcggtaaaaattttattatacagtctgataatttagctaatgatgatcttgaataattgcttgtaagtctttatcttcaaatcacgt

SEQ ID NO: 2655 - DNA, 538 bp, Cricetulus griseus
gaacatagctggggctcaagttcaaatgagcattcttttcctctgctttttttcttgactgaaggcaaatgttatttgtgagacatggcctatggcagacagggatgattctggcctcaagaaaaagggtctctggccttctggaagcctgctgtgcttttgtcccacagctttctgccccttgtttcttactagtttcttgaattgttcttgtggacttttcctcagggattcattggcctgcaggtcctaattgcccgcttcccattggagaactggctcacttgctatctggtgatgctacattggtgagcagatcatgcttcagtaactctgacctgggcaccctggacctggtcatgttctactgccagacctttccctgggggcttgaacacagaatggggaggtggacactcatgtcacagatcctaccacatttctgctttgtagctcctttctcctgggacttatgtggccagacttaaagctcctctgatcatccagctccctcccactggtactcccaatcaaagaa

SEQ ID NO: 2656 - DNA, 433 bp, Cricetulus griseus
gggtgaggatgagggtgcgcgtgcgggtgcgggtgcgggtgcgggtaagagtggagctgctgcggctgaggcttgggctgcggttgtggctgaatctgtggttgaggctggatctgcggttgaggctggatctgcggctgggactggggctgcggctggggctggggctggggctggggctggggctggggctggatctgctgcgtctgcggaggctgctgctggaccaggtgctgctgcttctgccgcgtagatttgactgccagtatggcctgacgatttttgtattgcaccatctgcaacgtgatctccgagttccagccctggtcctgggggcaccgaaagtcgatctctttgcccttcgccatcaccactgtgaagtacatgtacttgcccttgcgctccacacaatctacagtcttcatattggaaa

SEQ ID NO: 2657 - DNA, 541 bp, Cricetulus griseus
gaagcaacagctacaacagaggaaccaaggataaatcttacccagctcctagaagaagaagtggaattctgcacagatcttattaattcctatccaggacatgaaaccctttggtgtcataggcggcatgctttctaccttcaacatcacttaaatggcaagtgtcctcccaacgtgacgcacctgtcacctgcagactgctctggcggcactttgaatgacttgcacctgattccagcaagcccccaactgtctcaggcaatggaagtggatggactgaatgactccagcaaacaaggctattcccaggaaaccaagcgcttgaagcggaccccacctccagaccctgtaggcctagagatggagcacaggtttattgatcaagtgctatccacttgtcggaatgtagagcaagccaggtatgccaatgcatacaggaaatggctggtgactttgagtcagtaagaggggtggattcatcctaagaaattccccttttagtgcaatattgctttcctttctcaatgccatagttgcatga

SEQ ID NO: 2658 - DNA, 306 bp, Cricetulus griseus
tatgtttgaggctggcctggtctatacaaagaaaccaggtctcaaaaaaaaaggaagattgatagttaaacttatgcccataattgcattgtataagtgcactaaacattccagttaaaagacaaaaatcagatccagatcttgcatatcccccattgttcctcatattccttttgaggcagtgtctctccctggaccaagggctctccccccccccccttggctaggctggaaactaaaaaaccctaaaaatccttttgtatttgcctcacccccatccttgcccttggagctgacattacaggc

SEQ ID NO: 2659 - DNA, 409 bp, Cricetulus griseus
  misc_feature (371)..(394): n is a, c, g, or t
tccgccctgagcactcacacaagcactttctcagcactgctgctgcgggcagtgtttggacagcatcacctgcatgatgtttctgcatcattccctaagtctggtttcatattaagtgttgccatctagtgacacccacagtcacttcacaggcccaccatcatgctctcacagaactcaacttgtatcctcagtaataaaatcagccacaaaaggagaaaacagccagcagggttgcttaaagaagaaatgcactgttttttcttttctttttttttttgaaacaaaatctcactcactttgtagccctacctggctggaactcactatgtaaagcaaactggcttgaactcaaaaatccccctgccttnnnnnnnnnnnnnnnnnnnnnnnntgccaccaaacccta

SEQ ID NO: 2660 - DNA, 491 bp, Cricetulus griseus
  misc_feature (434)..(477): n is a, c, g, or t
agcaaatcagctagcatctgcaatacaatgcagagcagagctctggaggttaggaccctgagaaattctctaatagaatcagttctccactcccaacaagtaaactagtttataattgtttcaaagaagaagttagtatatcatccccttgtattcatccttgtctattaaaatataacaccacataaaaggtcagcgatcagattcatttttgaagctacatgttaaaatttattctgtggtcaggcttcagtaatactatgtaactacaactacatctactagttattatctctctgtcaatctccatctgaatattatatcacaacaagagtgtcatctaaactttccggtttccagaaaaaatgtttaaatgcaaatagtgtttacatttaataacaaaacataagaatcctttttggagattttatgtnnnnnnnnnnnnnnnnnnnnnnnnnnnnnnnnnnnnnnnnnnnnatgtgcgtgtatat

SEQ ID NO: 2661 - DNA, 529 bp, Cricetulus griseus
  misc_feature (16)..(16): n is a, c, g, or t
  misc_feature (348)..(363): n is a, c, g, or t
aggcgctccctggaanacatggtacctgctccagtgccgcgtgcggcccgggaaccctgggctgctggcgcctgcgcagagtcctctgtcccagggaaaggctcgggcaaaaggcggttgagattggcagagtgaaatattactgctgagggaacgtagcagggcacacgtctctctgtgtgtctgggtgcctcgtttctccaccacctacttacttcctggttgcagcttctctccttttgggacttttgcacccgaagctccagatttgctaccctgcagtgttgcggaaccttcaggagtggcatcggtgcactgcagagaccctaccctccttgctaccttacnnnnnnnnnnnnnnnnggctgattccttacacacattctctctgctcttcccatgcaaatcagacctcggttgcctcagcgtcctacccttctgcagggctgcagcccggccaccccaaaaccttattgcttggtgcctggaatcctgattttcagccgcggggtccacttgtctccctcag

SEQ ID NO: 2662 - DNA, 491 bp, Cricetulus griseus
tctcccctgatgaacgggcataccaacggcagctggtcatgaccatgggtgtggctgacacccagctcttcttctatccacagctcctgccaatacacacattagatgtgaaaagcacagggatgccggctgctgtccgctgctccgagtcccgactctccgaagaaggaatgttcctactggctaatggtctgaacatgttcttatggctcggagtgagtagcccaccagatctgattcaaggaatatttaatgtgccatcatttgcacatatcaacacagacatgacatcactgcccgaggtgggaagtccaccctctcaacaactccgaatgataatgaacaatatccagcacaagaagccatactcaatgaagctcatcatcgtgaagcagcgagagcagcaggagatggttttccgacagttcctggtggaagataaaggactctatggaggatcatcttacgtggatttcctctgctgtgtccac

SEQ ID NO: 2663 - DNA, 579 bp, Cricetulus griseus
atcttccatgactgcttctcttcctgccttccatggcagtgtcctcaggagatgggcaagaagattggagcagctttctcacaggtctgcaatttggtttttctccaagtacatcatgacaccttcgtcctcctgaactggagaggggaagaaatgaaaggcatcccatatccaccatttccccaatccctagccctaccctggacatcatgagctgttatttgtcttggaaggaggggttctgggctctgggctggatagcagagaagagggaatgcgccctttgtttgcttctctcctgcttgtcctttttccaggacataatggaactgtcagaagagtttctagaaagttaggattacgcagatagttgagtcctaatctatcaaatcattgttgcctctcataccaaaatgttcttacctacagtgtcccttctccctttcctgctttgcagtccccgtggactctgggcactgtgcattgtcttctttgctctctgttgaggaccttccacctgtcatggtcccctcagtatctagcaatgtttcttgcaagaagttagttttgctaacttgg

SEQ ID NO: 2664 - DNA, 256 bp, Cricetulus griseus
  misc_feature (111)..(141): n is a, c, g, or t
agtgctgaaatgtcaccttgggccttgtgaatgctaggcaaaggcaaactattgaaccactaaccatttccttggtctaaagctctaaaagcactcaaaagggattaaaannnnnnnnnnnnnnnnnnnnnnnnnnnnnnngtagccacggtggggatttaatttggcatgggtatgtgatggtttctatggcacaggcctggcacctgcaaacattttttccaaaaaagggacaaaagcaagctcttttattctt

SEQ ID NO: 2665 - DNA, 562 bp, Cricetulus griseus
ggactttgctgctgaggttgtgcaccctggagacctaaagaattctgttgaagttgccctgaacaagttgctggaccccattcgagaaaaatttaataccccagccctgaagaagctggccagtgctgcctacccagatcctccaaaacagaagcccactgtcaaaggccctgccaagaattcagaaccagaggaaactcatcccgtcccggctggatatccgtgtaggcaaaatcgtcagcgtggagaagcacccagatgcagatagcctgtatgtggagaaaattgacgtcggggaagctgaacccaggactgtggtgagcggcctcgtacagtttgtgcccaaggaagaactacaggacaggctggtggtcgtgctgtgcaatctaaaaccccagaagatgagaggagtgctctcccaaggcatgctactgtgtgcttccatagaaggggtgagccgccaggttgaacctctggaccctcccgaaggctctgctcctggcgagcgagtatttgtaaagggctatgagaagggccaaccagacgaggagctcaagcctaa

SEQ ID NO: 2666 - DNA, 535 bp, Cricetulus griseus
ctgtcgcctcagaggcccggaactcgcgggcttgtgcgaaccggaaggatgcggattctccagaggaggagatgaaggagccgccaggagacgacgcggagctggtggccgaggcggaggccgtggctgccggctggatgctcgacttcctctgcctctctttgtgccgagccttccgcgacggccgctccgaggacttccgccggactcgagatagcgcggaagctattattcatgagctacccagtcttacagcttatcaattgagaactgtatatatttgtcagtttttgacaagaattgcagcaggaaaatctcttgatgcacagtttgaaagtgatgaacgtattacccctttggaatcagccctgatgatttgggattcaattgaaaaggaacatgacaaacttaataaagaaatacgggatttaattaaaattcaggctgtggctgtttgtatggaaagtggcagctttaaggaagcagaagaagtgtttgaaagaatattttgtgatccggaatctcacacgtcttt

SEQ ID NO: 2667 - DNA, 475 bp, Cricetulus griseus
tgcccgtgcccaccccgaccccacgtgtcatgcccaacagggcctttgttgctttgagcccgaggtcatgccttgacctcaagcaagagctgtagccagcccttgcagtgcagaccagaccacgggcaacggcaggggccgtccccacgagggcagcccctccgcacagttctagatgcgtatgcacagtatttattccttcctgcgctcctagtggtcgtgactttcgcagcagcagctcccctggcttcccacgggtgagacctccctgtggacccgagaaccacccgctgttcccgcagctgtcctccgcaatgccaaacgcaaggttccagagagcacttgctctccaagtttcctgagccgttcttttgaccccgggcctgggcactggggagcaggtgtgcctacccaggcccgactgcgtgcctcccaagggatcatggcaccttgagcacatcctagtttcctgaga

SEQ ID NO: 2668 - DNA, 517 bp, Cricetulus griseus
caaggctattgatcacaatgtttgtcaatcatttcatacattgatgttatagccctttggtgagctgataaggcacctgggcataggggccatgtctttatcttctgtcttcccatacagtgcatgggtctggtaagaaagttaatgttaggtacttaattatctagtatagtttcattttaagtttagcacaggcaaacaacttgttttggatctttttaaattcaaatcaaatttaatttgccaattaccttaaattcacacagagttcccattcatccgtgacctagttcctcctattattgatatcttatctcaaagaactacatttgtcttaaagtaagaagctaacatcagtgcactactatcaactcaaccccacttttgcctttaatgccatttttctgttcctgtttagaattatatttagtcatcatgtctccttagtttcctctggtctgtgattgtgtctcaaaccatttccccacgatcttggcaaggttgaagcacactggtc

SEQ ID NO: 2669 - DNA, 562 bp, Cricetulus griseus
  misc_feature (107)..(126): n is a, c, g, or t
  misc_feature (177)..(205): n is a, c, g, or t
tacacccacccacacatacctgtcagcacattgggctggatgggaaatgatatcatccagaactatcatttttgttttgtttctatatttgttagtttgtttctccnnnnnnnnnnnnnnnnnnnnacagccctagctgtcctggaacttgctagaccgggctggccttgagctcgnnnnnnnnnnnnnnnnnnnnnnnnnnnnngtgggactggaggcgtgagtcaccactgcccagctgaactattgtttttttcacatgtattttggcagtcaaaatttctttacatgatttgattaccagttttgcatgtaagaggcagaactctacctttaatgagaggttttacaaagtaaagaagttgtgtttgatgaaacagcttttaaatgcgctttcatttacataatgtataagccaattcttttacattctaggttcttccttaactgaagatgaccttatttttcttagaaatacgctaccagtaaagccacatataataagcaaaacatgcctggtaaaactaagtgaaattcaaattaaccccattcatggtgtgct

SEQ ID NO: 2670 - DNA, 562 bp, Cricetulus griseus; identical to SEQ ID NO: 2669
  misc_feature (107)..(126): n is a, c, g, or t
  misc_feature (177)..(205): n is a, c, g, or t

SEQ ID NO: 2671 - DNA, 459 bp, Cricetulus griseus
  misc_feature (5)..(49): n is a, c, g, or t
  misc_feature (78)..(100): n is a, c, g, or t
  misc_feature (102)..(129): n is a, c, g, or t
  misc_feature (324)..(358): n is a, c, g, or t
ccgcnnnnnnnnnnnnnnnnnnnnnnnnnnnnnnnnnnnnnnnnnnnnncagagtgagtgtcaggacaggctccaaannnnnnnnnnnnnnnnnnnnnnngnnnnnnnnnnnnnnnnnnnnnnnnnnnngttatttcccactcagaaggcataaggtgtgcgccaccaccacttggcgatttattttattttcatttatgtgtatacctgtgtgaatctatatgtatgcaaacatgcctgtgtgtgcccttggagaccaaaacggggcatcagatcccctggagctggagtttcaggcaactgtgagctgtctagtgagtgtgnnnnnnnnnnnnnnnnnnnnnnnnnnnnnnnnnnngagtgctcttacctgccaaacctaacaactctatggctcacaaggttcagttaagctcattagaggcctaaggacaagctcctgcttcgacgcaaggagta

SEQ ID NO: 2672 - DNA, 533 bp, Cricetulus griseus
aaagttgtctattagcatattgaaattttagtttcctctatacttctttagtcctaaggtagagtattaagagttcattcatgaggctttatgtttgatggctctcctagataatcacatttaagaaaacaatggattataattttcaattaacaaatgagttaatgaatgtttctttgttgtgtagttatttgatttactattggcagtacaaatgtaacaaatcaacatttataggaaataagaaataataatcttttctaattgcaatcactgtgtgtgtgtgtgtctttgattctattttcattctagatcctctaaaggtccaccatgatgatggcctggcagatctgctctttgcctctagtggacccccaaatgcttcagcatttatagggcaaagtgatcctctgggtgacaattacggtatggcttcaactaggatcattatgtcattgtacagagatgcatacaataaatgacaattgattaagagaaaaatacaataaaaattttgaggaaagttctatata

SEQ ID NO: 2673 - DNA, 444 bp, Cricetulus griseus
  misc_feature (363)..(405): n is a, c, g, or t
cttcccagtggccccagctaatggttattaacatgttaggaagtctgatatgactctcttcttgctcttgccaatacattactagaaaaatagatgccttttacaaaagcaatccttggtttttaatttttttttttaatgtttgtattttggatctggatagggtttcttaaaagtctaatgaaatttggggattttagagagaacatgcaaataaatttgaaaattgacattatgactgaaggtagagcaaggagctaaccattttgagtttgggggatgtagtaataatgttttttaaaaaaactaattagtgctgggcattggtggtgcacgcctttaatcccaccactcgggaggcgnnnnnnnnnnnnnnnnnnnnnnnnnnnnnnnnnnnnnnnnnnncagagcgagtgtcaggataggctccaaagctacatagag

SEQ ID NO: 2674 - DNA, 566 bp, Cricetulus griseus
catcgcgccgcgcgcttgctctgcgcttccccggagtgaggcttctcggctcgccggctcccgtcgcaggtccccggcagcgatggcgctcaaggactacgcgatcgagaaagaaaaagttagaaaattcctgcaagagttttattatgatgatgaactcggaaagaagcagttcaagtatggaacccagttggttcatctggctcatcgggaacaagtggcattgtacgtggacctagatgatgttgctgaagatgaccctgagctggtcgactcaatttgtgagaatgccaaacgctactcaaagctgtttgctgatgttgtacaagagcttctgcctgagtacaaggagaaggaggtggtgaataaagatgttctggatgtttacattgagcaccgactgatgatggagcagcggagcagagaccctggggcagtccggaaccctcaaaatcaatatccttctgagctgatgcgtagatttgagttgtatttccaaggcccaagtagcagcaagcctcgagtgatccgagaagtgcgggctgattctgtggggaaattggtga

SEQ ID NO: 2675 - DNA, 558 bp, Cricetulus griseus
  misc_feature (182)..(202): n is a, c, g, or t
acattcggactcgaatctatgaatcaaagtactggaaagaggaatgctttggacttacggctgaacttgtagtcgacaaagccatggagttaagaaacgctatgtgctggaggaagcggaacagctggagcctcgagttagtgctttggaagaagatatggatgatgtggagtctagtgaannnnnnnnnnnnnnnnnnnnnaagctggaaagagtgccatcacctgatcaccgaagaagaagctaccgagacttggacaagccacgacgctcccctgcactacgctacaggaggagtcggagtcggtctcccaggaggcgaagtagatcccccaaaagaagaagcccttctccccgccgagaaaggcataggagcaagagtccacgacgccatcgaagcaggtcccgagacagaagacacagatcccgctctaaatccccaggtcaccaccgtagtcacagacataggagtcactcaaagtctcctgaaaggtctaagaaaagccacaagaagagccggagaggaaatgagtaatggattgatttatattttagtcc

SEQ ID NO: 2676 - DNA, 508 bp, Cricetulus griseus
agctcctctggtcgaccctgcgaatggttttggcggtggcttcatgcccagagctatggaggtgtcctcctcaacttcctgggagctgcccctggtggctgtgtgccaggtaacatcaacaccaaacaagcaagagaactttaaaacatgtgctgagctggttctagaggcggccagactgggtgcttgcctggcttttctgcctgaggcatttgacttcattgcacgaaatcctgccgagacattacagctgtctgaaccactggatggggaccttctgggacgatatagccagcttgccagggaatgtggaatctggctgtccttgggtggtttccatgagcgtggccaagactgggagcagactcagaaaatctacaattgtcatgtgcttctgaacaacaagggactagtagtggccacttacaggaagacacatctatgcgatgtagagatcccaagtcaagggcctatgcgggaaagcaactctaccatgcctggaaccatt

SEQ ID NO: 2677 - DNA, 429 bp, Cricetulus griseus
caaggagagatgctaactgcacccttgccactgccaaagcaatagaggcagaagcatcccctctttgccacccagcccagctttgaccctggcattaaccagactttttccaggaaaactgggttctggcaaggagtggcattgtttcttccaatctgctgattttcttgtctgcacctaaaacacagcagtatgctcccatgaccctctgccattccattggtcttcaggacccaggattctggggctgaaatgttgaagaaacgccagtgacttattccagagtgcctcagttaggggaacttctgtaaagaaccctgggtgttgagcaaaaaccttattaatattattaatgacctataattagaagcttcctgcctcttttttttctttttggttgctcctgtggaaatactaaaattactaagt

SEQ ID NO: 2678 - DNA, 84 bp, Cricetulus griseus
ctgccttaagcctgtgagtcatcactagctccctttacaaagtagaccgccactgccctccctcccatgtcactttcctctttg

SEQ ID NO: 2679 - DNA, 577 bp, Cricetulus griseus
  misc_feature (31)..(46): n is a, c, g, or t
  misc_feature (309)..(321): n is a, c, g, or t
  misc_feature (323)..(337): n is a, c, g, or t
aattgcatctgaaagttagtattttaagttnnnnnnnnnnnnnnnnatgttgttcagccccatgaattttttgggattggattctttttaggtattacggatgttggtgaggtgccttattgatgaatgggtatggactttttttaatcgaagctgatgcatgttctagttttctgttttcttctgtttatctgcagttgagtggagtcttggagggttgtcagaattgtctgctcacagtaggtagctacagtaacaggctagaagagacacgcattatggaacagatttcaattcgcacatatttgnnnnnnnnnnnnncnnnnnnnnnnnnnnngactaatttggttatttgccatttctggggattaaactttaaaaaatgttcttcttttctgtatctgatgttctgtgtgctattagtgacgcagccaacacgaacggttgtcatgtgtaacacaactttcgatcaccgcgaaaacagcgtcctgggaaagcgtccatgcttgatatcgtttggttcatgaacattaagtttccagtacaggtgacccatagctcaaagtgttaaataatt

SEQ ID NO: 2680 - DNA, 538 bp, Cricetulus griseus
tattcaactattgcatccctggtgtcaagtcaatgttggatcctgtcgatttatgctgggacggtgttacctggttacaggagaagtacagaaggctctggaatgtttctgtcaggcagcatctgaagtgggcaaagaagaattcttagatcgcttgatccgctcagaggatggggagattgtgtccactcccaagctgcagtattatgataaggttttacgtctactcgatgttgttggactgcctgaactggttattcagctggctacatcagcgattactgaagccggtgatgactggaaaagtcaggctactttaagaacatgcattttcaagcatcatttggacttgggtcacaatagccaagcatatgaagccttaacccatattcctgattccagcaggcagttagactgtttgcgacagctggtggtagttctttgtgaacgctcccaactgcaggatcttgtagagtttccctatgtgaatctgcataatgaggttgtgggaataattgaatcacgtgctagggctgtg

SEQ ID NO: 2681 - DNA, 567 bp, Cricetulus griseus
aacagtgaggtggtggccatcaagaaaatgtcctatagtgggaagcagtcaaatgagaaatggcaggacatcatcaaggaggtgcggttcttacagaagctacgacatcccaatactattcagtaccggggctgttacctgagggagcacacagcttggctggtgatggagtattgcctgggctcagcttctgatcttctagaagtgcacaagaagccccttcaggaggtagagattgcagctgtgactcatggggcacttcagggcctggcatatctacactcgcacaacatgatccatagggatgtgaaggctggaaacatcttgctgtctgaaccaggcttggtaaaattgggggactttggctccgcatctatcatggcacctgctaactcctttgtgggcactccatactggatggctccagaggtgatcctagccatggatgaggggcaatacgatggcaaagtagatgtctggtccttggggataacctgtattgagctggcggagcggaagccaccactgtttaacatgaatgcaatgagtgccttataccacattgca

SEQ ID NO: 2682 - DNA, 567 bp, Cricetulus griseus; identical to SEQ ID NO: 2681

SEQ ID NO: 2683 - DNA, 432 bp, Cricetulus griseus
gaggagactggtttgaataactaagcaattagaaaagatgttatcctactagaatgggaaggtcctgaaagaccttgttgtaccaggcctcacaggaaactcaggaatttctggaaacagcttttttgagagctatggagcattcacagaactcaagtcaaagttcaaactaacaatcagaacaaaaaaatgtaaagtactgatagacaaatgtgaatgctggccttggcttcgagtgtcaagggaatgaggctatgtatggtacagttacctttgaactatgcaactgacaacataagcctgctttatagcagctgttaactagcttgctacaaggaaaagtcagcaaattgtaggtttataccctaaaactcccagcagtgcaactgcaagctgggacatctccaatttaacaaatgagaaatagtaaca

SEQ ID NO: 2684 - DNA, 575 bp, Cricetulus griseus
ttttcttagctgctcttctctccagaagcttctgccggttcccccagctctgggtactcggctctgcgtcgtgccgccatgatgggccaccgtccagtgctcgtgctcagtcagaatacaaagcgtgaatctggaagaaaagttcaatctggaaatatcaatgctgctaagacaattgcagacatcatccggacatgtttgggacctaagtctatgatgaagatgcttttggacccaatgggaggcattgtgatgaccaatgatggcaatgccattcttcgagagattcaagtccaacatccagcagccaagtccatgattgaaattagcagaacccaggatgaagaagttggagatgggaccacatcagtaattattcttgcgggagaaatgctgtctgtggctgagcactttctagagcagcagatgcacccaacagtggtgattggtgcttaccgcatggcactggatgatatgatcagcactctgaagaaaatcagtacacctgttgatgtcaataaccgtgatatgatgctgaacatcatcaatagctctattactacaaaagtcatcag

SEQ ID NO: 2685 - DNA, 536 bp, Cricetulus griseus
tgcatctggtggcgttggggccccggatcccggctggggtcgggtatgtctgctcatcggaagcacgtgtttactgaaaaagtgctgaagagactttttcctaatgtttcaagtggacaagataaagggacacctcagactcctgctttggagacaccgcccaagaatgtgaccccagaggcagtagagcacacccatggtcacaagctggcagatggtgacattaagatccagcctgaacgtcggctctacactgtgagtttgcctcctccagggtatgttcctagtttgccagaacctaccagctgcgtgaattctgaaaatgcttccagtggtggtgacacagaagagccagatcttcatgaccaaccaaaaaggagaagagttagaaggcacaaatccaagaaaaatattaaaaaccctaatgatgttgtgataaagcaagcagaactagagacacagccaggtcttttacaagagaaaatgcatgcagatacccccacaatgagcaaaaacaaaagaaagaagctgaaaaa

SEQ ID NO: 2686 - DNA, 482 bp, Cricetulus griseus
  misc_feature (13)..(103): n is a, c, g, or t
atggttgaacccnnnnnnnnnnnnnnnnnnnnnnnnnnnnnnnnnnnnnnnnnnnnnnnnnnnnnnnnnnnnnnnnnnnnnnnnnnnnnnnnnnnnnnnnnnntttaaatctaagaagtgttttctataattcttcaagtgtcaacttttaatacatgaattaaatccagttaagcttagcagtctccctgcaaggtcaactccagtatatgcacggactgaggaggtgacaagatactcctgtgttccttccagtcagcccttggattacttggaatttccacctggaaggttgcttctccacagtgatttcacattacaggaaggttttccttctttgtttctcagacctggtcctgtagacgggaaggagcctggacacagtgacccaacacattcacaaaggccctgcaggaccaccatggcttatgatgactccatgaagaaagaagattgctttgatggtgatcacagctttgaag

SEQ ID NO: 2687 - DNA, 472 bp, Cricetulus griseus
ttgacacatcctttgtgaggaagtcacggaccatccttgagacagagcaagagacctcccaaagtccctataaccttgcatataagtataattttgagtattcagtggttttcaacttggtactgtggattatgatcggcttggccttggctgtgattatcacctcttacaacatttggaatatggatcctggatatgatagcatcatttacaggatgacaaaccagaaaattcgaatggattgagtttgccttatgctacccttagcaggtttgggaactggttgttctgttagagtatatcttttagtatagtttaaagtagacagtatagtataccttaaatttattttaaagaaaacatagatttttgttctctattttgtgtgtgcctgtggtttctttagagtgattcatagtgtggacataaattgatatagattccataatatgcttaaatgttgttgacatag

SEQ ID NO: 2688 - DNA, 552 bp, Cricetulus griseus
aatcgggacgcacaacggcaccttccactgcgatgaggctctggcctgcgcgttgctccgcctcctgccagagtacaaggatgcagagattgtgcggactcgggaccccgaaaaactggcttcttgtgacatcgtggtggatgtgggtggcgagtacaaccctctgagacaccgttacgatcatcaccagaggacttttacagaaactatgagttccctgtgccctgggaagccatggcagaccaagttgagcagtgcgggacttgtctatctgcattttgggcataagctactggcccagttgctgggcactagtgaagaggacagcattgtggataccctctatgacaagatgtacgagaactttgtggaagaggtagatgccgtggacaatgggatttctcagtgggaagaaggggagcctcgatatgcactgaccactacactgagtgcccgggtttctcgacttaatcccacctggaaccaacccaaccaagatactgaggcagggttcaggcgtgcgatggacttggtgcaagaagagtttttaca

SEQ ID NO: 2689 - DNA, 419 bp, Cricetulus griseus
tgatgtggacaatgagctcttggactatgaagacgacgaggtggagacagcagcaggtggagatgggacggaagctcctgccaagaaagacgtgaagggctcctacgtctccatccacagctccggctttcgagacttcctgctcaagccagagttgctccgggccatcgtggactgtggctttgagcatccatcagaggtccagcatgaatgcatcccacaggccattctggggatggatgtcctgtgccaggccaagtcaggcatggggaagacagcagtgtttgtcctggccacactgcagcagctggagccaatcactgggcaggtgtctgtgctggtgatgtgtcacactagggagttggcttttcagatcagcaaggaatacgagcgcttctcaaagtacatgccgaatgtca

SEQ ID NO: 2690 - DNA, 580 bp, Cricetulus griseus
  misc_feature (177)..(191): n is a, c, g, or t
ggatggggctactgaacctcccctccgtgcttgggctgaaagattaccccacccatctgtatgcatgtgtgcagaacctgagcctgagttacgacagtatcaccccaaaatagttcccatcctatagatactagactcttctctgagccagcttttctgtggccacaagattgcatnnnnnnnnnnnnnnngaaaggacatatattgagctcctggagaaagtttagtaagacatggggacaggtgcaaccagaaacagccacctttgtgtttcagaacagcccccaagacagcgcctcacagaaagctgcatggctgcacctagtggcgcacgccttcattcccagcatttggggcaggccaccagatacaaccttgtctacagaggtccatgctgcatagtgaatccatgttttaaatacaacaaaaaaagaactgcatagtggccaggacatgcagactgctgggagcttgtgtatctggctgtcactggcagtctgggcagactcctgcactctccagtctattgcagtacttgctgaagcagcagattctgcagtctctccagttagataagtct

SEQ ID NO: 2691 - DNA, 478 bp, Cricetulus griseus
agtggcggctttctccgtctctgaggtgcggcggcgcgctattcggctttcttctgactttcccgcagatttcagaatgtctaccatcttgacttccacttttaaaaacctttctactacatcaaaatgggccctcagattttctgtaagacctctgagctgttcttcccagctacgatctgccccagctgtccagaccaagtccaagaagaccttagcaaaacccaatattaagaatattgtggtggtggaaggcgtccgcattccatttctgctgtctggcacttcctataaagacttaatgccacacgacttggctagaggggcactttcgggtttgttgcatcggtccaatgttccaaaaaatgttgttgattatatcatctttggtacagctattcaggaagtaaaaacaagcaatgtggctagagaggctgcccttggtgctggcttctctgacaagactcctgctcacact

SEQ ID NO: 2692 - DNA, 586 bp, Cricetulus griseus
gaagaatctggcctaacccctttaggagagtgggtaagacatctctcccatttcctccccatttatcccctaaaacaagacaatcagggtatggcttgagaaggatctttatttatttctcagcctgcccttggggagttgagggcgccctgtcttccttttgggacatgggttgaagagctagcttgttttgttttattattcctggccatatctgagtccagggagcacttgtatgatttaatggtttgggagtcgtagccagagaagaatcacactgttaaaataggaattgctacctccccagccttctcagtcagcttgttcttttctcaagtaagcttttggccaaggaagaatcttccttttcttgtttttccccctgagaagccattcctttgtctccaagttccctgggggcctgcctattacctcccaatggagggttttttggggtggtggtccccgtctgggggactcctccagccagtactccagggctctctgtctcccatcctcttccattttgatagtataatctatttttaaatggggcttttcaataggggagaggaaagcatctctt

SEQ ID NO: 2693 - DNA, 263 bp, Cricetulus griseus
  misc_feature (41)..(58): n is a, c, g, or t
  misc_feature (99)..(165): n is a, c, g, or t
tatgcatctggatgctaaaaataaagtggaatggtctcttnnnnnnnnnnnnnnnnnnaaaaaaagcaatgaaaaaaaatccatgacaatgttccttgnnnnnnnnnnnnnnnnnnnnnnnnnnnnnnnnnnnnnnnnnnnnnnnnnnnnnnnnnnnnnnnnnnnaaccgaacccccccttcccaaagggggattttcctttcccaaactagaaaaaggacccaaatcctcaaaaaaaaaagggttttgggcccctttaaaaa

SEQ ID NO: 2694 - DNA, 537 bp, Cricetulus griseus
  misc_feature (419)..(453): n is a, c, g, or t
aaaaccagaagtaaagatttcagaaaagaaaaaaatagcagaaaagataaaagagaaagaacggcagcagaagaaaaggcaagaagaaattagaaagaggttagaagagcctgaagaacctaaagtgctaacacctgaagagcaattagcagataaactccgtttaaagaagctacaggaagaatcagaccttgaattagcaaaagaaacttttggtgttaataatacaggttatggaatagatgctatgaacccatcttcaagagatgacttcacagaatttggaaaattactaaaagataaaattacgcaatatgaaaaatcactatattatgccagttttttggaagccttagttcgagatgtctgtatttcattggaaattgatgacttgaaaaagattaccaattcattgactnnnnnnnnnnnnnnnnnnnnnnnnnnnnnnnnnnnaaacaaagccaaaaagaagaagaaaggtgtggttcctggagggggattaaaggccaccatgaaagacgatctggctgattatgg

SEQ ID NO: 2695 - DNA, 544 bp, Cricetulus griseus
gggcggtcggcgcagcccagggactgacttcagccgggcagtcggggcttcttggcaggtgatggcgccccccgtggcctgaaagtccagcgccctcggcaagcggcagacaggcctctctccgtgtgtctttgtcaagtctccgggctactttgaacatgctggtgcggctagccaagctgtcctgccctgtgtatcagtgcttccatgccttaaaaattaagaaaaaatgcctacctctgtgtgctacaagatggtcttcaacttctgttgtacctcaaattactacccactacactgttcatccccgggaaaaagacaaaagatgggaaggagtgaatatggagagatttgcagaagaagcagatgtggtaatagttggcgctggccctgcagggctctctgcagctattcgtctaaagcagctggctactgaacaaggaaaagacatccgtgtgtgtctggtggagaaagctgctcagataggagctcacacgctctcaggggcttgccttgatccagctgcttttaaagagcttttccc

SEQ ID NO: 2696 - DNA, 430 bp, Cricetulus griseus
  misc_feature (66)..(98): n is a, c, g, or t
aactctgcccatgttagaggtgaagcctccagaaaggccttcaagtagatgtagagacccaccgannnnnnnnnnnnnnnnnnnnnnnnnnnnnnnnnacaaaaaacggtctcgaacgaggtcccgctcccccaagtaccactcgtcttccaagcccaggtctagatcccactcaaaagccaagcactctctgcccagtgcctaccggacagtgcggcgttcgaggtgggtgtgcaggcgctcatgccctcctgctcatgtctgccctacatgctgaacttcctcctggccccctgtagagctagcagatggtttaaaatgagtatagtgttcagtgggctggtgaacacactagggtgtgtgtgtgtctgtgtctgtgtgtctgtgtaggtttaaaatgagcaacgttcactaggctggtgaacacact

SEQ ID NO: 2697 - DNA, 408 bp, Cricetulus griseus
gcacttgttcttagaaagaacccaggttaaattcttagcagctacacgatggctcacaaccatcaataactcaagttcccaggggatccagtgcagcagtctggtctccacagacaccaggcatgtgatgcatatctatgtatgtagacaaaacactcgcacacatcaataaacctaaaaatccagttaataaaatccatgttcaagaaaaaatgtgactgtggactggagatatagctcatttggtagagcttccctagaatgctagaatacctagatttagtcccagcaacaattggatttggttctgcatgcctataatcatgtttgaggtcttctttggctttgtaagaagtccaaggccaggctgggatatatgatatcctgtcagaaaggcagactatgtcc

SEQ ID NO: 2698 - DNA, 579 bp, Cricetulus griseus
tttacagtccttgatcaccaggtatttattatgtatttgtaaaatacaaggtgtggggctaaatgaagaccagaagttttagcactaatggggctgtgaggtggacaataagagaccctagtgggaaaggaaaagtagctcagaagcatttgtttagaacttatatcatgtttattaaagacaatagtagagaaggctgtgggagctaggggacagcattggcatgcatggcacgggctgtccagccttgttcccagcctgcctgcaggttgactctgagaacttgtgaacttacaaggtctaacttgactgctgagcaagagctgcttatgatttctaataaaataatgatgttggagcggctgagagtcctttctgttttaggccctgtgttcaacacagaatgcatcatgagaataataaaaatgtatagggtcaaaggtccatggggaaaaagggaggggtatatttcccaagactcaaggacaggattgtaatgttgtaaggattacaattgagaactggaggtttcaaaaagtcagtgcactaaaaagcatgttacctttcccatcctacctg

SEQ ID NO: 2699 - DNA, 544 bp, Cricetulus griseus
cggcgcgggttcgtcttcagggcacgtggagtggctgtcgcgccccgcggggcgggagatcgcgagatggacacccctccgctctcagactcggacgcggagtcggaagagtccctggtctcagaccgggagttgcaggatgcattttcccgaggactcctgaagccaggcctcaacgttgtgctagagaggccgaagaaggcggtgaatgacgtgaatggcctgaaacagtgtttggctgaattcagacgggatctggagtgggttgaaaggctcgatgtgaccctgggtccagtgccagaagtcagtgaaactcagccaaccccccagaacaaggaccagaagaaaggtgttaatccagaagacgacttccagagggaaatgagtttctaccgccaggcccaggctgcagtgcttgcagtattaccccggctccatcagctccaagtccccaccaagcgacccacagattattttgcagaaatggccaagtctgaccagcagatgcaaaagattcgacagaagctgcagactaaacaggctg

SEQ ID NO: 2700 - DNA, 546 bp, Cricetulus griseus
accagactggactgaactcacagagatccatagtgagcccctgcctctcaccaaggaaaccctcctcaaagtaaccttcaggttgacacaggtgggtggggctacaaaggccaattactcactctcacatgtagtcttgtgtctagttttatcaaaatattaacattaggatctgagatggttcagcttgctatcaagccaggtgacctgacttccatacctggaacccactttctggaagaagacaacagagccccccaagatgtcatatgattcccccatgcacacatacacccccatccatcaacaataaatgttaaaaataaaaatattcagggctgtagagatggctcagtggttaagagcattggctgttcttccagaggacccaggttcaattcccaccagttccagggcatctgacaccctcacatagacatacatgcagtgccataaaataaataaataaattgtcactgtatttgaagggattttcttgttagttttttattacatttatgtcttcgtatgtgtatgaacatgctt

SEQ ID NO: 2701 - DNA, 570 bp, Cricetulus griseus
  misc_feature (75)..(112): n is a, c, g, or t
aagctatgtgctgaggaaatcaaagctgtctcctatattgaatgctcagccttgactcagaaaaacctcaaagannnnnnnnnnnnnnnnnnnnnnnnnnnnnnnnnnnnnncagactcccagcaacagccaaagaagtctaaaagcaggaccccagataaggtgcgggacctgtccaaatcctggtggagaaagtattgctgcctggcctgacccttgcaaacagttggtgtttaagctgcaacaactctttacgacatgtgggtgtggtcataggacaagccctcaaagcaacccctttctgtccttaatttcctgtctgtgaggttagggttgagatccatatgcaaaataagttaaagatatttggaagttaagattttttttcataactatggaaccttagaatggtagaactctggattaatttgtatctcatacgaaaagggctcttcaaagctaggtgccagcatgaagttctgctgcatcatacaggacaaaggagaccgtgaccctctcctgattaagggctactgagtgctcattgaatgacacatgcacaccagactt

SEQ ID NO: 2702 - DNA, 389 bp, Cricetulus griseus
  misc_feature (53)..(67): n is a, c, g, or t
gtctttctatctgggtactttctgtccttccatctataaaataacactatgannnnnnnnnnnnnnncctatgcaagctctttatctttgccttcccagcctccaaaaatatgagccaaatttttctgttcattacacactaggcagtttcatgtattctgttataggagcacaaaatggacaaaggttggatcaacactgagagacaccacaaaatagattctgaaatgaatgctgggtattgaaatttcacagttttttcataaaacattgcctatgggataatgagaaatgtaggattggacaagcagagaagtttcacaggcatatagtcatgaatagaccacaggggattccacaaaaaaatcggggtcgggaatgaccccctc

SEQ ID NO: 2703 - DNA, 444 bp, Cricetulus griseus
attgttcaccgagccatcctggggtcagtggagagaatgattgccatcctcacagaaaactatgggggcaaatggcctttctggctctctcctcgccaggtgatggtagtgcctgtgggtccaacatgtgatgaatatgcccaaaagggtcggcaacaattccatgatgctaaattcatggtggacattgacctggatccaggctgcaccttgaataagaagatcagaaatgcacagttagcacagtataacttcatcctggttgttggggaaaaagagaaagccagtggcactgtgaacatccgcaccatggacaataaggtccacggggagagaactgttgaggaaactgtggagcgactgcagcagctcaagcaatcccgcagcaagcaggcagaagaggaattttaacaggaacatggccggcactggctcagcctaaag

SEQ ID NO: 2704 - DNA, 302 bp, Cricetulus griseus
  misc_feature (117)..(139): n is a, c, g, or t
tatccaggcagtattttatcactgcaggattaagggtatgttcacgtttatgatgtgaggtgcctcgaattccaggggaagccagcctatgatctctttggctgaacactccaagannnnnnnnnnnnnnnnnnnnnnncctgttacgggtaacagattggtgaccacatgtgctgactgcaagctgacagtctttgacagcagctctttatcttcccagattccttttcttactaccattaggcgtaacactatcactgggagatggctaacgaggttccaagctgtgtgggaccctaaac

SEQ ID NO: 2705 - DNA, 580 bp, Cricetulus griseus
  misc_feature (343)..(343): n is a, c, g, or t
aggtgtatgtagtgtaggtaacacagaccagacagcgcttggcctataaagtgcttatgggctgtattacctgctaccccagcggctcttcctaaccctattgtgtcattattcccaggtcaggattcagatgcggccagcacaggtgccctaatgtttaggctatcttgagcaggtcaaatctgatggtgttttgtcctgggatgtttgtgaggaacctaaggacaagttacaaagtccgtttgcattttccctcttgctctcctgacacacaggctgatgacagtagtttgccatttgtcatgctacatgcaagccctgctaagcacacaccatccactgngattttttttctctctctctcttcagaaggaaaacccactgatgctagcggagtcttaggggtttattcactgtcctgtcccatttgaaatcttacactacacaaaatgggggaacccctggccttggcaatgcttacagtaaaaattagaacaaatttgaagagacttgttgttcgtggtcctccatcaacttcaaactctgttctcaatgtaaccatctccaaatttagacagca

SEQ ID NO: 2706 - DNA, 505 bp, Cricetulus griseus
ccggtccctggcgggcgtcggccttcagggctctggtcctgggacaagatgccaacgaagtagtgacccgggaggagcagatctaagccgacggacctgttaccatgtcccatcaacctccgagctgcctgactgagaagggtgacagcctctgtgagaccccaggaaatgaaccccctaataaggttcaccccagcctggacacattcactcctgaggagatgctgcagcaaatgaaggaactcctggttgagaaccaccagctgaaagaagccatgaagctaaacaatcaagccatgaaagggagatatgaggagctttcagcctgggcagagaagcagaaggaagaacgacagttgtttgacacacagaacaaagaagctaagaagctcctgatgaccttgagttatgaaaatgagaaactgaaggtggagcttggaaaactaagagagaagtcagaaaggccatttgaaggctccatatgtggctccaggcctcccatgga

SEQ ID NO: 2707 - DNA, 485 bp, Cricetulus griseus
  misc_feature (359)..(425): n is a, c, g, or t
agaaattgttcagtggtgtctttgtccttgtcacccctcaaatgtgaagctgctgcgcacagtggagccttatgtgacatggggatttccaaatctgaagtctgttcgggagctcatcttgaaacgaggccaggcaaagattaacaataagactgtccctctgacagacaacacagtgattgaggagcacctgggtgagtgtggctgctgggggtcacttgcggtaaaaagtggggggttgtgattggggatccagggtatgttcttgggttttacagtcccagcttcatcgtgtgagtgcttgctgtatactggctaaatctacaccttttgtttctcagggagatttggtgtcattnnnnnnnnnnnnnnnnnnnnnnnnnnnnnnnnnnnnnnnnnnnnnnnnnnnnnnnnnnnnnnnnnnntgtgccctttccagctctctgtggcccgtcatgccaccaagaatagagtgggcttcctca

SEQ ID NO: 2708 - DNA, 538 bp, Cricetulus griseus
tttttgggtctctctatgtagctctgactaggctggaatttgctacgtagaccaggttgattggaaactcacagagatcctcttccttctgcctcctgagtggggggattataagcctgtgccaccatacttaggttcagattggatttttattttttatcattattttttaagattttatatatttattatgtatacaggcgtctgcctacacaccagagggcacaagatcttattcaagctggttgtgaaccactatgtgggtgccgtgaattaaactcaggacctctggaagaacagtcagtgctcttaaccgctgagccatctctccaaccccagattggatttttataagtaaaaattatctgtactaatttatcacaaaaataacttttatttggtaaacaaaaaattttataagtaaatgaagaacttgctaaactcaagcaaaacaatgataagaccccccatacaccgggtttcacattatccagagtgtaccagatacaaacactgctctggttcttgccccatgccg

SEQ ID NO: 2709 - DNA, 504 bp, Cricetulus griseus
attgctgctgtcgaaaattgatctacggtaacttacaacaactgtacttttgttggattagcaaaccgtgtgtttaaacaatcccgtatgttgggcaacagttcaaaaaagctcagagaagcattgcccaaacttagttctctgactccgtgcattcataaggccgggcttcaaaatcataacacccaccccaactcagcaggcacgtgcctattctgcagacatgcatgggaaactattggcccgtcttagaaagagcaagcccatcaagagttaagactgactttgtgtcctatttatattaagtgatgtcccaacagggaagaggtggagccagcgtgagatctccaagtcccaatttgagtgtgggacgtgcttcgagatgcttcctggcagtcatggctcaccttcacaaagacagtcttgtggcatccagaggcaggcatacagcctggggtgcttgggcctgagaggcagttattgacagtgatgtgcagactcctg

SEQ ID NO: 2710 - DNA, 538 bp, Cricetulus griseus
catccagtgtgggagataccacggctgtgtctgtgcagaccacagaccagagcctgcaggccggaggccagttctatgtcatgatgacaccccaggatgtacttcagacagggacacagaggacaattgcaccccggacacacccctattctccaaaaatcgatggaaccaggactcctcgagatgagagaagaagagctcagcacaatgaagtggagcggagacggagggacaagattaacaactggattgtccagctttcaaaaatcattccagattgtcacgcagacaacagcaagacaggagcgagtaaagggggcatcctgtccaaggcctgtgactatatccgggaactacgccagaccaaccagcgactgcaggagaccttcaaggaggccgagcggctgcagatggacaatgagctcctgaggcagcagatcgaggagctgaagaatgagaacgccctgcttcgagcccagctgcagcagcacaacctggaaatggtgggcgagagcacccggcagtgacgcccccggcc

SEQ ID NO: 2711 - DNA, 461 bp, Cricetulus griseus
tggctcgttctgcgcaacctcacaccccagattgacggttctacactgcggacgctgtgtttgcagcatgggcctctcatcacattccacctgaatctgacccaaggcaatgctgtggtccgttacagctccaaggaagaagccgccaaggcccagaagtctctgcacatgtgtgtactggggaacaccaccatcttggctgagttcgctggtgaagaagaagtgaatcggttcctggcccaaggccaagccttgccacccacctccagctggcaacccagcagtgggggcagccagcccaggctgggctcctcgggcagcacccatggcctggtgcgcagcgacactgcccactggagcaccccgtgtctgagtggcaaaagcagcagtgagctgctgtggggtggggtgccccagtactccagcagtctgtggggcccgcccagtgctgatgatgccag

SEQ ID NO: 2712 - DNA, 546 bp, Cricetulus griseus
ctatgtttgtggtggaagcttaggcaacaatgtttctgggagagtgcttagttcctgtgaagtctatgatcctgccacagagacatggactgagctgtgttcaatgattgagcccaggaagaatcatggactggtgtttgtaaaggacaagatatttgctgtgggcggccagaatggtttaggtggtctggacaatgtggaatattacgacattaaattaaatgagtggaagatggtgtccccgatgccgtggaggggtgtaacggtgaagtgtgcagcagttggctctatcatctatgtgctggcaggttttcaaggtgtaggtagattagggcacatccttgaatataacacagaaacggacaaatggattgccaattccaaagtccgtgctttcccagtcacaagttgtctaatttgtgttgttgatacttgtggagcaaatgaagagacccttgaaacatgattgagtggacctgactcatctgagactcaaaaatctggccaccaatggtttgttccattagtttggttgtgaagttctgg

SEQ ID NO: 2713 - DNA, 532 bp, Cricetulus griseus
tctgttttgtgaaacctactagttcaatgacgattaaaacaggaaagcatgtggatgcaaatgaggaaaatctaccttccttatctacatgactggaaacatccacggtcagagttgctggagcttattcagatcatgattgtgatatttggagaggagcctccagtattctcccgtcccactatttctgcatcctacccaccatacacagcaacagggccaccaaatacttgtcatgttagtggagcttttggaaatatcctgagaccccatgtctgcatatacaggttcctaccaaagactggcatttgggcttccatctgtgggtagaaatcaaagtgtggatgttctggatcccagagtggaagagaagatgccaaatagagctagaagttttaaattatgcatgccatggaaaagccttattaccacctggaaaccagatgtaatttgaaagatagcctgaggtctccctgtgactccaggaccagtgatgtagagaataattgcagtcagctagctcattcctttg

SEQ ID NO: 2714 - DNA, 472 bp, Cricetulus griseus
agggaggccaggatatgagaaaggaacctgagccctcagcttggcctgaggtgtgcccatctgtgcaccccagggtaaagactccgaagattcagtcttcccttaggttgggccaaacctgagggacatgggccaaggcagggcaggggcaagtagaaggggtaaggtccctccagaaacaggcccaccaggccctttcgagccttcccaggcctccaagggtggcaggagccagctttacctcacccactgtgacccactgcttccctgtcagcctgggaccaggttctgcagatctagcacagctctggcttgctccatgagtcaagagagccaagctttgacttcctcttcctggactcaaggcttttccctggctttcttcctttacccctgcagtagctactggtgctggcacaagttgaccgggcccacccatgggtgtctgcctcccgtcgactttccattaagg

SEQ ID NO: 2715 - DNA, 393 bp, Cricetulus griseus
  misc_feature (243)..(299): n is a, c, g, or t
tgtggcgccacaggcctttgtgtttggacagaacttgagggacagagtgaagttaatgaatgagaatgccgatgtggcaggtgtagacagcgctgcatatcccagctcatagacgcccaccgcaaccaactactttctgcagtacatcagctccggtgcagacaactcgacccacagtgctgacacctccaacaagtttgtgtttggccagaacatgagcgagcgcgtcttgagcccccccannnnnnnnnnnnnnnnnnnnnnnnnnnnnnnnnnnnnnnnnnnnnnnnnnnnnnnnnctgagccatcgtcccaggaggctgcccccaagaaagagtcactggccgagtcagccgctgcctacaccaaggctacagcctggacatgtttgct

SEQ ID NO: 2716 - DNA, 467 bp, Cricetulus griseus
agccagtacaggcacctcactgtgagcatgccttctgcaacgcctgcatcacccattggttctctcagcatcagacgtgcccggtagaccgtagggttgtcacggttgcccacctactcccagtacctcggatcatgcggaacatgttgtcaaagctacagattgcctgtgacaacgctgtgtttggctgcactgctgttggccggcttgacaacctcatgtcccacctgagtgactgtgagcacaacccgaaccggcctgtgacctgtgaccagggctgtggcctggagatgcccaaggatgagctgccaaatcacaattgcattaagcacctgcgctctgtggtgcatcagcagcagactcgaatcgcagaactggagaagacgtgcgctgaacacaagcaccagctggccgaacagaagcgagacatccagctgttgaaggcttatatgcgtgcgatccgaagt

SEQ ID NO: 2717 - DNA, 555 bp, Cricetulus griseus
tcccaataagaagatgaaacgaaacttaaggaaaattctggacagtaaagcaatagaccttatgaatgcactaatgagattaaatcagatcaggcctgggcttcagtataagcttttgtcacagtctggcccagtccacgccccagtcttcacaatgtctgtagatgtggatggcacaacatatgaagcctcaggaccatccaagaaaacagcaaagcttcacgtagcagtgaaggttttacaggcaatgggatacccaacaggttttgatgcagatattgaatgtatgagctccgatgaaaaatcagataatgaaagcaaaaatgaaacagtgtcttcaaactcaagcaataatactggaaattctacaactgagacctccagtaccttagaggtaagaactcagggtcccatcctcacagcaagtggcaaaaaccctgtaatggagctcaatgaaaaaaggagaggtctcaagtatgaactcatctcagagactggtggaagtcatgacaagcgctttgtaatggaggtagaagtagatggacagaaatttag

SEQ ID NO: 2718 - DNA, 478 bp, Cricetulus griseus
ttggagggtgctgtgactgagcgacctgtcctgggctgtgtcccagtgtcatcgcggccctcaacagtctctgcgacctgaaggcggaggccagacacaggcaggctgggtggaggtggtggcctcagaagccccaggcccggttgcagcctcgggtgcagcttatttttaagacacaatgaaagccttctatgctttctgtgttgtgcttttggtgtttgggagtgtctctgaagccaagtttgatgatttcgaggatgaggaagacatagtagagtatgatgataatgatttcgctgagtttgaggatgtcatggaagattctgttacggaatctcctcagcgagtgataactactgaagatgatgaagatgagaccactgtggagttggaagggcaggatgaaaaccaagaatgcgattctgaagatgcagatacccaggagggagatactgaaagtgagccgtatgatgatgaa

SEQ ID NO: 2719 - DNA, 478 bp, Cricetulus griseus
aatgtgacaatataaaagtgacttgtgccacttttgggcagtaacagtgaaaaacgctcctatatccattccaatctttctcagcgtctccatgattcctgttgatgtccgaagaagcctttatctccatagaatggacattcccaccacctgctccatcctttaaacagcttttcccctgaggattttggcaatccttatgaacaatatcaagaaaaataatggaaggatacttatgcggtgaatttgacttttaaactaaatgcaattttaagggctagaaatgttattcagtggtagagagattgcctagcatgcatgaggccctatgttcaattcgcaagtaggggtttaattactatagcagtgtttctactatttggatcttgtgttaaaatttatagataatatttttagcgaattatgtttgtaagaacaaactccaattccacaaggaatgtgatgatggctctatccc

SEQ ID NO: 2720 - DNA, 555 bp, Cricetulus griseus
tcatgagcaaattggctggtgaatctgagagcaaccttcgtaaagcctttgaggaagctgaaaagaatgctcctgctataatcttcattgatgagcttgatgccattgcgcccaaaagagagaaaactcacggggaagtagagcgtcgtatcgtgtctcagttgttgacccttatggatggcctgaagcagagagcacatgtgatagttatggcagcaaccaatagacccaatagcattgacccggccctacggcgatttggtcgctttgacagagaggtagatattggaatccctgatgctacaggacgcttggaaattcttcagatccataccaagaacatgaaactggcagatgatgtggacttggaacaggtagccaatgagactcatggccatgtaggtgctgatttggcagccctgtgttcagaggctgctctgcaggccatccggaaaaaaatggaccttattgatcttgaggatgagaccattgatgcagaggtcatgaattccttggcagttactatggatgatttccggtgggccttgagtcaaa

SEQ ID NO: 2721 - DNA, 578 bp, Cricetulus griseus
ttctccgctgaagcagaactgtatgtgggactcaggtccctggcttggagccatttctggcttaggctgtctgcccttctcctctccccctggaggggagtctacagtgcctgtggatctgggaggcatgctcaagagtgcagcagccatctcggtgcacctggtgtggccgctctggggaaggaaggctggagcctcactcacccggtgtttgcaccagactctcaccatggccaaacagctgcaggctcgaaggctgaatgggatcgatcacaacccctgggtggagtttgtcagactgtccaaagagtatgatgtcgtgaacttgggccagggctttcccgacttctcacctccagacttcgccgtgcaagcttttcagcaggccaccagtggggacttcatgctcaaccagtacaccatggcatttggttacccaccactgacaaagatcctggcaagtttctttggcaagctgctgggacaggagttggacccactcaagaacgtgctagtgacagtgggtgcctacggggccctgttcacagctttccaggccctcgtggatgaaggtgacg

SEQ ID NO: 2722 - DNA, 181 bp, Cricetulus griseus
gggacccttgttgaaaaatttgccctttaatttttattaaaaaaggggccttttaaattttttaattaaaaatccccaaagggaaaaaatttattaacaaatcccgagggccctaagtaggggcctttccccctccccaaagtttggtggggtttaaaaaaaaaaggggttttaaccccta

SEQ ID NO: 2723 - DNA, 531 bp, Cricetulus griseus
ggcttggattgatccccctcactagtgatgacattgtggacaagctgcagtactcccgggactgcacgtgcgaagagttctgccctgaatgttctgtggaattcacccttgacgtgaggtgcaatgaagatcagactcgtcatgttacctctcgagatctcatctccaacagcccccgggttattccggtgacatcccggaaccgggataatgaccccaatgactacgtggagcaggatgacatccttattgtcaagctgaggaagggccaggagctgagacttcgagcctatgccaagaagggctttggcaaggagcatgccaagtggaaccccactgcaggggtagcttttgaatatgatccagacaacgcacttaggcacacggtgtatcccaagcctgaggaatggccaaagagtgagtactccgaactggatgaggacgagtcacaggctccctatgaccccaacggcaagccagagaggttttactacaatgtggagtcctgtggctcactgcgccctgaaacca

SEQ ID NO: 2724 - DNA, 467 bp, Cricetulus griseus
taacaaggacacaaaggtgcccaatgcttgcctgttcaccatcaacaaagaagaccacactctggggaacatcatcaaatcgtaagtcccaggccagaggcctcgagtgtcaccagagctctgtaggctgagcacatgccctgggacggttccttccgtctctccgcagcttgctggcactttaacctgtcactgacaggtctgttcacatgcggcttgcttttgttggctttttgatgtaggggttcatgtagtgtagactggactcaaactgactcaccttaccatggttgccgggatcctggccacgtaacacgtaacacatcagcttcctgttggctcattcatgtagtgtataagtttgcagttgcctcttggtcttttggccaagatcaagttcaggggactccagcaaagcaggttttcattttagtgggcatcaagatgctaagaggtgatgggtatgg

SEQ ID NO: 2725 - DNA, 523 bp, Cricetulus griseus
atatctggacatgtttcctatcacttcaaaaaacaagtcctggaaacatggcgattcaagcaagtcctgggtcccgcttgtaggtctgcaagtcacaagtcctgcttgggtccagctgtattctctgtttcttagattttcatcaggctgacctccaggtgtcagtcagctagggactcctcccagaggccacccacagtttctccccacaaaatcttctcaaggccaacaggaaagtctctgcagcttggttgaatctcccttacctctccatggttcactctggacctccttttatgtggtccacctagttagatcagactcatggaagatacgcagcctttaacgtccagctggttaacagtcgcaggcactgattactctcgagtaaacaaagtagggtttaatttattacctacaacaggcaccgtgactgcaggtaatggtgtgaaggagttctacggggcagttcagcagggtgacagagaggaggtcttgtgaaagggacatctgggctgagacc

SEQ ID NO: 2726 - DNA, 471 bp, Cricetulus griseus
  misc_feature (43)..(62): n is a, c, g, or t
agataaaaagagcaagaaagaaactgtaaaagagaaagacatnnnnnnnnnnnnnnnnnnnngaggtgaaaaggaagagtccaaaaaggaggaaacaccaggaactccaaaaaagaaggaaactaagaaaaaattcaaacttgagccacatgatgatcaagtttttctggatggaaatgaggtttatgtgtggatctatgacccagttcacattaaaacatttgtcatgggattaattcttgttattgcagtaatagcagccaccctcttccctctctggccagcagaaatgagagtaggtgtatattacctcagtgtgggcgcatgctgttttgtagccagcattcttctccttgctattgctcgctgtattctgttcctcatcatctggctgataactggaagaaggcacctcttctggttcttgccaaacctgactgctgatgtgggcttcatcgactccttcaagcc

SEQ ID NO: 2727 - DNA, 581 bp, Cricetulus griseus
  misc_feature (34)..(69): n is a, c, g, or t
gcacatggattataagtacttgcgctggcaggtnnnnnnnnnnnnnnnnnnnnnnnnnnnnnnnnnnnnggatcggaacaccattgaaatgcaagctatcacagccctggcccacctccgagctgcagttctgtatgtgatggatttgtctgagcagtgtggacatgggttgaaggagcaattagaactcttccagaatatcagacctctgtttatcaacaagcctcttattgttgtagcaaacaaatgtgatgtgaagagaataactgagctttctgaagaagatcagaaaatatttaccgacttgcaggctgaaggattccctgtcatcgagaccagcaccctgactgaggaaggtgtcattcaggttaaaacagaggcttgtgataggcttttggctcatcgagtcgaaacaaaaatgaaaggaaataaagtgaatgaggttctgaacagattgcatttagctgtgccaaacaagagagatgataaggagcgaccccctttcatcccagaaggagtggtagctcgaaggaaaagaatggagattgtagagcccaggaagaagagggaacgagatcttg

SEQ ID NO: 2728 - DNA, 578 bp, Cricetulus griseus
  misc_feature (177)..(235): n is a, c, g, or t
acctcctgcctaagcgaacccagcaccttcctggacaccctgggtggtaccggaagctctgccctcggctagatgaccctgcatggactccaggccccagcctcctcagcctgcaaatgcgggtcactcctaagctgatggcactgacctgggatggttttcctctgcactactcannnnnnnnnnnnnnnnnnnnnnnnnnnnnnnnnnnnnnnnnnnnnnnnnnnnnnnnnnnagcgagccccactgtagagtcaacagggctagcctgcccctacagagccatcgaggccctgtacaggaagcactgtcttgaacaggggaagcagcagttgaagacccaggagacagaggtggctgaggagttcttagtcaccgacaatagttccatgtggcaaacggcagaagaactgggctgcttagacgtggaagctgaggccaagatggagaactcattactgggtcagcccctagctctgcctgctgcttgtgtcccccaaaccagccagcccacttaccaccatggcaatggaccttataatgatgtggatatccctggttgctggtttttcaagctg

SEQ ID NO: 2729 - DNA, 543 bp, Cricetulus griseus
  misc_feature (222)..(222): n is a, c, g, or t
acctggcccttggagaccattcgtcaagccaggtggatggagagagaaagaaaaggctagagaagagagttggggtccacctcgagaatcaagaccatcagaagaacgtgactgggatagagacaaagagagggatagagacagtcaagatcgagaggaggacaaggaccctgaaagagacagggaccgagacagagatggggaccgggaggatcgcttcanaagacccagggatgaaggtggctggagaagaggaccagcagaagaatcttcaagctggagagattcaagtcgccgtgatgatagagacagggatgaccgacgtcgggaaagagatgatcgacgtgatctgagagacctgagagaaagaagggatttaagagatgatagagaccggagaggacctcccctcagatcagagcgagaagaagcaagctcttggagacgagctgatgacaggaaagatgaccggactgaagatcgggatttacctcgtcgtgttcctcccccagttctttcaagagagagagagagagaacgaga

SEQ ID NO: 2730 - DNA, 493 bp, Cricetulus griseus
cgttcacgctgttcctcctgctagtgcctctgggctgcattcatgctgcttttatttttgtgatgactatgtacacccagctttataatcggctctcctttgggtggaacaccgtcaagattgacatgagtgcagcccggagagatcctctcccaatcattccattcggattggctgcatttgctgcaaccttgtttgccttgggattagcactggggacaaccatagctgttgggatgttgtttttcatacagataaaaattattctcagaaacaaaacttccattgaatcatggattgaagagaaggctaaagatcgaattcaatattaccaactagatgaagtcttcgtttttccttatgatttgggaagtaaatggaagaattttaagcaggtatttacatggtcaggagtccctgaaggagatggactggagtggccaacaagaaaagactgccacccatatagcctaacaagagaacagttgaaaca

SEQ ID NO: 2731 - DNA, 578 bp, Cricetulus griseus
ctgcctcctcctagaccacatgtccgatgctgttgactggctgctttggagacagagtgcatacagtccccgacgggggcggggaccattctgtgtgcactgcaatcatgtgacaatttccttctgcactttgtaacccaagtcagctatacactaacttgtaaatatgcaaatatgcaatcctgggtaaggtgggttataaatcacatgcttcccctcggactgtatttcctcgttgttccagtgtgtaatgtgcctacactgggaggcgtggttcttctggtgtgaagaatgggagagaagaagggtgtgctgtctcctgagtactttaaatgtctacactacgaggcagacgctccgatgggaaaagagggcccggtgcttcgagttccgtttcagagaaaaatctacaaaactgaagacttttttgaaaaagaagacatgacaacggcttcttctttatttacgaggctttcccagctgtagcatcttgaggtttggagtgtctctgccccaaagcaaagctcctctctccacagccaacacggagttggctctcgggtcctgtagtgagagac

SEQ ID NO: 2732 - DNA, 521 bp, Cricetulus griseus
caccaaagcttgaggagagaggtggtgggggtggaattgggggtgggggcagacccatcaggggaagggctgaaggaggacggttaaagtagggcaacacgctggggggcttatccacacgagcagatgagggtacaaggttctcagagggagttgcccgtccatcagcagaatcactagaatctctggagtgggcccgtggaggtattcgtttccgagcctgcgcctcaaattgtgataagttctgccgggtggctggtctcacatccactttttctccattaagaacttttcctggcaagagttccagcaatttgtggacagaattttcagaggctaccaccacctcagcataccctttagactggccatttgcacggttctctgcaaattttaactccaccacatcatagactcctatagagcgaataacctggatcagctgctggtctgtagtccaccaggagaagctgcctacatagacagctgctcgtctactccgcaggccactgtatgtatac

SEQ ID NO: 2733 - DNA, 580 bp, Cricetulus griseus
gatgaagtgtcatctctgattagaacctctgtaatgagtaagcagtatggtaatgaagcctttctggccaagctcattgctcaggcatgtgtatctatttttcctgattcgggaaatttcaatgttgataacatcagagtatgtaagattctgggctctggtatctattcatcttcagtattgcatggcatggtttttaagaaggaaaccgaaggtgatgtaacatctgtcaaagatgcaaaaatagcagtgtactcctgtccctttgatggcatgataacagagactaaggggacggtgctgataaagactgctgaagagctgatgaacttcagtaagggagaggagagtctcatggacgcacaagtgaaagctattgccagcacgggtgcaaatgtcatagtaaccgggggcaaagtggcagacatggctcttcattatgctaacaagtacaatatcatgttggttaggctgaactcaaagtgggatctcagaagactctgtaaaactgttggtgccacagctcttcctagattgactcctcctgtccttgaagaaatgggacattgtgatagtgttt

SEQ ID NO: 2734 - DNA, 503 bp, Cricetulus griseus
gcatgcccttaaaatattccaacattatgatttcccagtttggttttccatatttcaaccatgtaagcaaaatatgaacaggaaacaaacgaaaacaaacccgaaacactgctaggcttttgagtggcttctccatgctgtgctttttgttttttaagaaacaccatgaattttgatctagtccataagcctctacaatagaaaaaacagaacatgccgtacttctagtatataaaacgcatgaacttcaaaagccaagaagcctgtcttacccatacaggcttgtttgtgaagagcttttgtccaaggttgtaacccttgctcatgatattattgtttacatctccagactttcagtccaatttgagccctggcatttgccttaaggacctacagcaaactgtttccaggaccagagactcaaaagtaacagcttccagcttttcagtgaaggttgattgtttttatttgaagcctgaaatgcttcttcaagtaatgcctgc

SEQ ID NO: 2735 - DNA, 523 bp, Cricetulus griseus
ccttgggtacatcacaccattcattgcctcttgtaaccagccaagcagacaccctccagtctgtgccatgcaattgaggaagggaaacatcacctcaccttaaataatgacagtctgtcatttattcccactctaaagtttagggagtttgttatagtccttaacttcctgactgcatttgtactgtattataaaaaaattatcctgtccacaaaataaaacataccctgatcaaagcagagtatactggcatggcatatctttgctattcaccgtggtgtccttcgccacagcatctaacctagagctcacagaacaggtctgccacttttaaagatagatgcctttgatcagagttcaactcaccaacggtatttggtgtttgaaatcagctctataactatttaagtccctagacattatttgatcatcttcaaaaaataatttcctgtgttttctttgatttgcctcaataaattaggatgatccacaccttaacactaccaaatctgacctttactgc

SEQ ID NO: 2736 - DNA, 549 bp, Cricetulus griseus
  misc_feature (109)..(123): n is a, c, g, or t
ttcaagctcttcaggcagtgattctgacagtgaggttgaaaaaaaggtaagttttactgtaccaagtactttcattgtaccaaatttgtagtgcatgaattcctttatnnnnnnnnnnnnnnnttttgaagtgaaaggcttgttagtctttttagataggttttgctatgtatccttgactactccaaccacctcagatttcccctagggctgggattatgcgccaatgttaggttcagaatgtaagggtggatagatggcagatggactgccagagtggagtatgagcttctaaacttacttgcagggttaaatcagccgtaagaggttgcctctgtgctgtacttcgttctgcctggagtcccagtgcattccaggaaagtgctcacacctgaactctgaccccagccccctttttactttgatttttgacagggggtcaccaagctgtccgagctgaccttagaatcttaaccaaatgcattatccacatgagtggcttagactaaacaggccttctattgagcactgctagtaacctaaagtcac

SEQ ID NO: 2737 - DNA, 498 bp, Cricetulus griseus
  misc_feature (464)..(464): n is a, c, g, or t
tctggatttcctcagtgtccattgttgtctcccttttcatttctgattttgttaattagcatgctctctctctctgccttttggttagtttggatagaggtttctgtaacattctttgtacattctgtaatgcatttatttggttgattgctagttatttataggtctgcctttttcttgtagactgtgatttccacatagagatgagctgttttctgtttttcagctctgctatctaagttagcatttggaaaggaacaaatattcagaatttagaggatacttttcctaacaagaaaacaatttaaattctcagtacttcttcattgagtattgagattattttattaataaatgtgactcttgagagtaagacattccttgtggttcatacttaccagttactcaagagttacccaccagggtcattgctgcacacactttcattaacccatcattgtggntttcttgcataggtgtatatcttttattcattca

SEQ ID NO: 2738 - DNA, 497 bp, Cricetulus griseus
  misc_feature (4)..(18): n is a, c, g, or t
agcnnnnnnnnnnnnnnnaacagccaccaggagcagatgctggcccagtacatggagagcttcactcagggctccattgaggcccacaagaggggctcccgcttctggattcaggacaaaggccctattgtagagagttacattggcttcattgagagctaccgtgacccctttggctcccgaggagagtttgaaggcttcgtggccatggtgaacaaagccatgagtgccaagtttgagcggctggtggcaagtgctgagcagctgctcaaggagctaccctggcctcctgcctttgagaaggataagttcctcacccctgacttcacctccctggatgtcctcacctttgctggctctggcatccctgccggcatcaacatccccaactacgatgacctgagacagacggaaggctttaagaatgtgtctctcgggaatgtgctggccgtggcctatgccacaaagcgggagaaactcacgttcttggaggaaga

SEQ ID NO: 2739 - DNA, 372 bp, Cricetulus griseus
gtactctgcaggctgcgtcgtcaccatctctggacgcatgaccttcacgagcaacaagtccatggagattgaggtcctggtggatgctgaccctgtggtggacaactcacagaagcgataccgggccgccagtgccttcttcacctatgtatccctgaaccaggagggcaagccgctgcctgtacctcagcttgtggtgagtgtcctaaaccatgggctgcccttaggtctaatgaagtcttgagaagaagcaccctgtaagctgtaagctataggctggacagatgggtcagacctctgagctcgtcaccatggctggcacactgtctggagctcctggcaatgtgctcatgtgctggagtgatgtcttag

SEQ ID NO: 2740 - DNA, 507 bp, Cricetulus griseus
ccatctcctatcaccccctccctccttcctctctcccccattttttctctcgtgcaccccctttttcttctgtttcttgtattctaagctgtttcattgcacagacactgaatcatacagtcaagtggtgtgttcacagacctagaaaattgcatctatcagctcttcctctccattggtgatgaggattacttccatctgttttcggatttacaaagacctatagtatggcaaactgagtaagagcagagagctgaggaaatcctccacaagtgccatttcaagcagagtaaacaagagtgtgtattataactgccttacagggccaggaatccccaagaaagggctgttgattggccccagagctcttattcagggttagaaactttgttttctatgttgacgtgcttactgtgttatcacactactactaaacagacgctgccccaggtgttggttgtatgaacataattgtaccacataattggattttttaataatgagcag

SEQ ID NO: 2741 - DNA, 536 bp, Cricetulus griseus
tcaaaagtggttcatctgattcctattggttataggtccaccacacccgaacccactttgtttgtaaatggaaagagcttttctggcctcctgaacactggtgcaaatgtgtctgttattactgccagtcagtggctttcagtgtgaccagagatgcaagggattggtcaaactcagagtcctaagcaaagtagtaatgaactttcctaaaaagatgaccatgaagaaatgttttggccatacattgttgcccacttgcctgtaaatttgtgggtccaaatgttatgaaccaaattggagtgtgtttgtatagccccattgcagttgttactaaacaaatgtttcaacgaggaggactgttatctgatcaggggttaggaagaaacaatgatggctgagtatcacctttgcttccttaagaaaggtctaatagagctggattagggtatttttaagagtggccattgagtagcctgtacttcatgcagatcctataactgatgatcctgtgtggatgaattaatggccccccacag

SEQ ID NO: 2742 - DNA, 598 bp, Cricetulus griseus
attgcctcctgatgcacttatcattgaatacagagggaagtttatgctgagagaacagtttgaagcaaatggatatttctttaaaaggccatacccttttgttttattctactctaagtttcatgggctagaaatgtgtgttgatgcgaggacttttgggaatgaggctcgattcatcaggcgctcttgtacacccaatgcagagtaaatacaaagtggactgtgcgtgcctcaaggaaaatcccgagtgccctgttctgaaacggagttcagagtctacagaaaacatcaacagtggttatgagaccagaaggaaaaaagggaaaaaggagaaagatgtttcaaaagaaaaagatatacaaaatcagaatattactttggattgcgaaggaacaaacaacaaaataaagagtccagaaacaaaacagagaaagctttctccactgagactatcagtatcaaataatcaggaaccagattttattgatgatatggaagaaaaaactcctgttagcaatgaagtagaaatggaatctgaggagcaaattgcagaaagataaaggaagatgacaagagaagaaagaaaaatggaagcaat

SEQ ID NO: 2743 - DNA, 523 bp, Cricetulus griseus
  misc_feature (222)..(240): n is a, c, g, or t
  misc_feature (463)..(478): n is a, c, g, or t
ggtcaagtcttacaaatctgacttctcttcctgaagcgggtttgcgaactttcctgttgggtaactttgaattcttgatctggttagccttaaccggggctaaccacagagtcctctcagccttgcgaccccggggtcgccactgtcccatgttgtccagagcagcaagggactccccatgtatctgtgactgacttgaatttctgatcctcttgcccgcannnnnnnnnnnnnnnnnnntcaggtctctggagcacccatccatctggagccatggtccatgccttcctcatccacaccttgagggccccgaatttggaagatacaggcctttgccgagtgctctactcctgtgtctttggtgctgagaagtcacccgatgatccacggccacatggtgcagaaagggacaggctcttccgcaaggaacagattttggcggtggccagacaggtggagtcannnnnnnnnnnnnnnnagcaagcatctggatgtccctccacagacctgcagcctcagttct

SEQ ID NO: 2744 - DNA, 556 bp, Cricetulus griseus
ctgaaattgatgcgttggtgagaagcaataggccccttgaagtggcccatccatttctgcccatatttgccttcctgctctgctcaggagttggcatccaagcagtccaggaagggcatgggtggggccccacaggcccttctcttgagtctcattctgcatgacagtgatgacaggcattgtactgggtggggagagttggggacagggactagaaaggcagggatgactgagtctgttgctgctctaggaccccagcagctgcagacatctgcttcaccaaggagctgcactcccatttcttcagcttgggcaaatgtgtgcctgtgtgtcgaggagatggtgtctaccagaaagggatggacttcattttggagaaacttaaccatggggactgggtacacatctttccagaagggaaagtaaacatgagttctgagttcctgcgcttcaagtggggaattgggcggctgattgctgagtgtcatctaaaccccatcatcctgccactatggcatgttggaatgaatgatgtcctccctaatagcccacccta

SEQ ID NO: 2745 - DNA, 473 bp, Cricetulus griseus
aggacatgaccacaggtacagagtctgaaaccaaggccttcatggctgtgtgcattgagacagccaagcgctacaatctggatgactaccggactcctgtgttcatctttgagaggctgtgcagcatcatctaccccgaggagaatgaagtcaccgagttctttgtgaccctggagaaggatccccagcaagaggactttctacagggcaggatgcccggaaacccgtatagcagcaatgagccaggcattgggcctcttatgagggacataaagaacaagatttgccaggactgtgacctggtggctcttctggaggatgacagtgggatggagctgttagtgaacaataaaattatcagcctggaccttcctgtggccgaggtttacaagaaggtctggtgtaccacgaatgagggagagcccatgaggattgtttatcgaatgcgggggctactgggtgatgccactgag

SEQ ID NO: 2746 - DNA, 553 bp, Cricetulus griseus
gcagcagagatgctcaagtccacggatcctcgattccagagatccaggtcggagccttcaccagacgtcccggacagcccgtccagctgctcccccaacaagaacaggagggcccaggaggagtgggccaagaacgaaggcttgatgcctcggagtctgtccttttcaggcccacggtacagccgtagccggacgccaccctctgcggccagcagcaggtacagcatgcggaaccgcatccagagcagcccgatgactgtcatctccgagggagagggagagcctgctgagccagcggacaacaaaacacacagggccccggactctgccaggggatgctctctggacaggctggaggggaaaaaagtggacccagacagcctgctgtgtagggaggagcccacttctgtggatggcatgggaagggcagagggcaaaggtctctcggagcactgtgggggtagtgaagagttagggtcagaacctgcctctcttgagtgaggttggagggaatgcatcactcggaagtctatgtggccttttcctggcttgt

SEQ ID NO: 2747 - DNA, 559 bp, Cricetulus griseus
  misc_feature (39)..(53): n is a, c, g, or t
gtggaagaagcattggtttgtgctgacggattccagccnnnnnnnnnnnnnnnactccaccgccgaggaggcagatgaactggatggtgagatcgacctgcgctcctgcacagacgtcaccgagtatgcagtacagcgcaactatggcttccagatccataccaaagatgccgtttataccttgtcggcaatgacctcgggcatccggaggaactggattgaggctctcaggaagactgtgcgtccaacttcagccccagatgtcaccaagctctcagactgcaataaggaaaacacgctgcatggctgtggcacacagaagggctccctgaagataggggagcagcggacaggctctgaggttatcggccggggtggccctcgcagagtggatggatctcggcagtcactggactacgtggagctctctccattaaccccaagctccccgcagcgcgtgcgcactctgacccgctccacttctgagcgtccacccaaacaggaggatctagagcgggacctggcgcaacgctctgaggaaaggcgcaagtggtttgag

SEQ ID NO: 2748 - DNA, 496 bp, Cricetulus griseus
gtccacccttcatcccagtacatggtcctggactgaagggacagggaagctgggagcaacaacatggcagcttctgcttcgagacacaggatggaatctaggctgcctcaatgaggcactgaagcctattgggtagggaggggccacagggccggataacgattgagtgtgaatatggggtgagggacaagagaggctatgtctaccagtagccccacctgtactgaggaccccaagtcccagtgtccttccccattccaaaccttgtgctggaggagagagtatacttgccactttgttctcaagtaggaaaattctaggcccttcatagggatccacctgggctagtcattccctgcccccctcccccaatcaggctccacatacagacaacaggctttgagtgcacaaggtttccagcaaggtctgatggtataaacttaggctcaccatcaaaaccccttctgcctgtacttcttggctctagcctcacccc

SEQ ID NO: 2749 - DNA, 521 bp, Cricetulus griseus
ctttgacttggtaaatgggtagatgctgcaggggagtaaattttagaccatcaagagatctctgcaaagaagagcaaaggattggagaaacttgttatttattcatagtaaagacaataaaggagacttaagacatcctgtgaaacaacaggatgtctggtgtcaccagcgccagcaccagtgacagaagaactagaccaggtgagagtctgcagattaagaagtgaatgccattggtttattgcagccagcagtttatatacaaccataacaagaggaaatggaaaagtaccacctgctagcagaacattcccatgccctatcgtaagcaaggaaatcacaacccctgcccaaggccaacgaagcaggaaggggatgggggcaaggcacaatgtttcaaaacaggaagtaacaaaaggtcagcacaggcctaaaggtcaggtctgtacccaacagtaaggattcacaacaggatgttgatgctagtggggggaggccaggaaaactggaggtacctgtgg

SEQ ID NO: 2750 - DNA, 579 bp, Cricetulus griseus
tttccccgtacctagtctgcagttatggcgtcgctcaccgtgaaggcctatcttctgggcaaggaggaggcggcccgagagatccgccgcttcagcttctgctttagcccggagccggaggcggaggccgaggccgcggcgggtcctgggccgtgcgagaggctgctgtgtcgggtggcctcgctgttccccgccctgcggcctgggggcttccaggcgcactaccgcgatgaggatggggacttggttgccttttccagtgatgaggaactgacaatggccatgtcctatgtgaaagatgacatcttccgcatctacattaaagagaagaaggagtgccggcgggaccatcgcccaccgtgtgctcaggaggcatcccgaagcatggtgcaccccaatgtgatttgtgatggttgcaacgggcctgtggtgggaactcgctacaagtgcagtgtgtgcccagactacgacctgtgcagtgtctgcgaggggaagggcctacacagggagcacagcaagctcatctttcctaacccctttggccacctctctgatggcttctctcatggccgctggctt

SEQ ID NO: 2751 - DNA, 418 bp, Cricetulus griseus
cgacagagcctgctggctcagagacactcctggatgccgtgctgaggaccctctacgacctgggagagacagaaggtgaaacagagcctaaaaggatcagaaagaagagagaaaaaaagagaggcgaggagacaatagcagatgagacagcagagccccttcccctgcctgaatgtcctgcaagaagccaaaagaagaatgcttccagctttttcaaggaactcaaagcagagctgcactctgctcctgctgtcccttcagctcccccttcaggaccagaagtccctgctactactgcagtatcgctctctcccctgaagaacagcggcaagctagtagaagtggtcgcgtttcaaagcagaagtaaaaaaagaaaaccaaagtcagatcaagatgagcacacaaagaataaaacaaa

SEQ ID NO: 2752 - DNA, 505 bp, Cricetulus griseus
gctctccatggccggcaacagcagatgagaagaatggaagtctacaatgaatttcttcgaaaaagggctgcagtgctgtttgctactgatattgccgccaggggattggattttccagctgtgaattgggttcttcagtttgattgtccagaggatgctaacacatatattcacagagctggtagaactgccagatacaaagaggatggcgaagctttattaattttactaccttcagaagaacaaggcatggtgcagcagcttctccagaagaaagtacctgtgaaggagatcaaaatcaatccagaaaaacttattgatgttcagaaaaaattagaatcgtttttagcccaagaccaagatttaaaagaaagagctcaaaggtgttttgtctcctatatacgttcagtatatcttatgaaggataaagaagtatttaatgtgagcaagttacctattactgaatatgcactgtctcttggtcttgctgtggcaccacggataa

SEQ ID NO: 2753 - DNA, 573 bp, Cricetulus griseus
ttctgtaatcaaaaagcaataacttaaaagtcactctttgtaatattgtaggtcagaattatacaggttttaccaaattgttacatttattctccatgctgccagcacttgtaactgtggaaccaaattaacttctgcccaaatggaagtatacatatatctgtatagttacatgcccctttacatgttcaacacttaagcacataaatattagtgtgattgtatgtttggagtttgcagtatagcataaaggacaagtagaatcgcacgttaagattacctaccaaagcaactacatgtggcttggagccagtcagtcaactgaggaatcaatttcacaaggattccttcatttgccacagccccaaatgaagccccaatcatcagatcatagaaaggcacaactaaactaactagccctcaactggtcatctaaatgagtgaaaccacatactccttcaagtgctggccacgtgtttggagtaaagggagatgtagcaaaccacaatatcacagcctcatgttaataaagacacccctttgagccccgctgctggcatgcaaaatttccag

SEQ ID NO: 2754 - DNA, 579 bp, Cricetulus griseus
aatgaagctgcgctaccccatcaacgaggaagcactagagaagattgggacagaacccgattatggggcactctatgagggccgcaatcctggcttctatgtggaggcaaaccctatgccgactttcaagtgtgtagtaaaagccctgtttgactacaaggcccagagagaggatgagctgacctttaccaagagtgccatcatacagaatgtggaaaagcaagatggtggctggtggcgaggggactatggtgggaagaagcagctgtggttcccctcaaactatgtggaagagatgatcaacccagtcatcctatagccagagagggagcacctggatgagaacagcccactgggggacttgctacggggggtcttagatgtgccagcctgtcagattgccattcgtcctgagggcaagaacaaccggctcttcgtcttctccatcagcttggcatcggtggctcactggtccctagatgttgccgccgactcacaagaggaactgcatgactgggtgaaaaagatcccggaagtggcccagactgcagatgccaagcttactgaggggaagatgat

SEQ ID NO: 2755 - DNA, 404 bp, Cricetulus griseus
  misc_feature (139)..(166): n is a, c, g, or t
tccaccaacaaggagggactccaataaggcctctgataaggttttggggaccgagtttctctgtattggattggagcctgcctgggatcccctgctgtagaccaggctggatttgaactcacagagatctacctgccannnnnnnnnnnnnnnnnnnnnnnnnnnnatgggtgtgttccaccaatgcccggctctggacttaagttttctgcattttgataagtatggatctatctgcagtcttctacacaccagaatccagttatgccagcaacatttgttgaagaacatttctttgaagctttcatcactgagctcatccttcagattcatactcagtatgttcaggggactcggccaagatctctctgcccttgctgatccagattcacaatgttcaagca

SEQ ID NO: 2756 - DNA, 402 bp, Cricetulus griseus
agtgaaggcagtgaaggtgatgaagaagatgaaaagatgtcagatgagaaagattcagggaaaacattggataaaaagccaagcaaagaagttagctcagactctgaatctgactctgatgacgaccgaacaaaagaagagcgggcttatgacaaagcaaaacggagaattgagaaacgacgacttgaacatagtaaaaatgtaaatgcagaaaagttaagagctcctatcatctgtgtgcttggacatgtagatacagggaaaacaaaaattctagataagctgcgtcacacacatgtccaagatggtgaagcaggtggtattacacagcagattggtgccacaaatgttcctcttgaagctattaatgaacaaactaagatgattaaaaattttgacaga

SEQ ID NO: 2757 - DNA, 490 bp, Cricetulus griseus
agctgaacatcacggcagccaaggaaattgaagttggtggtggccggaaagccattataatttttgtaccagttcctcagttgaaatcgttccagaaaatccaagtacgactggttcgtgaattggagaaaaagttcagtgggaagcacgtagtcttcattgctcagaggaggattctgcccaagccaactcggaaaagccgcacgaaaaacaagcaaaagcgccccagaagtcgcaccctcactgcagtgcacgatgccattcttgaggacttggtcttcccaagtgagattgtgggcaagaggatccgtgtgaaactggatggcagccggctcataaaggttcacttagacaaagcacagcagaacaatgtagagcacaaggtggaaactttttctggtgtgtataagaagctcacgggcaaggatgtcaattttgaattcccagagtttcagttgtaaagtaaatgactgaataaatgtcattcata

SEQ ID NO: 2758 - DNA, 526 bp, Cricetulus griseus
  misc_feature (465)..(465): n is a, c, g, or t
tgggtgaaggatgaaggtggcgacagctgctcaggttgctccgtgcgcttctccctcacagagagacggcaccattgcaggaactgtgggcagctcttctgtcagaagtgcagtcgatttcagtcagaaatcaagcgcttgaaaatctcatccccagtgagagtctgtcagaactgttactacagcttacagcatgagagagggacagaagatgggcctcgaaactgccgagactgagggagaccacggatggcccagggagctctttgggtcctgccacggcttcgaaggcattgaagcagtctctatttaccacacacctcttcacgctgagtgtttgaagtgttgagttcaaagggatcattggatcacgggttccaggccagtgactggcaggcactatgcagtgaccagcacaagaagaaagcaaggtggttcctgagggtgtttcagaacctgggtctnccatagtgtagccatctccaagagcaaactccgtgcgccccaactgtctttcttgcatctc

SEQ ID NO: 2759 - DNA, 570 bp, Cricetulus griseus
  misc_feature (10)..(28): n is a, c, g, or t
  misc_feature (203)..(215): n is a, c, g, or t
atcattgccnnnnnnnnnnnnnnnnnnntcttggggagctcccatttcctgggagcaggccgacccctttgcatctttaaaaaaagtgggccaagattccatagtgctgctgatttgtatcacggtgtttctctcctacctaccggaggcaggccagtactccagcttcttcttatacctcagacagataatgaaattttccnnnnnnnnnnnnncagcctttatagcagtccttggcattctgtccattattgcacagaccatagtcttgagtttactcatgagatcaattggaaataagaataccatcttattgggtctgggatttcaaatattgcagctggcatggtatggctttggttcagaaccttggatgatgtgggctgctggggcagtcgcagccatgtctagcattacctttccagctgttagtgcccttggttcacgaactgctgatgctgatcaacagggtgttgttcaaagaatgataacaggaatccgaggattgtgcaatggtctgggaccagccctttatgggttcattttctacatattccatgtggaacttaa

SEQ ID NO: 2760 - DNA, 116 bp, Cricetulus griseus
attcatgtatgggggcatctgtctgtgtcttaagtgtataaaggagtgtgtatgtgcatgtgcccccttccgttgtgtgcctacattgggtaataaagggggttgatcccttggag

SEQ ID NO: 2761 - DNA, 470 bp, Cricetulus griseus
  misc_feature (280)..(280): n is a, c, g, or t
aaaacaatttgagtggcttattgatgtttttttttctttaaaaataaaattttctcttacagcaattctggggtcagaagccatggagtcagcattatcaccaaggatattattgaatacccaaataaaacgaactgatacatatttctccaaaaccttcacaagaagtcgactgttttctttagtaggctaactttttaaacattccacaagaggaagtgcctgcgggttccttttttagaagctttgtgggttgatttttttttcttttcttttttgnacatttttaattgcagttttaaagtgaatcgtaagagaacctcagcattgtgcacgataagagaatgtgtcagtatttcagggttctacattttatctgtaaaatgtgacttttttttatcacaacaaaagtaaaatgttgctttgtacctggtgtcttttattaagcatttactcccccatttctcaca

SEQ ID NO: 2762 - DNA, 600 bp, Cricetulus griseus
  misc_feature (108)..(146): n is a, c, g, or t
gaaggagcctcctctcaatttttaaagttttgaaaaaatgatttgacttctgtatagtaccatttagagatatgaaaatatagtctaatgaggtaaagaaggaaaggnnnnnnnnnnnnnnnnnnnnnnnnnnnnnnnnnnnnnnnaaagaagccccaattatactgtaacccacttttcaaacatggggttcatgagtgcattatcctacaactggagcaatgactctagccttgctgtgtaatcaccatatgtacataatggagaggactacatcacagttacagtagggccaagcttgggatgctgtgtgtgctgctaatgtctggtgaaacagttttggaaatccttggagaaagggtatcctgaaagtctccttttataatcttagacttggaatttctgtctctttttgttactttactgcaggctctcaactctctgaggtcctcaaggtttagaatgtaactgctagaagttgtgctgcccttcaacaaagttttttttatgtcataatgaactatgaaagaaactacttcagtctgctgatcagggtacctttagtgtggggtgctaattcctttgcaaaatttctgaaat

SEQ ID NO: 2763 - DNA, 581 bp, Cricetulus griseus
  misc_feature (61)..(87): n is a, c, g, or t
gaaagcccagatagaagaagagaaaaaaatgcagagaaagaaaagcagcagagaaatcagnnnnnnnnnnnnnnnnnnnnnnnnnnnggaaatcggaggccccaaagaagaacttatcccagagaaattggccaaggttgagactccattggaagaagctattaagtttttaacaccgttgaagaatttggtgaagaacaagatagaaactcatctttttgcctttgagatttactttaagaaagaaaagtttcttttgatgctacaatcagtaaagcgggcatttgctattgattctagtcatccctggcttcatgaatgcatgattcgactctttaattctgtgtgtgaaagtaaagacttacctgaaacagttagaacagtattaaaacaagaaatgaatcgtctttttggagcaacaaatccaaagaattttaatgaaacttttctgaaaaggaattctgattcattgccacacagattatcagctgccaaaatggtatattatttagattcttctagtcagaaacgagcaatagagctggcaacaacacttgatggatccctcaacaacagaaacc

SEQ ID NO: 2764 - DNA, 488 bp, Cricetulus griseus
  misc_feature (14)..(41): n is a, c, g, or t
tggcctgcggccgnnnnnnnnnnnnnnnnnnnnnnnnnnnngccgcagctgtagatacagttaatgccacacccatgtcagggtcaaaagaatgagtttggaggagccaaagaagatgaccagagaggactggaggaaaaagaaggagctagaagaacagagaaaattgggcaatgcacctgcagaagttgatgaagagggaaaagacatcaaccctcatattcctcaatacatttcttcggttccgtggtacattgatccctcaaaaagacccacgttaaaacatcagagaccacagccagagaaacagaagcaattcagttcctctggggaatggtacaagagaggtgtgaaggagaattctataactaccaagtaccgcaaaggggcatgtgaaaattgtggggccatgacacacaaaaagaaagagtgctttgagcggccaaggcgggttggagctaaatttacaagcactaacatcgctccag

SEQ ID NO: 2765 - DNA, 259 bp, Cricetulus griseus
gccatctgcgcatgtgtgcacgccttcagggctaccctagctgctggtccaacacctttatgggctcgccctacaggtttgctatttgggggcagtggccgcaattgtgtgggtagcacgccccaagtgacagtcgcatggaggaatgcgactccgaagacttctccacgtccgacgaggatgaagactacttgccagaaagtggagagtacagtgaaaatgatgtcaatgaattagtgaaggaagatgaagtggatgg

SEQ ID NO: 2766 - DNA, 291 bp, Cricetulus griseus
  misc_feature (17)..(32): n is a, c, g, or t
ccacccgtatcactagnnnnnnnnnnnnnnnnacgacatgttttagaagccacctatggtattaacattataaagcctggagaagatgaagacccctaccgacctccaacctcagaagagctgttgacggcttatggatgcatgcgagggtgcatgacagcacatggacaaccagaccagcctcgatccgcacgttacatcctgaaggactatgtcaaagggaaactgttgtactgccacccccctcctggaagagatcctgtggcgttccagcatcaacaccaacaactt

SEQ ID NO: 2767 - DNA, 535 bp, Cricetulus griseus
  misc_feature (10)..(28): n is a, c, g, or t
tggccccacnnnnnnnnnnnnnnnnnnnctgaagcggttgggcaacactgatgggctgcccagggtgcagctgtcttctcctgggcagctcttcacagcactggagagagactcggtccagctgtgtacgtgggttggggaactcttcctggaactacacaatggcacctacactacccatgcccagctcaagaagaggaatcgggaatgtgagcaaatccttcatgacgtggagatgctgagcagcctggccctagcccgcagtgcccacttcctatacccagcagcccagttgcagcacctctggagactcctactcctcaaccagtttcatgatgtgttgactggaagctgcattcagctggtggcagaagatgccatgaactactatgaagacatccattcccatggcaatacgctgctcaatgctgcagccgcagccttatgtgctggggagccaggtcctaagggcctcctcgttatcaacacgctgccctggaagcgcactgaagtgttggcactgcccaagcctggt

SEQ ID NO: 2768 - DNA, 217 bp, Cricetulus griseus
tgcctagttgtaaaattgccgccagtttgggctctgtatcccccattactaggagatttcagttggtgtccctctcatagattccagggagtttccactgcactaagtttctacatctttcccccgccatgccttccagttctgtcatctctcccagttctctctctctctctgtctctctgtctctctctctctctccctccctcccctccctttt

SEQ ID NO: 2769 - DNA, 524 bp, Cricetulus griseus
gcaggtcttgtctatgagtatacattgggcgaagagaagttcacctttattgagaaatgtaacaatccccgttctgtcacattactggttaaaggaccaaacaagcacacactgactcaaatcaaagatgcaataagagatggcttgagggccgtcaaaaatgctatcgatgatggctgtgttgtcccaggcgctggtgcaatagaagtggcaatggcagaagctctgattaaatacaagcccagcgtgaaaggcagggctcatctgggagtccaggcatttgcagatgccttgctcattattcccaaggttcttgcacagaactctggttttgaccttcaagaaacattagttaaagttcaagctgaacattcagaatcgggtcaacttgtcggtgtggacttgaacacaggtgagccaatggtggcagcagagatgggtgtgtgggataactactgtgtcaagaagcagctgcttcactcctgtactgtgatcgccaccaacattctcctggttgatgagat

SEQ ID NO: 2770 - DNA, 451 bp, Cricetulus griseus
tcatggaacacttgactgggttccttctgtgttcactgtggaaaacctcaggagaccactgcaatgagcagtgttagcacttaaacccctttaaaaatttttcaaaccaatgtgtgaatctctgtcatcctcaggccctaactgctgggagagacttcatacttgtttttgcccatttcctaacaggttgtctggaggtcatgggtatttactgaggtcagtcagagcccaatgacagtgacgctttccagagagttgtgcctgccttctgccctcagccattactgctggtgttttactaaaagctaatcagttctcctacttttcatctgtgtgggtttttgttggtttgttttttaaatccccgttattctggatgtgttttcccccttcctagacaaggcccctctgtcgaagagtctcttgctggtccccagtgccctgtcccttc

SEQ ID NO: 2771 - DNA, 535 bp, Cricetulus griseus
cctgctctgacgtgtcagcgtgctgtgaagtagagtctgaggtcatgatgagtgactatgagagtggcgatgatggccactttgaagaagtgacaattcctccactagattcccaacagcatacagaagtgtgacactcagactcctccccaaagtgcctggactttaaagaacctagagagggtatcaatgatctccgcattgttctttgcagcagtcttatgcgcttctcagtgagctgcagtgggcatggctgcacggaatcacacgcctcttgacatgctagccatttccagttcctaaccgactgtacctgaggggttctcatcgcctgtgccatttctgagcatcttttcgtatttagatgtgtctctgttaaaataatgaaaccgaaatcagtcctgtcatcctgttagcatgattcatgtatttatatagattcgattttattttaattttgctttttttgtgtgtgtaaattttctgtacagatttgattttttttttcctttcatagttttaactatgttttcag

SEQ ID NO: 2772 - DNA, 584 bp, Cricetulus griseus
  misc_feature (5)..(79): n is a, c, g, or t
  misc_feature (85)..(154): n is a, c, g, or t
  misc_feature (165)..(221): n is a, c, g, or t
  misc_feature (246)..(300): n is a, c, g, or t
  misc_feature (325)..(464): n is a, c, g, or t
  misc_feature (489)..(510): n is a, c, g, or t
cgctnnnnnnnnnnnnnnnnnnnnnnnnnnnnnnnnnnnnnnnnnnnnnnnnnnnnnnnnnnnnnnnnnnnnnnnnnnntatgtnnnnnnnnnnnnnnnnnnnnnnnnnnnnnnnnnnnnnnnnnnnnnnnnnnnnnnnnnnnnnnnnnnnnnntagtgtcaaannnnnnnnnnnnnnnnnnnnnnnnnnnnnnnnnnnnnnnnnnnnnnnnnnnnnnnnnatcccatctctcatactcctacctnnnnnnnnnnnnnnnnnnnnnnnnnnnnnnnnnnnnnnnnnnnnnnnnnnnnnnnttcttaatcaatactttagctatannnnnnnnnnnnnnnnnnnnnnnnnnnnnnnnnnnnnnnnnnnnnnnnnnnnnnnnnnnnnnnnnnnnnnnnnnnnnnnnnnnnnnnnnnnnnnnnnnnnnnnnnnnnnnnnnnnnnnnnnnnnnnnnnnnnnnnnnnnnaaagaaaccgactacaacaaaaaannnnnnnnnnnnnnnnnnnnnnttctacaaactcttctaatcccaacattttcagcaaacgagcttatactattttatattttatttgaagccaca

SEQ ID NO: 2773 - DNA, 463 bp, Cricetulus griseus
  misc_feature (255)..(279): n is a, c, g, or t
ttatggagactaaaaaagcaaaagaaagtgaagacaaggaaaaccttcccaaaaggacatcttctggtggcttcaaatttactttctcccattcccccagtgctgctaatggaacaaacagtgcaaatagtaagtctgtggtggctcagacaacatcagcaagttctaatgggtcatcttccaaaactacaaacttggctgcatcagtgacagccactaagggaagtttggttggcttagtggactatccagatnnnnnnnnnnnnnnnnnnnnnnnnnaatcatctcccaggaaaagacctcgccttggctcatagatacttgctggggcactcccaacacatggtcttactaaagtgctgcagctactcactgagctcaagtctgaatcggaaagctttctcatggaacttaacacacatggagtagcagagactcagttatcaggtagaaaagtgtagtt

SEQ ID NO: 2774 - DNA, 551 bp, Cricetulus griseus
gattgatctggtggctctggaaatcattctgaccactgcttcagccaccataggagtggcaagatcccatctgccaggtgaagggcagaccactgacttttgacctgtacctgctggtccttctgacttatagagctttcttgctagctggaggccttgtgctcccagccatctgacctcctccacgtttctgcaggcccagcatgggtgaattcaatgagaagaaggcaacatgtggcacagtctgcctcaagtacctgctgttcacctacaactgctgcttctggctggccggcttggccgtcatggcagtgggcatttggacattggtactcaagagtgactacattagtctgctggcttcaaacacctatctagccacagcctacatcttattggtggctggtggcgttgtcatggtgaccggagtcctgggctgctgtgccactttcaaggagcgacggaacctgttacgcttgtacttcatcctgctcctcatcatcttcctcctggagatcattgctggcatcctggcctatgtctactaccag

SEQ ID NO: 2775 - DNA, 475 bp, Cricetulus griseus
cactctgaagatcttcccgatgaagtaagggagcgatgggagacattctgcacgagctccttaggagagacgaacaagaggaacacggtagatctagtaggtttcacaaggttacatctctgggggttttggttctctcagccattgcctatttacttggaaaaatgttcaagaccgtctgttaggcccagtgaatgtgcaccacagataagcttatgactctgtacattaagaggacagtattcacagcattcttgatttgtcagtcacctcctagtgaccttgcatgacaaaaaggtactaaaaaagccacccaggtccactccagtccatatcagtgtcttgtctcacctgggtcctgctccctaagtacctctggaccatcctctgccttactcttgttctgtggctttgtacattggacctcatgtcactctgagtgcttagaatcccagactcctgtggatttttccca

SEQ ID NO: 2776 - DNA, 543 bp, Cricetulus griseus
gagtcaggattctcgatccagatacaatggccccgacgggatggagcctgaaggcgtcatcgagagtaactggaatgagattgtggatagctttgatgacatgaatctctcagaatccctcctccgtggtatttatgcctatggttttgagaagccctctgccatccagcagcgagccattcttccttgtatcaagggttatgatgtgattgctcaagcccagtctgggactgggaaaacagctacatttgccatatcaattctgcagcagattgagttagatcttaaggccactcaggctttggttctggcccccactcgtgagttggctcatcagattcaaaaggtggtcatggcattaggagactacatgggtgcctcttgtcatgcctgtattggaggcactaatgtgcgtgctgaggtgcagaagttgcagatggaagctccccatatcatcgtgggcacccctggccgggtgtttgatatgcttaaccggagatacctgtcccccaaatacatcaagatgtttgtactggatgaagc

SEQ ID NO: 2777 - DNA, 542 bp, Cricetulus griseus
cagctggtgtagctcggctgtgcaggcggttctgtcatgtgactccgtacacctttaagaaacaacctctgcaccaatatgtgcgaagaccacctttcctgatgtgtgcacccttgtttaacccagtgcgattcatgtttattcaaacacaagacaccccaaatcccaacagcttaaagtttataccaggaaagccagttcttgagacgaggaccatggacttccccacgccagccgcagctttccgctcccctctggccaggcagttattcaggattgaaggagtaaaaagtgtcttctttgggccagatttcatcacagtcacaaaggaaaatgaagaattagactggaatttactgaaaccagatatttatgcaacaattatggacttctttgcgtctggcttacctctagtgactgaggaaacacccccaggagaagcaggttctgaggaagatgatgaggtggtggcaatgattaaagaactgttggacactaggatacggcctactgtgcaggaggatggtggtgacgtgatctac

SEQ ID NO: 2778 - DNA, 477 bp, Cricetulus griseus
tggcccgctggtttgtcggcagagctggtcggcgggcgatcctccaggacggccatggcagagccacagcccgcgcccagcggcctcacggatgaggccgccatcagctgctgctccgacccggaccccagcaccaaggactttctaatgcagcaaacgatgctgagaattaaggatcctaagaagtccctggatttttatacgagggttcttggactgacgctacttcaaaagtttgattttccttcgatgaaattttccctctatttcttggcttacgaggataagaatgacatccctaaagacaagagtgaaagaacagcctggacgttctccaggaaagccacccttgagtggacacacaactggggcactgaagatgatgagacccaaagttaccacaacagcaactcataccctaggggatttggtcacattgggattgctgtccctgatgtctacagtgcctgtaaacga

SEQ ID NO: 2779 - DNA, 378 bp, Cricetulus griseus
  misc_feature (5)..(29): n is a, c, g, or t
ccttnnnnnnnnnnnnnnnnnnnnnnnnnaccaccactgactggcttcttttcatcttttgaataaaacattacataagcctcattctgatgttcacactggctcctaaggactacacctttcttaactgtgtggaacttggggagggattatgggatacacagctgtccttcctgtaactttgggtgggaactaaaagttcaaatacaaaagacaagaattgtcaagagcaatgaatagaacagtgtgagtttattacaaaccttgtgatcacagctcatcatgtattccttattcctttcaggctttgaaccacaaacatattgggatcgaatgcaccttttccaggaagccattgcacacaggtttgtccattag

SEQ ID NO: 2780 - DNA, 500 bp, Cricetulus griseus
gccgctcgctgcaaggctgtggccgaggattggctgttgaggggctcatagcactttctccggggaactgtggctgcgttccaggtggctcggccaggatcccggctgcgttctgcccgcctcgggcagccaaggcaaccatagcaccggtgatggggaccccagcctctgtggtgagcgagccacccctatggcaggcttcaactgagtcccggggacgaaagcaggcctctgccaacatattccatgatgcagagttggtgcagatccagggcctgttccagcgcattggggaccagcttgctgaagagcgatcccagatcatctgggaatgtgcaggggatcaccgtgtagctgaggccctaagaaggctgcgcaggaaaaggcccccgaggcagaaccactgtggccggctgagagcaccagagcttggttctacagcagctgacccacaggacagcaccactgacatggcttccggcgagcagtttgggaactcc

SEQ ID NO: 2781 - DNA, 528 bp, Cricetulus griseus
agggcggtcgcggcggtcgctagggcagcagtggcaggtgacagcgggtgtcggcctccggcagcggaatgttggctaccagggtgcttagcctaattggcaagagagctatttccacctctgtgtgtgttcgagcacaagggagtgttgtgaagagtgaagactatagtcttcctgcttatatggatcggcgtgactaccccttgcctgatgtagcccatgtcaggctgctgtctgccagccagaaggccctgaaagagaaggagaaggcagactggagcagcttgtctagggatgagaaagtccaattgtaccgcatccagtttaatgagagctttgctgagatgaacaggagcaccaacgagtggaagacagttgtgggcctggccatgttcttcatcggctttactgcacttgttctcatttgggagaagcactatgtgtatggccccatccctcatacctttgatcgtgactgggtggccatgcagaccaagaggatgctggacatgaaggccaaccccattc

SEQ ID NO: 2782 - DNA, 491 bp, Cricetulus griseus
gaatccaaatggactaccgacactacaaatgactatgcagtaattcagcactgccccatgtggtgaattgcaagttgtgtagcactagcagcggacatgattccatgtggggaggaatggatgtagccatcttatcaggcatcttgaaaaggtgtgttcatcaaagagctgcttttcagctacctttaacaattgacacgagtgggattcgaagtactgcttgcaactggaaaggcaggtcaaccacttggcaaagaaatggaacaatggatggacacagcagaggataagacaaccttctatttcaaacttctagactctacatcccttaagcagttcactggtactgtctaaagtcaagaatgggttagataaccttgttctaggagtgccaaacacaatacctacaaagagatgatcccagtgcgtgaccgagtgtactgaaaaaatattgaaaggggtatgaaagattcaaatctatagagaaaacg

SEQ ID NO: 2783 - DNA, 349 bp, Cricetulus griseus
  misc_feature (300)..(339): n is a, c, g, or t
gtgttggttcagtttctagcagaccaagtactcccacactaggcacaccaactccacaaaccatgtctgtctcaactaaagtaggcactccaatgtccctcacaggacaaaggtttacagtacagatgcctgcttctcagtcccctgctgtgaaagcttcaattcccgcaacatcagcagttcagaatgttctgattaatccatcactaattgggtccaaaaacattcttattactactaatatggtatcccaaaatacagccaatgagtcagcaaatgccctgaaaagaaaacgtgaannnnnnnnnnnnnnnnnnnnnnnnnnnnnnnnnnnnnnnntatgataatt

SEQ ID NO: 2784 - DNA, 552 bp, Cricetulus griseus
tgaaagctccacttctcaggagcaaagtaacctgcacacaagccagtgctcagttgatgcagttcttcctggaaagcacttggatgtgaaaattaaccagaagggctttaggaagaggaaagccaagggaaaaaaacatttccattccaggagactcacccataagaaataagcagaagaactatgaggggcagcaagtcagagatgacagcaattccagggtacatggttctatacaaaaccacgaacagggttctgagaagagtgaagctagggacagcaaagatgccattatacttctagaacctgcaaaaattaaccaaaaagccactggctctgaaaggggtaaagtcagggacaatagcaatgccaggacactggatgcaaatgtaaagattcacaagaaagttcctagacaggataaaagtggggaaagcagcaatgccctggcacaaggttcatctataccgaatcacctgatgggggctgaggtaggaagatccagggacaggaactgttccttgacacaggcttcacctgtaagaattctcc

SEQ ID NO: 2785 - DNA, 418 bp, Cricetulus griseus
aacactgctttgaattggatgaatgaatttgagaagtggcaggagggattaaatgacaatgaaaagcttgaggtctctgatttagcaaccgagaaacttcctcacgagagaacttatatgctacagaggtggcaagaatatggaggccttatgatcatagggcctgagatgtatagaaatcttgctcaaagaaagaatgtgaagagtcggaaacttaaagaaatatttaataaagctttagttgatccaggccctgattttgttgcttgtgatgaaggccatattctaaaaaatgaagcatctgctgtttcaaaagctatgaactctatacgatctaggatgaggattattttaacaggaacaccacttcaaaataacctgattgagtatcattgcatggttaactttatcaaggaaa

SEQ ID NO: 2786 - DNA, 457 bp, Cricetulus griseus
  misc_feature (152)..(170): n is a, c, g, or t
  misc_feature (273)..(298): n is a, c, g, or t
taaggaaactctgaaccaggagtcatggaaaccaaacccaagctctactactttcacggcagaggcaggatggagtcaatccgatggctgctggctgcagcaggagtggagttcgaagaagaatttcttgagacaagagaacaatatgagannnnnnnnnnnnnnnnnnncctgctttttgaccaagtacctttggttgagattgatggaatgccgctgacacagtcaagagccatcctcagctaccttgctgccaagtacaacttgtacggnnnnnnnnnnnnnnnnnnnnnnnnnnttgacatgtatgctgatggcaccctggacctgatgctaatgatcgcccaggctccatttaaaccccctaaggaaaaagaggagagctatgctttagtagtgaagagagctaagactcgttacttccctgtctttgaaaagattttgaaagaccacggag

SEQ ID NO: 2787 - DNA, 522 bp, Cricetulus griseus
  misc_feature (255)..(298): n is a, c, g, or t
gactctgcctcagaatgttaggaacaggcatgcatcaccacatccgtctaaagttgtgcctcagctttaaattagatgtcatatattggtccaggaaggctattttgactttcttagaaccctgacgtgggcttagttttttcaagtggaaatcataatttattttggttttggtaatatgtggatctgcttttgtaaacagagaaaagttgcacagactgatgttggctgaatgtttattattttccaagggannnnnnnnnnnnnnnnnnnnnnnnnnnnnnnnnnnnnnnnnnnnagtcatgacagaactttaaattccttttaaacgttttattcgcagaagtgttagaggaagctcttgtaggaaatgacagtgaaggcccactgtgtgaattgctttttttcttcctgactgcaatcttccaggcgatggctgaagaagaagaggatgtagccaaagagcagataactgatgctgacaccaaaggtcagagttcaacatcattgctgattaaacta

SEQ ID NO: 2788 - DNA, 497 bp, Cricetulus griseus
atcctgtgagtcccctgatgtcctggacagacaccagaccatggaggtgtcttgctaagcagatgctcccctggaccatgcaagtccctcctccttgaaatgaccactccataatagaacatttcatcctgcccgctggcctccactttcaccccatgcatggccacagaacctttctctaatagcctggatttaccattctctccacacacccctttttgtatataccaagaaccacacccatgccattactgtaacattccaacatcttgatccgatctgatctccatatcttctcttgccagcctttccctattctccctcaaatatgtatctgatgagactctttgattcctaactccatgtgtgtgcgagcacgcgtgtctgtgtctgtgtgtgcatagttctgtgattttagacatgctttcttgtagcgcttctacaaagggatttttttgcattctcagtggcgtttttaagggaaatatgcagagcag

SEQ ID NO: 2789 - DNA, 467 bp, Cricetulus griseus
ctactgacagcaagcgacagaagccttctatccattcaaggcagctgatttctaagccactaagctcatctgttagcaataataaaagaatagttagtacaaaaggaaagtcggttacagaatataaaaatgaggaatatcaaagatctgaaaggaacaagcgtctagatgctgatcgaaaaattcgtctgtcaagtagttcttctagagaaccttacaagactcaaccagaaaaagcttgtctacggaaaagggattctgaaagaagggccaagtctcctacaccagatggttctgagagaattgggcttgaagttgatagacgtgcaagcagatccagccaatcctcaaaggaagaggttaactctgaagaatatggctctgaccacgagacagggagcagtggttcttctgatgaacagggcaacaacactgacaatgaggaggaaggtgtggaagaagatgta

SEQ ID NO: 2790 - DNA, 424 bp, Cricetulus griseus
attgaccctcccggggaagtgaggacacaagttaaccaagcttctctttaaccctccttttaaactgaccgtcacggccttttgctgtaccatagccactctggagcgttagtgtgctgccccttcttaccgctgaccatgtccttaacattcacaaacagttgtcctttccttgactctgccatgttcttcccaatgagtatttcacatgatggtagactctcagtgtcctgtcagctctttgttcccagtcaccaagatggttgttcctctggaagactgatgatgtgacatctcatctcaacataaaatgcttgtgttaccatgtcttggccataggtggttacatccctctctgtgatgttttcaaaggctaaaggatttatttgatatatatccttaacttcttcagttgtctgcttgc

SEQ ID NO: 2791 - DNA, 351 bp, Cricetulus griseus
gcgagtccgcggcttccggctggagacgatgatgcaagaagtaagccccagtgcgtctcttattgacagaaccatcaagatgagaaaagaaacagaaactaggaaagtggttttagcctggggactcctaaatgtatccatggctggaatgatatatactgaaatgactggaaagttaattagtacatattataatgtgacatactggcctctgtggtatattgaacttgccctggcatctctcttcagtcttaatgccttatttgatttttggagatacttcaaatatacggtagcaccaacaagtctggtggttagccccggacagcaggcactgttagggctgaagac

SEQ ID NO: 2792 - DNA, 440 bp, Cricetulus griseus
  misc_feature (4)..(18): n is a, c, g, or t
actnnnnnnnnnnnnnnntctttcttgatgctgttcccatcagaccactgaagaggacacttcccgttccctagtgaaagatcaccttttccagcaagagacagttgttaccagtgagccttatagaagctcagacataagacctttaccctttgaagatctgaatgccagaagagtctacttgcaaagcccagggaaccaggtaagaaaatgcatactattcatatgtatagcatatttagagaacctggtatgctacagaaaaacacaaagctctgtaaaagggcacagggatgtggaggatgagttttgtagacagggagggaatgtcttagttcagggtgttgtaatacaacatgaactgggtagctcaaacagcaggatttttgtttgtttgtgttatcctacagctctagcagttagactggctgtggtaaggg

SEQ ID NO: 2793 - DNA, 473 bp, Cricetulus griseus
tgtcacaacaagattattgatttcccatttaagtggaattcgtcattatgaaaaggacatgaaaaaagtgaaagaagagaaagcttataaaaccatgaagatgatgaaaggggtaatgccatctgaccaagagaaagaactgaaagaaaagggaggcaaaaatcatgagaagagtgactcccctaaagcaaaagccgagcaggagaatgaagtcaggtgtcggcactcaaagccaggcaagaaaaagaatgattttgaccaaggcgaattatatttgaaagaaaaatttgaaaattcaattgaatccctaagattatttaaaaatgatcctttattctttaaacctggtagtcagtttttgtattcaacatttggctataccctgctggcagccatagtagaaagagcttcaggatataaatatttggactatatgcagaagattttccatgacttggacatgctgacaactg

SEQ ID NO: 2794 - DNA, 152 bp, Cricetulus griseus
ccccacttcaggcaatgccagccctgtaattccatccttgccactttacccagacccagtgaggctcatccggtttggaaccaaatgtcctgaatgtcacaagcagatgcgagactatatggtcctggctgcacatttccagaggacaacag

SEQ ID NO: 2795 - DNA, 517 bp, Cricetulus griseus
ttatgctttgttaaaagaactcttaattcagatctttagtacaccacggtatcatccaaagagtcaaccattcgtggaccatgtgtttacattcaccattctggataacaggatatggtttcggaacttccagattatagaagaagatgctgctctagtggaaataggacctcgatttgtcttaaatcttataaagatttttcagggaagctttggaggaccaactttatatgaaaatcctcattaccagtctccaaacatgcatcggcgtattgtaaggtccatcacagctgcaaaatacagagagaaacagcaagtcaaagatgttcagaaaatgaggaagaaagaaccaaagactattcttccacatgaccccactgcagatgtctttgatataccagcagaggaaaaaccagtagaaatacagtgggtgaaaccagagcctaaagtagatctcacagcaagaaagaggaggatttacaaaaggcatcggaaactgcagcagaagatgaacaga

SEQ ID NO: 2796 - DNA, 545 bp, Cricetulus griseus
tcgcccagccagcaccatagaagacccttccttgcacacctgcaagcctgcagaggcctccctggagcaggcaatgccataccctgctcagaagactcagttaagaagccatctgggatatccaaggtgatgcagggacaggacttcacctacagagacatcaacagcagccctgccgttacccacaacagcttggcgtcactgcatctccttggccacagcttttaggaaaataccacctagtccccccccaacccccagtgcctcgccagcatgagaacttgtctcttcaggtctggaacagagactcagcaggtttgagaaggagaacccagaaggaccacatggtaacccccaaaccagagtgaaagttgtgatgagtctgaaggcaaattcctcccacatccactcagccagagccatcgtgaagactttggcgttcctggtcccctcaccacagtcccgataggcaacccctgcgggatcctacctctggctgacagcttcttggtattaatgatcttggctgcatattcatggccggt

SEQ ID NO: 2797 - DNA, 578 bp, Cricetulus griseus
agggcgaccgggtaccccaccgcgctcagcgccgccgagggctcggtgccaggtccggtagcagcacgccggggctcttcctcctcggagagggcggtgccggtggtctccggcctcagcagccccggggtagcttcaccctgtctgtgttctgcagcgggttaaggaaagccgccctgtggggcactagcgaggaggccatcgctatggtgacggagcaggaagtggaggccatagggaagaccctggtggaccccaagcagccgctgcaggcccgcttccgggccctgttcactctgcggggactcggtggcccgcacgctattgcctggatcagccgaggcttcgaggacagttctgccctgttgaagcacgagctggcttactgcctgggccagatgcaggactcgcgcgccatcccagtgctggtgggtgtgctgtgcgacaggaaccaagagcccatggtgcgccatgaggctggggaagcactaggggccatcggtaacccggaagttctagaccttctgaagcagtattctaccgaccctgtggttgaggtggccgagacatgtcagttg

SEQ ID NO: 2798 - DNA, 600 bp, Cricetulus griseus
gattcaaagtagtatgtaagattatagagcttatggagggtgtcgctgatgattttaagtctaaaaccctcaggcgggttgttactctacagacaaaaagtcctgaagggcgctttcctgatctgagcgcagagctgaaccgatgggatacagcttttgaccatgagaaggctcggaagacaggactcatcactcccaaggcgggctttgatcctgattatgaccaagcacttgctgacatcaaagagaatgaacagagcctcctagaatacttggataaacagcgcagtcgcattggctgcaggaccatagtctactggggaattggtaggaaccggtaccagttggagatcccagagaattttgctacccgtaacctcccggaagaatatgaattaaaatctactaaaaagggctgtaaacgatactggaccaaaacaattgagaagaaattatctaatcttataaatgctgaagaacgtagggacatgtctttgaaagactgcatgaggcggctgttctataactttgctaaaaattacaaggactggcagtctgctatagagtgcattgcagtgttggatgtcttactgtgcctgg

SEQ ID NO: 2799 - DNA, 430 bp, Cricetulus griseus
  misc_feature (86)..(103): n is a, c, g, or t
agaaccatccatatgctgagacatctaccagggacccagttttgctatagagagtaaatggacactggtgtaatcccttacaaatnnnnnnnnnnnnnnnnnnttctgaatgatgtaatatttaaagttatactatgcttgtttgaacatggtattacacttatcaaaaatcttggcagtttaagatttattaaagtgtattatgtgcaagcattccgtagtttaataaaactattgtttgttctttaatgttaaaaacactgatccttaaaatatgattttttttattttcatagatcatttatttcaaaatggatgaaatgaatggcctttcaggcttagggacatagttcataagtagagtagttgccaaggatgtgtgaggctaaatatttgatccctgaaacttaagaaaacaacaaagatcttc

SEQ ID NO: 2800 - DNA, 506 bp, Cricetulus griseus
ccctgcactgcaatctgaatgagcataaccaccacctcatcaatgacttcactatcaagcagatgaggcaaggagcattccttgtgaacgcagccagaggtggtctggtagatgagaaagccctagctcaagccctcaaagagggaaggatacgaggagcagctcttgatgtgcacgagtctgagcccttcagctttgctcagggcccattgaaagatgcaccaaatctcatctgcacgccgcacacagcctggtacagtgaacaagcatcactagagatgagggaagcagctgccactgagatccgccgagcaatcacaggtcgcatcccagaaagcttgcgaaactgtgtcaacaaagaattcttcgttacttcagctccgtggtcagtcatcgaccagcaagcaattcatcccgagctcaatggtgccacatacaggtatcccccaggcattgttggggtggctccaggagggcttcctgcagctatggaagggatcatccca

SEQ ID NO: 2801 - DNA, 339 bp, Cricetulus griseus
ggtgctggacctggatttgtttcgtgtggataaaggaggggacccagccctcattcgagagacgcaggagaagcgcttcaaggacccggggctggtggaccagctggtgaaggcggacagtgagtggcgacgatgcaggttccgggcagacaacttgaacaagctgaagaacttatgcagcaagactattggtgagaaaatcaagaaaaaagagccagtgggagatgacgagttcatcccataggacgtgttgaatttcgatgaccttactgcagacacgttatctgccctgaaagtctcacaaattaaaaaagtccgactcctcatcgatgaagccat

SEQ ID NO: 2802 - DNA, 198 bp, Cricetulus griseus
cctggactggtgttgtggtgtttgcccagtactatgtaggagaaagtggaggctcccaggaagagagctggttctcctttcattcccagtcctgaaagatgatgcaattaaagctgtgcctccagtactcataagacggagttcctggttcacctgccataggattggagtcacttcctgacacctgtgtaacatgta

SEQ ID NO: 2803 - DNA, 433 bp, Cricetulus griseus
  misc_feature (122)..(122): n is a, c, g, or t
cacctggccacggagtacgtgttctcggacttcttgctaaaggagcccaccgagcccaaattcaaggggctgcggctggagctagcggtggacaagatggtcacatgcatcgcctttggtcnttctctgctgctcatctcgctggccttcgctcaggagatctccatcggtacacagataagctgcttctccccaagttctttctcctggcgacaggctgcctttgtggattcatactgctgggctgctgtgcagcagaagagctccctgcaaaacgagtctggaaacctcccactgtggctgcacaagttcttcccctacatcctgctgctgtttgccatactcctgtacctgcccacgctgttctggcgcttcgcagcagctccgcatctctgctcagacctgaagtttatcatggaggaacttgacaaag

SEQ ID NO: 2804 - DNA, 322 bp, Cricetulus griseus
gctctggacttcttggagtactgcctccaaacttgcccaacaactgtggacttgtaggactacagccaccaaatgttacaaatcctgctggacttatgggaacacagccaccgattggacctcaaaacttacctcccttaactatcccaactcaaagggtgcctgcattgccgatgttagacatccgtccaggactgataccacaggctcctggaccaagattccctttactacagcctggaatacccccccagcggggtatcccttccccagcggtacttgatgcatctcttcatccgccaccccgtggacctttccctcc

SEQ ID NO: 2805 - DNA, 342 bp, Cricetulus griseus
  misc_feature (23)..(45): n is a, c, g, or t
tccctgatttataacatgaacannnnnnnnnnnnnnnnnnnnnnnaaggaaagaaagaattcggccttctttctcttctaatcttattccacggatctgattcaggccatgtcacaacacaaggctacataaaaacctcaagtggaggtcccagggtctgggggggtttaaatagggggtgatggaatgtttcggtaagggacccttttcttcaaatcctctcaaaggggaatttctaacagttccaacttaatgggctaacagctttgggggccttgcctctttcctaatctttagggcatgggagcccagcctccctaaccctaaaaccctgaaaatgga

SEQ ID NO: 2806 - DNA, 527 bp, Cricetulus griseus
agcctgcgagggagggtggcatccactccccaagtccggtgccccgatgcccagcgccaacgccagccgcaagggtcaggagaagccgcgggagatcgtggacgcggcggaagattatgctaaagaaagatatggggtgtcctctatgatacaatcccaagaaaaaccagacagagttttggtccgagttaaagacttgacagtacaaaaggctgatgatgttgtttgggtccgtgcaagagttcatacaagcagagcaaaagggaagcagtgcttcttagttctgaggcagcagcagtttaatgtccaggctcttgtggcggtgggagaccatgcaagcaagcagatggttaaatttgctgccaacatcaacaaagaaagtattattgatgtggaaggcattgtgagaaaagtaaatcagaaaattggaagctgtgcacagcaagatgttgagttacatgtccagaagatttatgtgatcagtttggctgaacctcgacttcccttgcagctggatgatgccgttc

SEQ ID NO: 2807 - DNA, 528 bp, Cricetulus griseus
  misc_feature (309)..(325): n is a, c, g, or t
tacaggaattggattcaagcaatggggccctgctgcccttctatgacccagacaccagtgtggtctatgtctgtggcaagggtgactccagcatccggtactttgaaatcacagatgaggctccctacatccacttcctgaatacattcaccagcaaagaaccccaaaggggtatgggtagcatgcctaagaggggcttggaggtcagcaagtgtgaaattgcccggttctacaaactccatgaacgcaagtgtgaacccatagtcatgaccgtgccaagaaagtccgacctcttccaggatgatcttnnnnnnnnnnnnnnnnnacctgaggctgctcttgaggcagaggattgggtgagcgggcaggatgctgatccgatcctgatctcactacgggaagcatatatgcccagtaaacaacgggatctgaaggtcagccggcgaaatgtgctatcggacagtcggcctgccagttccagccgccctggagcctccacagctaccacaatttctgatgttttcagtg

SEQ ID NO: 2808 - DNA, 399 bp, Cricetulus griseus
  misc_feature (203)..(228): n is a, c, g, or t
ctctcttcttcatggagctgtccttcggccagtttgcaagccaggggtgcctgggggtctggaggatcagccccatgttcaaaggagtgggctatggcatgatggtggtgtccacatacatcggcatctactacaatgtggtcatctgcatcgccttctactacttcttctcgtccatgacgcacgtgctgccctgggcttannnnnnnnnnnnnnnnnnnnnnnnnnactgtgccggtgtgctggatgcttccaacctcaccaatggctcccagtccactgccctgtctggcaacctctctcacctgttcaaccacaccctgcacaggaccatccccagcgaggagtactggaggctgtatgtgctgaagctgtctgatgacattggaaacttcggag

SEQ ID NO: 2809 - DNA, 359 bp, Cricetulus griseus
cttcattgctgtagtttggattaactcccctcccgcctaccccttatcccaaactgcatttataatttgtgactgaggatcatttgtttgttaatgtactgtgcctttaactttagacaactttttattttgatgtcctgttggctcagtaatgctcaagataccaattgtttttgacaaaataaatttactgaacttgggctaaaatcaaaccttggcacacaggtgtgatacaacttaacaggaatcatcgattcatccataaatataaagaaaagtggtagcctgcattaaggctttgatacttgcagattggggaaaaacaaacaacaaacgtcttgaagcatattaatggaatt

SEQ ID NO: 2810 - DNA, 421 bp, Cricetulus griseus
  misc_feature (63)..(101): n is a, c, g, or t
  misc_feature (148)..(170): n is a, c, g, or t
tgacactttccaccaaagatgtcctagtcctcttacataagtggagcctcattgaaagagacnnnnnnnnnnnnnnnnnnnnnnnnnnnnnnnnnnnnnnncaccaagacaaggacctaatgaaaatgctcaaggataagaacaagcnnnnnnnnnnnnnnnnnnnnnnnggcccacgaggccgaaagaagaggcctggagaagtggaagagactgctgagcctgagctggaagcatctagtttggagacgtgcaagaacctcctaaagtccacactgactcactggggtccagttgtccccatccctgaacccactcaagagtctgtgggccaggctacccccagaagtgaaacactgggctctacgcatgctgctctttccttggtggccaactgggtgctgcggtcattggctgagtg

SEQ ID NO: 2811 - DNA, 457 bp, Cricetulus griseus
gaagtgtaaaggaataagctgaaggctgacacttttgcagggaaaacagagctggtgggacatggccaagcaaagttcaggcagtctctctagccttccattcttggagggcatggaccccacctactctgtggctgctgaattggctccatttagttgcagtggtaggaaacggtagtctggcttgactgggccacttctacaatgtaagcaagtgacaggttctccatgacatcgttgttttaaagtttcccacaaatacttatacttactaaagtggaaccattgggaagtctttccagtattccattccaggatgcttttgttcatttctctcttgtcttttaaaataagaaacttgagatgactttgatcatcagcgacttgtcccccaggctgataatgcctggcttgaaaatagaagatgggctctcaaaccatacaaacttacagcaag

SEQ ID NO: 2812 - DNA, 357 bp, Cricetulus griseus
acctttattcagccaaacatgaggttaagacaactgggagttgcaaaaaaatttggtgtgttgtctgacaactttaaaggcaaaagaattgttctcatagatgattcaattgtgatatgtcattactatctcacccatcataaaactcctcaaagaatccggggcaaaagaggtgcacattcgagttgcttcaccaccaataaaatatccttgcttcatgggaataaatatacccacaaaagaagagctgatagccaataagccagaatttgaacatcttgcagaatacctcggagcaaacagtgttatatacttgtcagtggaaggactggtctcatctgtgcaacaagagatcaa

SEQ ID NO: 2813 - DNA, 182 bp, Cricetulus griseus
  misc_feature (143)..(169): n is a, c, g, or t
gggacaccctgcagctggcgttcatcgacctcagacaagtaagatgtattgactccttccacttactgttctcttgccttattagtttatttttaatggtaccacaatgcttgtttgccctgaaaacccatctttggaagatnnnnnnnnnnnnnnnnnnnnnnnnnnnggggggggccttt

SEQ ID NO: 2814 - DNA, 323 bp, Cricetulus griseus
ccacccctctaagctttccaaacctcttcactcacctactttctcttcaaatacaacaagctcttagaactttgggtgtttgaagagaaacacacatcttaggacttttgcatctggtttgccttctgcccgggtatttcctcctggagttctgtcccattgtctcattttactatcttcataatcagaattactttctggacttgccgtctaggtatgtgctgacagatctgtgaccagttccactccaatagtatataaattggatgtggagggcacagggaccttgtctttcttagccctgacggggagggcatataaga

SEQ ID NO: 2815 - DNA, 528 bp, Cricetulus griseus
aagagggcaagatgaatggggaagactaagttctctttgcaaatggagtgcttgtagaatgtacactgaaatgccttataaaagcaaacaaatccacaaagtggtcaggactccacccacttcacagttctcactcagtgaaacaggaatacagaaacggcacacaaaatacagaactgggcagataaagcctacctgtttaactaaggcatagagggacggaatttctattttattcatttcaccattctggcccttgaaaattggtaagactgtcaccaggatataaaacctgcattgagacagcacaagtatgaaaaagcaaaagcatcccccaaaccaaaacaaacaaaaaaaccaaaactctgtgtaaaagtcctttggtgccgactgtctcttctggacaagtctgcaggatgcccctggaggtaaacccagttaagtaggcagcaaaactccttcccacttgctctaagcatctttctacccaacagcctggcacctgccactgaccctgtttctacccag

SEQ ID NO: 2816 - DNA, 291 bp, Cricetulus griseus
aaagccacagtagaaaccctgtctcggaaaaaaaaatcataggccctaaccaaaccacaaaggttttatttgtaaaatatgctgacagagtgaatcatgaagtcacttctgagaagcccatgtatgctgtattactaaataaaccaaagaaatgatagcaatgctaacgtatggtgaaaagaccaaagaccttggtgagcttcgagctcattggcagtcatttggttcagctgcatcgtggaaagaacacagtcacacctatagattaggacaagtctctctctctctctc

SEQ ID NO: 2817 - DNA, 355 bp, Cricetulus griseus
caagatgagagaggagcatggaacagagagcttttttcagcacttcctcccccagcacttccaactggagctggcccagcgggatgaggacgcgaatgtcaacatctatagggccagacacagggaagtgagacctgccggacatcaccccttctgttgacctcagcccccgtctcagtggaggaatggcctgtctccagacccataaacatcaggacaaaagaaaaggatggattgtctgtcttctttctccccctctagcaatttgttcccctagatattcctgggaaggctctgttaaaaaattagcagagccctagaagcattgagtttaaagcccaacacttgtcttcag

SEQ ID NO: 2818 - DNA, 294 bp, Cricetulus griseus
gaggaagctgcccctttgcagaactgtactgtaaccatttctcctttataaatattattttcacatggctgattgtatacagggcttgtaataattttaacactgtgctgtgaaagagcttaggattctccaccagaggcgacttgagaagcacccgagagtggagtgttctttctgtgactttacttcttcctacgtacattaagtctattcgttctgtttcagcctcctgtataagaagtaccgtattttctgcccatcatactttgtaataaaacttgaacatgtatagac

SEQ ID NO: 2819 - DNA, 495 bp, Cricetulus griseus
ggtgtctgctgaagtggaaggagcctgggccttagggtcagatagccgtggttttgtataacatctgtgggtttctgtcagaggctgctggttgtaaagcaactttgtattttttctaagtccattttctcactggtaaatgtcactacaaggatcatgtattgtgattgatacatacactttaaatatataatttcctttctggccagtcataaatggcagggatagacttaaaaccacattattggattcctggtttttaaaggcatttgcttttttaaacatgacagctttctctgctgcatgccagacatatttaccacatgtgaccaaggctctgtagaaagtcacacagcactcagaatctatgaattgagacatggaagcctatttattgtcctgaaagaaattcaccattcacttttacacagcaatcattcatagagtatgctcatagctctcaaaacctcatagacgtgtatatacttgctcact

SEQ ID NO: 2820 - DNA, 360 bp, Cricetulus griseus
  misc_feature (58)..(73): n is a, c, g, or t
  misc_feature (75)..(88): n is a, c, g, or t
aactttgaagtaaggccagggcagaggcagtatactgcctctctgagttcaaggtcannnnnnnnnnnnnnnntnnnnnnnnnnnnnngcagagctacacacgagaaaccctgtcttttttcttttaaaaatttaaaaaaagaaaaaaaaacttttaaataaactttttctcacattataatactttgggccaggtgcatagctcattgatggagcacatgtacaaggcatgaagttcgggttcaattcccttcactgtgaaaagtatgtgtgtgtatgataaatgagaaaaaaaacctaaggtgttgactaagggaccatattctctaaacagtgtgatcaattaaacatggggaatgt

SEQ ID NO: 2821 - DNA, 313 bp, Cricetulus griseus
caagttctctgtcatggaggcaatgtcactgtctctggtctcggagctcagggaacaccccagggtcccgaatccaacagaaaatgggcctcccctcagtgactggggctgggctggacgcccctttgcatgacctcatgaagcacatttgtgcttgatagtaggaatttttttttttaaagcaatctggagaaagagtcttctatacctgtcttataggttttatgagaacttcactaagatggacaggataaaggttcatgtttgccgttttatacttctatatttgaagtttataataaaattctatttg

SEQ ID NO: 2822 - DNA, 578 bp, Cricetulus griseus
  misc_feature (468)..(494): n is a, c, g, or t
ttctatagaggaggggtttacaaagagaagctctgggggttcctcagagaggaagctaagaagccctgacacatggagccaggggcagggttattgtagatttacaggtgaaaggtgagagtatctagaacagatcaatacaaatgaggagaaatgggcaaaagccaactatattttggagatagaactggtcagatgtgattagatataatacacaaggcaaagaaagcaattaaggattgctgctgaatttctactttgtttagctagctgatcattgatgttaattaatgatacagggaaacctgttaagacagtgaatcttgggataggaggaatcagaaattcattttgaccctgttaattctatgattcctgagtaggaaggtgccaagtataatgtttaccatgaatccagatagaagacgtctttgctcaagatgaagattagatgtcactttgtcatannnnnnnnnnnnnnnnnnnnnnnnnnnctgttattaagtatgtagaaaccatggggttttctgatgctctttatctctgagagcagtaggccttctgtttcctggaagtct

SEQ ID NO: 2823 - DNA, 579 bp, Cricetulus griseus
ggcccgagtgcagtttggagcaaataaggtacttttcttcagaactccacagacatgcagagatgtcccaatgctagtggaggtcacgtgtcaggcatatttctgtcttgattatagttttaaattttagttatttttatgtctatgagtgttttgcctggatgtatgtgtctgtggaccgtatgtgtgcctggtgccctcaaaggccagaagagggcatgagataaactacagttagagacagttgtgagtcaccatgtgggccattggaattgaactcgggtcctctccaaggacagatgctcttaactgatgagccatctctccatcccctgtctcaattctttttgaggtactttaattttcatgctttagaaaagtgaaggtaggaaacacagatgtgtaagagaatatgctcattgcagtcacttaaccccacttagtctttgatattcccagaaacgtttagtttgagctcactgttaatgaaaggaaaaccttgctgtactttgaggtttctccaaactgaggtcatgttagtatcactaattttcagtcagaatatacatgctggactgt

SEQ ID NO: 2824 - DNA, 600 bp, Cricetulus griseus
tcgacccagcgtccgctaatcttgtcccaatcatcagaagcattagagatcaactcctgagggaaattttccttgtttgaatagagtattggtgatacaggacttgagctggtgcacttccttgggcgtcttgatgggaaagccaaacagtagtatagaacagggtggacccacacatcaagcattgctctcttccttttcttggttcacgttaagggtcagggtcacagttctaggaagtcctccccccagcacacacataatcatagttgattacaccactgcctaaagcaccttatcttccctttgcttcctgttgaggctcttgcccagccacttctccttattctatctcaatttcagtatttgtttactcttgatcatttataatacaatctcctttggtgatcctattacatgcaagataacaccatataatcatttaataattttttctataaaattctctacaaaatcttagagtgcatagaaggaaacttttttgcaagtaacagatgtatcttttcattcctgtgttcccaggacctagttcaatgcctcatccataggatgaattctttttaaattaaattgtaaata

SEQ ID NO: 2825 - DNA, 581 bp, Cricetulus griseus
cagcagccctgcctcttcacagttctctgtgtgtagtgaagatcaagaagcaattcaggctcagaaaatatggaagaaagccattatgcttgtatggagggctgcagcaaatcatatatatgctaatgtgttcctgcaacctgttacagatgacatagcacctggctaccatagcattgtgcagagacctatggatttgtcaacaattaagaaaaacattgaaaatggactgatccgaagcacagccgagtttcagcgtgacattatgctgatgtttcagaatgctgttatgtataatagctcagaccatgatgtgtatcacatggcagtagagatgcagagagatgtcctggaacagatccagcaattcttggccacacagttgattatgcaaacatctgagtctggaatcagtgctaaaagtcttcgggggagagattctacccgaaaacaagatgcttcagagaaggacagtgtccccatgggctctcctgccttccttctctctctctttgatgggggaaccaggggacgccgctgtgccattgaagcagatatgaaaatgaagaagtgaagcctca

SEQ ID NO: 2826 - DNA, 581 bp, Cricetulus griseus
tgtggttccgagtttgagctgctggtgcgacagtctgcgcgatgcccaaggccaaggggaagactcggaggcagaagttcggttacaacgtcaaccgaaagcgtctgaaccgcaatgctcgtcggaaggctgctccgcggatcgagtgctcccacatccgacatgcctgggaccacaccagatccgtgcggcagaacctggcggagatggggttggccgtggaccccaacaaggcggttcccctccgtaagaggaaggtaaaggccatggaggtagacatggaggagagacccaaggaccttgtgcggaagccctatgtgctgaatgacctggaggcagaagccagcctcccagagaagaaaggaaataccttgtctcgggacctcattgaatatgttcattacatggtggcaaaccatggggaggactataaggctatggcccgggatgagaagaattactatcaagatacaccaaagcagattcggaataagatcaatgtctataagcgcttttacccatcagagtggcaaaccttcatggattctttgcaaaataagaagatggaggttgactgagtg

SEQ ID NO: 2827 - DNA, 567 bp, Cricetulus griseus
tcagaaggagtaggtgctgagatagtgaagcatcgccaaatggaagcaagtggctcgtttacaatctcccctaccatggctaccatgaaatggggctgtaagagtgtccctggaacctcctgctgatactgccactttgtatttctatgccaggaatcatggcaaagtgctgaggaacctgtactccatggaagtaatatgctcatgaacattcagtcaaggaaaaaaaaggcaattaatatgtgtcatgggtgtgtttataaactaagtactgctaagtttagcatgtcagcaggtttcttttatgtcttaggctaacttagagaaaactaaagaaaagtcttggctatagggaatgtagactcggggggccaagtgtccctgccagatccttgaagcatttttactccagctcctaagaatactatcgcatgctatttgagtgcttttgttcctggagctctgtcagtgacagggaaactctagatgtttgtgatgaggcaacaacatagccaggaaggctgagttttcacccagatgtggcatcggagatgagccaggttaata

SEQ ID NO: 2828 - DNA, 579 bp, Cricetulus griseus
  misc_feature (292)..(306): n is a, c, g, or t
ccctcctgttatcagtaaggattgggacaacgaatactgcagcaatgagtgtgtggtaaaacactgcagggatgtattcttggcctgggtggcctctagaaatccaaactctgtggtgtttgtgaagtagcctttctgtttctccaagcctggaagattcatctgccagacacaagtccaagagcctgtatttgaaacacaagctgggcttcttctggtagtgcctgacctttacacccatagtccttcatgtccccatcttttctttcttcagcagaggccagactatagnnnnnnnnnnnnnnntactgtaatttggaattgtttttcactctcgactacaagcaaaattaccaggttatagcacaggaaagggtaaagggaatatggaagcaaaccatagtgggttattagaagaaatgtgtccggtaaattatcataggacttgcttcagatgttattggaaaactccttagctccgtccctacgaggaaacaccactgcgatattaagcttagggctacagctcattggtaaagtgccattgggtttattcccaatttatagaggaatgaatat

SEQ ID NO: 2829 - DNA, 510 bp, Cricetulus griseus
cagcatcagactcttaagtctacagcatatgcattatgggaagatacagtgtagtattcaaagtgtttagtttgccatttcaataaagtttaaaaactagccaggtttttacagtccaagaacttagaattgaaatagtgtaggaaagggactcagactggtttctgcctgttggatgattagatggtgtttattgtagaatgttactggaaagtggtgtgtctttaacaatacacattgaggttatttcctccttgacatctttttccagttggtcaaggttgcagattcagaggataaaaaaaatttcattaagaatgaattcatgtttactggtaacttattttttaaaaagtgatctgccaaagaaccaagaacttcagatactaatgaaattgtggggggaaagatttttaaaagaatgttactcacttttcactttctagttgatagaacctatcctatataatagacattcaagcaaagtgcatatattaagaaaaatgtgga

SEQ ID NO: 2830 - DNA, 569 bp, Cricetulus griseus
gtcatacaaacttacttttccccagaaaatagttcctgagggacaggtgggagactgtgtgagcaaatgtgtgtcatggctgtcctgaggaaagaggatagcctttacatacagattaaagttcaagaatgcttttctgtacaggcaggaagctttaggagctagatgtctctctgcttactcttgtgaccatggaacaaaggtttctgattcacacagaaaggtggttaatctgggaagactgataaacaaggaaagttcaggcctcccccaccctgagaattgtcagggcagccatcacagaaggtcgttatttctatcatcacttctgtgagttacacatttgtgtgcgtgtgttctgcatgtgtaggtgtatgtgaggagccatcttatttattctttgtgggatgggaaaatatttagttaaaatacactggcaaatcccactgccaacagacgagggaaatgcaggttgtcactgctcacccctaaggtgtcttcttagcttatagagcccacccaaggagcatactagccaaacaggacattcaaacaaaatctgcataatc

SEQ ID NO: 2831 - DNA, 422 bp, Cricetulus griseus
tcatccaactgtgcctggacctgaccacgacagtccagaaggattgccttgtagcagaaatggaggataaagttttaaatgtggtcaaggttttgaatggcatctgtgacaaaacaatgcgctcaacttcggatcctgttatgagccagtgtgcatgcctggaggaagttcacttaccgaatgttagacctggggaaggcctgggcatgtacatcaagtcaacctatgatggattgcatgtgattactggaaccacggaaaattctcctgcagacaggtctcagaagattcacgctggtgatgaagtcattcaagttaatcggcagactgtggttgggtggcatttgaaaaatctggtgagaaagttgagagagaatcctacgggtgtggtgctgctactgaagaataagcccacggtcttt

SEQ ID NO: 2832 - DNA, 580 bp, Cricetulus griseus
aaatatacagtgtggtgaaggttgactgaagaagcccagtgtgtccagttaaaacagaaataaactaaatcttcatcaacaaagacctgttttgtgactaccttgaattttctcagacttattggcctagtaatccttcagaaacagcatacttaagaacacctcttcccatgcgcctgtacccacaagatgtatttcaacactaaagcgtttgtattgtgattggattaagtatgtattcagttgttctcagtgaagggcaaatttaaatattatgtgcatttgtaaatatgatagctataaacttttcaatacttctaatggcagattagaggaggccataatactcctgagagactggacagttgattgtaaataggattttctaggctcggtaggtggaaagaattatttttctttgaaggaaataactttttatcatggtaattttgaaggatgattcctatgacatgttcactgggggaatgtggcttttaaaatcttgtatcggttgtaattgttcatatcttcttactcttctgtgttgacttcattattcccatggtatcggccttttaaa

SEQ ID NO: 2833 - DNA, 580 bp, Cricetulus griseus
cagcccgcctggggtcagcccacgcggagcccaggacatctggggctgtacagccaccatgcccagtgaaactctctgggaaattgcaaaagctgaagtggaaaaaaggaaaagtcacggaagtgaaggagatggagctgaaattggagaaaaatctgttttcttccttggcagtaaaaatgggggaaagacgactattattctaaggtgtcttgacagggacgagccagcaaagccaaccttagctttggaatacacatacggaagaagaacaaagggacataacacaccaaaagacattgctcacttttgggaactgggtggaggaacctctctattggacctcataagcataccaatcacatatgataccttgaggacattttctgttgttcttgttttggatctttccaaacctaatgatctttggcccaccatggaaaatctgttgcaagcgacaaaaagccacatagacaaagtgataatgaagctggggaagacaaattccaaagcggcctctgagatgaggcagaagatgtggagtgtcatgcagaaggaccatccggatcgtgagttaatc

SEQ ID NO: 2834 - DNA, 579 bp, Cricetulus griseus
aattaccctatgactaaaatacactgttcattttactgacctgtgtagcttcgtctcttttaataagtcatatgtccaaaacaagaaaaaccatagtccactttttgcaagtttccccactgtgcacattgctgaagctgcttaggaagggaggtggcgacttggccagcgttcttgacctccattgcatggccctcgaagtagtgtagattgttgccagcacagaggccaatgaacaacaaatgtctttcttaatacagttgttgtcctttgatctgagtagagattgtttgcaatggaaaacaatttgctttaaacttcttgtttttgtaaggtggatttagttttaagcttctgtcccctgagaactacattcatagacaagtcgctttttccagacatagcatataactcttctgaggtaattacttttgtaaggaagctgttcataacataagttattattattattgaacgcacgtggatgtgaaggatttttattgaaaaaccaaatggtttttcctttttctgtcgaatgaacccaatgatttgtctcctgggttatgtgactgtgaacac

SEQ ID NO: 2835 - DNA, 580 bp, Cricetulus griseus
  misc_feature (442)..(460): n is a, c, g, or t
tatgtccttagttacgagtttacacatcggcacagtcttgttattttgtctccctgtgattcatcttaggctgccatgaaaagggaggatgagccaggctctggagtggtatgattcagacaaggagttcagctgcttttagtctgttgcctcacttgctagacgggggaatccgagcacacacctcctggaggttgagctagtgggagactgggatagtagtaggatcctgagtccatggccagcctgggctacaaagtgaattccaggccaagtcagtctaggctacatcatgagaccctattttaaaaaaagagaaggaagagctcaggctggtggtacagcccagtaatcctagttacttgggagtctgaggcaggactatagagatcctgtctcaatgtctcaaagaaagcaagaggggggttggtggcagggtgannnnnnnnnnnnnnnnnnngcactcaagatgcatatgcacgtggatatctgtgatttcgaggccagcctgttctacagattgagttccaggacagacagaactacatagagaaaccctgtcttatataaaaatttaaat

SEQ ID NO: 2836 - DNA, 579 bp, Cricetulus griseus
cacagggtaaaagctctctcgtacctcccctgcttccagttcctgccagttccagtgtgggaccctttccagttgtactggctctgtctgagcatggactccctcctctagcagtttttctctctccaccctcttgtggactgtgtccacccccagggccaggtcctgggatggtccctccaactgaggcggctgcagcagctgcagcggctgctgcggctgctgccctttgtgctttgaccaactgggcttttgctttgatgtctgccagagttctggctcctgttctgtaaggactagtgatggagattggaaaacgagccctgggagagacctgcgatgtagaaaacagcatcggggagattctggagactgggatcttgataggtggtacttttcgcacttggaccctgtcccctctattaataaaaggctgctgagagacctgaaatggctgctggtgctggtgattctcattgatacctggtcttctctcacatctggtagtgggctcttcttggataagagatgatttccctttgatactttctgggatctgatcaacaagatttgcaggag

SEQ ID NO: 2837 - DNA, 172 bp, Cricetulus griseus
  misc_feature (97)..(151): n is a, c, g, or t
taccagtgttcttatatcactcaaggcaggcctggggcctgttagaccaaacacttcactacaggagactataggaaactttttaaggagagagatnnnnnnnnnnnnnnnnnnnnnnnnnnnnnnnnnnnnnnnnnnnnnnnnnnnnnnncgtgcctgtgttctctgtggg

SEQ ID NO: 2838 - DNA, 580 bp, Cricetulus griseus
ttttcttctgacaatgaattcctttgggtaccctctgagcccagtgctgtgctcacacaagaagccatataataaaaactaaaaaacgttgacattgtccaaatagcaaaaacatatccacagtttgctttataccacactataataatcagtctctttatgattctgcagtccctctgcttgtaatatcacctgggagatggagctcttagcaaacaggaaaagcatttttttagacccctcctccccaaccccccaaaaaaatccctctgtcttttcaaatggaacaagtcaaaagcaaggcaaatagaattgtattttttttctttctttgtgatttgattaatcagtatctacagagtattgagacaaaagacagtactaaatggtatatatactattgcttcagttttggctattttatgacctttcttttgtctacagtctaatttctttcagtgtagctggaattatgtgagttaatgacctctttaatgtagaacacaacttgcattataagacttgttagctcaaaaggaacaggcttggacagtgtggcaattttattttatttttttgg

SEQ ID NO: 2839 - DNA, 580 bp, Cricetulus griseus
  misc_feature (9)..(27): n is a, c, g, or t
  misc_feature (187)..(201): n is a, c, g, or t
ggaactgcnnnnnnnnnnnnnnnnnnnatcttggctctgactggatggggttaccgggttatagctttgcagtatccagtttattgggaccatcttgaattctgtgatggattcagaaaacttttagaccacttacagttggataaagtccatctgtttggggcgtctttgggaggttttttggctnnnnnnnnnnnnnnntacactcacaagtctccaagagtccactccctcatcctctgcaatgccttcagtgacacatctatcttcaaccaaacgtggactgcaaacagcttttggctgatgccagcatttatgctcaagaaaatagttcttgggaacttttcctctggcccagtcgacccaatgatggcagatgccattgacttcatggtggacaggctagagagtttgggtcaaagtgaactggcttcaagactaactctgaattgtcaaaattcatatgtggaacctcataaaattcgggacatccctgtaaccatcatggatgtgtttgaccagagtgcattgtcaacggaagccaaggaagaaatgtacaaactgtaccctaatgcccgga

SEQ ID NO: 2840 - DNA, 579 bp, Cricetulus griseus
aaattacaaaagaactttcttgcacttgcttgtcgccaaataaaagaaagacccattgattcccctccccctttcttcagcttttctcccttgatattcctcctttctttcctcttaaagtttgtaatactttcaaggactcttaaaaatgatcatgtttggattgtttcagttctcttatttttgtgaggtggttgggttgaaggaaagagaaaataggtctgtatagtttcacagttaagatgtcctctcaaattgggtatcagatgatttcaattttttttaacatcctgctttcacattgaagggcagagcctacaatattgtttatttcaaaaaaagccacagcaatatcttattctctaattcatagacaagcttagtgtatttgtggtactttgagttttaaagactatctgtgggatgttaatccctgacattgccttcactctacctttagtcctttgagtactcccaggagttggaccattgctatccttgtgagataatactaagctgatttagggttttaaagcagtttttcttctatctgctgattgctggggctggttgcgtagt

SEQ ID NO: 2841 - DNA, 567 bp, Cricetulus griseus
  misc_feature (65)..(82): n is a, c, g, or t
tttgcttaggtagtctttccagaagggagtaaactgtgtttttttagttttagcttttgttctgnnnnnnnnnnnnnnnnnntccttgtttgttttaagtagaacgactttgcttcattttctttgcttgtaagaaaatagatgtatttcagttgaatgtatgttatcaagcattatgtcattgtgggccttttacacctaccttttcatacaagcttaaatcctacattgtgggactgaagtgctcttaagattcctgtttattttcactgtgtaatatgcaaagcaaaagggaacttatttattgagtgggtaatggctcaaaagtggagcccacattcttatttgattatgttggtttcaccctttagacctcatcaaatggctgtctgatagcactcttactaaaccattttcccttttttatattaataattaggctttgaaataagtattttattcttacaaaatggaaagcttaccatctctgaagttgtcattcaggtggccttgtttagtcaaaacgccttgttaaaaataaacaagctttaaaatcatttttatttt

SEQ ID NO: 2842 - DNA, 579 bp, Cricetulus griseus
cttcagcaataagtggaacttacctgtttattttcagataaggtcagtcactgcaccatatcctgcccttctaaatagactttttcatggttgagggttagtcttgctatgtggctcaagctggccttaaaatcatgatcctctagcctcagcctcccaattactgggattataagtgcctgtcaccacactcagttaactggcatttgctagttaattaaaattttaaaattattattaaggcttttaaatgttttggggggggcgatattactccaatcagcagttctctaagggtggcagaattaaagtgaagatgtttatatatcatggatgatgaactatcaagaaagtgtgagttttctggtagtgggagagaaaagggacttggaataagctggactccaggccttgcatcattgccacagtcctctggctttgtgatgaaaagcactgaaggtgctagatggcagtccctctgtccttttcagtcactatctgcctccagtcctgggcctgtgtttggctctgtgtccccctttcagcttgtgaagagcaagtggctatttactctcccct

SEQ ID NO: 2843 - DNA, 175 bp, Cricetulus griseus
caaagacattacagataccctggtggctatcaatatccccaatggggcccatcatttagatctccgagccagcactgcctttgatccttccactgtgctgttatctcgatcactggaagttaaacacatgaagaaatggatcgcagatttctataaaaatgccaaaccttaaaaa

SEQ ID NO: 2844 - DNA, 418 bp, Cricetulus griseus
tgatgtttgtttccactgcaaccgtgtcatagaaggtgatggtatgtatctgtggatgggtgggaccactttggtataagaacacttgggaggtatgaaaaatgaaagaagctgattgctgtttgctcttggtatgcttctcaagtgctttacacagagagatgggctaacgaggcagcacatctgctgtaagctgtgttccgagttgctaggacttattacatgggctaaccatgcaggacatattggcaacaacgtaaggaaagcagctgtgtttgctaatggtcactaaccagccctgccagaaattccctgccagagttctaaacagcactgttgacatcatgtcatggctctcatcatacatcacctaatcatgaattgctttgtggaatgctgcatagagtaacaaggttat

SEQ ID NO: 2845 - DNA, 188 bp, Cricetulus griseus
gaacagctacaacccctgtgagggaccacaaaacatagcgaggcaagtggcagccagtgacaagtgggtgtatgcttccttggaaagttcaaatcccccccatcctgattcaccccagggtgtgaactcagaccccacccatgcttgtctcacgtccagagctctgtgggcttcccttatgatgcccc

SEQ ID NO: 2846 - DNA, 368 bp, Cricetulus griseus
  misc_feature (193)..(193): n is a, c, g, or t
  misc_feature (198)..(198): n is a, c, g, or t
gcaatgaagagggaagacatatacactttagatgaagagttacccaagagggtaaaggcccgcttttccacagcctctgatatgcgattcgaagacacattttatggggcagatgtaatccaaggggagagaaagaggcaaagagtactgagctccaggctgaaaaacgagtatgtggatgaccctgtgtatncgctnacctttcttgaagagttctttccagaagaagtgtcagaagagacaatagttgataacctgctgcaaccaaagagcagctcagaaagaaggaagacaaagggaaagtcttggtgtatgcactgggacatgtgatgggggtgggtggctttctctggcattggtaacagaca

SEQ ID NO: 2847 - DNA, 486 bp, Cricetulus griseus
cgactgaggcggcggtatggaggagggtgagagtacgttgggggtgctgtccggcttcgtgctcggcgcgctcaccttccagcatctcaacaccgactcagacacggaagggttccttctgggtgaaataaaaggtgaagccaagaatagcattactgattcacaaatggataatgttaaagttgtttatacaattgacattcagaaatatattccatgttaccggctttttagcttttataattcttcaggtgaagtaaacgaacatgcactgaagaaaattctttcaaatgccaaaaagactgtggtgggttggtacaaattccgccgtcactcagatcagatcatgacatttagagagcagttgctgcacagaaacttacagactcatctttcaagcccaaaacttgtttttctgctgttaacaccaagtataacaacagaaagctgctccactctctgcctggaacatgccctgcataaacc

SEQ ID NO: 2848 - DNA, 579 bp, Cricetulus griseus
caagttcaagatccaggtatctccgtttttacagcagatgttcatgcccctgcttcatgccatttttgaagtactgctgcgaccagcagaagacaatgaccagtcggctgccttggagaagcaaatgctaaggaggagttactttgccttcctgcaaacggtcacgggcagtgggatgagcgaagtgattgcaaatcagggtgcagagaatgtagaacgggtgctagttactgttatccaaggagctgttgagtatccggatccaattgcacagaaaacatgttttatcatcctctcaaagctggtagagctctggggaggcgaagatggaccggcgggattcgctgacttcatttacaagcacattgtccctgcgtgtttcctagcgcctctaaagcagacctttgacctggccgatgcacagacagagctggcactttctgaatgtgctgcgactctgaagacaatccatcttaaacggggccctgagtgtgttcagtatcttcaacataagttcctgccctccttacaggttgctccagaaatatattatgattcctgttaatcactttcagcagt

SEQ ID NO: 2849 - DNA, 439 bp, Cricetulus griseus
  misc_feature (276)..(302): n is a, c, g, or t
  misc_feature (402)..(419): n is a, c, g, or t
gccgccgcagaacctactcggacacagactcctctaatgatgttccccccgaagacccagagagacctcttcactgttcaggaaacacacttaatggagatttggcatcagcaaccattcctgaagaaagcagacttctggccaagacacaatctgaatctgaagaacctcttccatctttctcctgaggaaacggacacaccccgcctcctctgagtgttgctatgcaaaagctgctgtaattaaactctttctggggtagcttcccctctcctnnnnnnnnnnnnnnnnnnnnnnnnnnnttgtaaacaaacaacccacatacttttgaagtgtattttatctttctatagtttacttgcaagagtattttcctaataacttcacagtatggatgtgcannnnnnnnnnnnnnnnnncaaatgagggggtaacattt

SEQ ID NO: 2850 - DNA, 579 bp, Cricetulus griseus
agaggtaagttaaagaagactgtgacacttgagacccaggttctctttaaagtcctgttccagcattcctccatgtgattaacagccgggcctctgggttcctaggcaatgatcttccagttgagcaaccatttacttgacacaaattgtacctttctgttttcctacagtcaggttggtggtctacagggacacacactttgccacccaaccagaggtttcttgcagagattcctgatcactagtttattgcattagtaaactcagagatcaagaaagcagctggaatttaagggaaataaaacctgcactgcaccaaagctgtggggccctgtgtttcctctattgggtgatgatgttagcatcacttcccagcccatgtgtgactaaagtgcttggttttagccacagacaactacttaaatgtcacatcttggctgagcaaagttgggacaagggtttaacctgacataggagcaatgtgcaatccctaattcactgcacagtattataattgcaggacatttgtattttaaaactggatttggggaacattcatttgctccagcacttctagca

SEQ ID NO: 2851 - DNA, 579 bp, Cricetulus griseus
ggctgtgtcggtcgggcctgagccgagcagctgcgcgacatcatggatacgtccgggaagcaggcggaggcaatggcgctgctggctgaagcggagcgcaaggtgaagaactcacagtccttcttctccggcctcttcgggggctcatccaaaatagaagaagcgtgtgagatgtatgccagagcggcgaacatgttcaagatggccaagaactggagcgctgccgggaacgctttctgccaggctgcccagctgcacctacagctccagagcaagcatgatgcagctacctgcttcgtggacgcaggcaacgctttcaagaaagccgacccacaagaggccattaactgtctgatgagagcaatcgagatctatacagacatgggcagattcacgattgcagccaagcaccacatctccatcgctgagatctatgagacagaactggtggacgtggagaaggccatcgcccactatgagcagtctgcagactactacaaaggcgaagagtccaacagctcatccaacaagtgtctgctgaaggtggctggctacgccgcacagctggagcagtaccag

SEQ ID NO: 2852 - DNA, 463 bp, Cricetulus griseus
  misc_feature (50)..(62): n is a, c, g, or t
  misc_feature (65)..(79): n is a, c, g, or t
gcacacacctttaatctcatggtgttgatggcacacgactttaagttgannnnnnnnnnnnnatnnnnnnnnnnnnnnnccactcgggagtaagaggcagatggatctttatgagtccaaagcctgcctggtccggcagatcgaattccaggacaggctccaaagtcacataaaaaccctgcctcaaaaagaagttaatctactgtttaatgaatataaggctatctctattcagtttttaagttcagctgtgtctgttcaaacattctacttacctataaccatttacagactaattcatttacataattttgaccttatctagccatttgcatgtttaatgtgtgccccatatatttaactattacccacttttacacttccaatggtttcaaaaatccttaaaaaatttgcctaaaaagttggtatcttctttagtacacttattttcacgacacaactg

SEQ ID NO: 2853 - DNA, 579 bp, Cricetulus griseus
  misc_feature (232)..(246): n is a, c, g, or t
ggtaaggccatagctggaggctggccaggaacttgaaatgctaacatgttggatgcaggttccataaaggaggcctgaggctaaattcgacttgagtatattttatttgccctacacagcagttaaaaatttttaatcagctttctgcattaaattgttcacgtaaaattgtgcttgatcagcttctcccgagaagccaggagctctggcttcctgggcccacattctgaannnnnnnnnnnnnnnctgggggctgggtaatgaaacaccctgagtcagtcccacccccaccccaagttctccagatctggaggccaagacttcactgttaatatccattgtcaatttgattgggtttagactcaccatggaaacacagctcccggtgtgtctctatgagagcatttccagaaaagttcaacttgaagctgtaagaagaatcctgaatggagggtgggggcagcattgagggcgtcctgggatgaataaaagggaggtgtgctgaggtgtgattcctgactgatccgaatgtcaccatctgcttcacaccccctgtggccataacttctccgccatgat

SEQ ID NO: 2854 - DNA, 570 bp, Cricetulus griseus
tgtatcctgtcagggataatgtcagtgaatggaaagaaggttcttcacatggatcagaacccgtactatggaggagaaagcgcatctataacaccactggaagatttatacaaaagatttaagttaccaggacaaccaccagcatcaatggggagaggaagagactggaatgttgacttaattcccaagttccttatggccaatggtcagttggtgaagatgttactttacacagaggtcactcgctatatggatttcaaagtgattgaagggagctttgtctacaagggagggaaaatctacaaggttccttccactgaagcagaagcactggcatctagtttaatgggactgtttgaaaaacgccgcttcaggaagttcctagtttatgtcgccaactttgatgaaaaagatcctagaacttttgagggcattgaccctaagaagacctccatgagagatttgtataagaagtttgatttgggccaagatgttgtagacttcactggccattctcttgcactgtacagaacagatgagtaagtagactaatgaatccattggtggctc

SEQ ID NO: 2855 - DNA, 578 bp, Cricetulus griseus
  misc_feature (26)..(26): n is a, c, g, or t
ttatatttcatacttttttatacttntgagggaaaaaaagtcaaagaaatactgtagtattggagggaaaaaatatgatcaagaaaaagatgaattcaataagcagcctcatgggacttggccacacactctgggttccagttatctcgagctgctccaccctccctagcccaccaacggttctctctgcaaatgctttggatctaggaagctagtctcctgggttagccgatgtctgccctgctttctggttactcacattctgtttcttgcttcaaaagaaaagacaagactgttggaccagtattgcaattctgtagagtcatttcttattaaaacaataatgtgattacccaaattggcatatttaaggcctaatgccattctaataaaggcaaaaatttctttctactacttgtttcaggctctttgatctctttataagttaactaatatgtctattttcttcagattctgcagtagctctttaaaaagcacagcgggtggatagcaagctgacttttttatgtgctctgtacaaataattgtgaacttttaatatgttgagtgctttcatt

SEQ ID NO: 2856 - DNA, 303 bp, Cricetulus griseus
tttctgaagaaccaatttatattgtcactgagtttatgtcaaaagggagtttgttagatttccttaaagaaggagatggaaagtatttgaagcttccacagctggttgatatggctgctcagattgctgatggtatggcatatatagaaagaatgaactatattcatcgagatctccgtatctgctaatattcttgtaggagaaaatcttgtatgcaaaatagcagattttggcttcccaagattaattgaatacaatgaatacacagcacgacaaggtgctaaatttccaatcaagtggaca

SEQ ID NO: 2857 - DNA, 577 bp, Cricetulus griseus
gaagctgctgctgggccccaatgggccagcggtggcggcctccatcgacctaaccagcgaagaggaggaaggccagagtctatggtcttcgatcttaagcgaagtgtccacccgtgccatgtccaagctgccgtccggcaagaacattctggtgttcggagaagatggctctggtaaaacaactctcatgagcaaactacaatgagcagagcacggcaaaaaaggaagaggcttggagtatctttacctcagcgttcatgatgaggaccgagatgatcacacacgatgcaatgtgtggattttagatggagacctctaccacaaaggcctgctgaaatttgcagtttcagctgaatctttgccggagacgctggtcatttttgtcgtagacatgtctagaccttggactgtaatggaatctctacagaagtgggctattgttttacgtgagcacatcgacatgatgaatattccaccatacgaaatgagggatctggaacgataatttatgaaagattttcaagattatatccagcctgaagattggtgtcagggttccccacatataagagggcct

SEQ ID NO: 2858 - DNA, 300 bp, Cricetulus griseus
  misc_feature (150)..(150): n is a, c, g, or t
ggtcgtaccccactgccgtccggcccacgccgtgccgcgtccaaagccacagtataaaccccttgtctcgggaaaaaaaaaatcatatggcccttaaccataaccacaaaagggtttttatcttgtgaaaatatggctgaacaggagtgnaattcatgaaatgtcacttctggaaaagccccatgttatgcctgttattacctaaatgaaacccaaagtaaatgtatagccattgtctaaccgtttgggtggaaaagcaccataagaaccctctgggtgagcctttcgagccctcatatg

SEQ ID NO: 2859 - DNA, 578 bp, Cricetulus griseus
ttcctcctcactttcatcctgtcattcatgagatttgctgaaatcattattgggatatttgcattttgcacagtgactggtgtgctagctcttgacaataggaaagcactgaactgttagaattgggtctctgaatgctcaggtgggtgtctcaccagcatctcttctgtgcatttgctgttgagctgtctttagccataatgagcaccttgactaagagaagcaaaggtttcctgggttatttatcagtagtgtggaaatcatgttttcatgtggccagtgaaagcaaagatatttctcttcagtttgtattctttggaagacaggaaacatctgtgtacatcccttgactgtttgtaggatcacattgtctttatgatactgaactttacagctgctatacttttttacaaatgaatatcaaattataataggaatataggttgttttccacatcttcattatttggacctaaagttaatttttaataagaaagtatctttactctctacattaaaatgtcagaaaacgaaaaacatactgataaataaaagtccatgggcttcagaacctggaca

SEQ ID NO: 2860 - DNA, 580 bp, Cricetulus griseus
  misc_feature (339)..(356): n is a, c, g, or t
  misc_feature (387)..(404): n is a, c, g, or t
catcgtgtccacacgtcgcgtcggtggcaggactcctgaattattccaaaactgaacaatttcaactgagctgaagtactctgccttcctagagtaccagtccagtttaggagagccagagcagatcattagccatcatggcaaaccttagctactggctgctggcactctttgtggctacgtggactgatgttggcctctgcaagaagcggccaaagcctggagggtggaacactggtggaagccgataccctgggcagggcagccctggaggcaaccgttacccacctcagggtggtggcacctgggggcaaccccatggtggtggatggggacagnnnnnnnnnnnnnnnnnnggacaacctcatggtggtggttggggtcagnnnnnnnnnnnnnnnnnnggtcaaggaggtggcacccacaatcagtggaacaagcccagtaagccaaaaaccaacatgaaacatgtggcaagtgcggctgcggctggggcggtggtggggggccttgggggctacatgctggggagcgccatgagcaggcccatgcttcattttggcaatgactgggaggaccg

SEQ ID NO: 2861 - DNA, 580 bp, Cricetulus griseus
cagcctgtcctttcttcagaacacatggcagcctttggagtatttggtctctgtcagatccatgccttcgtagattacctgcgcagcaagttgaatccacagcaatttgaagttcttttccgaagtgttatctccctggttggctttgtcctcctcacagtgggagcactcctcatgctgacaggaaaaatttctccctggacagggcgtttctactcattgctggatccttcttatgctaaaaacaacatccccatcattgcatctgtgtctgagcaccagcccacaacctggtcctcctactattttgatctgcagctcctcgtcttcatgtttccagttggcctctattactgctttagtaacctgtctgatgctcggatttttatcatcatgtatggtgtgaccagcatgtacttttcagctgtaatggtgcgtctgatgctggtgttggcacctgttatgtgcattctttctggcattggtgtctcccatgtgctgtccacatatatgaagaatctggatataagtcgcccagacaagaagagcatgaagcaacaggatttcttcttaccctatt

SEQ ID NO: 2862 - DNA, 578 bp, Cricetulus griseus
ctcaccggcgtgcatccccgtgggctcaccggcgtgcgacccggcgtggagatgccccgaagtggggtacgagcagactatcgcgccgcgccggtgcccccctacaagtcggatgcacgcacggaggcccttaacagcaagattaaagaacaaaaaattcttgtggatgaactttctaacctgaagaagaatcggaaagtatataagcagcaacagaacagcagcgtatttttacttgcagatggaacagaaatgttttccaaaagcaaaaagacattagatgaactaagaaaacaataccaagcattagaagaaaacacagagacaaccgaagtcaagacgcagtcaccctgatttcacataaccatgtgtggcatttgctgctctgtaggcttctctgatgaacacttcagtaaagaattgaaagaggatttgctgtgcaatcttagacgactgggccccaataacagcaagcagctgttaaaatctggtgttcactatcatcgtttgttttccggtcatgttctttattagaaatgtgttttgactgcccatcctgtggaagatgaaagtggcaa

SEQ ID NO: 2863 - DNA, 201 bp, Cricetulus griseus
tttatctacatcgtccggaaagatgtagctgtttactctcagattttgagaaaactcttcattgaatcccatggaatcttccttggcctgcaaagaattgaggaggaattgacctttttttttcatgaaagctcacttggttcgagtggttgataattaccgatcactctttcgggcctgtgtggtagaaatgccccacgt

SEQ ID NO: 2864 - DNA, 138 bp, Cricetulus griseus
gtcgacccagcgtccgcatttcgtaaacaactgctctcttctaccttcaaacacacatggtcagtatgaacacattctgttttccattcgattactactggataaaactggtttggaagcagttgtgcttttggggtt

SEQ ID NO: 2865 - DNA, 577 bp, Cricetulus griseus
ctggaggaggttcaggttcaagatcaaagtccaatttggttactgtagaatcactggctggaggtgctagttcagagatgcgtgcatcaaccacgggtactgtagcaggcacaggagtctgagggctgaatgtgccagaatgatttactgtgggaatagctcgtctcactagccttccccacgtggcaatattaatattcatttgaggagctctgagaaatgttttgccttgctgttttgaaaaaattttcttttgtctttggagttttggtcttctttcaataactggattaaaaaaggtaacctctgcaaacaaagtaccctgtggttccaaatagagacacatgccatgccgctggttgtctaaaaaatcttctaacctcataaattttacagcacacagagatcgccaatcacgccaataaactgaaatttccagttcacgtgacctgtctagttccagtgtaaacttctggtcccacgactgattggaaataggcttccagctagtttgaccaaccacagtgttatctagcttcaaaacagcacagacatcattggacaagtcatcgggttt

SEQ ID NO: 2866 - DNA, 578 bp, Cricetulus griseus
  misc_feature (512)..(512): n is a, c, g, or t
agctctggtggcactatccttcagcggggctattgggctgacttttcttatgctgggatgtgccttggaggactatggcgtttactggcctctgttcgtcttgatcttctacgtcatttcccccatcccctacttcattgccaaaagggtcacctatgactccgatgcgaccagcagtgcctgtcgggaactggcatatttcttcactactgggattgttgtttctgcctttggatttcctgttattcttgctcgtgtggctgtgatcaagtggggagcctgtggccttgtgctggctggcaatgctgtcatttttctcacaattcaaggctttttcctcgtctttggaagaggagatgacttcagttgggaacagtggtagccctttactctgatggaaagcattgagttttttagaatttgtactgtatgtataagtgtacacatatggtggtttcttacagattttaatatgctgagttttttatacctttatatcatgaccatcttanggaagatgttgtaaacaaaagatgaattttattcctagcaaatagatcactccattgactcagact

SEQ ID NO: 2867 - DNA, 283 bp, Cricetulus griseus
  misc_feature (62)..(79): n is a, c, g, or t
ggtggttaaaagcactagctgctctttttttgttgtttctgagacagggtttctctgcatcnnnnnnnnnnnnnnnnnnctggaaattatctgtagaccaagctagccttgaactcagagatctgccaacctctgctggcgttgacacacactaccttagcatggcatataaaaagtaaatctttattcattctattggttctggtcccctagagatccttgattaataccttgcttcaggtgggcagtgggggttcaattgggttggttaatcccacacttg

SEQ ID NO: 2868 - DNA, 579 bp, Cricetulus griseus
agggtgccgtgaagaagatccgaagcctcatgaagactcaccagctggacaaggtgttcgtggccacagacgccatcaggaaggagcaggaagaactgaggaagctgctaccagaaatggtgaggtttgagcccacgtgggaggagctggagctgtataaagacggaggcatcgccatcatcgatcaatggatctgtgcgcatgccaggttttttattggcacctcagtttccacattctcttttcggattcatgaagagagagagatcttggggttggaccccaagacaacatacaaccggttttgtggagaccaggagaaagcatgtgagcagcccacacactggaagattgcatactgagggccaccgctccaccacccaccagtcactcggtcacagggtcccagaggaggcagcacacctaaagcccgaattcctttttgttcatggctgacatcacaaatgtgtcttctgtcaggacttgagaacccatgtccccatcacacatgtgacatgtgtgccagttcagaagtgtgaggaatatttgtcagtcctgacaggccttccaaccactttg

SEQ ID NO: 2869 - DNA, 580 bp, Cricetulus griseus
  misc_feature (270)..(321): n is a, c, g, or t
  misc_feature (381)..(381): n is a, c, g, or t
  misc_feature (488)..(488): n is a, c, g, or t
gtttccaccatgcagaatcccattcctcgacgctgactctgtggctgggagaaggacctagcagacttccaggatatgctacacaccaagtaggggttgcaggtgctgtatttgatgatagcaccagaaaagtgctggtcgtacaagatggagaataaactgaaaaatatgtggaagtttccaggaggcctgtcagaacccggagaagatattggtgacacagcagtccgagaggttttcgaagagactggtgtgaagtcagaattcagnnnnnnnnnnnnnnnnnnnnnnnnnnnnnnnnnnnnnnnnnnnnnnnnnnnntcggatatgtaccttatctgccgcctgcagccacgttccttcactatcaacttctgccancaggaatgcttgaagtgtgaatggatggatctagaaaaacttgccaagactgaaaacaccacccctatcaccagcagggtggctaggctattgctgtatggacatanggaaaggtttgataaaattgacctcagtatggaggaactcccagcagtgtacacaggcctgttctacaaactctatcacaggggactgccag

SEQ ID NO: 2870 - DNA, 580 bp, Cricetulus griseus
  misc_feature (76)..(76): n is a, c, g, or t
  misc_feature (568)..(568): n is a, c, g, or t
ttggatcccagcaacataaaaaggcttgacacttgaagggtcatagttccagtttgggactgggaatgtagctcanaagtgaagtgtgtgcttagcgtgtgtgaggccctcagttcaatcgctagcaccaattggccaattacatgtggaagtatgataagtaaactgacaaagggtttcttctcagctgatatgagaagaaaatggagtttatttggtaaggcaaggccatgtaccacattatatcagtttaatataatctagactgaagaattttaattaggtgaaatgttcactgtaactactaatagtgcaggaaatataattctgagagtttttctttacttttgcatttgatatgtttaaaacaaaactaaaattaaagcagtaagctaggtacagtggcaggtacctatagtctccgctatttatgaaactgaaatagaaagatcacttgcagcccagagttctgagcacagaaaacctcatttacaaacagataagcagtgctagagatacagcccagtgtcagtgctcacctagcacctagcatgggtttgattctcancattgtattgca

SEQ ID NO: 2871 - DNA, 581 bp, Cricetulus griseus
  misc_feature (284)..(301): n is a, c, g, or t
  misc_feature (470)..(470): n is a, c, g, or t
actggagcgacgctgcagaccgacctaggactcctgacccataggaggccgcgccatgaagattctcctgttgtgcgtggggctgctgctgacctgggacaatggcatggtcctgggagagcaggaggtctccgacaatgagctcaagggaatgtccactcaagggagtgggtgcattaataaggaaattcaaaatgccgtccagggagtgaaacagataaagaccctcatagaaaaaaccaatgaggagcgcaagtcactgctcaacagtttagaggaagccnnnnnnnnnnnnnnnnnntgctctagatgacaccagggatactgaaatgaagttgaaggcattcccggaagtgtgcaatgagaccatgatggccctctgggaagagtgcaagccctgcctgaagcagacctgcatgaagttctatgcacgtgtctgcagaatcggctctggtctggttggccgccanctggaggagtttctgaaccagagttcacccttctacttctggatgaatggtgaccgcattgactccctgatggagagtgaccgacagcagagccaagtcctaaatgccatg

SEQ ID NO: 2872 - DNA, 557 bp, Cricetulus griseus
atgatttgaagtgggtattttgactccctgctttatgaggagcaacacttggggtgaagggacttgccttttgctttgaacaaacaaccctttgatggatttagggtctctcacctgtggttttgaaagcagtcacaagtgataatctacagacagctgtgtttttgttgggttttgttttttgttggtttttttctggacagtatttacaaggatttgacttatttcctaaggaaattctgggctcacatcaagtacagcagtgatcatagaggagggacagcaggggctcctgtttctgacctgtacagtattcactttaagctgattgtttctccttttgcaattgaactgaatactttttttcatgcatgttttccagaaaatagaagtgagtattaatgttattaaaaagattatttttttttattaaaggctatttatattatagaaactatcattaatatatattctttatttacataatctgtcccatagtcatgcattgttttgcaccccatattctctatcattggaaacagcatgggtagcttttc

SEQ ID NO: 2873 - DNA, 549 bp, Cricetulus griseus
gacaaaaatagaaatcccccaaatttatccacaggtttcttttttctttagctattttgttagattttttcctaaacatctgtaaccatccatgggtaatattggctcaaataacaatccaatatgctatacatatacctacatataacatgcaggtacatttcagaagttccattaatgggttctaggctggcaatgggtatttagtgtaagcttagttctaagtcttatcagcccatacttgaattcaaatgctaagaattctggaatagtcacaacaaatgaattgttactccacaatatgtgattgttgtagggtttaattatggaagacaatgatccaatctaaaaacacaaaatgcttggattaactttccctagaagaagaaatacaaatgcttcaaaattgtagaaaatgtacaatatccctaataaacaggataattgcaaatcaaaatctcattaaaatcatgaccttggtgaaaacagcgaatattggtgcagatattatgtaaatggctatgcctttttatatgtgcgttgggaggc

SEQ ID NO: 2874 - DNA, 581 bp, Cricetulus griseus
  misc_feature (177)..(227): n is a, c, g, or t
  misc_feature (565)..(565): n is a, c, g, or t
gcgtgccatggtatatgtgaccctaaataaataaacctgggaggaacaagtattacattagatgatcacaaatcatcagtgagttctgcattttcaatctataagttcattctattgaaaaaagtgtggggtggagtcaaaatggtttagcaggtgaaggtactagctgctcagccnnnnnnnnnnnnnnnnnnnnnnnnnnnnnnnnnnnnnnnnnnnnnnnnnnnactccatgaattgtcctctgacctccaaacgcgtgccatggtatatgtgaccctaaataaataaacaaaagtgaaacacatgggaagtgctagagagatggttctgaagtcaaggacacatactcctttagagaggacctgagttcagttcccagcaccaacatcaggtgggctcacaaccacctgtagtaactctagctccaggaaatctgattcctctagccggcttgggcacctgtactcacatgtgcatagcccacccatgcacagacataattttttaaagtatttaaaaatatttttaaattgggtatggtagtgtacacttttaatcctancactggcgaggaagtg

SEQ ID NO: 2875 - DNA, 577 bp, Cricetulus griseus
tgaagatggtagatttaaccacagactgaccatcctgttcagtcacttgcttttccaattcttgttcctcttcaggtgtgtacttgtaggtgaaggaaggtgggctgcacctggtctcttttcctggagatagccgtacattgacagaagacacaacccttactgggctcagtaaggtggtcggcaaagactgagaccttcttaggggatagccagcttttgcaagcaagtacctttgtttcaacagatcctttgattttattaagctacgccctactcgttgaccagacagactgcaaaccttcatttgagctctctgcaaggcggtattcactctatccacagaagagggaaacacggttttcttttcagagctcataccactgcactgagcttcaatggaagccaaggatttgagaatatgatgtgtggtatactgggcaaattcacattcactgcttctctctgcatcactgtctccactaccttccctcatgacctctccaactgctgctggagatgcagcctcctccatttcaataagctgaggctcagggtcacctggacccctcatgga

SEQ ID NO: 2876 - DNA, 568 bp, Cricetulus griseus
  misc_feature (220)..(234): n is a, c, g, or t
aggcctacattgagtttgagagcattgaggccattgtgaagacagccagccgcaccaagttcttcattgagttctattctacctgcttggaagagtacaagaagagcttcgagaatgatgctcatagcagtgacaacatcaatttcctcaaagtacagtggtcctcccgccaactgcccacgcttaagcccattctggctgatatcgagtacctacaggnnnnnnnnnnnnnnntcacagtcaagtccatggatggctatgaatcctatggggagtgtgtggttgcactcaaatccatgattggcagcacggcccagcagttcttgaccttcttgtcccaccgtggagaggagacaggcaacatccgtggttccatgaaggtgcgggtgcccacagagcgcctgggcacccgtgagcggctctatgaatggatcagcattgataaggatgagacaggagccaaaagcaaggctccttcagtgtcccgtggtagccaggaacacagatctgggagccgcaagccaacttccacagaggctccgtgtccactgtccaagatgtttgaaga

SEQ ID NO: 2877 - DNA, 577 bp, Cricetulus griseus
  misc_feature (312)..(337): n is a, c, g, or t
cactgcttaccagcttgtccatcgtgtcttgttcagcttgcttttttcagctgtgcctacccacagatgtcaacacccacactgctctgtctgggtccttccaaatcaagaaaatgccccacaggcatgccttacaggtccatctgatggtagcattttctctactgaggcttcctcttctcagatgactagctgtgtcaacttgacaaaacagtcaacacattatgtatggaagcaggtctgctatggtgctagagtggaagtcagaggatagtttatgaagttgattcccccctccccctatgtgggtcnnnnnnnnnnnnnnnnnnnnnnnnnncttggctgcaatcacctttatccactgagccatcttgccactgaggccaccatcactatcccttttcctcttcttcttctctctttattctttttaattttcattttgatagactttctcaaagaacatagatttggagagtctctatacctaaacctcctgaaacttgttgtcagttatctgatagcatattttttaaccttgcttccttccttattcattttcccatgctgacctcag

SEQ ID NO: 2878 - DNA, 546 bp, Cricetulus griseus
ggataagctgaggccctagctctcccctgtgctggtggtgcccggctgcccgccgtgatgcagtggtccttgggccggcggtgggcatggatcgccctatttctggctgttgccgcggtgctgacccaggcgggggggctgtggctgggtactcagaacttcgtcttccagcaagaagagatagcgcagcttgctcgacagtacgctggactggaccatgagctggccttctctcggctgatcgtggagctgcggaggctgcacccaggccacgtgctgccggatgaggagctgcagtgggtgtttgtgaacgccggcggctggatgggcgccatgtgtcttctgcacgcctcgctgtctgagtacgtgctgctcttcggcaccgccctgggctcccgtggccattcggagcgatattgggctgagatttctgacaccatcatctctggcactttccaccaggggagagagggcaccacgaaaagtgaagtcttctacccatgagagacagttgtacacggacctggaaaggcaacggccttggga

SEQ ID NO: 2879 - DNA, 580 bp, Cricetulus griseus
tgatacatctataacacagccacgacagctaagctctggggatgtcttgttaaatgtggaagaaatattgtaagggcctgggacccaggaaatctgctgagacatggaagctggagccaggaaccctcaaaaaatgtggttgccttagcaatacctgtgaaatgataacctcaactgaccgcacattgtgaatggatgaaatctgacatgtcccaactgatagaagagttatgatattaaagactggcaagagagggagaatcagtcttctccagatgatggtcctcttgataggttagccaatcccaagagatcagcttgtaacacataatgagcgacaaaagtgaactaagcaggttatatttataaatttgtaagtatgtacatttatatgtatacacataacaatgataattaaagaataaaaagccaggaatttgagaatgaatgggggtagctcttctggtaggttttgtgtcaagttgacacaagctagaggcttcagagaggaaggagcctcaagtagggaaatacctccatgagatccatctgtaggcatttcctgaattagaataatgga

SEQ ID NO: 2880 - DNA, 578 bp, Cricetulus griseus
  misc_feature (161)..(200): n is a, c, g, or t
ggcaagtagggttgggggaggatggtgggggtggggaggttgacagggttgggtgaagctggcaggggtggggaggctgggctttgcaatagtatcacagactgaacattcttgccgattagagtgcagcctgaggaggtgggggttgggtaccctaggannnnnnnnnnnnnnnnnnnnnnnnnnnnnnnnnnnnnnnntgccaccacagtggagaatgggtgtcctctgcctcctctgctttcccagtctttcataaggtgtcaaacggtgtaactgatttcacatctagaatcaactgtaaggcagtgtgagaaattttaacaactttaaggataagatttaaaaaataaagccaagcatggtggcggcacacacctttaatcggggaggcagaagcaggcggatctctgtgagttgaaggtcagccaggcccactgagtgaggtccatgacacccagggctacatagtgagaaactgtctcaaaaacacaaaataaatatgtgatagtatagataaatatgaaataaatgaatataaaatacaaatagtgtgtgctgtcacagagacaaacaca

SEQ ID NO: 2881 - DNA, 518 bp, Cricetulus griseus
gggctgcggctcggtgctcgaggacaacatcatcgtgtccgaggtgcagttcgtggagaacagcggcggcggctcgtcggcggtcggccagttcgtgtcgctgggacggggctggcaaaaccccaacccttagcggggggattccatgtgaacggggggaaagggagtcaccagccccgacccttcagaatggtcggggccacattcaccacctggggagccagctgcagctgaaccaacactgcctggacacagccttcaacttctttaagatggccgtgagcaagcacctgaccccagggcggaaaatgggccatgtgatcgctgcctgcctctacttggtttggcgaactgaaggcacacctcacatgcttcttgacctcaacgacctgctccaagtgaatgtgtacctgctggggaagaccttcctgctcttggcgagggagctctgcatcaacgcaccggctatagacccgtgcttgtacattccacgctttgctcatctcctggaatttggg

SEQ ID NO: 2882 - DNA, 578 bp, Cricetulus griseus
atgaagaaggttacaatgatggggaagtggatgatgaggaagatgaagaagatgctggtgaagaagaaaggagtcagaagcgaaaacgagaacccgaagatgagggcgaagaggatgactaaggggaattaacctatttggggaaatgggggtggtgatttgactgtttttacccatatcccctcccccctcctattcctgccccccgaaacttatttttttctgattgtagcgttgccgtgggaatgagaggggaaaagtgtactgggggttgccgggggtgggtgggagggggaggaataaaatactatttttactgccactctttattttcccccctcctttttccttgtgtctggttttgtccccgtaaatgcaatagcttattacgcaccaagcaagtgtttgttcttactctctggagaggatggctttgaggtctctttttggtatgtcccacatccccagagttggtcaagaggctatggctggcctccaccatgtgggtgactcacagcccaggaggcgctgaaacccgggccctgtcttcagtaactctggtctggttcatgtgggtc

SEQ ID NO: 2883 - DNA, 580 bp, Cricetulus griseus
  misc_feature (491)..(491): n is a, c, g, or t
  misc_feature (512)..(512): n is a, c, g, or t
  misc_feature (516)..(516): n is a, c, g, or t
  misc_feature (548)..(548): n is a, c, g, or t
gtatctccccccaaaactgaaactgtagccagatccttgaggtccttaatatgcagagtaagcaggcagtgacattggctgagtgagaagtctacatacaacgtagttgtcattgtgtgaccttgagcccttgaatgccacagtcagcgggggaacaggtgtgcttccctgaatgactaagtaccctgaacatgatctattgagtggaaattggaaaattctaataggctgaactccccaattagcaataacctttatgccaaggtatgtataagaaggggattattccttggaatatgatagaatgctatcaccaaaatgatgttttaatttcaaataaaagtagccttgatacctttgggttcttccccagatcttacatcagaaagggcgattcactacctaaaatcaatagtgattcacgcttaacattacaggctttgtgttcctgatgaaaggttggggaaagatcctttataaatgccttccanggggctggatagatggctcancatntaagagcccttgctgctcttctagaggaccanggttttggttcctagcacccatgttggacagc

SEQ ID NO: 2884 - DNA, 580 bp, Cricetulus griseus
  misc_feature (127)..(142): n is a, c, g, or t
taataaaaacccatagacagatattggggtgaaaactgaagatcagaaaagcaaagcagccagccagtagagagttcttacctgtaccaatgctcagacggaaagtgtgattcggtcttcagagtgnnnnnnnnnnnnnnnntgactcagactgtactgagctcctgtctcctcctgccttttattcctctatagtgttgggattaaaggcatgtcactccaagtgctgggatcacttttgtgtgagctgtttctcttttggctggatcaattttgtgtatctcagggtggccttgaactaagagattcatctgtctctgtctcccacgtgctgagattaaagatgtgtgccacctctgcctggcttttatggctaactagtgtggctagttttgtactctgaccttcatgcaagctttatttgttagatcataaacaaagtatcaccacattttctggaataaggtggattgaccattactatgggtgtagttcaaagtacaaaatatgactcggagcctttattgtgatgaacttgtatgtgatgtatggggtcatccactccttctgctccctaatg

SEQ ID NO: 2885 - DNA, 410 bp, Cricetulus griseus
  misc_feature (223)..(223): n is a, c, g, or t
tgtgccactatgtctggctcagtccagttatgcgtgccatactacgtacattcatgtggtcaacaggacactgctatgtgtcttctgaggctcagcactgttcttcataaacaaaagaaattagccaggcatggtgatgcatgcgttcaatccagagttcagaaggatgacttcgaatggttgaaagtttgaggtcagagctgagggagtgggtgtgtctcantggtagagtacttacctacaatgttccaagttctgggctcagtcaccagcacagagaaagacagggaaggaaagaagcaggggaaggagcagagtgtgggggagaaaggtgcctggctaagaaatagttttaactgttcaaagagtgtccttgggaaggaatatggaggtgttatagggtaaatact

SEQ ID NO: 2886 - DNA, 511 bp, Cricetulus griseus
gcaatgagtgtggcaaagccttccgagaaaagacaaaactcattatacatgcagagaactcacacagggagagaaaccatatgaatgttcagaatgtgggagagccttcaaccaaaaggcgcaccttagtgtgcatcaaagaacacacgcgggagagaaaccttttgaatgcaatgaatgtggcaaagctttcagagaaaaatcaacactacgtagacatcaaagaattcatacaggagaaaaaccttatgtgtgttcagaatgtggaagagcctttacccttaagctgagcctcagtgctcatcagagaattcatacaggggaaaaaacagatggatgtagtgtatgtggaaaagtcttctcccgaaaatcataccttatgttacatcagagagctcatacaagagagaaatttgaaaaatcctatgaatgcgatgaatgtgataaagcattcttccagaaatcatatctcattattcatcagagagtccacacaggggaaaaaccctac

SEQ ID NO: 2887 - DNA, 579 bp, Cricetulus griseus
tctagggctgcaaagctgttcgctcaggttcctagccggctgctttttggcgtcgggtcctcagcatggctgcctccagggttgagagctggggagctgccacaccctcgttttgctgactgttcctggagtctgtgttcttcttgtgtttgctgggctaccctagcagacatgttcgctaaggcctttcgggtcaagtccaacacggccatcaaggggtcggacaggtgagggagaaaatgcttttgcttcactgagagaggcccctacacctctaggggtgcacatggagaggaaaccccagggagccaagcagggacgtccaaaacattttgagcatgaggagaaaacttcgggccgatgtgaccgctgctttccccacccttggaacagatcaggcctctgagttgatacctgggaaggaagagctaaacgtggtgaagttgtatgctcacaaaggggacgcagtgactgtgtacatgagtggagggaaccccatcctgtgtgaactggagaaaaatttgtatccaacagtgtacacactgtggtcatatcctgatcttctgccagcctttacaa

SEQ ID NO: 2888 - DNA, 566 bp, Cricetulus griseus
agacagggatgcacacatgatcaattgctttcttgtccttggcccattctcaccactcttccctgcctgggcagtggtgtttcccacggtgggctgggtcttcccacatcccttgatttaataataccatgtgggcaaagacatccccacaggccaagccaacgtagactctcattctagatgattctgggttgtgtcaagttaacaattaaagccaatcatcgaaacttaatgatgcatttgatgctggagtatgatatagcacatatttcttactgactgtgatccaaaacattggaaaaacaacttgcctgtcatctgggcttctgagattgggttatgagtacccacacttttttttctttcaagcagagaaaggatctgtagcttcttcctcctaaagaatgctttgctacttggagaaattgatgcacaaatataacaccatgagtgaaagacgggctcagatggagtattagcagcactgtggacttgaagggagggtgctaaaaccatatgacccgttctgggtcttgcaagctgattgacagtatgtttggcaagga

SEQ ID NO: 2889 - DNA, 476 bp, Cricetulus griseus
  misc_feature (157)..(251): n is a, c, g, or t
agccgctactgctgaatccgcggaggctgaggtctggcacgaacgtgctggggaccccgagatcgtctgggtgaagcgggctgcggtgcacgggcgcaggcaggcggctctgagacccgtgaggaaccctaggagaagatgcgagccacccctctgnnnnnnnnnnnnnnnnnnnnnnnnnnnnnnnnnnnnnnnnnnnnnnnnnnnnnnnnnnnnnnnnnnnnnnnnnnnnnnnnnnnnnnnnnnnnnnncgaacctgggccaccctgcttcctgctgtccccgagtccacctcctgcctcagacttgtcacctgctgtggcccctgcaacccgactgggaccttatgtcctcttggaacaagagcaaggcagccacacctaccgggccctgcactgccccacaggcacacagtacacctgcaaggtgtacccagcctgtgaggcccgggaggtgctggcaccctatgcacggct

SEQ ID NO: 2890 - DNA, 582 bp, Cricetulus griseus
  misc_feature (11)..(11): n is a, c, g, or t
ctggggctggnaactccatatgtataccaaactagccttgaactcacttgctaggattaaaacatttaccaccacgcccagctctctgctctgtcctagaattcaagaaattgctttaacggtggggggcttaaaaagaaagccaagacagtgtgagtggacatactcacttctgggattcagagaacatttttaaaattcagatttttagcatgatacaaactaatgttctttcctctgagttgaaggagaaattaactatcaatctcttaaatccaaagctggataataagtaaaagaacctttccctttgttgggtataagacttctttctcctgctgtatcaagtgagaccattttgattggaagccatagcagctcagcaagtaaccagaatgctggcccaactccagacatgctgttttcctcaaatactaatgtgcagttgcaaaccttaatttctataatgtgttctaaaacgtgtggaccgagtagaccagctgcactacttttccttaaagcattcctagcacatggcccacagaccttggaagaaaaaaaattcctgtgtacagaccctgc

SEQ ID NO: 2891 - DNA, 191 bp, Cricetulus griseus
gtttctactttctttcctgctgtgtgagtgtagtgaagagcttgtgttcctcctagtagtggttccagaaccggttcatgttatctactaactgatcaatagatggacagaaaccccatgaggtgggagctgatcgtgtgacctggcactggacgagaaactagagggatccggggtggggttaacttggg

SEQ ID NO: 2892 - DNA, 567 bp, Cricetulus griseus
  misc_feature (208)..(236): n is a, c, g, or t
  misc_feature (259)..(278): n is a, c, g, or t
ctccttttaagaccttccttactccatccactcctgctctccatagctcattccaaatagagctgataattttttttttattttgtggggggagtgagggtgtacatgccatgccatctctgagtagagaagtcagcagacaacttccaagacgtgcttctctcaaaatgagggcatcaagctgggtggtggtgctgcatgcctttannnnnnnnnnnnnnnnnnnnnnnnnnnnncgatctcattgagtttgagtttnnnnnnnnnnnnnnnnnnnnagtgagttccaggacagcttgaacagttacacagagaaatcctgttttgggggaagaaaacgagggcatgaggcacctctgtgatccagagttgatgcttcatcctccatcctttggtggagtttctatgagagttgcttttttgcttcccatgggagcatttgtattttgcattttctgacatttcattttctcagtgagatgggagaatatgtcatttgttgggaatggaccctggaaagggaatgttggcctgagttttctctaaaactcttaaaggagaggagct

SEQ ID NO: 2893 - DNA, 579 bp, Cricetulus griseus
  misc_feature (354)..(354): n is a, c, g, or t
gctacaccacctcccggagactggaccctattccccagttgaagtgtgttggaggcacagctggttgcgatgcctacactcccaaagtgatacagtgccagaacaaaggctgggatggctatgatgtacaggtaatagcttgtactacaacaacagttttcatggagttctgttgtgtgacactattcctacagggttttgggtgacaggttacttagcaggagcagaaatgactcacagacagctgcatcatcagaagccaccccagcatgggtcacagctcatgaagtctggaagtctggagttcaccacacaacctacaggcagctgggctggtgggagagtgactcttancagtcctcactgcttatatacacttcaccaggagaggcctagctgtttctgttcagagcttaatgagtgtccctgcaggatgggttgttacctctagttacaacaatagccctcgtcttaatgagcctccctccaaggtggaggttttatctcggaggaaattcatacacagcaaactttaatacaataagctgtttattgagacatcattattttggaaaaact

SEQ ID NO: 2894 - DNA, 579 bp, Cricetulus griseus
  misc_feature (421)..(437): n is a, c, g, or t
ccggtgctggagcggagcatagccgagccggagccctggaagtggctaatccatgcttgccatgcgactgtggagggtcgccaccgccctggggcgtgggcccctcccgcgggcccctgcggtcctgggcaggcaggggaagcaggcgaaggggaaggcctaccgatggtgttcgtcaggaataattcccaatgagaaaatacgaaatattggaatctcagctcacatcgattctgggaagacgacattaacagagcgtgtgctatactacactggcaggattgctgcgatgcatgaggtgaaaggtaaagacggagttggcgctgtcatggattcaatggaactagagagacagagaggaatcactatccagtcagcagctacctataccatgtggaaagatatcaatatcaatattatnnnnnnnnnnnnnnnnntggacttcacaatagaagtggaaagggccctgcgggtgttggatggtgccatccttgttctctgtgctgttggtggagtacagtgccagaccatgactgtcaatcgtcagatgaagcgctacaacgttccgttgttaacctt

SEQ ID NO: 2895 - DNA, 568 bp, Cricetulus griseus
  misc_feature (100)..(128): n is a, c, g, or t
  misc_feature (545)..(545): n is a, c, g, or t
ttcccaggatggtcaaggcaaaggagatgatgtaattgtaattgacagtgatgatgaagatgacgatgaagaaaatgatggagaacatgaagattatgannnnnnnnnnnnnnnnnnnnnnnnnnnnngaagatgacacggggatgggagatgagggtgaagatagtaatgaaggaactggtagtgcagatggtaatgatggatatgaagctgatgatgctgagggtggtgatgggactgatccaggtacagaaacagaagaaagtatgggcggagctgaaagtaatcagagagctgctgattctcaaaacaatggcgaaggaagtacaagtgcagcagaatcatctttctctcaggaggttgctcgagaacagcagcccacatcagcatctgagagacagaccccacgagcaccccaatcaccaaggcgcccaccacatcctcttcccccacgcctgaccattcacgctccacctcaggagttgggaccaccagttcagagaattcagatgacccggaggcagtctgtagggcgtggacttcanttgactcctgggataggtggtgt

SEQ ID NO: 2896 - DNA, 446 bp, Cricetulus griseus
  misc_feature (3)..(15): n is a, c, g, or t
gannnnnnnnnnnnngtgtgagtactattgcttatttttgaaagccagaagatgactttggagaactctggttcttccaccttgcttttgagacagagtctgttttagcttctatactgactaagccagctggcttgcgggtgttctgggtgtgtcttctttgtctgctgccccttccactgtggaattgcttaaattaagatagccactacatctggcattttttacttgttggttctggtgatccaactgatcagctgtgagtggcaaatcacttctatcaattgaatcattgaactagctgtcatattgtagtttttgtgtgtgtgacacagcctagattgaccagactcaggcaatgctttttccttagctattctagtgctgggattataggtggttctagattggaacccagagcctatactaactagtaaagtgttatt

SEQ ID NO: 2897 - DNA, 582 bp, Cricetulus griseus
cagacatgaagagtccaggacgctgcagtcacacactcaaatttagccctcttcattatgccatctctatttgagcaagaaaaaaacagaattctctccatttcaattggactaaagtgatcaaagctttaagtaggaaattccaaaaaggaggtgactccatccttggtattcccagcttatcagagttggggcattgctgaggaattagccatcttaatttctgagttttatatgcaaatttgattattctgatcttaacatctatggccataaaaagtccatatgcaggtgggcctaatctgcaagaattatcatatatttataaattatcatacatttaaatatgatatatgtaaattggactttgaaatgctgtgtattactagaattatcaaggaagagcttaatagaagttccacaattgcctttttctatgaaaagaataaaagaaaaatcataatctgctttccccactcttatgtgatagcaatgattgtagtaatatttctaggtgctaagtctccctaaattctcaagcattagtatagtggagaaaatagtacagacattggtgtcagc

SEQ ID NO: 2898 - DNA, 352 bp, Cricetulus griseus
  misc_feature (152)..(202): n is a, c, g, or t
acagcaacgaatactcttcagatccccagcctcgggatgtagtgtctaaatacaaagccctggctcacaagctttatgagcatgaagtcagcttattcaaaaataaaacaaataatcaaaaaggaggctcttccacctggatgaagaggagnnnnnnnnnnnnnnnnnnnnnnnnnnnnnnnnnnnnnnnnnnnnnnnnnnnccaggatgatgctggtcacacactccagtttgtaaaaatcctgttgaaccttgttaaaaagaaaggcagcaagcagcagtgcctcatggctttggataccttcaaagagttactcattacagaccttctgccagacagtctgaagctacc

SEQ ID NO: 2899 - DNA, 566 bp, Cricetulus griseus
ggatccactacggagtcatcacgtgtgaaggttgcaagggattcttcaagaggagccagcagaacaatgcctcttactcctgcccaaggcagagaaactgtttaattgacagaaccaacaggaaccgttgccaacactgccgactgcagaagtgtcttgccctaggaatgtcaagagatgctgtaaagttcgggaggatgtccaagaagcagcgggacagcctgtacgctgaggtgcagaagcaccagcagcggctgcaggagcagcggcagcagcatattggggaggcagaggcccttgccagggtgtacagcagcagcatcagcaacggcctcagcaacctgaacactgagagcggcggcacctacgccaacgggcacgtgattgacttgccgaaatccgagggatattacaacatagattctggtcagccatcgcccgatcagtcaggactggacatgactggaatcaaacagataaagcaagaacctatctatgacctcacatccgtacccaacttgtttacctatagctctttcaacaacgggcagttagctccggggata

SEQ ID NO: 2900 - DNA, 448 bp, Cricetulus griseus
  misc_feature (15)..(34): n is a, c, g, or t
  misc_feature (241)..(268): n is a, c, g, or t
aaatctagactttcnnnnnnnnnnnnnnnnnnnngtgtgtgggatctgtgtgtcagagtgtatggtagcaggtaaattgagagcaaggagaagtggtgttggaaatttgaggtatttggtcctagtttattagatgtggggattgaggttttcagtatatggcttttgacttcagaagttgatcttgacttgaagtgttttgttgatttacaaatttgtttttactctttgacagatcttnnnnnnnnnnnnnnnnnnnnnnnnnnnncaagtcatttagttttggtaatcaagtctttatgagaacttagctcctcatatgcccatatggtattatctgtcttagtgctaggtaggaataaattattaatttttacttgtagcccccataatgagcaagatttagtgagggtatgacacttattgcatataattaacttgtaccagg

SEQ ID NO: 2901 - DNA, 578 bp, Cricetulus griseus
  misc_feature (2)..(19): n is a, c, g, or t
  misc_feature (49)..(67): n is a, c, g, or t
gnnnnnnnnnnnnnnnnnnataaagtcacaagcatccatgaaagagatnnnnnnnnnnnnnnnnnnnggatgtgtgaaatttatcagtaagtgttaagtcacgagagagacttctcagcaaataaagctgcgatctatccatttgatgtgaagaggcaaactaaagtgtttaacttggtagacagaacaaacacctgccatacactcagaccttgggttccatccctagcaccccaaaacaaaatcaatatcttggcaacatttagcttctcctgaagtgagttattgccaatggaatgctttggaaatctccattatgttcataggaatgtgccccacacactgacaggagtgtgcaaattagcaacgcttacacagaaagcctgtgaagacactggtctgactcctacgacatgtccctgacccacaaataaaaggcgggaggaggtgctaatagattctttcaaccacttataaatctcctcaaaactatttctagtcaatcattaaaggcattttgtattgaaaaattgtgatagaaatatcaacaattaaagttagaaaagaggccaagaaaa

SEQ ID NO: 2902 - DNA, 578 bp, Cricetulus griseus
ttttcaattaaatctttgatgaaacactagcaaaatggtacactctgaggagcagttacaatctgcctggagtggtgtcacctggggcagttgggctgactaaagtaagatatcatgaccgttgtgctaccagagttgtcctggtttgtgctgaacactatgccataaatagaatgagccttcttgtgttacccccaggttagaacctttgtgcccaacaaacagtacagtaaggactatcatttttaaatggaatgtgtaaacttcagctcttgttttgtatgattgttactgactttatgcaatctagctgtggtgtattacagtgccttaatcctagcaagggtatggaagcttattctagaaatgatttcagagcaacctacaacttgacactatgcaaaacacttgggaatgtgctttatcagactagggaaacaactgtatagataatacccaaggcctgcaggcctggaactctttatgtagaatgagctggccaggaactcagagatccacctgcttccaccccctcgtgctatcattaaaggtgtgcaccaccacctacttccatgggc

SEQ ID NO: 2903 - DNA, 488 bp, Cricetulus griseus
gtgggaagtcggtgccacattacgctgcgatcgagcctagtggaaacggcctaatgatcgtgtcctataagtccttcacggctgtttccattgatcagagtcttgaagaaagcatggatgaagacaggccagagaagaccaaagatcgcggtggttactggcaacaaactgatgatgatttgacagtgactgtaaggctccccgaaaactgtgctaaggaggatattcgagtacagtttttgccagagagcatcaatgttacactgaaggatgtccaggttctggaaggaaggctctactcatctgttgaccacgaaagcagtacatggacaatgaaagagaatgacggcttggagatttccttgattaaaaagaatgaggggctgacatggccagagctgttggttggtgacaaacatggagaacttctgagaaacccagcccagtgtgccgaaatagcagagcgcttgatgcacctgaccttcgac

SEQ ID NO: 2904 - DNA, 493 bp, Cricetulus griseus
caataagtcagggcatcaaagactaaagcatatgcagaactcaaagtgtaaacactcaagtgataaagctttattgaaacacacatgcatgttgaggtggaatgccaaagaacaagtatgagccaggactcttgagttacacttccattgcaggaccaatccatactgaagggatctttgaaaaacattctatacaatcaacacatatgatcttaaccaccccagctgcatgcaatccagggaccttacaggaaaagtcaattcgcagctggctccattgacaggatttctcctcgggcacagacaccatccacacacacacacacctgtgtatagacagactgctatgactgaaaaggccagtctagaagagtgactagcaggaaatgaaagctttcttggtctctcttttaaatctaaacacattattcccctgttacccataggtcaagttcagaaacaaccaaaaacaggaactgaaaaatatattagg

SEQ ID NO: 2905 - DNA, 580 bp, Cricetulus griseus
  misc_feature (523)..(523): n is a, c, g, or t
  misc_feature (552)..(570): n is a, c, g, or t
tacatcaacttagagggaacaagaaggccagaaatacattttcaaagcatatagaacaactcaaacaggaacactataagaaaaaggaggagaagaatatataagtactttaccaagggcttttaatactctcttgcctgatctagaagagattgaacatttgaattggttggaagctttgaagttaatggaaaagagagcagatttccagttatgttttgtggtgctagaaaaaacaccttgggatgaaactgaccatatagacaaaattaatgatagacggatcccatttgacctcctgagcactttagaagcagaaaaggtctatcagaaccatgtacaacatctgatatcagagaaaagaagaatagaaatgaaggagaaattcaagaagactttagaaaaaattcagttcatctcacctgggcaaccatgggaggaagttatgtgttttgttatggaggatgaagcattcaaatacatcactgaggctgatagcaaagaagtatatggtaggcatcancgagagatagttgaaaaagccaaagaagnnnnnnnnnnnnnnnnnnntgagcattct

SEQ ID NO: 2906 - DNA, 578 bp, Cricetulus griseus
caacacctccccagcactcttcatctagagagcatctaggtgtgtggacttcagggcatctgttttatccccactgatgtgtatatatcttggcaatctggcaggcacagttctctatgtcttcatcttgattgatatcagcaggaccaatgagaagctagtcccacatatgtggcaaaccttcacccactccagtcagtggggttaaaggaagcactcattcagtatcatatccctgactgtttacaggtttagcaggaattcagtcattgtctcaatcagatcagcttgtcatgatcttcacctcttgagctgcctttttcaccctcttctcaaggcaaggagcttgttgcaactttaagtcaggttcagtcctcatcttcccccaggaaaatgcaatcctcgtgcttgatggggtgtgccaacggtgcaatggcagtgactgagggcccaagaatgtcactgccatactgccaagtggcttcagatattgttgcgcctatacagggttgattcatttcctttaaaactaaagcttatttttaggcctgcttattagttgtattcctattataaca

SEQ ID NO: 2907 - DNA, 450 bp, Cricetulus griseus
  misc_feature (406)..(406): n is a, c, g, or t
gcaggggcctcatccaccttcccaatgcaatgctcagcattacgtaagaatggttttgtggtgctcaaaggccggccatgtaagatcgtcgagatgtctacttcgaagactggcaagcatggccatgccaaggtccacctggttggtgttgacatttttactgggaagaaatatgaagatatctgcccgtcaactcataatatggatgtccccaacatcaaaaggaatgacttccagctgattggcatccaggatgggtacctatccctgctccaggacagtggggaggtacgagaggaccttcgtctgcctgagggagaccttggcaaggagattgagcagaagtatgactgtggagaagagatcctgatcacggtgctgtctgccatgacagaggaggcagctngtgcaatcaaggccctggcaaaataactggctcccagggtgggg

SEQ ID NO: 2908 - DNA, 579 bp, Cricetulus griseus
actgtcttttctcagtcttctggtacattggcttcaaatccaggtacatttcagaggtctgctggtctccagggctcaaatccagcaattttcccaagagcctctgggccactaggccccaaccaacctaactttccaagggccactggccttcagggtccaagtccagctgccttcccacgatctgctggtccattaggcccgggtcaagttgctttcccaaggtcagccgctgggcaccttggctcttctccagcaggccctgtgggtatcaacccaactccttttgcaaggccaacaggaaccctgggtcttaacccagcttcctttccaaggatgaatggccctgtaaccaagactgtggtcccatttcctcgggtaggcagcctccctggttcaaatccagctgctttccccagaccagggggtccaatggctgcgatgtacccaaatggaatgttacccccttaaataccatttttcttccagggccactttgttttttaagcactgtggttctgtggtggggctgcctcttagataaaagagtatatttggagctacagtctgaagaactag

SEQ ID NO: 2909 - DNA, 81 bp, Cricetulus griseus
  misc_feature (28)..(28): n is a, c, g, or t
gcatgccccagggaggggaagctaactntggtggggagccataaaaggtgcggtggtggttttaaggtgattactgggaaa

SEQ ID NO: 2910 - DNA, 579 bp, Cricetulus griseus
tctctccgtccactaggaagagtatactgaaggagagggtcatggacttggtcactcagacggccatcctgcccctgctgtttggctgcctagggattttcagcctcttccgggtgctacagcggatccgctcaaggacttacctgaggaatgctgtggtggtggttacaggtgccacctcagggctcggcagagaatgcgccagagtcttccatgctgcaggggctaagctggtgctctgtggtcgaaatgtgacagcccttgaagcactcgtcagtgaacttgctggttctcatacctcccagggacagacacacaaaccttacatggtgaccttcgacctcacagatcctggtgctattgctgcagcagcagttgagatcctacagtgctttggctatgtggacatcctcatcaataatgctggggtcagctaccgtggtgccatccgtgataccatagtggacgtggacaggagggtgatggagataaactattttggccctgttgctctgacaaaagctctactgcgctccatgatcaagaggaagcgaggccacattgtcgccatcagcagta

SEQ ID NO: 2911 - DNA, 578 bp, Cricetulus griseus
  misc_feature (422)..(442): n is a, c, g, or t
cccataggctggcagaccatggtctcaagaccagctgcaagttatattgcaactcattatgcctatttatttacatactgcctaaagtgatttcacacaacagtgaaattttcacacaacggtggctgtgtggagtaactgtgatggagactgtatgattcacaagtcagaaatacacatttcctagatggatttcaaaaacaattcagagaacagaaacgtgtccatgaaatatcagcatgtatcaagctataaatgtgtcatttagtggcatccagaggtggtaaaactgtgaagaaaatagatggaataagaaccacagacttcgacagaatttctaaaagataggggctgggagtattgcttgaaaatgggataatgaaggagcttcaagtgatacgtaagacttaaattattcttgnnnnnnnnnnnnnnnnnnnnntggtaaattgtgcactctgtaagcctgaggacctgagtttagatccccagcaactacataaaaactgggcatggaaacacatgcctgtcatcccactgctgagagactgtggggacaggaggttccctgggagtgg

SEQ ID NO: 2912 - DNA, 535 bp, Cricetulus griseus
  misc_feature (126)..(126): n is a, c, g, or t
caaatacaggttctcggccccggagctgcaattttataccagtgctgctgctgtggccttgctgattccagcatggaccttcttcatggatgtccccgtgattggcaggagtgggaagagcttcanctacagccaggacatggggctgctgctgctgacaaatggcgccttgtttcaccttcagagtgtcactgcatatgccctcatgggaaagatctcccctgtgactttcagtgtcgccagcactgtgaagcacgccttgtctatctggctcagcatcattgtttttggcaacaaaatcaccagcctgtctgccatcggcactatccttgtcacaatgggtgtcttgctctacaacaaggccaggcagtatcagcaagagaccatgcatagtctggccacagccactagccagggcccagaggatgatacagagtcactggttcccctggactctagacaacaccactgagttccttctaatactgtgtcccccagaaaccaagcctagactgtcctcctgcactatatgcta

SEQ ID NO: 2913 - DNA, 458 bp, Cricetulus griseus
  misc_feature (29)..(53): n is a, c, g, or t
  misc_feature (78)..(95): n is a, c, g, or t
actaaagcagacacactgaaagtgaaggnnnnnnnnnnnnnnnnnnnnnnnnnagaagggccaggaagcaggaggatnnnnnnnnnnnnnnnnnnagtatgacaaaagcctctccttccaggacatgaatctgtcccggcgcctcctgaaggccattacagccatgggcttcaagcagcccaccccaatccagaaggcttgtatccctgtgggtctgctgggaaaagacatctgcgcctgtgcagccactgggacaggcaaaactgcagcttttgcgttgcctgtcttggagcgtctgatctacaagccccgccaggctgcagtcactcgagtgctggtgctggtccctaccagagagctgggcatccaggtgcactccgtcaccaagcagctggcccagttctgcatggtcactacatgcctggctgtgggtggcctggatgtgaagtctcaagaag

SEQ ID NO: 2914 - DNA, 426 bp, Cricetulus griseus
  misc_feature (13)..(44): n is a, c, g, or t
aggccggtaggannnnnnnnnnnnnnnnnnnnnnnnnnnnnnnncgccaccaacgcccagctgatgccgctatttttaagagatacttttgtttattctgtagaagaatactcagattaacctattatgtaagaaaatccaaacacgcgtggtatttgctctaaatgatagaaatgctgtaaatcctgtgcagtctatccagttagcctgagtgtaaggtttttgctattagttttacgctgtggctgtcctaatggtctcctgccatcagtctttacattctttgctttcatctttgaagcctctgtacagaaggttttttttctatccatcccttgatcttacacccctaactactgctcaatcttcataatccatctttttgaaatttagcagatgtgtgctcctacttttcttcctcatttt

SEQ ID NO: 2915 - DNA, 580 bp, Cricetulus griseus
  misc_feature (141)..(161): n is a, c, g, or t
  misc_feature (164)..(176): n is a, c, g, or t
  misc_feature (253)..(271): n is a, c, g, or t
  misc_feature (401)..(418): n is a, c, g, or t
cccaggatacaacagatgctcagcaaatcgtgcaggctagctgaatgccacattagtgttcaaggttaaaacagtacgaaggggctgccgagatggctcataggttaagagcactggctgctcttccagaggtcccgagtnnnnnnnnnnnnnnnnnnnnngtnnnnnnnnnnnnnctatagtgagatctggtccccttttctggccttctggcatgcatacagaaagaacattgtatacataataaataaannnnnnnnnnnnnnnnnnngtacgaaggtaagacgagatcccagtaaaccagctgctaaatgagtcaccattgctcgaaaagttcagtgctaaaaaagataagaaaccatgcaagaaaacaagtcaagttcacaggcggggcacggttnnnnnnnnnnnnnnnnnngactggagatgtcaaaagcatcaggttcaaagagagaacactgtccggggtgggcggggctggctgcggactgtatcatcttttgaaatataaaatccacatgtgtgcaaacatagtgatgtcctggaagctgaaattcttgttcatgataccgagtgtaat

SEQ ID NO: 2916 - DNA, 579 bp, Cricetulus griseus
tctgatgtggatgctgggagctgaactcagcagtgtactctgagctactgaagtcatctcagcagcctcggaagcagaaatctttcacatttattatcatggaggggcacatactaatgctgaccccttttctccctccaaatcatctcctttctgcctttgtgtcatacatgcattctgctgcagagaacaactttgtagagtcggctctcccttccaccttttacataggttctgggattgaactcagattgttaggcttgcacatcgagcgccttacttactgagccatcttgttggcccaagatggggttttataaagatacttaatagagacttaagcatgaggtttgagaaagagccactttctcagaaagacagacacacccaagagcatagggtgtgggttctaaggaagctccaaagacctcatagtgtggttatagactcatcatgggagacttgagagtagcaaccagatgtttttgtaaatgataaatcaattccctccatttacatacgagcatcatatgatttctgctttctaaaacttctagtaactacaaaacaatgttcatg

SEQ ID NO: 2917 - DNA, 579 bp, Cricetulus griseus
  misc_feature (286)..(337): n is a, c, g, or t
  misc_feature (339)..(352): n is a, c, g, or t
  misc_feature (384)..(403): n is a, c, g, or t
  misc_feature (406)..(439): n is a, c, g, or t
catccgtacccagtttgacgactgcactgttctgaccatcgcccaccggctgaacacaatcatggactacgacaggtgacccatggaaacccaagggggtgaggggatggaaagccatggaaagggaggtgatctgtggctgtcacctgggagtcgggaagaggcagggcaaatgaaagtatctgggcatgtatctcttagaatttgctatggcatgggagtacagaacaggggtcccaagttatgcttaagaagcagaataggcgaagtgttggtggtgcaagtnnnnnnnnnnnnnnnnnnnnnnnnnnnnnnnnnnnnnnnnnnnnnnnnnnnnannnnnnnnnnnnnncagagcgagtgccaagacaggctccaaagcannnnnnnnnnnnnnnnnnnngannnnnnnnnnnnnnnnnnnnnnnnnnnnnnnnnnaagaagcagaatatagaacagggttaattgggaagaatgacatctgcaaagacacagggtccttttggaattaccaacatgtgggggaaggtgcatcaggctccttagacattggaaactgcatggaccatctctgtgtt

SEQ ID NO: 2918 - DNA, 490 bp, Cricetulus griseus
  misc_feature (217)..(233): n is a, c, g, or t
cttgagtaacttttggaaagtataatattttaactaaaacccattaaatgttagacacactttctatattccctttactgcccgtttaccgaagagggaaatatttatgtgaacccagaaggctgatttatttattttattgtcttttttaataacttgcttttccctggtgctgggtgctttctgaggcccagacagacgccatgatttcttctgnnnnnnnnnnnnnnnnncccttggcctgcatcctcaggggcctgcttggcactttgcagcttcaaggaagactctggtaaatggaaataaatccaacctaaatgccccgcccaggagcagtgtgacttctggaggatgtaggtcagattagtgggtaagacccagcagaaacagccaaatagatgtggaaataaaaacactacttgagctggccttggtcctcttgcttgtcttgtctgtgtttgagtggttcacccggtttaacttgctggcc

SEQ ID NO: 2919 - DNA, 578 bp, Cricetulus griseus
ctttgtatagcttttggagcctgttctggtacttgctctgtagataaggctggctttctcatagacttgagacaatgctgaaaactaaatgtgagcattaagcctgtatactctccctctttgatatctttaaacattgtctccttataacaggtcttctggactggaacatacagtataactcaggatgaatgcaaacctaaaatgatgcccctgtgtttgtcacctgactgctgagataacaggcatgtaccctcctcttgtattatctgcaggtgattagagaagttgaagaattgaaagcatttgtatacagcgaactcaataatttcttcactgagtcgatttttctgtgaaaaaaagtagggaacaaaattcagtcatatttttattatgttcaatcaatcatacacttttctatgccttaaaaataaagacttttttttctgtatcaaactctaaggggttgatttaaaatggtggagaaataaggaaagatgacaatttttagacacataatgtcatggtaaaattttagacctaaattctctttaaatgattatgttgaaataaaaatg

SEQ ID NO: 2920 - DNA, 459 bp, Cricetulus griseus
gtatgtgcatgcactttgcatgttaggggtgcattgaatgtgtgtgcacatgcacatggggaaggggcgcattgaatgtgtgtgcacatgcacatggggaaggggcgcattgaatgtgtgtgcacatgtgcatgggaaggggcgcattgaatgtgtgtgcacatgcacatggggaagccagagttggtatcaggaatcatcctcagtgtgtctcttactcaatgagccaaggtctctcaatcaaacccagagctcactgatatgtccagccttgctaataggttgctctgggaacccctcatctctaccctctgacgctggaaagataggcaggcacccacacccacccagcatttacgtgggtttctttaaaaatgaagctgtcccttgtttatgtctttcaagagcgcttccatcttgtacagacactcattattcttggtccttccaaaaaaagag

SEQ ID NO: 2921 - DNA, 529 bp, Cricetulus griseus
gttttgggtgaggaaatgtgtttttaggtatgtgctgtttccagccaggagtcacaaactcagtagcctaaaggcagggaactaagaaagagtggggagtgtggtggagactgtgactaccttaaagagggcagccacaggactccaggtaggaaaagaaaaggtggggctaggaattggtatttcaaattacaatactgaagctcactgacttttaatttaaggagtaatttaatgtccaaaaccacagagcagaaatctggttgaacctgaggccaccagtttgcgaccccttgccttacagttagccttcccccaagtatatataaggttatattctttgccagggaaatgatggtgttatatataggagggagtgtgctagttcatttctacttcatctctcagagttaagctttattatgggaataacaacagataaaattaacacagccgcagataacatttatccccagtttctggtagggctcccatgcaagcctggctctccagtgagaaccacaactaa

SEQ ID NO: 2922 - DNA, 572 bp, Cricetulus griseus
gctgccatgtgggtgctgggaattgaacccaggtcctctggaaaagcagtgactgctcttaaccaccgagccatctctccagctgccttgtttatgtattttgagtctgataaagtctgtacaaaatttagcatgtctgggggatttcagtggtgacttagtgctgacttttattttttttgtgtttagattcagaaggtttgtaacaaaaaattatgggaaagatacacgcaccggaggaaagaagtttctgaagaaaaccacaaccatgcaaatgaaaggatgttatttcatggtaagttctcaccctgtcctccctgtgagattggagcttttgttgtcattgtcatcattatcttcttgctgtgtagccctggctatcctagaactcactatatagaccaggcaggcctcaaactccctgagatctgcctgccaaattcatgcatcatcactgcccagcaacttatttatgtcttcttaataaagataatatttctgtaacttttatatttgtgtacatattttcagtttcttttgtgataatgtaccttacaatgaacatttttttt

SEQ ID NO: 2923 - DNA, 572 bp, Cricetulus griseus; identical to SEQ ID NO: 2922

SEQ ID NO: 2924 - DNA, 530 bp, Cricetulus griseus
  misc_feature (499)..(499): n is a, c, g, or t
acctcgctcagtccccacagctgtataagcagatgtgcatatgtgctgattttgagaaggttttctgcattggaccagttttcagagctgaagactccaatacccatagacatctgactgaatttgttggtttggatattgaaatggcttttaattatcattaccatgaagttgtagaagaaattgctgacaccttggtgcaaatattcaaaggacttcaagaaaggtttcagactgaaattcaaactgtgaataagcagttcccatgtgagccgttcaaatttttggagccaactttaagactggagtattgtgaagctttggctatgcttagagaagcaggagtggaaatgggcgatgaggaagatctaagtacaccaaatgaaaagctgttgggtcgtttggtgaaggaaaagtatgatacagacttttatgttcttgataaatatccattggctgtaagacctttctacaccatgcctgacccaggataccctanacactccaactcttatgatatgttcatgaga

SEQ ID NO: 2925 - DNA, 527 bp, Cricetulus griseus
  misc_feature (16)..(79): n is a, c, g, or t
  misc_feature (102)..(240): n is a, c, g, or t
  misc_feature (268)..(321): n is a, c, g, or t
  misc_feature (345)..(392): n is a, c, g, or t
ctttattgtgggagcnnnnnnnnnnnnnnnnnnnnnnnnnnnnnnnnnnnnnnnnnnnnnnnnnnnnnnnnnnnnnnnnctgatgggcaaaaacaccatgannnnnnnnnnnnnnnnnnnnnnnnnnnnnnnnnnnnnnnnnnnnnnnnnnnnnnnnnnnnnnnnnnnnnnnnnnnnnnnnnnnnnnnnnnnnnnnnnnnnnnnnnnnnnnnnnnnnnnnnnnnnnnnnnnnnnnnnnnntgccggctgctgcccgtgctggtgccannnnnnnnnnnnnnnnnnnnnnnnnnnnnnnnnnnnnnnnnnnnnnnnnnnnnnaagacctctttcttccaggctttnnnnnnnnnnnnnnnnnnnnnnnnnnnnnnnnnnnnnnnnnnnnnnnnatgtgcagctgataaaaactggagacaaagtaggagccagtgaagccacactgctgaacatgctcaacatctcccccttctcctttgggctgatcatccagcaagtgtttgacaatggcagcatttacaacccag

SEQ ID NO: 2926 - DNA, 557 bp, Cricetulus griseus
agactataataatttcactttagatggtgaaattggagttaagcaattcttcactacaggacgtctcagagcttttaatgtgataagtacaagattatttatctctaagtaatagccttgtatatgaatgaaatcttttaaatcaacaagtcaagtgcctacagatttataaagaatgagagcaaactgatatatttgcaagtactaaagtgacaggctcctgtaaaataagactaatgagggttggggaggtggctcagtggttaaaccgattgctatgcaagtgtaaggacaatgttttagatccccagcacccatgtagaagtcagatgggtatagtagcccacctgtggcccacccctcaggaggcagaaatgggatctttagagcaagcgactagccagaccagctatatcaacaaactctggattcaggtagtggaatttggagaacagttgttggtatgatcaaggaagactcctaatgttaatctaagtgcacatgcacccatacacatgcaaacatcacacatgaaaaagaaaatccgaaggggcatg

SEQ ID NO: 2927 - DNA, 494 bp, Cricetulus griseus
cgacagggacaccctggggggctgtgctgtctttaccattctggatagaggactggccaaggctagccctgtccaaaagtggggagttcctgcttcggtttgtgctggtggaaaggacgttgtttgtggagggggtaggagtggtcttcttcctctctaccccaggcaaagggctggcaggcactttggcggtgctgctggctttccgccccgcctcatcctcaggccgcttattttctgcattgttactctgggtcttcttaaagtaggaatttgaggtgggaatggcagggacggcctggtcgctggagcgtcgctgcttagggttggcagaaacactgcgctgaaccttgtgggatggagatggggcactactgttggtcaaatcagctgaaggccggggcttcaaagtgatggtgtcaccttccagctcaaagctcttgtagcctaaaagcagataggtggccatcacttcgttgtacctctgtcccacc

SEQ ID NO: 2928 - DNA, 522 bp, Cricetulus griseus
acatgtgccatggcttcacatgcctatttaccagcaggagcttgtgtactcagtcacaactcatgctcacagctattcttcctttacaagtgtacaaatgtatagtctgaaagggtgttgggtgggtccccaagtctgtatcctctttggctctaagactgacttcccttgtgggttcttccaccggatacagattctccatgggtctcccttggtaagggcaatgcacaagcagtggcttgaccattatcaccaccagaggaaggcagcctgggtgtctgtgaccccatcatgttggccctttggaagctttcctttcaaggaggcttttctctgaggacttgggcacttcataaagagcacctgctggtggtacttgtgttgtgagggaggtgacctttgcacatttagccaatgcactgctacttgagagagagtctgtggcactgatggtgttaggaccaccaaggcgctgaggggactggagagtttcccattgcttgaagtatggagacagcttct

SEQ ID NO: 2929 - DNA, 502 bp, Cricetulus griseus
accttgtatgaccacttctggtgggaccgactatggctgcctgtgaacttaacctgggctgatctagaagacagagatggacgtgtctatgccaaagcctcagacctctacatcacacttcccctggccttggtctttcttgtcattcgatacttctttgagctttatgtggctacacccctggctgccctcctgaatgttaaggagaaaacccgactacgagcacctcccaatgtcaccttagaacatttctacctgaccaacggcaagcagcccaagcaggtggaggttgagcttttgtctcggcagagtgggctctctggccgccagatagaacgctggttccgccgccgccgcaaccaggacaggcccagccttctcaagaagttccgagaagccagttggagattcacattttacctgattgcctttgttgcgggcatggctgtcattgtggataaaccctggttctatgacttgaggaaagtttgggagggctatc

SEQ ID NO: 2930 - DNA, 567 bp, Cricetulus griseus
tgacttattaaatataatctgaaaatactttgaattttcatatgcctcagccccaaaagggatatgaagtatcaaatcctccccgccagactcagcgatatatggggaagaggatggagatgtattccaataacaaaaatagataatgcttctaggacagttttctaagttttcatatcatgaatatgagtagaatttcatgaaacaatttccctgaatctattgatttttcatcataaacacttctattacattttaaaatatagtgaatcttgaccaattgacctgaagttggcatgtgaggggggagggaaactgggatttcttaagacgaactataactcataaactgacactacgccacccctctctttcctaggacatcccctctgcagtctctctctagggttgaggtatactggaagaaaggccagagggtgatctggagatgtagagcactctcacagtccctccagaattgaagaatgaaaaggagaagacaggatcactggtttcgtttaggtgagagtgaggaagaggagcagactcaagatgagtctctgagcc

SEQ ID NO: 2931 - DNA, 438 bp, Cricetulus griseus
  misc_feature (382)..(382): n is a, c, g, or t
aatataatcctgaattaggtgcaagagcacctagtagcctgcccctagatggtgtggaggggagccttggcctatttccagccttcaagcccagctgtcttgtggggttttgttttgtttgaaggcattatccctttaggaccaatgtgggtacctgcttaattggggtaaacttgtctagagttggggatatgtccagccttggtcctcatgaggtccttgaccaacccatagctatagtcactgtccccagatatactgcagcacaaagacaaggttcctcctaatgccaggctactgggcagcaacagaaagtgcagcacaccatcttcagaactattggacaatacttctgagagcagcagttaaggaggggactcanacaggatatgaagttggggttccatcttggtcacccatttggctttgttttgatgt

SEQ ID NO: 2932 - DNA, 519 bp, Cricetulus griseus
taggttctgggatgggatgaatttaatggaaaaaaaattgctgatcgttatgactgtgcctaatgtagtccttttccttttcccctctcctggctggaaactgtagaactggtgttttgcttctgatgcatgggtctgtaattaaatcctgtttgaataattctgccatttacatcaagtagcacagagacactttccagctgccatgccactcctgtgcctttcctctgagaattctggtggtgctgggggagcagtcacggccctggatagtgtggtttgtacctgtctgatagagaggtattctagcacaggagcctgcttgttcccacttcagtctgagaagctcattacacaacttcgtactcagttcaagaaataatgttaactgttcttactatttaaaccatgtaagttatccaaacagcctttattatcactttagaaatgtctgtttttagtctctttgttgtatatgtatagatacataaatatatagcaaatcgatcaaaatgtgtt

SEQ ID NO: 2933 - DNA, 540 bp, Cricetulus griseus
gaagaacgaggaaaggaggatgtacacattggaagcaaaagctttggctgaagaacaaaagcgtttaaaccctgactgctggaaaaggaaaagaaccaactcgggctctcaacaacattgaacctgatgcttgtgtttgtaagtctgtatctacataagtactgactctggatggaaaagcttggaagaccttggtctcaccatttgtcctgaatttgcgtgaacataagatactgatagtattgagtcctgaagtgatttaatgagtgaggatttgctttctccattagagcattaagtaagctacaactatcaacattgtaaaccaaattgccttattttccttccaaacttcatatatgtctatcaggtaatataggcttgaaaattgataccctgtggtgctaaagtacagtagaaagacgtgtatacgtgttttcttttaaattgtaagaaggggaattaaaacatatgtaactgctctttatatcagctccttactgcttattaatctgtattgtacccatgatatcaggaagg

SEQ ID NO: 2934 - DNA, 578 bp, Cricetulus griseus
cctgtctagccgggaccatggcgtcgcgcaaggaaggcaccggccccagcgccgcctcggcgggctccgcgggctccgcggtggggaagggcaaaggcaaaggcggctcgggggactcggccgtgaagcaggtgcagatcgacggcctggtggtattaaagatcatcaaacactatcaagaggaaggacaaggaacggaggttgttcaaggagtgctcctgggtctggttgtagaagaccgactggagattaccaactgcttcccgttccctcagcacacggaagacgacgctgactttgatgaagtccagtatcagatggagatgatgcgaagcctgcgccatgtcaacatcgaccacctgcacgtgggctggtatcagtccacgtactacggctcgttcgtgacccgggcgcttctggattctcaatttagttaccagcacgccattgaagagtccgtcgttctcatttacgatcccataaaaactgcccaaggttctctctcactgaaggcatacagactgactcctaaactgatggaagtttgtaaagagaaagatttttcccccgaagcattg

SEQ ID NO: 2935 - DNA, 574 bp, Cricetulus griseus
actggttttggaggtggcccagcacttgggggagagcaccgtccgaaccattgctatggatggtactgaaggcttggttaggggccagaaagtcctggattccggggcaccaatcaaaattcccgtcggtccagagaccttgggccgaatcatgaacgtcattggagaacctattgatgagagaggcccaatcaaaaccaaacaatttgctcctattcatgctgaagctcctgagttcatagagatgagtgtggagcaggagatcctggtgactggtataaaggttgtggacctgctggccccatacgccaagggtggcaagatcggactcttcggtggggctggcgttgggaagacagtactgatcatggagttaatcaacaatgtcgctaaagcccatggtggttactctgtgtttgctggtgttggtgagaggacccgcgaaggcaatgatttgtaccatgaaatgattgagtctggtgttatcaacctaaaagatgctacctccaaggtggcgttggtatatggacagatgaatgaaccacctggtgctcgtgcccgggtagctctgact

SEQ ID NO: 2936 - DNA, 499 bp, Cricetulus griseus
cagtatgggcagtatatggcaaatgggtggcaagtgcctccctatggtgtatatgggcagccatggaaccagcaaggatttggagtagatcaatcaccttctgctgcttggatgggtggatttggtgctcagcctcctcaaggacaagctcctcctcctgtaatacctcctccaaaccaagctgggtatggaatggcaagtttcccaacacagtgagctgggactctaaacacaattgtaactcaccataggctgcagtttcctgtgacactctgaagacatgaaaagtaaacatcggaaagtgaaaatatttattttaaaaattgaaatgttggaacctttagcacagctttgcttggtgaaggacacgtgtcttctagttctgcctttttaagtttttgttcatgatggatatgaacatgatttttctttgtgtacaaaaactaaaataaagtcaataaagacaattctgactaaattttgatataataggagaaaa

SEQ ID NO: 2937 - DNA, 500 bp, Cricetulus griseus
  misc_feature (348)..(378): n is a, c, g, or t
tgcctgaactttcctgtaaacagcgcgctgacaggcggcatccccgctgggtggagaatccgcgctcctggcgcaagtggcacttcttgcttttaattagcgagaggagaggcgaataagaatcggctgctcggcaagtcggtgcaggaggctgacttctgggaggctgggggaagagctgggggaggctgctggtcggctccggctgttttctcaatgaatagcatggcggggagactgaagccagccgcagcctcctcctaacgccggcggctgggtgacggcgacagccccagccctccaggcgggacctggctctcaagacgcgctcctttaaaagccctcttnnnnnnnnnnnnnnnnnnnnnnnnnnnnnnnagagaaaggctctgcggatccaaataccgcctggcaaacggcactggggaatggtgttttctgatgacaaccccttctgttggtgacaaagcctgtcgcccgcagttggccctggaaggaag

SEQ ID NO: 2938 - DNA, 313 bp, Cricetulus griseus
  misc_feature (279)..(306): n is a, c, g, or t
ctctcacatactgccttgaacagtgtgggagtgttctggagctgttaaaacaatatcagaattttaaaaacaacttgacagctttgattcaaaaagaagagggtatcatctcccagcaggcttcctacatgggaagggacaacctgaagaagaaggtagcagagattgaaactgtcaaagaagaattcaatgaacatttagaagttgtggacaagataaatcagatttgtaaaaatctacaatatcatctaaataaaatgaaaacctttgaagagcccnnnnnnnnnnnnnnnnnnnnnnnnnnnnggggggg

SEQ ID NO: 2939 - DNA, 479 bp, Cricetulus griseus
ctcgagacggagcggatggtgctttttatccagatgaaatccaaaggccacctgtgcgagtcctatcttgggaagacaatgttgtctgtagccagccagctcgaaaccttagccgtccggatggtttagaagatcctgaggacagcagagaagatgagaatgtgcctgaccctcctgatccagccagtcagcatttacgtggtcatggagcaggtttttgctttgattccagaagctttgatgttcacaagaagtgtcccctctgtgaattgatgttccctcccaactatgatcagagcaaatttgaagaacacgttgaaagtcactggaaggtgtgcccgatgtgcagcgagcagttcccgcctgactatgaccagcaggggtttgaaaggcacgttcagacccattttgatcagaatgttctaaatttcgactagcttttattaggagttagtacaatttagcaatctaaaaaaaaa

SEQ ID NO: 2940 - DNA, 502 bp, Cricetulus griseus
tttagcagccctgtctttgggcttgtggtggacattcgatcgctcccgaagcggccttggacttgggatcaccatcgccttcctagctacgctgatcactcagtttcttgtgtataatggtgtctaccagtacacatccccagatttcctttatattcgttcttggctcccatgtatatttttctcaggaggcgtcacagtgggaaacataggacgacagttagctatgggtgttccggaaaagcctcacagtgactgaacttcagggcatggttcaaagtggaagcaggatgcggagacactggtcctgggtgtgatgaagactcttttttcctcaatgtcccatttagactgggctgacgatgataaatgactcctgaagaagtgttcacatggtctaaactagcaaatggaggcaaggactacttacctaaaagtcttaccttgctcacccaccctcacacctgtctgcactggaacattccattccaagctgtatgtg

SEQ ID NO: 2941 - DNA, 539 bp, Cricetulus griseus
accagcttcaggccatgcatgcccagtcagccgagctacagagactggccatggagcagcagtggctgcatggacacccacacatgcacggtggccacctgccaagtcaggaagactattacagtcgactgaagaaagaaggtgacaagcagttataagttatttatttgttaatgctggctgtggaaaccccagttctagggggcagaaacgggactttacatccagtaggagctgcaagagcaaagaggaatatcgtctaaagatttctctatatatttaaaacccacaactaaaaacacatctgcataatagtgttcgtttgttgagaggatttcccgagacctatttgggtctccctgcatgacagtcccccagaaacgtggtgtgtcttgggttggactgacccctataaagcttacctgcagtcttggggtttggctttggttcttttccttgatttcccagtaggtgctagagtccgcccacactcttcactgtgcgcgcagacgctgaggcacgcgggctctggaaccgtg

SEQ ID NO: 2942 - DNA, 501 bp, Cricetulus griseus
gctgcgcggcgcagcgcggcggggaggttttggtatgaacaggattcggattcacgtcttgccaacgaatcgggggaggatcaccccagtgcccagatcgcaggagcccctttcttgttcgttcactcaccgcccatgctctcaaccgcgtctggaggggcaggaattttgcatcaagcatatccttgaagacaagaatgcacccttcaaacaatgtagctatatatcgacgaagaatggaaaacggtgtcccagtgctgcccccaagcccgagaagaaagatggatatttgccaggacacaaatcaggttctcttcaaatgctgccaggggtctgaagaggtaccctgcaacaaacctgttcctgtaagcctttctgaggacccctgctgtccactgcatttccagttgcctcctcagatgtataagcccgagcaggtactgtctgtgccagacgatctggaagccggccccatggatctgtacttgagtgctgccgagc

SEQ ID NO: 2943 - DNA, 395 bp, Cricetulus griseus
gaggtaccatgcttagctttcctgcagatttaatgatcagtgttgtggggtttttgtttgtttgtttgttttggttttttttttcatagctatatagcctttaaccttactttcaggtcaaattcaaaattttacatttgctaataccttcattataatatgttaacactttgcattctattgttgaggtttctgaccttgattttaaggggatggaaaagctccttaacttttgtcttccagtgtcaggtttcatataaactggtacaaaatctttttttctgagtaaatgtgaaggaccactattgggtcttggataaactgttcaggacaaaagtgaataccctaccttattccaggtctattgatttggggaatgaatggggaggtgaaaa

SEQ ID NO: 2944 - DNA, 282 bp, Cricetulus griseus
  misc_feature (8)..(48): n is a, c, g, or t
tgcgtccnnnnnnnnnnnnnnnnnnnnnnnnnnnnnnnnnnnnnnnnncgggggggaaccccagttttttttccctttaagaagggttaatttcccccctggggtaaaaaaggaaaataatgttttccgtggaaaattttttcaccctcaaatatcctttgggataggacctacctccccccactgtttctaagctgagggagtatccctctatgtgaaataagctcccaaagcccattcctatgctaagaataagtactgatctactacaagaagccctat

SEQ ID NO: 2945 - DNA, 247 bp, Cricetulus griseus
ttgatatttgtctcatcaagacgtcaaactcgacttactgctttagagttgatagcttttctggctactgaagaagaccctaaacagtggttgaatatggatgagcaagagatggagaacatcattgggacaatacgagattccaacctgaatctgactctagcgtttgggataggaatgcatcatgctggactgcatgaaagacaccgaaaaactgtggaagagctgtttgtgaactgtaaagttc

SEQ ID NO: 2946 - DNA, 487 bp, Cricetulus griseus
gggcatgtgcctgtggaggccaaaagaaggccttctggattgttgatactctggagctggagttagttacaggtggtcttgagccacatgacatgggtgctgggaactttggttctctacaggaggacatacccataaccactgaaccatttctccagtcctctatttacttggaaatcaagtaaagggtccctatccttaccaaaggccaccagccaaatcaaacaagaagcgacacctaactcaattaattacaattctataccctagttaaggataaagtatgaagatgtgtaggaatccagccttccttcaagagctacatctggagtcttatgcactcctcttatcccccaaacacattgttgatcctgtcttctgaagttccaagattgttctgccaaccgttttggaagggaatggagatagatgaaggagcctgactggtacagtactcattttgcactttccactgacaagacaaccg

SEQ ID NO: 2947 - DNA, 579 bp, Cricetulus griseus
  misc_feature (434)..(456): n is a, c, g, or t
tcctgtttcagaaaaacaaaacaacaaaaaagagcacttcctagtctcctgtctgacttgagtcaggctcctagtaccaggtcaactcagggtggcccgcaacctcctgtgactccagttccaggggatctatgctgtctttctggcctcagtgggcactaacacacacatggtacacacatgtacataaaaatcaatcttgggatctgcccttgggtattgaaattttgaaaccatcaccgtttctcccgcttctgacaagctggtgtgacaatgcaaatgatacttctttttggcaagaacctgttggtgaatacctacatgcttactcaaagacaaccacataccaattactaaacatttaaaatatatttctaaacaaaatgggcaactcagtcatcgtaactgctgatctccagagcagagtgacccannnnnnnnnnnnnnnnnnnnnnntaccataatcaggggtgaaaaatatacaacttgtttctgaaccaaagccacaacttctatttctgcagtctaaaacatttcactgctagtatggcagccctggttgaaattatgtagttcctt

SEQ ID NO: 2948 - DNA, 517 bp, Cricetulus griseus
agcagatgcgcattttgatggttggattggatgctgctggcaagacgacaattctgtataaactgaaattaggggagatagtcaccaccattcctaccattggttttaatgtggaaacagtagagtacaagaacatttgtttcaccgtatgggatgtcggtggtcaagataaaattaggcctctctggaggcattacttccagaatacccagggtcttatttttgtggtagatagcaatgatcgtgaaagaattcaggaaggagcagctgtgctgcagaaaatgcttctggaagatgagctgcaagacgcagtgctgctgctttttgcaaacaaacaggatttgccaaatgctatggccatcagtgagatgacagataagttaggtcttcagtctctccgtaacagaacatggtatgttcaagccacttgtgctacccaaggaactggtctgtatgaaggactcgattggctgtcaaatgaactttcaaaacgctaaatgaactgggatatctaacc

SEQ ID NO: 2949 - DNA, 146 bp, Cricetulus griseus
aagtgcaatagattttcaagtgtattgtgccttgttctaaaacttttattaagtaggtgcacttgacagtattgaggtcatttgttatggtgctatttcaattagtctaggtttaggcccttgtacattttgcccataacttttta

SEQ ID NO: 2950 - DNA, 561 bp, Cricetulus griseus
  misc_feature (2)..(19): n is a, c, g, or t
  misc_feature (250)..(268): n is a, c, g, or t
gnnnnnnnnnnnnnnnnnncctagctcgcgcgtccgccgggatgagctacgaccgcgccatcaccgtcttctcgcccgacggccacctcttccaagtggagtacgcgcaggaggcggtcaagaagggctccactgcggttggtgttcgaggaaaggacattgttgttcttggtgtggaaaaaaaatcggtggccaagctacaagatgaaagaacagtacggaagatctgtgctttggacgataatgtctnnnnnnnnnnnnnnnnnnncactgccgatgcaaggatagtcatcaacagagcccgggtggagtgccagagccaccggctcaccgtggaggaccccgttactgtggagtacatcacccgatacattgccagtctgaagcagcgctatacacagagcaatgggcgcaggccatttggcatctctgccctcattgtgggatttgactttgatggcacccccagactctatcagactgacccctcatgcacataccatgcctggaaggccaatgccataggccggggcgccaagtcggtgcgtgaattcctggaga

SEQ ID NO: 2951 - DNA, 526 bp, Cricetulus griseus
taaatgctgggcaagcgctggcagcctgcctgtgattccagcactgaggaggtgaacacaggatctctggagcaaactagctaactagactaggtgagttggtgagctctaggttcaagtgagagaccctacctcagtatgtagagagcatctgaggaagacatctgacattaacctttggtctcttgaaaaccaccagaggaaaaggcacgtaatacacaagaaaataatgacaaaactaatagtggcagttggaggtggctcagtggttaaaagcacccacatcagacagctcacaaccacctgtaactccagctttaagggatccgatgtctctggccgctacaggcaatggcatatacacggatacaaaattggaaagaacatatttcttcccatcagaagaaagggatgtgagaaacgtgaattatctttaaagtggtgaaagaaaaaaacttcatatctaattaaaatgttcctcaaagccgggcgttggtgacgcacgcctttaaacccagcactcggg

SEQ ID NO: 2952 - DNA, 325 bp, Cricetulus griseus
ttttagaatgctacctttgttcttcaaaagctactgcttatacagttatttaaattcccttacaattctgggatggggtgtttaaaaaacactatttaactttctaaggaaagtgaatagccacattgttttgacaactctgtctgcatcactgtgttcaaggaaataattctaaggtttatcccctacatggattcattaattacacattggaattgaaaatgaaaactaaagttaaacttagacagtatttaatttttaatatgatgtcactaatgcaatcattactaaataaaaatgtgttttgaaaagttataaatgcatt

SEQ ID NO: 2953 - DNA, 579 bp, Cricetulus griseus
accatgcgagtgaaacttgcctcccgaatgtggaaagctacaccaaactggggaaccccacacgatctgaggatgtcttggattatggacctttcaaagacacccctgcctatagtcaggatacttttaaggtacactatgagaacaacagccctttcctgaccatcaccagtatgacccgggtcatcgaggtttctcattggggtaatattgctgtggaagagaatgtggacttgaagcacacaggtgcggtgctgaaggggcctttctcccgctatgattaccagagacagcctgatagtggcatctcctccatccgttcttttaagaccatccttcctgctgctgcccaggatgtgtattaccgggatgagattggtaatgtttccaccagccacctcctaattttggatgactccgtggaaatggaaatccggcctcgatttcctctctttggaggatggaagacacactacattgttggctacaacctcccaagctatgaatacctctacaatctgggtgaccaatatgcactgaagatgcggtttgtggaccacgtgtttgatgagcaagtga

SEQ ID NO: 2954 - DNA, 368 bp, Cricetulus griseus
ctctggctgttgaaagactgttggagcctcttgttacacaggtgacaaccctggtaaacaccaacagtaaagggccctctaataaaaagagaggtcgttctaagaaggctcatgttttggctgcatctgttgaacaggcaactgagaatttcttggaaaagggggataaaattgcaaaagagagtcagtttctcaaggaggagcttgtggctgctgtagaagatgttcgaaaacaaggagatttgatgaagagtgctgcaggggagtttgctgatgatccatgctcttctgtgaagcgaggtaacatggtccgtgcagctcgagctctgctctctgctgttacccggctgctgattctggctgacatg

SEQ ID NO: 2955 - DNA, 505 bp, Cricetulus griseus
  misc_feature (398)..(416): n is a, c, g, or t
gctactgtgttgggacacctcaatgtacaagatcccaggggtcacagctgtcagcctttgtgaaatcacaagtaaaatataaacaagatgggaaaggaacagggaggagggagtgttattgtgctggcggttaaagtcgaggccgagtcttcaatctgacggagatgatgtctgagttaggccttgaccgacaaatgcattttttttaagattctgaggtcagagatggggatgttggaggttcatgaaataagcagatgtgggcagtgccttcagtagaaactgaggggtaaagtcaaggcactgctccaggtgtcctcgaagctagaggtcatttgaaaagtggctagtttaactgagggtggtggttcacgcctttcatctcaccatcagggatnnnnnnnnnnnnnnnnnnnaaagttggggccaacctggtctacatatcaagttccaggccagccagggttacatagttaaatcccggtctcaaaagaaaagtgtgtta

SEQ ID NO: 2956 - DNA, 432 bp, Cricetulus griseus
gtttacaggacataattcaaacaaaacaagagttagctggtatagtgagacacacctgtaatgccagctgaccgagaagctgaggaaggacagtaagtttgagggtagcctgggcaacctgctagaccctgtttcagaatgaaatgtttaaaagcgcagggatgtagttcaggaagcatgcttggtttcatctctcaacacagcaaacaaaacaaaagccagtgttcatatgtgtacatatacgtgtgtgttctcatgtgtgtacatgtgtgtgtgaatgtgtgtatgcatgtaggtgcccaaggggcatataggtgcccagggggtacaggagctctggaccccctggagctgcaattatagctcttgtgagttgccctatgtgggcactgggaacctttgcatgagcactgtttgctcttaactgctaag

SEQ ID NO: 2957 - DNA, 540 bp, Cricetulus griseus
tctgtgttgtagtaaaaccaggagggtgatagagttcattggtttcgaaatataacacagctggggatgtccatgtatttcataaaaaacccgtcaggaatgttttgtaggctaggcagcctgtttagcttaattgattctgtctgtattggtcccttgttcttcaggaacttgaaaatcttgaagtaagcgtaattttaagttaagatttaacctgaacacatgaattaaaaacttgacactgtataaaaatattttaattgactttattgctttctattttgggggaaaaaaagataaggaaaaggagaaaatggaaaaggaaagtcctctacccaccaagttgatgctttgaaaaagaagagaaaaagcagttttggtgtagagtacgccagacaatgataagggcaaggggaattaaaaagaaaaaagctcatggagactaagattgagcatagtaactgctgagttctctaactgggcttctgtatttcaagtaagagaccagaagtggtcttcctagggaactggaaaagctca

SEQ ID NO: 2958 - DNA, 457 bp, Cricetulus griseus
aaactatatacaagtgcttcattttaactccctcctcttttataagaaagtggacctagaaatttgtcctgtatgttttgttttgtgtttgtcagacaaagtctttatgtaacccagcctgccttgagcatatgatcctcttggattataggcatgaaccaccatactcagcttttagaatgtttttgtttttcttgagaaaccattgttgaagaaaggtattagaacatagagaaatgacatcacgcattgtgcaacatttctttacaaactattcatgcaaatgtctaagcatcgtatgaggcattggcctagcaagaccataaagcggtaagagtttagaaataatggagagagctgtgtgaggacagtgcactgtggggtttcagggcaaacaaacctgatctttcagttctgcttttgtttttatttcaagacaatctaggtatgttaccca

SEQ ID NO: 2959 - DNA, 83 bp, Cricetulus griseus
caacagctatggtgtcagtaatcaacaccgtggacacctctcatgatgacatgattcatgatgcccatatggactattatggc

SEQ ID NO: 2960 - DNA, 472 bp, Cricetulus griseus
tgttttattttccttaattacattgtcagaactctgaaatgaaaacagtctgtgtactataactgggtgaagtttctatatgcagtctgtttcatgtcatataggctgtgcttctaggcctccaggtcagcctcctctccagaagcagttggtctgaactttggatcagaagtgatctccaggaatgctttttgctgcttcctcaaacttaagagcattagccaaaacaatgttttaagtttgtaatttgtttctaaggttggtatcgacacttgattgtggtgatcaatagcagaaaaacgttaactaaagcttgtggaagtctaagctctacatcctattgaattttactctcaaagtgagtcttgttcaagtaatcattttggatacttgcctctctgatttttttcttgttgtagtgctaagaatggaaccaggggccaggggtggtggcacatgtctttgatcccag

SEQ ID NO: 2961 - DNA, 514 bp, Cricetulus griseus
  misc_feature (191)..(209): n is a, c, g, or t
aacactaggaccagatcttgtctgaaggctcagggtcagtgcccaggggtgcacacttgtatgctcagtccatacataatcacaaaacatgatggcacagttcttcctcaaaactgcaatgttgggggtaggagtgaaacctagttcacttttacttatgtagccatggctggttgagaactcagatctannnnnnnnnnnnnnnnnnncccaagctggttaacttttgttgaggtgggatggtaatgttaccactttgttatagggctctgtgctcagcattttggcatatatccatgagtggcgtgcttgtgctttgttgggtgtggacctgaggaggtgctgtgcatttatttgccatttaacattgagaattagtttctagcaagtgagttgcttgctgcttctgttactgctggccctgacctgttcatattgggtttgcccagctttccaaagatgaaatgaggggatcacatttcagaacagtaccgtgtagccgcatgcccatgag

SEQ ID NO: 2962 - DNA, 427 bp, Cricetulus griseus
agaggggagtgtcaggatgaagggaacaggggaagatgttctgagaacatatactagaagacagcagagtgtctgtttttatcccaaagtacaaaatgaagagaattacaatatattggttattacaactttgatcctaagttgaattcatgggcctggcatttgctgtcatagtcctcttttctttgttttgaatcccatgtccttgggcgctgtgtggggtaggcccctaatgttttgacaagatgcagattcttgtctactctgagaaatccttttgaactgaagtttcatattctagaaacagatgaatgttattggcacttggtgaattatttggaatcctgagttaataacgatggaaattggggagttaataaggacttgatcttcagcagttttgagctctgctctttaatgacccgag

SEQ ID NO: 2963 - DNA, 554 bp, Cricetulus griseus
gaggcgaccaagccacctccagtcccagatatggccagtacaccataatccaagaaaactccaccaaagttacagagaggcctccctttaatcgatcaagttcccaggattctttggatgacgttttgatggaagactattggacggaactagaaaacatcaagaggtctaatgaaaatcgccaagaaagtcaagaggccgttgttgtcaaagagcctgatgagggagagctggaagaagagtggctcaaggaggctggcttgtccaatctctttggagaatctcctgatgacccccaagaaagcattgcgtttttagccacactgacccggactcaagcggcagccgttcagaaacgggtagaaacggtctcccagaccttgaggaagaaaaacaaacagcaccacattcctgacgtcagagacatatttgctcaacagagagaagcacaagaaaaatctccaggtggctcagaatcaccgtcagccagaacgaaggaaaacaaatgccaaggaaaagatgaccaggcatcaagtggggctgttgataacaag

SEQ ID NO: 2964 - DNA, 280 bp, Cricetulus griseus
tgctgctttgtttgcccccactactcctggtatgagttatctagagatgaaaggtttgtcaagtttaacataaagcactgatttaccttgctaagtaaatggaaagataaattctaactgcctactatcagatgtcagttaatcggtgtcagcccctcatttactctctctcctaaaacctttcccacccactgtctggcttctgttcctctccctccccctttcccttcctgtctatccattgagtttatgaaatggaagagttaattgcatgcactat

SEQ ID NO: 2965 - DNA, 345 bp, Cricetulus griseus
ccccagccagatagccaaaggtgaggaccctgccttgcagatttggtggcaaccaaactgcacgccccacccaatctgctgctactggcctgacacccaagccacaagggcctcctcaagggtagcccaagaaccctaactctatgctgagtgtgtgatggctcaccaaaaaggcaggggcaagtatgtagtttgtatctggtaatgtaataacatcatctgagatttgcaggtgtgctaattcatctagtccttgtggtaactctgagatcagagcctattctcctgtgctaccaatgaggcctggggaaatctcatggacctgttcaaggccaatgtcacctt

SEQ ID NO: 2966 - DNA, 522 bp, Cricetulus griseus
gtctgccttgccttgaagaagggaatgtggatttgtgggtgttccctttcccacccctgagtggccctcagggactctacctgctttccatctgtggggtgggaaggcctgagtaaaaaaggaagaatatatggcaaggtagagatgacagttctcaagtttccctattgtattttgttgttgttggtttttaaaattaatacctttgttactgattggcctccactaggtggctatgggtaagtcttgggggaaggatagaaaaggggaatggttgggcctcagggctaattgtactgaatcctgccagaaaaaagcctctgtaagggctgcagcaagggacaagtctccattagctgagcacttccttgtgggggttgggggtgtccttgactgtgataacttgaagatggcattcctaacagctcttcagtgcattgtttgtcatctgcttagacattgttagggagtggtcaagccagagatttgaggcagtaggtaatgttcacttacagatgcact

SEQ ID NO: 2967 - DNA, 304 bp, Cricetulus griseus
ctttcatgttgttctcttcatttcaggaaggcctaactccatctctttcttctctggctactctgttgaagtctctcttcatccttcttcccttcccagctaccccttggtcattttttcctgtaggtgctctgatgtagcaaacagctgtacctattggcaactcagtgcacgagactggcaaggcatgcactatgaagcatgatagcaggtctatggtctgcccaggctccccatgtccttgtctgatttccctctgagtaattttgcagggtttatctgtctattccatttctcctcattt

SEQ ID NO: 2968 - DNA, 329 bp, Cricetulus griseus
  misc_feature (213)..(231): n is a, c, g, or t
tttttttctccaggaggaaaatggcgtcggttgcagttgatccacaaccgagtgtggtgaccagggtggccaatttgcccttggtgagctctacctatgacctcgtgtcctctgcttatgtcagtacaaaggaccagtatccttatttgagatctgtgtgtgagatggcagataaaggcgtgaagaccatgacctccgtggctgtgacaagtnnnnnnnnnnnnnnnnnnnagctggagccacagattgctgttgccaatacctatgcctgcaaggggctagacaagatcgaggaaagactgcctattctgaatcagccaacaactgag

SEQ ID NO: 2969 - DNA, 427 bp, Cricetulus griseus
tgcagagtcgccagaaacatgaaattgaatctttgtataccaaactgggcaaggttccccctgctgtcattattcctccagctgctcctctgtcaggaagaaggcggagacctactaaaagcaaaagcagtaaatctagtagaagcagctcattgggcaataaaagcccacagctttcaggtaaaaagccctgggccaagttgagtcagccatcttgtgtttctgtctcctactgtgaatgtaacctgttgcacatttattaacttctattaaatttcaaaggctttccaatactcctgcttctttagctcttctaaccctggcatattttgaacctcttttgactctatagaagtaggctctctttttaatgtagtcagtactactagctacctactgttaattttcacttatggttgcttttcag

SEQ ID NO: 2970 - DNA, 540 bp, Cricetulus griseus
ctgtgagggagtcgctgctatccgaggccccggaacccgagctggagctgaagcgcaggctgcgggcgcggagtcgggagcatgtcggaaggggaatcccaaacagtagtcagcagtggctcagacccaaaggtagaatcctcctcttcggctcctggcctgacttcagtgtcgcctcctgtgacctctacaacctcagctgcttcccccgaggaggaagaagaaagtgaagatgagtctgagatcttggaagagtccccctgtggacgctggcagaagaggagagaagaggtgaatcagcgtaatgtaccaggtattgacagtgcatacctggccatggatacagaggaaggtgtggaggttgtgtggaatgaggtacagttctctgaacgcaagaactacaaactgcaggaggaaaaggtccgtgcagtgtttgataatctcattcaattggaacatcttaacatcgttaagtttcacaagtattgggctgatgttaaagagaataaagcccgggtgattttcatcacagaatacatg

SEQ ID NO: 2971 - DNA, 521 bp, Cricetulus griseus
tgcgtacgagccaggcagagggttgaaatgaagaccagccaaggaaatcacaccgttagtcaccctgcatggacatggtcaaattactatccacttgcgcttcctggtctttgtcatcatccagcatatggattttagactaacttgacgttaagatgttttgttttgtttttcctgctccctaagccttctcattgagtcaccccttctcagtactgcagaatcctcctcccaaattaattttctcctttcagcatcgtgatagggatgtgtttgtgacacattgtcattcatagcctgtgctcctttgtgatgacgtccctaaattctgtgatcacatcacgacttgtgttatgagtagagaggaatgggaccccaaaattggacactagaaattggtgggtggtgctcataactgaaaacacttagcttattgaagtgcctctatttacatgttctttagttataatatgtatttttctaacagaaatacacgtctgtaattgatgtttattatactt

SEQ ID NO: 2972 - DNA, 446 bp, Cricetulus griseus
  misc_feature (305)..(305): n is a, c, g, or t
ccttggcaaccagatttctgcatttggagttttttaaaaggatgtttcatagccacaagaatcagtgggtgtgccggggaagctgctgcccttcccggcaggagcctccacttgttttgatgcagccatagtctgaggacaagcaggccacccacctcagggtaggttcaggaagggcagacagtgggctgcatagggccatggtgtggctctctctaaaatgtctggtggtggctgtggtgggaggcagctctcagcctgggccggaatggagcaggtaggtggggctggttagaaacccttancaatcaggtgggcagggctgggtagatgctgggattcccttgaaagcctggatcaggtctaagtgcctgtcacacatgcgccatctgtcccagcccacagcttggcatagggctgtccacacctttctgctgatgaatggt

SEQ ID NO: 2973 - DNA, 549 bp, Cricetulus griseus
  misc_feature (241)..(289): n is a, c, g, or t
ctggttgctcaaatgaagcaggatccacagaatgctgacttaaagaaacagcttcatgaactccaagccaaaatcacagctttgagtgagaacagaaaagagtagttgaacagctgcggaagaacctgatagtcaagcaagagcagccggacaagttccagatacagccattgtcacagtctgaaaataaactacaaacagcacagcagcagccactacagccactacagccactgcagcnnnnnnnnnnnnnnnnnnnnnnnnnnnnnnnnnnnnnnnnnnnnnnnnncgcccaacagtcagcagcaccacccagcctgactgcatcacagactgtaactacagcttctatgattaccacaaagacactacctctcgtcttgaaagcagcaactgcgaccatgcctgcctctgttgtgggccagagacctaccattgctatggtgaccgccatcaacagtcagaaagctgtgctcagcactgatgtgcagaacacaccagtcaacctccagacgtctagtaaggtcactgggcctggggcagaggctg

SEQ ID NO: 2974 - DNA, 580 bp, Cricetulus griseus
ttacatatttaagggtcattggaatgtcagatgttaatgattggacactgaacatggtagtgacttgtgcctgtaatttcaatacttgggaggtgtaggcagatgattgctttgtgttaagtccaacctggtctgcagaataataatctgttgtaaacccataaaactggggaaaagtagggtcttaaaatatataaactaatgttatgttttgtaaatattaattggagggttttgtttggctcaaggcaaaaactaataaaatgctggttgatagtactgccccttactgcagtgccttccttccagctttgactaagaaggctcaggtttcatttcattattgtggttgatttcagagcctgttgttagcaaagtcagcagaatgtagaacggtgattgtcattgggttgacacttggctgggggtagtggcctttgttcattaccgtaactagttcaagctggactggaactcactttgcagaccagttagtctcaaatccacaacaacacttgcttcagcctcccaaatgttttgattaaaggcatgttaattgattttgtggtttctgatgact

SEQ ID NO: 2975 - DNA, 560 bp, Cricetulus griseus
gacaaaccaccacacactggaagcagaccttgtttatgatggacgacccagtcccagtccacacaggagacgtggtcacaggttccgtcgttttacaaagaaatccggtgtggagaaggcacatgtctgtctctctgagctggtctgtctcatctacgctcgatcctacatctcaaagagctggagagaaagtctttccaatctggaggtgacagttaagcactgcttgggagtcatggccatggtttgcatcttgtggaagaagaggcacctggccaccagctgtgacatccataagcacctgtcccatgctgttccctttccacctagcaggcgacatcggcccctcacagacaagcccctgggctcgccccccagtgttgttcctcttgtaggctgtgtatataggtgttcatcccgtggtgcctatcggctgccggctgccggctgccagctgccagtgttcccagctgggagtagtcgtagattcctcagacacacatttcagcctgtgcgcctgtgactgtgacgtctacatgttgggtcagtgatgtttctga

SEQ ID NO: 2976 - DNA, 539 bp, Cricetulus griseus
cctctcccttcacagcatgggatacatctgtatggagacggttcttttctagatttcctctacctttctgctcttaaactgcttctctgctctgagaagcccagctacctgccttcactgaatatacctcaggctgagattggggcgggacagcaggtcagtggatcttcggcgggaaggtgcagctgctccgcacagtgcagctgcaccacagttcgtgctcaagagctgcaggcccagactggggcactgacgctttcggctttgggggtcattctaccaacaaacagtccttggggggaaacgtcctggaaacacacagatcagaatgcatgctaatctcacagcgagcatggaggtagcggagcctgtgtgactccataaggctctaaccaacctaagttttcattgttgagaagtgaggccagggttgtactggaccaaaggctaaggcttgccactcagcattccaagcagacttgtttcctaaaagcattccttcattttgcattccaccctgggtcagcctcaaccacaaa

SEQ ID NO: 2977 - DNA, 498 bp, Cricetulus griseus
gaaatcatagatcaatatttctctggtgatgatattgatgaagatcctagcctcattcctgaagcaacacaaggaggtacttacaactttgacccaacagccaaccttcaaacaaaagaatttaatttctaaggtctattaagtgcagcaccttttattcaatacaaacaccaccagatggccaccaagcgataagacagcaagcaacagaaggctcccagctctcttgcctcttcgttttgatgcttctaaagcaagccatgtctcagtcactttgcagttgccaaaagtcactctcacatggactgtaaatgcatatgcatgatttcctaaactgttttagaattctccttaacagtctcaactaccctatttttccatgttccctggtgccacatgctacaactgcagtctccagttagaatgttccatagtggtggcaatcggctgtccactgatactgctttggaaaaaggtgcgctgtggatcaagacactg

SEQ ID NO: 2978 - DNA, 423 bp, Cricetulus griseus
  misc_feature (20)..(37): n is a, c, g, or t
  misc_feature (51)..(64): n is a, c, g, or t
  misc_feature (67)..(80): n is a, c, g, or t
gtttggtttcggtttttccnnnnnnnnnnnnnnnnnnattgttttggcacnnnnnnnnnnnnnngcnnnnnnnnnnnnnncttgaactcacagagatctgcctttgcctctgagtgctgggattaaaggcatgcaccaccaacacctgcaggaaccattttaatttgggtaaattacaatgtttcttttttcttccagtgtgctgtaagaaaccataccagttcaaacttacagaaacttactcctatgtcttcattgaagagttttataattttatctcccatccataggcttgggcttgctttcaaaataattttatatatcttatttgtagccatatttcaagttattagttaaatataaataacagaacttagcatcttaaagtgtataggtcagtagtgttgagtgcattcacactgt

SEQ ID NO: 2979 - DNA, 310 bp, Cricetulus griseus
  misc_feature (220)..(250): n is a, c, g, or t
  misc_feature (265)..(294): n is a, c, g, or t
gacaggccactggaaacaggagagaggagaaaggaatgagggggagggagaggagggatcagagagaggcgggggggagagagaggatgggaggtgggcagaacccttttaaaagggaacatagtaaatgtgcacaggtggtgctcttagtggctgcagctcctgtcagaaccccaagggcagtccagtacagatgcctgaacactaacatcgagggctnnnnnnnnnnnnnnnnnnnnnnnnnnnnnnncgggggacctccacnnnnnnnnnnnnnnnnnnnnnnnnnnnnnncccctgggcgtaatca

SEQ ID NO: 2980 - DNA, 579 bp, Cricetulus griseus
cctggaaggaagggaaatactgtcagacatttaaagtttttcttatagtcaaatatctgttgggaaactcataggaagttggaagtgcatgtgtgctcactgtctaccctgctgctctgaggaggccatggctagaacaggtgtgaagcgtgactcactgtacgaggtttccacgatgtggatgatagttgacgttggtgcatccagaactcagagagatacctttataatgactgtggcccttctgtttaatagttttggtgttggcaaattttcctgtcccagtaccagaatgccaaaggaggaaacaatcaagggaaaaattttaggccatttcttaatgtttaagatttgtcattttaaaccataatttttcttagaacatctttgaaatttctaatcactttggtcatttaagaatgagagctgtgatgttttgatttataaaggcaaacttaatgcaaagtgggtaacgctaaatccatagcaaagttttttattaaattttataaattttttactagttaattatgtcctaattgtattttggggaatgaacagcagtcaataccacagact

SEQ ID NO: 2981 - DNA, 292 bp, Cricetulus griseus
gaaagtactaagtccttgggactgggaggtatctcatttggtaggatgcttattagcctttgatttaatccccaacacttcttagcacttatccataatcccaccacttggcaggtggaaccaggagaatcagaagttcagggtctaatccaaggcctgcctatactatgggagacctcatttcctgaaaagaagtattgagtattacgttccttaggcatcagtgactttctgtttaaatgaagtaaggtttgtgtcagtaagtggggtgggtgtaacttgaaaggatgtt

SEQ ID NO: 2982 - DNA, 278 bp, Cricetulus griseus
gccggtggagtgagaggatgggcgagcagtctgaatgccagaatggataaccgttttgctacagcatttgtgattgcttgtgtacttagcctcatttccaccatctacatggctgcctcaataggcacagacttctggtatgaatatcgaagtcctgttcaagagaattcaagtgattcgaataaagtggcctgggatgacttcctcggtgatgaggcatatgaaaagacttacaatgatgcactgttccgatacaatggcacaatgggattgtggag

SEQ ID NO: 2983 - DNA, 482 bp, Cricetulus griseus
  misc_feature (418)..(446): n is a, c, g, or t
tgggtgagaaggcagtgcaaagcctgaagcagatccaccagcagctttatgatcgtcatctctataggggtctgggaggagaacttatgagacaagcagtgtgcattttaataaagaacttgtcactttccagaatgccctttaaaggtgacaccgttatagatggttggcagtggctgataaatgacactctcagaagccttcactttgtttcaagccattccagacaacagatcaaggaggcagctgtctcggccctggccgccctctgcagtgaatactacatgaaggagcctggggaggcaggctctgccgtggagacggagctgattccacagtaccttgctgagctccagagcccagaggagatgacccgctgtggtttctcctcagccttgggtgccctcccaaatttccnnnnnnnnnnnnnnnnnnnnnnnnnnnnnacaggtctgagaacagtcacctgtacttctcccaag

SEQ ID NO: 2984 - DNA, 560 bp, Cricetulus griseus
tgtctaacatggcaatgagttctcatccaaacagctactggtaactgactacagagacagcccaggacctggcactgtctaaggtcttttctaattccacatatggtatacacatataaataagcatcttagcacataatgtacagctgcatcagttcaagttccaaggccttatgggtgaactttaaaggccaagagctcctcagagtgcatattgtttaaagatcgaagatctggcaactttagaagtaattttgtaaaaatggaggcctcatttgggtggtttttcatgattaaagtccttaatgcacggatgagcgtttcttgcaaagcttccaccgagttgacattttcaattccagaccgatctgcagataccagaacaactgctgtgaacaagctcatctcctcatcactgagctggagagcgttcagcttctcactaaactcaaacatagaactgagcagatcccctgctcccattgagtgcaggtgatccacactgtacttcttcccacttataaaggtgacagtccgctcctttgcatcaaataatgaag

SEQ ID NO: 2985 - DNA, 487 bp, Cricetulus griseus
gcagcttagagcaggaagctgagtctgtgctggcacagcagggtgactggagtgtcaagggtccaggaggccgagctgcacaggtcagccacccagaccacaaacctttggaatcagactggaacagctgggaagctgagggctcctgggaccagggctggcaggagcccagttctgtggagccacctccagaaggcacccggctagcaagcgaatataactggggtggtgcagagtccagtgacaagggtgacccctttgctgccctgtctgttcgtcccagcacccagcccaggccagacccagacttctggggtgaagacaactgggaaggcttggaggctgagagcagacaggtgaaggcagagctggcacggaaaaagcgtgaggaacggaggaaggaaatggaagccaagcgggcagagaaaaaggccaccaaggggcccatgaagctgggagcccggaaactggactgacaaccctaccc

SEQ ID NO: 2986 - DNA, 459 bp, Cricetulus griseus
gcatctcagcgcggtgcaacgcgacttccttcctgcagctgagcgatcggggttgttcaggacaaggaggtgtgaacagactcctgggctggctgatccatcatggcggaaaaagtgaacaacttcccaccattgcccaaattcatcccgctgaagccatgtttctaccaagacttcgaggcagacatccctcctcagcatctcagcttgaccaagcgcctctactacctctggatgttgaacagcgtcacgctggccgtgaacctggtgggctgtctcgcgtggctgatcggaggcgggggagccaccaactttggcctcgcctttctctggctcatcctcttcacaccttgctcctacgtctgctggtttcggcccatttacaaggccttcaagacagacagctccttcagcttcatggccttcttcttcaccttcatggcccagttggtcatcagc

SEQ ID NO: 2987 - DNA, 362 bp, Cricetulus griseus
accatattctgtctcctcctccctctccccttgtggggagtatgtggaggagctgctgacactgggtagtgagaaacagaagcccagggcttgtgtctgagctgagcctggaccacccccactttcagactgggcaaagtgacttcctcacgcattcacacccagtctgcttggatttctatctctagccagagtgtggcagcacatccgttatctggggtgcagcttctgccaacaagacaattgtcctgagtgtttttaatcatgttccgatgttaggtgttggctcctattgtagatccctgagctctgaagagacccattagcaatgccctttgcccaggtcttcacactgagggtta

SEQ ID NO: 2988 - DNA, 463 bp, Cricetulus griseus
tttaagtatagcaacatatacattaaaataaaatgaaaagaagaaaaaaacggcaaaaggaaagattgagggtgataaatgaaattcatactataagtttctgaattgtttcttttttatcattgggcacttaatttctgtggaaaaagtttcacctgtgtaaaagttctggcaactgtttcagaatcaaggctgacaatcaatgattgggtcagtgattattgatttgtttttttccatctctttctcttgtccctggtgaattccagaactggcttgtcagttccctgtagctcaagccaggtgtttgatgaacaacttatctttgtccagcactaaactggcacaaccacaacgaggagtataaaagtttgtttgaatgatgtctacctaccactggtaagacatttacctgagccagttagaagtagtagatatatactgctatgtgatattatcttag

SEQ ID NO: 2989 - DNA, 410 bp, Cricetulus griseus
tatgtgtgacttgctttgtctgtatgtcagtgtaccatgtgcatgtttggtgttttggtggccagatgagggcatgggatccagagttaaaggtacttgtgggctgccatgtgggtgcaggggaattgaacccatgccttctggaagaatagcaagtgctcttaaccactgagccatctttggagctccaaccaagcgtgttttgacaagacttgagacaaaaatgttttgtataatatttattgatttagtcttcccaagacatgagtggcctagataaatttagctaattcttaagagtttttgtttcttaagaacccctgtgcttattatggagccaggagttaaaaagtcatttattgaaaagccttcaagcatgtcacgggatctgaatactttttttcttgtcg

SEQ ID NO: 2990 - DNA, 487 bp, Cricetulus griseus
  misc_feature (287)..(315): n is a, c, g, or t
tgttttcatgccttaggagcagtcctgaaaacttggaaagcctcttatgtgggacccaagatacattttccagtaatgaacctaaaaaaaagatcattctagttgctgaagattttgttactgtgtgcacatggatgcaatgaactgctgttcatttaaaaataccctgctttcagcaagtatggaaaaattaacattcacaagaatacatgttatttaatagtgattaatttcagtttcagtagaatcccaactagatgttataatttatggttttttagacaaannnnnnnnnnnnnnnnnnnnnnnnnnnnnacaaactatattccctggttattctcaataactaaatgttgttctgaacctatagtaaaaactgttccaatatccttgagtcagctcatgcatacttttgtttctgccatcctatgaaagtacacatggctaccaacatgtctattaactgtacttatatattttaacctga

SEQ ID NO: 2991 - DNA, 581 bp, Cricetulus griseus
gcttgcctagagctcttgatcagaacaggaagactcccagaagctgccttcctggcccgcacttacttacccagccaggtctcaagggtagtgaagctgtggagggagaatctctcaaaagtcaaccagaaagcagcagagtcccttgctgaccccacagagtatgaaaaccttttccctggattaaaggaagcctttgttgttgaagaatgggtcaaggagacacatgtggatttgtggccagccaagcagtacccacttgtcacgccaaatgaggagagaaatgtcatggaagaggcaaaaggcttccagccctcaagaaccacagttcatcaggaacctgatgggaaacctgcttctagcccagttatcttggcctcccaacctatccagaaagaagaaaagaacttactagaactagaagtagatttggataatttggaattagacgatattgacacaacagacatcaatctggatgaagatattctggatgactgaacactggatgaagatattctggaggactgaacactgtttgccatttacttcaataacagatcattgagacaattgatcac

SEQ ID NO: 2992 - DNA, 347 bp, Cricetulus griseus
ctctctctcttctctagagagaggggggacgcgaaaaatggataggagataatagtaaagccgggaccaatgcgagaactgcgttgacgtggcacaaatgaaagctggcacacacagccaagaaggaatctactcctgtgaccagaaactacctcaccacaaccgggaatcctgcgtctcaaaccccagtatctttccctcaactccatcttcttcttccgcccggaagcgctttaaccgcctacaggaggagaacccttttgccagccacggcgcacctcaccgcagcgcgcatccgcggaaggctctctttgcggccggaggggcggggcgtaagcgtgtggcgc

SEQ ID NO: 2993 - DNA, 347 bp, Cricetulus griseus; identical to SEQ ID NO: 2992

SEQ ID NO: 2994 - DNA, 525 bp, Cricetulus griseus
cggggacaccaaaaattccaccttctcggatatcttcaaaaaggagcatccggaccgtttcattgagtgctacattgccgagcaaaacatggtgagcattgctgtaggctgcgccacacgcaacaggacagtgcccttctgcagcacttttgcagccttctttacacgggccttcgaccagattcgcatggcagccatctctgagagcaacatcaacctctgtggctcccactgtggtgtgtccattggggaagatgggccctctcagatggccctggaagatctggccatgtttcggtcaattcccatgtcaactgtcttttacccaagtgacggagtggcgacagagaaggcagtggaattagcagccaatacgaagggcatctgtttcatccggaccagccgcccagaaaatgccatcatctacagcaacaatgaggatttccaggttggccaagccaaggtagttctgaagagcaaagatgaccaagtgacggtgattggagctggtgtaaccctgcatga

SEQ ID NO: 2995 - DNA, 536 bp, Cricetulus griseus
cggcctgcgcatggtgccggagcaccgcgccttcggaagcccgttcggcttggaggagccgcagtgggtcccggacaaagagtgtccaagatgtatgcagtgtgatgccaaatttgactttatcaccagaaagcaccactgccgccgctgtgggaagtgcttctgtgacaggtgctgcagccagaaggtgccacttcggcgcatgtgctttgtggacccagtgcgccagtgtgccgagtgtgccctggtgtctcaccgcgaggctgagttttacgacaagcagctcaaggtgctcctgagtggagctaccttccttgttacttttggggactcatagaagcctgaaaccatggtttgtcgtctctccaacaaccagagatgcttgattctggacggggacagccatcatgaaattgagattgcgcatgtctgtactgtgcagattctcacagaaggcttcactcctggagcaggcagcactcgagccacaggcatgttcctgcagtacacagtgccaggggcagaggctgcaacac

SEQ ID NO: 2996 - DNA, 579 bp, Cricetulus griseus
tattcacctactggattgccgcagtctctaagatgaccaaaataaagtccgttccggaggagtctgaggcgcaggcggagggctgcagcgaggagcgcacgtacgaggagctgctggtcaacctgaaccccatcgcgcagccgctggcgtcccgccgcctgacgcgcaagctctacaagtgcatcaagaaggccgtgaagcagaagcagattcggcgtggggtgaaggaggttcagaaatttgtcaacaaaggcgagaaaggaatcatggttttggcaggagacacattgccaattgaggtatactgccatctaccagttatgtgcgaggaccagaatttgccctatgtctacattccctctaagacggacttgggtgcagctacaggctctaagcgtcccacctgtgtgatcatggtgaagccccatgaggaatatcaggagatctatgacaagtgcctggaggaggtgcaggctctgccaacacctctgtgagagacttgagctgcagcctattccaagagctgctgggctggctgcaggcggctgcccaccctaacatcatctccccaatttcctg

SEQ ID NO: 2997 - DNA, 541 bp, Cricetulus griseus
cattgacctggaagtggaggagaaatgtgcactgatggagcaggtagctcaccagaccatggtgatgcagttcattctggagctggccaagagtctgaaggtcgatccccgtgcctgcttcaggcagttcttcaccaagatcaagaccgccgaccaacagtacatggagggcttcaaatacgaactggaggcctttaaggagcgtgtgcggggccgtgccaagctgcgcatagagaaggccatgaaggagtacgaggaggaggagcgcaagaagaggctgggccctggtggcctggaccccgtggaggtctatgagtccctgcctgaggaactgcagaagtgctttgatgtgaaggacgtgcaaatgctgcaagatgccatcagcaagatggatcccactgatgccaagtttcacatgcagcgttgcatcgattctgggctctgggtccccaactccaagtctggtgaggccaatgagggggaggaggcgggccccggggacccattgctggaagccgtccccaaagcgggcaacgagaaa

SEQ ID NO: 2998 - DNA, 522 bp, Cricetulus griseus
cttcccaatcatcctcaagctgggaagtcaatcttcgagggagtggggtttgcttaagatgagtggctcacaccctgctcagtgtggtaatgagctgtaacccttcacacacatgtaacccatacacatgctggatgtctcagcagatagtacatggacctgtttgggaaatgttgactcctagggacttttgtgctccactgtttctggtagacagagacatacccaagattggctttaacttctcattatcctgtcaaaagacagattgaatttgagcagagttcaacagaaaagaggcaagccagaggcggcttctgtgcagcaactggctcaacttctcaccctctcactccccgtgggctgaggaagagtggggatctatactttgggaccactttggaaccatattcagatgagaggggagactgtccttaccaccgccatcataggtgaatgttacaacgcctctatgcccatgaatagatttcctttctttctttggatgatgtccactgcata

SEQ ID NO: 2999 - DNA, 533 bp, Cricetulus griseus
caggaaaagtgtggacttcctaggctcagcatcaatagagaggacaggcttccatatgtctgaggtcacctttgggggctcagatgagccaggagaagcatgtttccgtgcctcggggaagacactaggcttctgagactctgtaatgaaggaggactcaggagaaccacgagaacttttctgggactcagagaaatcaagtgaagcaggagagcttttccgctggtcaggagaaagcttccgaaggtctggggaccctgaaggcttcctgagctctggagatcctgctggacttcggatctcgggggagagaggcggacctggtcttcgaagctcaggaggcacagggggcactgccttccagtgttcaggtggcaaagcaagaggcgtctttcggagctcagggggaccagacttccatgactctggggatgtggggggcgttttccaggaaccagatgaaactgaagacttccaggatgcagaggaaacaggtggagctgccttccaaggcccaggcgatacagatggta

SEQ ID NO: 3000 - DNA, 569 bp, Cricetulus griseus
ggttctatttgctgtctgaagtccagagtcacaattgccctgcacacacagtagaccagctgagtcattggggcggtgcaagtgtaaaaaagcagggcgggcagggactcacactcagctaccttcacctgtcccacggctctgggtgctgtaaccacagagcagtcaaagcacctgcactgagccctggtggacagcagaggacactggaataattttgcccagaaaaggaaaaggcaggcacttctgtccctaaaaaaagcaacggaggagcctttggcctttcgctgctgcagtcaagtagggggtctgattgtcaaattctctggccccctttcctgctgactcgcagctcttctgatgatgtcatacaaaattggtcttctctcagtggttccgggccagcaggtgacagtatgccaccttctcaaagaggaggactctttggtctggacagagagtctctggaaatgagggaggaaaaaagatcatgcaaactccctgtctgaattcagagggactctacttcagccatctctaatctgctttaattaagcagttcctactat

SEQ ID NO: 3001 - DNA, 335 bp, Cricetulus griseus
  misc_feature (175)..(194): n is a, c, g, or t
ggacaaaaggccaggaagaggtactaaggctctggcttatcagagcccagtgtgtgtggtagtgggtggtaaggctcttggatgtctggtcttgtgttttggaataggtttgtattgtattctattcttcatcaaatcttaatcaaataatgtggcttaattctcctggatatgnnnnnnnnnnnnnnnnnnnngggctggggggtaaacccaaggctttgggcttgctaaatacatgttctaccattgaaaactgtctccttccagggtatattttttatctatggagtatagtttggttattttctttttttaaaaatattttgaaaccggtt

SEQ ID NO: 3002 - DNA, 542 bp, Cricetulus griseus
ggcccggaaacagaagggtgcagagactgaactggtcaaattcttgcctgcagttggtgatgagaatttcaagaggctgtccagtcgtgctcggaagagggcagccaagaggaggtccgggtccgttgaagtccctaagccaaataagtctccagggatcaaaacgttgcctggagagttagcaaaaggagctgtccaggctcggggtaagaagcgcccagcaccaacttctaacagtgatggggatgaggaggaagactctgaggaagatggcgtggcaaaccagggggacctgtggggctctgaggacagtgatgctgacatggtggatgactatggagctgactcagactcagaggatgaggaggaaaagttgttgcccattgaaagagctgctctgaagcagaaggcccgggaagctgctgctgggggccagtggagtgaagaggagactgatgaggaggaagatggtccccctgcgccccgtccctcaaaggatgatgaggcggaggggggtttgcagattaatgtggacgatgagg

SEQ ID NO: 3003 - DNA, 483 bp, Cricetulus griseus
tattgacttagcggcccggtattgaggggtcagagagatccggaccagtccgcggagcagcctagtgggctccggagaaaagccaacatgttaaggatacctgtaaaaagggccataatagccctttctaagtctgctaaaggatatgttcgaacaactgccacagcagcaagtaacttgattgaagtatttgttgatggtcagtctgtcatggtggaaccaggaactactgtcttgcaggcttgcgagaaggttggcattcagatccctcggttctgttaccatgaaaggttgtctgttgctgggaactgcaggatgtgcctggtggaaattgagaaagctccaaaggttgtagctgcttgtgctatgcctgttatgaagggctggaatatcctgactaactcggaaaaatctaagaaagccagagaaggtgtgatggagttcttattagcaaatcacccattggactgtcctatttgtgac

SEQ ID NO: 3004 - DNA, 218 bp, Cricetulus griseus
ggggatactggtgtgttgctgaaggaagctagagaagcgccccaggacatcaagatggcaatttatacatatggtcagctgattccttctttaggggatgcaaaattcagaccaatgatctgccgaaatcattgaaaaacagcttgaatattataaaaaaccgtaagagacacagcaatagctgattcaccaactttacttgctcatcctttctatag

SEQ ID NO: 3005 - DNA, 407 bp, Cricetulus griseus
  misc_feature (175)..(201): n is a, c, g, or t
  misc_feature (203)..(215): n is a, c, g, or t
  misc_feature (217)..(240): n is a, c, g, or t
  misc_feature (382)..(401): n is a, c, g, or t
taacatgtaaaaagacaagtatgatagtggctactgtaatcgaagccagcactaaggtgatggagatgggtaaatctatggagtttactggcaagtcagcttaacctacttggcaagctttgagccagtctctttttggtttggttttggtttttcaagacatgttttcagcacnnnnnnnnnnnnnnnnnnnnnnnnnnnannnnnnnnnnnnntnnnnnnnnnnnnnnnnnnnnnnnntgccaccaccacctggccagactgtctcaagcaaacaaggtagatggcatctaaggaacaccagctgaagttgacgcctggcttccacatgcacaagcagcatgcatgatgggacatgtgcgcacacacacatgaactcaannnnnnnnnnnnnnnnnnnntatgca

SEQ ID NO: 3006 - DNA, 527 bp, Cricetulus griseus
tctatgatgtcttcattctttaagcttgggtattatgagtgataatttttagccttcctttgtgggaccatttgacccagtccttaaaacttactcattttgaattgagtttcaaactttgaaagtgcaaggatttaattttagagggtataatatcctaactctccttgtagatttctatacactggcagcagaaagccattgacttccctttccctatcccactgttgatttaaagggagtatgatattccacttgataaagtaggtttggaacattattttattgctatcacttgcatgtttttctcctccatggtttttcttgggtaaccttttttcattattcatactctggaatctataattgcagttgaggtttctggtgactgaaagtactgtactcaattacagggtgcagctatttgcacagaaaggagccattatgttaaagtttcagaagttggtaaagaatcaggttgtaatgtctgtcatgtctgaatgcatttctgtaatagatatgcgtca

SEQ ID NO: 3007 - DNA, 192 bp, Cricetulus griseus
atgaacttcctgtgacataaatcctactgcaaccccactggactctcctgagagatgtgctccatctctgtgcgccatgggcctctgtttccacatgtacaagaagcctggataaaatctaccatgtaggattgaaattactagcatagtgcttggttattggtggttattaatatgatctgcaacttctcc

SEQ ID NO: 3008 - DNA, 363 bp, Cricetulus griseus
gtgctcagttactgaaatttgtgtggccctcttcatcactgagttcctctgttgtcccaaaggctgggactaggacacagcatcccaggctggcaagaacttgccttgccctctgtctttgggtaccttgttgcttttagcttgtgccctgcctcactctgccctcccggtgcttacttagtatgtgcacatcccatgtcagctcctgtgactgattcagttgtctcaaatgatataggaacaggatctgctgatgggatctgaggcctttcccgaagtctggtacctgccctatggtgcacgttcaccaaagagtgggctccctttttcttcctttcctttctccttcctttccccattcag

SEQ ID NO: 3009 - DNA, 539 bp, Cricetulus griseus
atcttcagagtgagccctgctacgtgtcagcctctgagataaaatttgacagccaggaagatctgtggaccaaaatcattctagctcgagagaagaaggaggaatcagaactgaagatttcttctagtcccccagaagactctctgatcagccccagctttaattataacttagagaccaacagcctaaactctgatgtcagcagcgagtcttcagacagttctgaggaactttcacccacgaccaaatttacctctgatcccattggtgaagtcttagtcagttcaggaaatctgagctcctccgtcatttccacacctccttcttctccagaagtgaacagggaatcttctcaactatggggctgtgggccaagagacctaccctcaccagggaaggttcgaagtggaacttctgggaagtctggtgacaagggtagtggcgatgcctccccagatggcaggaggagggtacatcgatgccacttcaacggctgcaggaaagtttacactaaaagctcccacttgaaagcacatcaa

SEQ ID NO: 3010 - DNA, 235 bp, Cricetulus griseus
aaagcgatgattatttctcttgttggtagatcttataacccttcaaacctgtttgtttttctttgaggatttatatcattttaaatgctctttcattatctttttttttttaacctaaaggaataggaaaatactgtttggtttttgggttttttgttgttgggggttttgttttgttttaagttatatcttaaccttggtatatgtctttcctttggataatgaggcttaaaag

SEQ ID NO: 3011 - DNA, 483 bp, Cricetulus griseus
  misc_feature (430)..(430): n is a, c, g, or t
cagcacggacacggacacggacactcccacagcggccagggccccatcctctctgtggggctctgggtcctcagtgggattgtcgccttcctggtggtggagaagtttgtgaggcacgtgaaaggcggacacggacacagtcacggacacggggacggccacacacacggaagccatgctcatgggagacaggagtgtccttcaaaagaaaagcccagctcagaggaagaagaaaaggaaacgggggttttgcggaaaaggagagggggaaacgcagggtcgagggatgggccagcaaaacctcaggaccctgaagaagaaaaaccaggttcagacctgcgtgtgtctgggtacctgaacctggctgctgacctggcgcacaacttcacggacggcttggccattggtgcttcctttcgtgggggccgangcctggggatcctgaccacaatgacagtcctgctgcatgaagtgcctcatgag

SEQ ID NO: 3012 - DNA, 567 bp, Cricetulus griseus
ggtagagggttgagctagctctgaaacttgtagtaaatttcttttttaaaaaaatttatttcatatgtataagtttcacatgtatgtatgtatgtactatgtatatatctatccatgtatgtgcacttgtgtgactgatgtcttcagaagccagaccatcagatcttctgaactggagttaatgtacagttgtgaaccaacattggcatatgctgggaatttaaccgaggtccctacaagagtagccagtgctcttaacccctgagctgtctttctagcctctagataagattttgatatgccataaaaggaagagaaagatagaaacatgataaaagcagaggacattatatgattgataatgtaaaaattaataatatggctcccatttaatgctgtgtttggattttttaatgttaggaactttaatgtttttcaatttattaggaaacctattaaacataacataaaaagccaggtctatgtgttgctcagtcatccttatgacttttgaaatttttgatgtgcaaaattgtatataattgaaaatgtcttagtgtttgagca

SEQ ID NO: 3013 - DNA, 296 bp, Cricetulus griseus
  misc_feature (6)..(29): n is a, c, g, or t
agggcnnnnnnnnnnnnnnnnnnnnnnnnaaaaaagtttgggttttccggaaccccctttggaaaataatgctaccccaaaattaaaaaaaataccctgcctttgctccggataagggggttaaacagtttggcccaccccccctggggccacccaggggcccaaggggggggccctgtctaaaaaaattaaatttttttattaaaacacaaccaaaaaagccacttggcccattgaaatagggcacatgcgggctgacccccaaaggggggggggcccttggaaaaaaaacccct

SEQ ID NO: 3014 - DNA, 457 bp, Cricetulus griseus
  misc_feature (351)..(351): n is a, c, g, or t
cctccatttgggatgatataaacaatgttggactcagaggccactacttgtgctctgtgtatggggcacggctgatggtaccagctggcaaaggactcatcgtggttgtctcttcccctggggggctgcagcatatgttcaatgtcccttatggtgtgggcaaaactgcgtgtgacagactggctgctgactgtgcccatgagctacggtgtcatggagtcagctatgtgtctctgtggccagggttggtgcaaacagaactggtgaaggaatttatggcaaaagaggatcaacctgaggattctttgtttaagaaggccaaaccaaatttctcaaaggcagaaagcccanaaatgagtggcaagtgtgtggtggccttggcaacagaccccaagatcctaagcttgagtgggaaggtgctaccatcctgtgaccttgctcggcgctatggccttca

SEQ ID NO: 3015 - DNA, 497 bp, Cricetulus griseus
aggtgctggtctaggcccatgcagattatcttgggagctcataggcagcactggggagccagtgagggatgtcaggagttgctcactgtggggtcatcacagctctgcagcacttcagcgaaagcaccctggagtacctggccaacctggatcaagccccagaccccacagtcaggaaggacacctttgctgctgacatctttggagcctatgacattcttttccaccagtggctgccaagccgagatgccaagctccggcttgcagtggtggcagctctgggtcccatgagccacctgcttcccagtgagaagttggaagaacagctccctaagctcctccctgcggtacttggcctctacaagaagcatgcggagacctttctgatatccaaggtatttgtagggagggggagggcacagcaacaccagaacctctcagatcagaccctgcgggagcaaccctaacttaaaattttatgttgggttatgaggcaa

SEQ ID NO: 3016 - DNA, 401 bp, Cricetulus griseus
cttagggtcctacccagcaccagtgagagaaactctggagccatcatatgctctttaacgtgagatcactgcgttggtactataatgagctctttttaacgctagctttcatttagactggttttgtcgacagccacttaacctcctttagtaccatgaagctggactcttaaatggaggagttctgggtcactctacttcacgcattggtgtaaaaagtcacagcttctacttgcttcatctggacatcagactgctgcgtctaagaaaacagtagtaccagttccccacagctagtgggctggaggctcataatggatggctcattggttaaaagcactgtggctcttccagaggatcagcattcgattccccagcactcacatggtggcttacaacca

SEQ ID NO: 3017 - DNA, 471 bp, Cricetulus griseus
tcccaacagtccacagtcccaccccacgcaccccatcccctcttctctggcgctccagtcctgggccttgggcctgaacaactggaaaaggtctggtggctggggaggagtgccagcaatagttcatagtaaaaaatctgtgggctctcaaagctaattttttactaaagtttttatacagcctcaaattgttttattaaaaaaaagattaaaaaacggggatgcttaacagcagtttgtacaagctcctagtgttgattccatggaactgatggctttgctcattttgacccctcccttcttttcctaatgggttaaattctggattacatagaggcttcctttgcctttttctagcagaacaccgtccatccatctgcatctctgtcccatgactcaggggcacccactctgctttgattctcctcctgaaagaaaccattttgagcatgccttttcttaatgtctgag

SEQ ID NO: 3018 - DNA, 137 bp, Cricetulus griseus
aataaattctaattgagaatttgttgcattttcagcaaattttaaaacatttttaggttttacagagattttaacctttaaacaacagatcttaaaacaacaacaacaacaggtgaatacgagtgagtctaacaaag

SEQ ID NO: 3019 - DNA, 445 bp, Cricetulus griseus
atggaggctgaggatgagtggtgatggggtcgggctctgcctctggctttagctctggctctggcacggactcccggtctgggtctggtaacctagtgacccgacacgatttttcgactctccggtggggtcctgcctgcgtcccggcagctgttttggagcgcttcaaagaagggagggcgttcgagtgcgtggggtcgggtctgtgaagccaccgcctcctcccagcgatccagtccgtggccggcctcttccatgcagttgaaataagttgacaaccattagcccgggttgcaactgcaggtggcactggaaactgactggttcctggacatgcccagtagaaggaggggtcctagtcggcagcagctaagccgttcagctttaccttctatgcagactttggttggtggcggctgtggcaatggaacaggcttgagaaaca

SEQ ID NO: 3020 - DNA, 501 bp, Cricetulus griseus
gctcccgtttctgctctttgtattaatgagttaacaggagacattgtgtcctgtgcaggcacgtacatccatgtgtggagcatcaatggcaaccccatcgtgagtgtgaacacattcactggcaggagtcaacagatcgtctgctgctgcgtgtccgagatgaatgaatgggacacacagaatgtcatcgtgacaggacactcagatggagtggtccggttctggaggatggaatttcttcaagttcctgaaacaccagctcctgagcctgtggaagagctggaaatgcaagaaggctgtcctgaagcacagatagggcagcaagcccaagatgaagacagcactgattctgaaacagaggagccgagcatcagccaggatccgaaggaaccacccagccagcccagcagcaccagccacaggccccgggcagcctcctgcagagccactgccacatggtgtactgacagcggctctgatgactccaggcgctggtcggac

SEQ ID NO: 3021 - DNA, 167 bp, Cricetulus griseus
ggaaatattgacaatcaataagcctgatttcaggggtctcttgcaagtagtcacagctgttctgatgaagatactggctttttggcttaaagaacggtcttctacaacacatgttccttatccaggtttcacctttgttagcacagcttcatgctgtatgtgtgaat

SEQ ID NO: 3022 - DNA, 445 bp, Cricetulus griseus
atatcagtggccttgtggctgccaaggtgatcccgtcacctttcaagtatgcggacattgtcaccaccaccactcacaagactcttcgaggagccaggtcaggactcatcttttatcggaagggagtgcggaccatagaccccaagactggccaagagatcccttacacatttgaggaccgaatcaactttgctgtgttcccatccttacaggggggcccccacaaccatgccattgctgcagtagctgtggccctcaagcaggcctgcacccccatgttccgggagtatgccctacaggtgctgaagaatgctcaggccatggctgatgccctgctaaagagaggctactcactggtgtctggtggcactgacacccacctggtgctggtggacctgcgacccaagggcctggatggagcccgagctgagcgggtgttggagct

SEQ ID NO: 3023 - DNA, 550 bp, Cricetulus griseus
gggttgttgtggttggagatcagagtgctggaaagacaagtgtgctggaaatgattgcccaggcacggatattcccacgaggatccggggagatgatgacacgttctcccgtgaaggtgactctcagtgaaggtcctcatcatgtggccttgtttaaagatagctctcgggagtttgatcttaccaaagaagaagatctcgcggcattaagacatgaaatcgaactccgaatgaggaaaaatgtgaaagaaggttgtactgttagccctgagaccatatctttaaatgtcaaaggccctgggctgcagaggatggtgctcgtggacctgccgggcgtgatcaatactgtgacatcaggcatggctcctgacacaaaggaaatgattttcagtatcagcaaagcgtacatgcagaatcctaacgccatcatcctgtgtattcaagatggctctgtagatgctgagagaagtattgttacagacttggtcagtcaaatggatcctcatggaagaagaaccatatttgttttgaccaaagtagacctggcaga

SEQ ID NO: 3024 - DNA, 540 bp, Cricetulus griseus
cggcgccaccctgaggatcccccctcccgccgccgccccttcttctctgtgcagcagatagaagagctgaagcagcagcacactggagcccctggcctaccttccagtgcaccaggaccccaggtcccccaagagccagcacctttccagtcacctgagactcccccactactctgtcctgatgccctaagtggtgccacaatcatctaccagcaaggagctgaggagtccactgcgatggccactcagacagccttggatctgctgctgaacatgagctcccagcgggagctaggggccacagccctgcaggtggctgtggtgaagtcagagggcatggaggcggagttgacatctactggtaggcagccttcccctgaagataccacgccacaggtggtgacacttcatgtgggagagccagggagcagcttggcagccgagagccagctaggcccctctgacctacagcagattgccttgccatctggatcatttggtggggccagctacagtgtcatcacagcaccccctctggaa

SEQ ID NO: 3025 - DNA, 406 bp, Cricetulus griseus
gggtcgagaggacgaggtgccgctgccgccggcccccggagcccagccctttcctagcccggtccagttccagctgccacctcctgaccccgccgcagaccccatcgttaccatgaatcctgccgtcttcctgtgtttacccgacctcagatgctccttgctgctgctggtaacttcaatttttacacctataacagcagaaataacaagtcttgattcagagaatatagatgaaattttaaataatgctgatgttgctttagtaaatttttatgcagactggtgtcgtttcagccagatgttgcatccaatttttgaggaagcatctgatgtcattaaggaagaatatccagataaaaatcaagtagtgtttgccagagttgattgtgatcagcactctgatata

SEQ ID NO: 3026 - DNA, 463 bp, Cricetulus griseus
gctcctgtctgtgaaagacttcctggttctcccaccgttttttctcgtctttttatttccagaagccaatgcgagacattggctctgattaagcgacggctcgtgacccggggtgatggagatcacccctgcaaggggtggactgaaccgagcacacctacaatgcaggaatctacaggagttcctagggggcctgagccccggggtgcttgaccgcttgtatgggcacccagccacttgcctggctgtcttcagggagctcccttctttggctaagaattgggtgatgcggatgctttttctggagcagcctttgccacaggctgcggtggccctgtgggtgaagaaagagttcagcaaggctcaggaggaaagcacaggactgctcagtggtctccgaatttggcacacccagctgctccctggtggactccagggcctcatcctcaatcccatcttccgc

SEQ ID NO: 3027 - DNA, 343 bp, Cricetulus griseus
  misc_feature (50)..(68): n is a, c, g, or t
  misc_feature (79)..(101): n is a, c, g, or t
ttgggtagactgctgttagtccaactgtgaaaacttggatccccagaccnnnnnnnnnnnnnnnnnnngcatgttggcnnnnnnnnnnnnnnnnnnnnnnngggtagagacatgaaatccccagcaagccagctaaccagactagcagtatcagcaagctctagattcagtgataaccctgtctcaaggaataaggtagggagagatagaggaaaacaactgtgaggttggaagaaaggaacgggaaagtaatgccattctattttaattaaaatatatgaaagttgtatttaacaactgtgaaaatctaaaaccaaaatagacttttgactttaaaagcatt

SEQ ID NO: 3028 - DNA, 513 bp, Cricetulus griseus
tggataaagagagggaggggaggggctgaactgtgaagattgtggccccagaaccatgtctactcgggagtcctttaacccggaaagttatgaattggacaagagcttccgcctaaccaggtttactgaactgaaaggcacaggctgcaaagtgccccaagatgtcctacagaaattgctggagtctttacaagagaaccacttccaagaagatgagcagtttctgggagctgttatgccacggcttggcattgggatggatacttgcgtcattcctttgaggcatggtggtctttccttggttcaaaccacagattacatttatcctatcgtcgatgacccttacatgatgggcaggatagcatgtgctaatgttctcagtgacctctatgcaatgggcgtcacagaatgtgacaatatgctgatgctccttggagtcagtaataaaatgactgacagggaaagggataaagtgataccgctaattatacagggttttaaagatgcggcaga

SEQ ID NO: 3029 - DNA, 326 bp, Cricetulus griseus
tggtcttttcttgcgctatcgagtggaagccctaaccctgcgtggcatcaatagcttccgccagtacaagtacgatttggtggcagtgggcaaggctctggagggcatgttttgtaagctcaaccacctcctggagcgcctgcgccagtcattcttcttctacctgctgccggccctctcccgctttgtctccattgggctctacatgcctgccatgggcttcttgctcctggtccttggacttaaggccctggagctgtggatgcagttacatgatgctggagtgagccctgaggaggccgggaaggctcctggccctgggtctt

SEQ ID NO: 3030 - DNA, 487 bp, Cricetulus griseus
tcttggccccggtacccctgtccgcgagtgctcaatgtgaaccctggtaaagagaaaaaaagcctttaccgataccgcggggccccccctcaaacgctcgctcgtggcttgcccgtttatactctgtgacggggtttgagtgtgcacgctgtacccccgcacgcacgcacgctgcccttggccaccgcggccgggagctcgccgggtcgggtccgtcccgccctcagtgagaaaagttgccttctctagcgatccgaggaaagggcgtgctatgtccggatctggtttgtgttgtggggttccctcccgcgttgggtcccctgacccgaccggctgcccgccccgaccgcccgattgtccccgcgcggttggcggggtaaccgagcgtctgtgcctttgttgctctcgttttcgcctatcgcggcccgcgcctcctcgctccgagtccgaggaggaatcacgcggggcagagctgtcgtcagtcacg

SEQ ID NO: 3031 - DNA, 438 bp, Cricetulus griseus
ggagtcattcatctaaccaagctgagaaacctgtccagcttggatctgcgccatatcaccgaactggataatgaaaccgtgatggagattgtgaggaggtgcaagaacctgagctctctgaacctctgtctgaactggatcataaacgacaggtgtgtggaggtcattgccaaggagggacaaaacctgaaagagctgtacttggtgtcctgtaaaatcaccgattatgcactgatcgccattgggcgatacagcgtgaccatagagacggtggatgttggatggtgtaaagaaatcacagatcaaggagccaccctgattgcacaaagcagcaaatccctgagatacttggggctgatgagatgtgataaagtcaacgaagtgaccgtggagcagctggtacagcagcacccccacatcactttcagcactgttctg

SEQ ID NO: 3032 - DNA, 467 bp, Cricetulus griseus
  misc_feature (285)..(313): n is a, c, g, or t
gattaacagccctcccccatctaaaaagacaaagggaagactgccctgtgtctagatagaacacggcaggaacagggccaaggttgaacttctgtcccaccattagctgggttttaggtgtctgtttgcagggatctgggccctcaacactcttaaagctttgctgaaatgcctcaggtatcagtcctctccaggggaaatgattttgggcagaagccaggcaatggagtgccagctgtttgattagtcccagagttttgtattccctccttgtagctcttaatnnnnnnnnnnnnnnnnnnnnnnnnnnnnnctcagatgatgagccttcacaaagttccagcttgttggcaaggggaagcattctgttctacttgaagttttgaagtttcatttgaaatttaagacctctgggggccctggcccctagtggggttgtggagctttgggttcgcctctcccctgcc

SEQ ID NO: 3033 - DNA, 413 bp, Cricetulus griseus
gcggggaaaaccagacagatggatgttgaatcctcctcaaggaggaagtaaactaacacagtgtgccaccatgacgtgatgagcactgaatttaaaagaaatgtgaccagagcaaggccagttactcgtctcacacccaacccacgggtgtcagggacacttgtcaccgttccttcatggtgctgtcatttagttaagtgctcctatcagacgcaaggaattgctcacagtgcagcctcctcgtgtgtgggggtggtgggagtggtcctctgagcatggtgcttctgctatgcaccttgtccagtgctataagtaatttatgaatgaacccttcatttgaggaaaacattatagactagacccaaatgtaggagatagggaaggcttaagaaaagaataaaaggccgggcgat

SEQ ID NO: 3034 - DNA, 392 bp, Cricetulus griseus
tacctaaggggaagagtaagaaaggaaggccagcgcttcagagatgcattggaggatcacaatcggttctatgctgccaaagattagacacattcaacaataaacagataggaggggccaagaggaacacactttttctgcagtgaaattccttttcagttctaaactgcttctatgcagcccaagttagagtcaaccatttgtaaatcgtgtcctgtcgtgacccatctcctgtccagtccacttccccctacctgagagcctggaaatgaacccaatgggacagtgaagatggaggaggcttggctgcctggcagatgcagaatctgtctgtctggacatgaaggaaaacagagattggaaggaggagcagggcgctgttaaccaccctc

SEQ ID NO: 3035 - DNA, 307 bp, Cricetulus griseus
  misc_feature (258)..(278): n is a, c, g, or t
gcgccccacccctgcaagtggtctccagtgtgtggtcctgtctcatccaaggtcacaaaaccctatcactccctgtactggtagccccagctgtctgtcctcccctacctcctcatgactgtcctggttaaatgggcgtcaaggatgactcccatggtactccagccctccactgtgctgatgacaggtgtgtggaagtcaagggcaccccccggggatagatcacacactaggagtgagcacagtctacggagtccnnnnnnnnnnnnnnnnnnnnnaaggctatcttgcttatcctgtgagattc

SEQ ID NO: 3036 - DNA, 582 bp, Cricetulus griseus
  misc_feature (390)..(427): n is a, c, g, or t
cagcctgctggaagagacactccactttgaccatgctgtcagaatggcacctgtaatcacagaggaaaccaccctccatctagaggatatcattaaacagaggatacgagatcaggcttgggatgatgtagaacgaaaagaaaagcccaaagaggatgcgtatgaatataagaagcgcctgacattagatcatgagaagagtaagctgagccttgctgagatttatgagcaggagtatatcaaactcaaccagcaaaaaaccgaagaagaagaaaatccagagcatgtagaaattgagaagatgatggattctctcttcctacaattggatgccctatcaaacttccacttcatccccaaaccgcctgttcctgaaattaaagtggtatnnnnnnnnnnnnnnnnnnnnnnnnnnnnnnnnnnnnnngtgagtgtcagtgatgcagccctcctggccccagaggaaatcaaggagaaaaataaagctggagatataaaaacagctgctgagaaaacagctacagacaagaaacgggaacggaggaaaaagaaatatcagaagcatttgaaaataaaggagaa

SEQ ID NO: 3037 - DNA, 383 bp, Cricetulus griseus
tctacaaacataacctgagggcaaagggtctctgctgctttcgttctttctaagtaggcatttagattattcctgtaggctttctattttttgctttattgctctaatgctgctagttttagtactgtaggtggtatgtctttattagcataagaaaaaactttcacatgagcttttacatactctgggtgggggtggtaagggatgggtgggcagccctggccctttaggacatttcctctatagtgttagctttcatcagtcaactgctgccgctttttaaggaccctgaagcttgtcctgttaaaatctttgggaaatattaagctcataattaaagtttttggggtaggttttgtgtggtgaaacaaatgggcggtctt

SEQ ID NO: 3038 - DNA, 304 bp, Cricetulus griseus
  misc_feature (90)..(103): n is a, c, g, or t
  misc_feature (105)..(120): n is a, c, g, or t
ttattcttgagctgggtatggtggtgtatacctttaatcccagttctcaggaggtacaagcaggtggctctctgtgaggctgaggccaannnnnnnnnnnnnntnnnnnnnnnnnnnnnncagggctatgtagagatgccctgctcccatctatctgtctgtctgtgtatctgtctatcatctattcatttttggagggttaggggagatggttcattgagtaaagcacttgtcacataaacatgaagccctgagtccagacccccccaaacctactaacgctggtagtacagttttgtaatcc

SEQ ID NO: 3039 - DNA, 434 bp, Cricetulus griseus
  misc_feature (68)..(94): n is a, c, g, or t
ggaatatctccatctcaatgacatgaaggaggcagtacagtgtgtccaggagctggcttcaccctccnnnnnnnnnnnnnnnnnnnnnnnnnnnattgagtccacgctggaacgtatttttattgctcgtgaacatatggggcgactggtacaccagctgctctgcgcagggcacctctccactgcccagtattaccaagggctgtatgaaacactagaattagctgaggacatggaaattgacatccctcatgtatggctttacctggcagaactgataacacccattctccatgaagatggggtgcccatgggagagctcttcagggaaattacgaagcctctgagacccatgggcaaagctacttctttgttgctggagatcctgggtctcctatgcaagagcatgggtcccaaaaaggtgggaatgctgt

SEQ ID NO: 3040 - DNA, 196 bp, Cricetulus griseus
tcagggaaaatttatttattgtttactcagggtttattcagctgatgtgcaggctaacccttcactggcttccttgggggatgtgatccccattgtcagggagtcccacccccatgctgtgtaggttctaaacctaacacagcttctgggtgtgctaaaataatatccaaaccctgttggattgttgggggtgtag

SEQ ID NO: 3041 - DNA, 300 bp, Cricetulus griseus
  misc_feature (28)..(63): n is a, c, g, or t
ggcctccatcttccgcgccttcgagatnnnnnnnnnnnnnnnnnnnnnnnnnnnnnnnnnnnngcctccgggaccgggaccgggaagccgcgggttgagcggcaccgtggtgctggagctgcgctgcttgctgcccgagggcgcctcggagctgcggcttgactcacacagctgcctggaggtgacggcggcgactctgcggcgggggcagcccgaataccatcagccactctcggagaccgcgccgtttcacacgcatcccttctcgcactatggccaggccttgtgcgtggtcttccc

SEQ ID NO: 3042 - DNA, 370 bp, Cricetulus griseus
ctatttgacaattattagtgtgaccaaagtattaggcagttttcatacattttccaccttgtacaaaattctgaattcatttttcttccaggttggcacagagctgtcgatgggaaagccctctgcgtattattttggttgttctgacttagcaaagtgattttgaataatacttggtgttcttttataacccacttttgattggtaactgttttctgtattgttgcaggcggatcaaatgagtgagtcttggtggagatttaagtatttattgctacagcttagttgatgaaattgctgttcttgtaaagccatatgttctgttaggtcctgcttgctcagagcgtttctttctacaggtgaaacacta

SEQ ID NO: 3043 - DNA, 480 bp, Cricetulus griseus
gaagctggcgtgaccttcacatagacaggtcaccactaacttctttaccacccacttcacctataacttctgcagacctgtcacaagtttacatgtaaccacagaaatctgttcttgtgactcattagctaatggacactgttctcagcaagggaggctgaatcagccccttaagagagattaggttagaggatcatgtacaagctgatgtgtaaaagtaggaatcacgtgtatcagaaagccggttaggtactttttctacataaagtccctgcctgcctcctggctgtgctgccttgttctaagcccttcccaacagggtcagtgctgttgccagggaaggcagtcaagagcactcatccacttctggacaagtctgggaacttggacacataaaagaataggtgtgtggcattttccaaaggtggcatggcccttaaatgagttattgctattttacatctacaaaataactcagtt

SEQ ID NO: 3044 - DNA, 515 bp, Cricetulus griseus
gtggctctcataggtagtccagtggacctcacttacagatacaaccatctaggagattctcctaaaattctgcaatacattgcttcggggaaccatcttttcagccaggtcttaaaggaagctaaaaaaccaatggtggtgttaggcagttctgcactccagagaaatgatggagcagcaattcttgcagctgtgtccaatattgcacaaatgattcgagtgacgagcggtgtttctgaagactggaaagttatgaatatcctgcataggattgcaagccaggtagctgctttggaccttggctataaacctgggatagacgcaattaggaagaaccctcccaaagtgctgtttcttctgggagcagatggaggttgtgtcacacgacaggacttgccaaaggattgtttcattatttaccaaagccatcatggtgatgtgggtgctcccatagctgatgttattctcccaggggctgcttacacagaaaagtctgctacttatgtcaatactga

SEQ ID NO: 3045 - DNA, 530 bp, Cricetulus griseus
gtgattgtttctctttttgagaagtattacaatgcaaaatatggtggtgttataagatgcaaaatattagttgaggcaggagagataggttagtggttaagaacctttcctgctctcacagaggacctgggttcacaacaattaagcttttctgagatgatttgcatattgtgacattagccacagtgcagtttcctcaaaccatctttcaaggcagcttgccagtgcctaagaagcagcctctctctgtttcagatatcagagatgggatcagctgctctcttgttgtgggtactgctgctctgggttccaggtgagaggatgcagtgttgggagtatctattgtagccaccattgttttttatgctttgatgtcatgatcattaaaattattgcacttcattagttttaatttttcttttattttataactcctcagaatttagctcatgagtactgttgcagattcctcattcatgatagttttacactggcctgctttcagtatacatgtgacaggaatatgtgtt

SEQ ID NO: 3046 - DNA, 444 bp, Cricetulus griseus
gcagccgctgattcaggaacatttggagctggaccatgacccattctccatttaccctctttttacagagactgattccagccagagacagcaccaatctacttcagagaagatgatgggcatcaaaggagctgcagagaagatgataggcaccaaagaaactccacatgcagtttaatttatttgtggcaaagggaagaagtctcatcatcaagtacagtgcatggacactgggaaacatgcatgtctaccagtcccttgggagacactgtgtaattcctcacagatcttcatgtcacagaagccaatggagatgaatttctattacctattgagaagggtataaagtagtcacttttctagaaggtgaccagcgtcaaacatctctggattggggaattcctttttgtcatgcagcactgctgacagtgatgttaaaatggt

SEQ ID NO: 3047 - DNA, 444 bp, Cricetulus griseus; identical to SEQ ID NO: 3046

SEQ ID NO: 3048 - DNA, 494 bp, Cricetulus griseus
ggcccgggcggccagcgcgagcagcggggaccatgttccgacgcaagctcacggccctggactaccacaaccccgcaggcttcaactgcaaagatgaaaccgaatttagaaactttattgtttggcttgaggaccagaaaatcagacactacaagattgaagacagaggtaacttgagaaacatccacagcagtgactggcccaagttctttgagaagtatctccgagatgttaactgccctttcaagattcaggagaggcaagaagcaattgactggcttcttggtttggctgttagacttgaatatggagataatgctgaaaaatacaaggacttagctcctgataacaagaaaaatactgacaacgcagctaaaaatgcagagccattgatcaacctggacgtaaataatccagattttaaggctggtgtcatggctctggctaacctccttcagattcagcgtcatgacgattacttggttatgcttaag

SEQ ID NO: 3049 - DNA, 363 bp, Cricetulus griseus
cggggctatctacacatgagctcacctctctgctagagaaagagctggagcagagccagaaagaggcctcggatcttctagagcagaaccgacttttgcaggaccagttaagggtggccctgggccgatagcatagtgcccgggagggctatgtgctacaggctacatgtgaacgaggctttgctgccatggaagagacacaccataagaagattgaagacctacagaggcaacaccagcgggaactggagaagctgcgagaggaaaaggaccgcctcctggctgaggagacagctgccaccatctcatccattgaagccatgaacaatgctcatcgggaggagatggaacgggagttagaga

SEQ ID NO: 3050 - DNA, 190 bp, Cricetulus griseus
cgccacccccacctgtcccaggaccacacctcatgcagcagccaaactcgcatcatcagcactctgtagcacatgtagttgggccagttcatgctgtcacccctgggtcacacattcattctcaaactactggacaccatttaccaccaccccgtgcacctcctgggcctgccccgcatcaccacccacc

SEQ ID NO: 3051 - DNA, 370 bp, Cricetulus griseus
  misc_feature (339)..(355): n is a, c, g, or t
gatgcccgggatttcactgtttccgccatgcatggagatatggaccaaaaggaacgagatgtgatcatgagggagttccggtctggttctagcagagtattaattaccactgacctgttggccagaggcattgatgtgcagcaggtctccttagtgatcaattacgaccttcccaccaacagggaaaactacatccacagaattggtcgtggtggtcgctttggccgtaaaggtgtggctatcaatatggtgacagaagaagacaagaggactcttcgagacattgagacattctacaacacctgcattgaagagatgcccctcaatgttgctgacctnnnnnnnnnnnnnnnnntgttacctggctcta

SEQ ID NO: 3052 - DNA, 548 bp, Cricetulus griseus
catagaatgttctacttagtaagatgaaagtgcaatttttgtttaaatctatttgtttcttgtttgcttacttctgtttttgctttaagatagggtctcatttaagatagggtctcattttgtagcccatgctgacttcaaacttgctatcctcctgccttagctttctgagatgtacactatgatgccagccaccaatttaacttcttgcagggcatcccaggattgtcagagtccctgtaaccttatgtctgtggctctggcatcctcagcttctgtcccagtgactgctctaccacctacattccatccaggcagaagggggagggggataaagaaacacctctgcttgcagcaagcaagcaacagttctaagagcatcatgtcacctagaatttgattacagagaactctgggaaatgtagtctttatcggaatcaccacacactcaatagttaatcccaagtataccaaaaggggaggaagaatagatgtcaagggacatgtcccacagaagactgtggaaaagcaagcaaggcaagaaccat

SEQ ID NO: 3053 - DNA, 489 bp, Cricetulus griseus
ttggctgtttttcactgaagtgcttaagtggtaggtagtgtttcatggacacggcagatattaaaaacaaagcaagcaaagaaagaaaacactaacaaatgggggaaaccaagcaattcagatgtctattccctttgccataccatgaagctgaggaccttcctgtagctcaaacatgcagatgagaatctgatgtagaatatgaaaaacatcaccctgtttttttccccagagtcaaatttaatagaaaaccatttttcacagatgtgacttgagaatattttatatgcttgtgatttttcttaaataggcttctttggggcttatttcaactgcagtgggggagactcggtgattcaccaaattgtgtgaattaaaggcatgatcaaggaacaggccattgaaaatgatggccccacagtattaaaagcactttgatcttttgttttgacaccttgaatttatctttaattatatgtgatgacattt

SEQ ID NO: 3054 - DNA, 579 bp, Cricetulus griseus
  misc_feature (155)..(184): n is a, c, g, or t
ccttgccacactgacccatccggcctggtccctacctggtctggtgtacaactgctcacaggcaggggctgtctcacacacaccggaatgtactacgggtactacagcaacaccacgctgagccagtcatgcgcctcccctcgagaaactggccnnnnnnnnnnnnnnnnnnnnnnnnnnnnnncctacctcttcacggtgggcgccgccttcttcattacctgcatcactctggtgtacagcatgtcccactcctttggggagagctaccgggttggcagcaccaaaggcatccatgctcttacggtcttctgctcctgggactacaaggtgactcagaagcgggcctcccgtgtccagcaggacagcatctgtactcagctgaaggagctgctggctgaatggcaacttcgagagaggccccagagcgcatgtgggcagctgtggcaggctgccatgctaagcctgggatggttgctgtgtctgggcaccacgatgggctgtgcagcggctgttcttaccttctcagaggtcatgattcatagaccggatgctgatggccagggggtagagctgctg

SEQ ID NO: 3055 - DNA, 370 bp, Cricetulus griseus
  misc_feature (252)..(278): n is a, c, g, or t
aacacagaggaagtgttcagcaacagcactttggactgctctggagtagggttgtacaatttcaaggaatgtttggatttccctgcatcgtgtggattgctccttagctactgcacagattgcaatataatgctgcacgttcaagatgaacagtagctcctagtgatcagaaaatccacgctttgcacatagtttgatctttactgaaatatgttgccaaaatctgtttttgttgtagctttggatttttcnnnnnnnnnnnnnnnnnnnnnnnnnnnggaaacaatggacaatgccctttaactttggcaactactaaggaacccttttttgaaaatccttttaaaaaccctaacccctttttaaaaca

SEQ ID NO: 3056 - DNA, 287 bp, Cricetulus griseus
tggctttccctccccctccatacattcccccctcctgctccttttccagtttttctgcttcccgggaagtgaattgctgatgccaagaggactttattcattaatgatgcaaccggattcgtttcaggattatgttgcacgaaattgaattttgaatgaaggatttttttttttgtgaaaaaaagtgttgactctttatttcgttgcactttaaattattatcttatttaagtatacagtttaattgtattattctcttaaaaatattaaatctatattttatggaa

SEQ ID NO: 3057 - DNA, 577 bp, Cricetulus griseus
  misc_feature (50)..(97): n is a, c, g, or t
caaaaaaaactaaaacaaaaatttgagtaaaaattgtggggttttgtttnnnnnnnnnnnnnnnnnnnnnnnnnnnnnnnnnnnnnnnnnnnnnnnnggtgtatctatccatttgatgttttgaaatcatctcttcagtaactggaggaaggatttgagacagttaaaataatgcatttatgctgtcataaggtttatgagctgtatcttagaaaatgctgtgcgagagcaactctgatacatcattcatgtggcttaatttggaattcttactctgaaatgattaattgaatttagtgttttttttcttttctgtctgactaataactaaaatagtgaacttgggtacagtggtgcattcatgtaatcctagcagctcaggatacttaaggccagaggattgctagtttgagacaagcttgagcaacaccctgtattaaagtaaaataaggtacagtgaaatcaaataaaaaattcagaccacaaactaaatacttgagacaaaaggggggctgtattttctttctcttttcagacagcactttccataggctagtgaatgtaccaaggatgagtt

SEQ ID NO: 3058 - DNA, 568 bp, Cricetulus griseus
ctactcgattcaaggacaacacaccatttctccgctcgatctggccaagctgaaccaggtggcaagacaacagtctcactttgccatgatgcacggcgggacgggattcgccggaattgactccagctctccagaggtgaaaggctattgggcaagtttggatgcatctactcaaaccacccatgaactcaccattccaaataacttaatcggctgtataatcgggcgccaaggcgccaacatcaatgagatccgccagatgtccggggcccagatcaaaattgccaacccagtggaaggctcttctggaaggcaggtcactatcaccggctcggctgccagtatcagcctggcccagtatctcatcaatgccaggctttcctctgagaagggcatggggtgcagctagaacagtgtaggttcgctcgtaacccccttctgctgttttcccatgatccaactgtgtaatttctggtcagtgattccaggttttaaataatttgtaagtgttcagtttctacactttatcatctgctaagaatttaaaaagaaaatcacattctctgtt

SEQ ID NO: 3059 - DNA, 183 bp, Cricetulus griseus
gagcaccgacctgggcaacaaggagcgaggcaagatatggcaccgcaagccgtcgccggccactcaggacgggattatagtgaacgttgttcacaccacttctgaataccaccggaaagtcttgcggtttttgaatgtggcttttgacggctcaggcgattcctttcttgccggggaccacca

SEQ ID NO: 3060 - DNA, 183 bp, Cricetulus griseus
gctgacggcttcctgaggagacggccctcgatggggcatcctggcatgcattatgcaccaatgggaatgcaccctatgggtcagagagcaaacatgcctcctgtacctcatggaatgatgccacagatgatgccccctatgggagggcctccaatgggacaaatgcctggaatgatgtcttca

SEQ ID NO: 3061 - DNA, 465 bp, Cricetulus griseus
gagggagctgcggttcgccgcttcataacctggtgccagagtaattggtggttaaaagaagtcacaagtaacttggatgaagtaggaatttcaactaaggagatactgaggattttctgccgattctgggcaaagatggccaccaatgatgctgttctgaagagactagagcagaagggtgcagaggctgaccagatcattgagtatctcaagcagcaggttgctcttctcaaggagaaagcagttttacaggcaactttgagagaagaaaagaaacttcgagttgaaaatgctaaactgaaaaaagaaatagaagaactaaagcaagagctaattcaggcagaaattcagaatggagtgaagcaaattccagtgccagtccaatctgatactccagtgcaagctagctctgcagtttctacaagtgtgatacagtctacatcggtatcaaccatctcttgtagt

SEQ ID NO: 3062 - DNA, 428 bp, Cricetulus griseus
gcggttgatgctggctttgttcccaatgacatgcaagttggtcagacagagaaaaatagtagcaccagaactttatattgctgttggaatatctggagccattcaacatttagctgggatgaaggacagcaagacaattgtggctattaacaaagacccagaagctccaattttccaagtggcagattatgggatagttgcagatttgtttaaggtggttcctgaaatgacagaaatactgaagaaaaaataaataaaaatcatatcttaaggaaactatcaaaagtattcagctgaaatcatagaaatataatctgaggaaagaaagtatgctaacagcagctagaatgccttttgatgaatcaattattcctttttaatttttttgtggtcctaaacaattattttttgacattttctaattctgc

SEQ ID NO: 3063 - DNA, 580 bp, Cricetulus griseus
  misc_feature (475)..(495): n is a, c, g, or t
cactgtgccctccggggtctggagcgtctcctgttatctgagcagctctctcggttagatacagagtctttggtcaagctaagtgtggacagagtgaatgtacaaagcccacaccgagccatggcagccctaggcctgatgctcacctgcatgtacacaggaaaagaaaaagccagtccaggcagaacctctgaccctagccctgctacacctgacagtgagtctgtgatcgttgctatggagcgggtatctgttctctttgataggatccgcaaggggtttccctgtgaagccagagttgtggcaaggatcctgcctcagttcctagatgatttcttcccacctcaagatgtcatgaacaaagtcattggagagtttctgtccaaccagcaaccatacccacagttcatggccactgtagtatacaaggtttttcagactctgcacagtgctgggcagtcatccatggtcaggnnnnnnnnnnnnnnnnnnnnntccaacttcacacaaagaactccagttgccatggccatgtggagcctctcctgcttccttgtcagtgcatctaccagcccatggg

SEQ ID NO: 3064 - DNA, 542 bp, Cricetulus griseus
  misc_feature (210)..(239): n is a, c, g, or t
  misc_feature (297)..(439): n is a, c, g, or t
tgattcatgggactttaaatgaattctgtgggtgaaagcaccagagttactagtgtccattttcatccaagacccttcttctctaacgttcttggtcctgttgaaacatttcagtatctacaaatactgcaatgttactacccaagagaaaagccattgtgtgtatgctggtcaccatgatcagtgtggtaccatttcctttttttgtcnnnnnnnnnnnnnnnnnnnnnnnnnnnnnnataaactatcacacccttccagccaccatttgtctttatttctagaactagaaattcnnnnnnnnnnnnnnnnnnnnnnnnnnnnnnnnnnnnnnnnnnnnnnnnnnnnnnnnnnnnnnnnnnnnnnnnnnnnnnnnnnnnnnnnnnnnnnnnnnnnnnnnnnnnnnnnnnnnnnnnnnnnnnnnnnnnnnnnnnnnnnnttatatctgaaggaacagttcacacccaggatagggaaacacacttaaaaatgaaacatacatcaaagcacattggctagaacagtgcagcaattagaatttc

SEQ ID NO: 3065 - DNA, 311 bp, Cricetulus griseus
  misc_feature (14)..(57): n is a, c, g, or t
aaggtcgagacctnnnnnnnnnnnnnnnnnnnnnnnnnnnnnnnnnnnnnnnnnnnnacaactcagaacaactgaacgggactcagcgggttctcctagacaacgtcctatcggaagagcagtgccacgagctacacagtgtggccagtggaatcatgctggttggtgatggataccgagggaaaacatcgccccatacaaccaatgaaaagtttgaaggagcaactgtcttgaaagcactaaaatttggctatgaaggccgagtgccactaaagagtgcacgcttgttctatgacatcagcgagaaagct

SEQ ID NO: 3066 - DNA, 329 bp, Cricetulus griseus
tgggtagtacccgctcggctgtggcgttggtggctgctgaaatgacgaccttagttctggataacggagcctacaacgccaaaatcggttacagccatgacaatgtctcggttatttccatgcgctagttcagatcaaaaacagcacgtcttaaaacatttactgctaaccagattgatgaaataaaagacccttcaggactcttttacattcttccttttcaaaagggctacttggtgaattgggatgttcaacgacaagtttgggattatctttttggaaaagagatgtatcaggttgattttttagatactaatattattataaca

SEQ ID NO: 3067 - DNA, 567 bp, Cricetulus griseus
acgaactgctctgtgcaatggcagaaagcagcctggaatgtggttgatggtactgaggtctctacatgtgttttcatgtattaacaaaagagaaggggaactctgtgtcattctaaaccagatggtaagagaaagacagcagaacaaggacgtggaagaggggtggatgctggctttctgaagagccccgcctgagggggaagctggaatgtaccatgttgttagcagtgagtggcaatgactggaaagggcctcactgaacatagcatgcaatgacgggacacaggaaagacccacgacttggccagcaaagccggggcaaagagagagggactgggtcccacaagcaagaggaagataggagagatcaaaggtcagtccttgaagacaatctgttggccgtgaggacgctcatcatgggtgatatggcggcgaatatgaatcctccggacacggtgctcccggttctcttcatcgtctcctctgcctgccccaccacctccagctgcaccccctgtggcctccaggagagctagatctgggccacggggagtctcataaatcaag

SEQ ID NO: 3068 - DNA, 486 bp, Cricetulus griseus
cccggttccgtgctgcttctgagcgcacgcagtgacttggcgctgctgcagctggaggaggagctgtgcacacagcatcctggcctgcgagtgttgcgggcagcagctgacctgggcaccgaggccggagtgcagcagctgttgtgcactgtgcgcaagctccccaggcccgaggggcttcagcgactgctgctcatcaacaatgcaggtactcttggggatatttccaaaggcttcctggacgtgagtgacccagcagaggtgaacaactactgggctctaaacctgacctccatgctctgcttgacctccggcaccctgaatgcctttccagatagccctggcctcagcaagactgtggttaacatctcatctctgtgtgccttggagcccttcaagggttgggggctgtactttgctgggaaggctgccagagacatgttgtaccaggtcctagctgctgaggaacccagtgtgagggtgctg

SEQ ID NO: 3069 - DNA, 479 bp, Cricetulus griseus
accattcagtttacaggagacctatgaggcataaaagaaatgagtttcttggggagctccagaaaaaagaagaggagatgagacagatgtttgtccagagagtcaaagagaaagaagccgagctcaaggaggcagaaaaagagctgcatgataagtttgaccgtctgaagaaactgcaccaggaagagaagacgatgctggaggataagaagaaatccctacacgatgaagtgaatgcattcaaactgagaaagacagcggttgatctgctccagtctcatggttctcatgctgggggctcgcagactctgagaagatacatacatatcaagattaatccatggttgtgtactgaatagtatgccctgctacagcctggactggactccacttagcctcctaagcgaaggttcttattccaactgacaactttttttaatggtgccagatagctgggccctccaccccctgctctggta

SEQ ID NO: 3070 - DNA, 480 bp, Cricetulus griseus
ccctccagaggatttacggcatttcattccctgaccccaaactgctgaaagagtgggagaagttccaagaggaagctaaaaaccgagatcataggaagattgggagggaccaagaactatatttcttccatgaactcagccctggaagttgctttttcctgcccaaaggagcctacatttataatacacttatggaatttatcaggagtgaatataggaaacgaggattccaggaggttgtcactccaaacatcttcaatagccggctctggatgacctccggccactggcagcactacagtgagaacatgttctcttttgaggtggagaaggagcagttcgcccttaagcccatgaactgcccaggacactgtcttatgttcgaccatcggccaaggtcctggagagagctgcctctgcggttggctgattttggtgtgcttcataagaatgagctctctggggctctcacaggactca

SEQ ID NO: 3071 - DNA, 495 bp, Cricetulus griseus
agctttacttagtcagtagggtgcgcctgttggaggcttagacttaagatgactcaaacagccatcccctgtccctgctgtatgtatgctggggaaaggcttctctcccactcactctcaccagattggtttttggtttttttaagtctaggcagtcctgaagctcattatggataccaaactggattcagactcacagctagggttacagatgtgagccaccatgcccagctttcttccttctggaactagaatagagaccatccactacctcacacatgccagtcaatatgccctgcctgccatggtgccctgagcctgcgctcaccacctctttatacagttttcttgaggcttgtgcgaggagcaataaatagcacatcttttccactgctgaatcagaaccagttaagcagtagatataggccttgagcaatggatataaaaatactggccttcaggaggtggtgctcgcctttagtcccagcactcggg

SEQ ID NO: 3072 - DNA, 481 bp, Cricetulus griseus
tccgttgctgaaaattataagctctgcatagtgttagctttactgtgattacatctgtttcttattttaagcaggcccgtacctttccagggtccaactacaggatagattacagacttcattagtgtctatttcttttactctgtgtagacttaagaaagtctaatccagaggtgggccaattcagaattgactgtaattgaacatagattaaaagtattgatgggaggcttgacacatagcatgagttatttgacttttgtaggatatttaaaatcttcatttgcagttcatgtaacagttgcgtcttaaaattcacacaataaagcagtcctgttcaaaattttttttattgtggcttgaagagttttttaaagtgaatttagagttgttttgtttttgatgtgaaatgcagatgggtgctagaagagcctcttccccatcactacagtgtaataatattacaccatactgaaatgta

SEQ ID NO: 3073 - DNA, 423 bp, Cricetulus griseus
atcgtcaaaaagaggaccaagaagttcatccggcaccagtcagaccgatatgtcaaaattaagagaaactggcggaaacccagaggtattgacaacagagttcggagaagattcaagggccagatcctgatgcccaacattggttacgggagcaacaagaaaacgaagcacatgctgcctagcggcttccggaagtttctggttcacaatgtcaaggagctggaagtgctgctgatgtgcaacaaatcttactgtgctgagattgctcacaatgtttcctccaagaaccgaaaagccattgtagaaagagcagcacagctggccatcagaatcaccaatcccaatgccacgcttcgcagcgaagaaaatgagtagatggctggtgtgcatgttttatttgtgtttaaataaaaccataaaagc

SEQ ID NO: 3074 - DNA, 226 bp, Cricetulus griseus
tttggccccttgctctgttccagcgttgctgcagctgtttctcagcccttttcaacactccagcgaccgaccacaagctcttgtttccaggatggtgatccgtgtatatattgcatcttcttctggctctacggcgattaagaagaagcagcaggatgtacttggtttcttggaagccaacaaaataggatttgaagaaaaagatattgcagctaatgaagagaat

SEQ ID NO: 3075 - DNA, 477 bp, Cricetulus griseus
cttccggggctccccagctccccgtgtgtctcttggtgttggggatggcgggatccgggaaaactacctttgtacagaggctcacaggacacctccacaacaaacgcttcccaccctacgtcatcaacctggaccctgctgtgcatgaagtccccttccccgccaatattgatatccgtgacacagtgaagtataaagaagtcatgaaacaatatggactcgggccaaatggtggcatagtgacctcactcaatctctttgctaccagatttgatcaggtgatgaagtttatcgagaaggcccagaacacattcaaatatgtcctgattgacacacccggacagattgaagtgttcacctggtcagcttctgggacaatcatcactgaggccctggcatcctcatttccaacagtggtcatctatgtaatggacacatcacgaagtactaacccagtaaccttcatgtccaatatgc

SEQ ID NO: 3076 - DNA, 600 bp, Cricetulus griseus
agaaagcaaaagcatgtaatgtattaacaggcttatcgctatgcagaaaatggagggggcattaaaaaaaatgtaagcttgtgacatattcattgcttctgttttccagctacatcacttaaattagaagtcaacagcagtgattttcctggctttacataggaggcaaatttagggaaggttgacaatattactgtgtttggctttctttctttccttttctttctctttttttcttaagagtctaaggtttacacaatcactcataatgtgacgtgagccagcaaggccaaaaacgctagagaaacaatgggatctctccttgtaaacttgtacagtacgtggtgacttttttcaaaacagctttttgtacatgatttagagacaaattttgtacatgaaaccccagatagactataaataattaattctaacccaacaagtaggtagctgtgtatgacactgctttaaatcattcaaatgcctttgtttttggactgtgcaaaggttggaagtgggtttgcatttctaaaatggtaacttttattctgcaagagttcttagtaacttcttgagtgtggtagactttggaacatgtac

SEQ ID NO: 3077 - DNA, 573 bp, Cricetulus griseus
gtaccacattacgggcccaagttcatagttccttatctcccaagcttgaagaggagagaacacaagtaatgccctgggcttgtttttgtcaagttcctacagcatgctccttttaccatacaaaataccagcacattggattacaacctgagtaaaggcaacatgaacatttcattttttaagccaagcatggtggcacacacctttactcccaaaaaggaaaggcaggcagatttgtgggttcaaagccagacaagactacaagtgagatcctgactccaaagaaattttttacaacaagggggattaacataagttcacaacttttgaactacaaaccttaatccaccaactgcataaatttaataagttgttgggtatagtggcccatgccactatattcataggtagggggtcggcagatctcttgagttccaggacagccaaagctacatagtgagaccctatctcataaagaaaaaaaacaaatattttgaaagacaacatctacatcttttcaaagtagaattatttgaacaaattcacatcccactaaaatatatcatatatgga

SEQ ID NO: 3078 - DNA, 508 bp, Cricetulus griseus
  misc_feature (248)..(272): n is a, c, g, or t
gagtattgggtcagcaggcagctgtttacctggggttttgctgcactattgcgatttcggaggggcttgggagcagttttttagaggattcttttgagagaaggcatcaagtccgtgtcatagcagtgtctgaggatgcctcctgtgactgatttccaattagacttgtactgtatataagagcctcttaaaatgtgggatcttcaattttttaactcaataaactagtaaagaatatctagtttccnnnnnnnnnnnnnnnnnnnnnnnnntaagttttctccccaaatacacgaagcttgactcagtcttgcactgacgttaactgccatactacctcttattatgtagatgtccatggaaagtgctccctggaatggaacagtttgaatgcaacagcccactctgaagaccgtgaggccaagcacctgccctagttgtgatctgttacacatttgtatttccagggagaatgtcaacttccctatctgttttcttctagtctgca

SEQ ID NO: 3079 - DNA, 537 bp, Cricetulus griseus
tggggaggctgagactcgggagtgcatctactacaacgccaactgggagctggagcgcaccaaccagagcggcctggagcgctgcgagggggagcaggacaagcggctgcactgctacgcctcctggcgcaacagctcgggcactatcgagctggtgaagaagggctgctggctggatgacttcaactgctacgacaggcaggagtgtgtggccactgaggagaacccccaggtgtacttttgctgttgtgaaggcaacttctgcaacgagcgcttcacccacttgcccgagcctgggggcccagaagtcacctacgagccacccccgacagcccccaccctgctcacggtgctggcctactctctgctgcccattgggggcctctccctcattgtcctgctggccttctggatgtatcgacatcgcaagcctccctacggccatgtggacatccatgaggaccctgggcctccacccccatcccctctggtgggcctgaagccactgcagttgctggagatcaaggctcggggtcg

SEQ ID NO: 3080 - DNA, 487 bp, Cricetulus griseus
ggcagaagtatgagaggatcagtgagaagaagatgtccactcccattgaagtgctgtgcaagggctatccttctgaatttgccacatacctgaatttctgccgttccttacgttttgatgacaaacctgactactcctacctgagacagctcttcagaaatctgttccatcgccagggcttctcctatgactatgtgttcgactggaacatgctcaaatttggtgccagccgagctgcagatgatgctgagcgggaacgccgggacagagaggagcgattaagacactcccgtaatccagccacccgtggcctcccttctacagcttccggccgtcttcggggaacccaggaagtggctcccccaacgccccttacccctacctcacacacggccaacacctctcctaggcctgtctctggcatggaacgagaacggaaagtgagcatgcggctgcaccgtggggcaccagtcaacgtctcctcatc

SEQ ID NO: 3081 - DNA, 283 bp, Cricetulus griseus
gcagggttcagatgtcagtgtggtgagagctcaccacttggtggtattttagcagctttcttctagagcccagcggtggtcagcagtcatgattgtggctaacctgtttagaatggttccaacaagagtttcatccccttcctttgccctcagtagatccttgcaacacagtcactcctgctagaccccatatgttctgggtgaacaggtgacaccatctcactgcttactctccacacatcagccaaagctgacaggttcttttctttctttttcttaaata

SEQ ID NO: 3082 - DNA, 481 bp, Cricetulus griseus
gaacaactggtgtccttcctcagtggcaaagatgaaacagagctggccgagctagacagagcgctggggatcgacaagcttgtccagggaggtggattagatgtattatctgagaggtttccgccacagcaagcaacaccacctctgatgatggaagaaagacccgccctctacccccagccatactcatctccttctcctactgccagcctccctggtcctttccaaggcatggtcaggcagaaaccttcactggggactatgccagttcaagtaacacctccccgaggcaccttttcacccagcatgggcatgcagccccggcagactctaaacagacctccagctgcacccaaccagctgcgactgcagctacagcagcggttacagggacagcagcagctgatgcaccaaaaccggcaagcgatcctgaaccagtttgcagcaactgcccctgttggcatgaacatgaggtcaggca

SEQ ID NO: 3083 - DNA, 479 bp, Cricetulus griseus
cggtcctatttgcatttgaagaagctatcggatatatgtgctgtccctttgtgctggacaaggatggagtcagtgcagctgtcataagtgcagagctggcgagttttctagcaaccaagaatctgtctttgtctcagcagctgaaggccatctatgtggagtatggctatcatattaccaaagcttcatattttatctgccatgatcaagggaccattcaaaaattatttggaaacctgagaaactatgatgggaagaataattatcccaaaacatgtggcagatttgaaatctctgctatcagggaccttacaactggctatgatgacagtcagcctgataaaaaagctattcttcctaccagcaagagcagccaaatgatcacctttacctttgctaatggaggtgtggccaccattcggaccagtggaacagagcccaaaatcaagtactatgcagagctgtgcgctccccctggc

SEQ ID NO: 3084 - DNA, 479 bp, Cricetulus griseus
catcttgtcatccctttgcctagctccaccccccgggctgggaaacccggccgctgacggtccgcggtcccccgggcccagaccctgggctgccccgcgttgtctcccccgtccacacgctacgagcctggaatgcagctctccaacagggcggcagccagggaggcggcgagccgcgacgtgctggccgcggacctccgctgcagcctcttcgtctcggcgctgcagagctacaagcgggactcggtgctgcggcccttccccgcctcctacgcccgccacgacagtaaggacttcgaggccctggtgagtgcgccctgatccagcgttgctcgctgcatcctgggccaagtggccccatggaacggcaggcataggcagcaccacccgtgttagaaaacacaccaattccttggacttccctttcccagcctggccttggggaaggttcccatcagcaggaacactcctaaacaccc

SEQ ID NO: 3085 - DNA, 570 bp, Cricetulus griseus
gcgggactaaagttttccaaaggagaaattcttcagattgtaaacagagaagacccaaattggtggcaggctagccatgtgaaagagggaggaagtgctggtctgatcccaagccagttcctggaagagaagagaaaggcatttgttcgaagagactgggacaattcaggacccttttgtggaactataagcaacaaaaaaaagaagaagatgatgtacctcacaaccaggaatgcagagtttgatcgtcatgaaattcagatctatgaggaagtagcaaaaatgccacccttccagcgaaaaacattagtgttgataggagcacaaggtgtgggcagaagaagcttgaaaaataggttcatagtgctgaatcccgctagatttggaacaacggtgccatttacttcacggaagccaagagaagatgaaaaggatggacaggcatataaatttgtgtcccgatcagagatggaagcagatattaaagctggaaagtatttggagcatggggaatatgaaggaaacctctatggaactaagattgactctattcttgaagttgtacaaact

SEQ ID NO: 3086 - DNA, 156 bp, Cricetulus griseus
ggatatgtcaccctgctccatatccagcccatctactcacagctgattattttgaatatcttggttcctgtaatcggcttaatcacagagctgccattacacatgaagagagactttagttttcacctcgtctttgtattctcatattaaatacag

SEQ ID NO: 3087 - DNA, 463 bp, Cricetulus griseus
aaaggcccacagccagcctagtgttttttttttctctatcttgacctaaagattgctatttttccaataacatgcctgcctgcctgcctgcctgcctgcctgcctgcctgcctgcctgcctgcctgcctgcctgcctgctgccatgttccctgcctccatggtccctgccattatgataatgaactaatctctgaaactgcaaatgaaacccctaattaaaagctctgctttgtaagacttgctgtggactggggggtgggggggctcttcataacaatagattaatggctaaggcaatataatcgattggtaggatcaatatagtaaatatggccatcttaccaaaagcaatatacacattcaatgcaatccccatcaaaattccaaacagaattgatctacctaaagatatggctgtaccactcttgatcatgtacacaaagggttcttcatcctaccaca

SEQ ID NO: 3088 - DNA, 495 bp, Cricetulus griseus
tgaaggaaagttgacctgtaaaaactaaagacccacactttccttgacgacccactctatttgtcctcctattttgttctgttatctgcagtttgaagggaaaagatcaatgagctcaaatgagaaggctcattgagtgctcattcccttgccacaggtggactttcctctcatccttttcctggatgagaccatagaaatccagcccctgaagttctcaccctcttccagtgccctgagactatgtctattatttatgcctaaaatctcagtcttccctcactagcaaatagtattataagaatggatgattaatgataattgactaagtcctgtctgggttgtgttttctggtatctttgtaagctacggatggaacaaagtctcctgcatgatgaacaatcactctaccgctggctctagctgtagtagttttccttagttggtaggattatggtataaattgtgcttttagtaatctttgagccgtggaag

SEQ ID NO: 3089 - DNA, 551 bp, Cricetulus griseus
cactagccctgtggcagagacggaaggaaccataatggaagagagctcaagagacaaagacaaagcggagaggaaaaggaaagcagagattgctagactgcgccgggagaagatcatggcccagatgtctgaaatgcagcggcactttattgatgagaacaaagagctgttccagcagacagtggagctggacgcctctgtctcggccactcttgatgacaggcctctcgtttcggatacagcacttacagcattgggcccggcacagacacaggtccctgaacagagacagtttgtcacctgtatattgtgtcaagaggagcaagaagttactgtggaaagcagggcaatggtcttggcagcatttgttcagagatcaactgtactgtcaaaagacagaaccaaattcattcaggatccagaaaaatatgatccgttattcatgcaccctgatctgtcttgcggaacacacactggcagctgtgggcacgttatgcatgcccattgttggcaaaggtattttgattccgttcaagctaaagagcagcgaa

SEQ ID NO: 3090 - DNA, 318 bp, Cricetulus griseus
ctcccttgtatactttgccctccattctggttagcccactgcagctgtctgtactcctcttgcctctgcagagtgcccattccctcccaccacaccttttatagcctcttttaataggcctccctcttcagggaggagctagggtcccggtggatgttatcagagcgctggtgtcagattcctggctcgatatggtttttgtgatgaagcatgagaatgctagagtcctgtgttatcatcgccccacccgctcctgtcctgggacagtctcatcactagttccccaaggtggtgtggctggaggcagtattgcaggga

SEQ ID NO: 3091 - DNA, 428 bp, Cricetulus griseus
  misc_feature (228)..(243): n is a, c, g, or t
acctgtcaaagcacctgaaaccaccgttcacaggcagttgtcaatttgagttgtagtgaatgttttttaggcactttatagctgctttccatatgtagaaatttgtaatggaatgcaaaataccttttttaagtccccattatatgatttccaaatcagtgttaggagtctacattgatggcaaaatactgttttctaaagcagggactgtgaagcccccaggccacnnnnnnnnnnnnnnnnagatgctgtagttttcacagtgtcaacttactcagatttgagaaaatgacttttatactaacctatattttggagtaaattccagcttccttatccccatgccagtcctcatcctggaaagggagctgcatcttggtgtttgcaggaaaagcagcatccggtcaccctagcagcccatattctct

SEQ ID NO: 3092 - DNA, 103 bp, Cricetulus griseus
gaagaaaagaacattttccagtttatttgtgatgcctcttcactgcatcaagtgaggaagaaactggactccctgggcctgtgttctgtgtcctgttccctgg

SEQ ID NO: 3093 - DNA, 502 bp, Cricetulus griseus
tgaactctatgaaaaacgagatctcatcaaaaacctaaagacgatgaaagaagatcttatggaaagtatccaaaatccacaaggggaaatatgcagcacaaatacaggaagacatttcagagctaatgaataaaactatgacagtaaaagattcaatcgctgagaaaacatattttattgaagaagagaaaaagaaacatgaaaaactaagaaaagaaatagaggtacagcataagagatatgatgcaattcttaagcgtttgcattgtcagatgagcaagattcagttaaataggaggaaatggcaatggaacatccaacaactggaaaaaactgcagctgacttaaaaaagcgccttggagtgaaagaagcccatgaactacagaacagaccagcagcattgtgggaaagaataccgtgaagatcctttggtcacttgtgaaccagcacccagcggcaaaggcctgtctcaatggccgatattttcttttgtcccccttc

SEQ ID NO: 3094 - DNA, 531 bp, Cricetulus griseus
agactcgaggcggtcccgtggccgagcttcgccctcgccatggccctcagcgatgcagacgtgcagaagcagattaagcacatgatggctttcattgaacaagaagccaatgagaaagcagaagaaattgatgcaaaggcagaagaagagttcaacattgagaaaggtcgccttgtgcaaacccaaaggctgaagattatggaatactatgaaaagaaagaaaagcaaattgagcagcagaagaaaattcaaatgtccaatctgatgaatcaagcaaggctcaaagtcctcagagcaagagatgacctcatcactgagctgctaaatgaggcaaaacagagactcagcaaggtggtaaaagatacaaccagataccaagtgctgctggatgggctggtcctccagggcttgtaccagctgttggagcctcggatgattgtgcgttgcagaaaacaagaatttcctttggtgaaggctgcagtgcaaaaagcaattcctatgtataaaatcgccaccaaaaaagatgttgat

SEQ ID NO: 3095 - DNA, 493 bp, Cricetulus griseus
tgcaaccaaagaagtggtgtacagagattatattgacatcagtgttgcggttgctaccccaaggggtctcgtggttcctgtcatcaggaatgtggaaacgatgaattatgcagatattgagcggaccatcagtgaactaggagagaaggcccgaaagaacgaacttgccattgaagatatggacggtggtactttcaccattagcaatggaggagtttttgggtcactttttggaacacccattatcaacccccctcagtctgccattctgggcatgcatggcatctttgacaggcctgtggctgtgggaggcaaggtggaagttcgacctatgatgtatgtagccctgacctatgaccaccggctgattgatggcagagaggctgtgactttcctccgaaaaatcaaggcagcggtagaagatccaagagtcctcctcctatacctttaggaggaagccacacactctacctattgatcatgcaggaactga

SEQ ID NO: 3096 - DNA, 156 bp, Cricetulus griseus
ctcctttgtctccgtttcttttgattttagtttaaactttggaagcctgatacatgagcaagatacatatttttttctcaaagatggctttttgactggcttaattctaccatagaattaagtaatcaaatgtgctctcctcaatccttaaatgat

SEQ ID NO: 3097 - DNA, 546 bp, Cricetulus griseus
  misc_feature (332)..(368): n is a, c, g, or t
  misc_feature (524)..(538): n is a, c, g, or t
actggacgcgctcagatgtcggtgttcctcccagttcttgacccctggtcctgtctccagcccgtctcagcttacccactctgactcctttgagctgcttggaggggcagcttctggtagtagtggcttttatactttcacagaatcccttcatccagagatgtcttctggcaccagtgccctgcagcagcgagcacttccagtgccctcactgcctactgtcgtttagtcactgactgctttctggtttgaaggatgcagtggttcctccttccttgaaccctttctgcgtacgtgtcaccctgctgaaccatgcagcctcaccagagcgnnnnnnnnnnnnnnnnnnnnnnnnnnnnnnnnnnnnnttacagtgaggaatgctattacataaggcactttaagtcagtgacagctccaaatttgcacttcatctgttgactagtaaactgtacccagaacaggagcttgtggacacccctggatggtattgcagcttcaggggcaggcacttctgtcacggnnnnnnnnnnnnnnnatttttct

SEQ ID NO: 3098 - DNA, 578 bp, Cricetulus griseus
cactactttaactgttaataaaaatgtttttatggtgtcaaaagaaatctgaaagattatgccaagccaaaaatctcagagacactaagaacataaaggtgaagaggtatttaaggttctggctaccccgagtcatgtacccatctccattacaacagttgcagaatgccaggatctcatagatccaggtgcaaggtgaaaactagcatttatttttaagttgatgaatctaatgcattacccttcacataaaactggggccttaggaattatctactgctttctcctatttattcccaagggattacggtaagagttctttagtgctgagcagatgtgtaacaagaagaaaagaggaagagaatttatgtttgagagtttataaaccaagtgtcagcattagatgagatttcaggctaaaattttataagataagaagtctaagaaagctcttgtatcagagaagcaaatttatatatcatttgaagagtgacaccttttcctgtgtttcagaatctaataacccttttaagattatggaacatcaaggttgggaagtggtggcgcatgccttaatc

SEQ ID NO: 3099 - DNA, 579 bp, Cricetulus griseus
  misc_feature (75)..(75): n is a, c, g, or t
  misc_feature (493)..(507): n is a, c, g, or t
tcagggtctcagtttctcatcagctctttcttacatgccttcatgtagggagaactaaggtagagagagacaggngaaaaagtaactggcctgggctctagctgtcccctgccgactaaaggcttcttacgtcccatcccggtatatccatgctggcttctctatggagctgacactcagcaggtgttcatgttagtcctttgtcttccaaacacccatttgccagagtcagtgtcattttaggtggccatttctgttgaagcacttgtatcataagacgttggatttggactagtgacctttagaccatgtccttgtagctacacaccaagggctcccaggagaccaaaatagttaaacattacttgactacaactgagtcctctgggtaatggccactgtttcttgtactgtaactgacatagttgcttagtttgccctttcaccccagcatctggcaacagtgctattagtacaagctgagacactatgnnnnnnnnnnnnnnnaggctccctgaacctgaacctgaacctgggggagccagaagatgtgctcaagtgctggctgcagcccaagcc

SEQ ID NO: 3100 - DNA, 446 bp, Cricetulus griseus
gtaggtttggggtccagaataacattcttcaaggtttataagatgaagaagtttttatactttgcccaattactaaaacggcacattaaaaattcaatgaagggaaggatcatactgagtaaaattaaagactgctgtttggagaagaattctttttcatggtgctactaatcttactgtaccccaagtttttaatagaaaggtgttaatcttattttgctctgtaagtaaagaatgtgtatattctgtaaacaacatcttagctcaaaacgttgagtcatttagatgtgatctggtataaacccttctttactaaaaatgtatgaaatcttacactatagacagcaagattttacatgggagaggatttgcctttcattgacttactactgaaaacaaattaattgggacttttatcccttaagttattagctgacttttaaaat

SEQ ID NO: 3101 - DNA, 508 bp, Cricetulus griseus
atggggtcatccacttctgacaccattctgttatgctagacctttccgccataagccaccaagccccaccaccatgtgtgcgctttacgccagccgccagcccgagttagggcccaaattaatacacagaatcttgtattaggttcaaatgctgcttggccaatgactaggattctcatctgttagctcagtcttaattatcataaatctatatattttataagatttatcggatgccttattggtgtccctccttgccagtggctcacatcctgccgcttgaggaagcggaggggaaaagggacccttcctttttctcctttcttaaatatgagtctccttgctatgtcacttcctgcctggatcaccactgctctactacaattcccagaatcctctttgactcttagtcctgcctaacttgctgtctcattggccaaacagtattttattcaataatcaataagatgaacatacatagtacattccccatcacagtgctgtttaa

SEQ ID NO: 3102 - DNA, 220 bp, Cricetulus griseus
gagctgacaaagcaaaaagaaataataacagcccaagacaatataattaaagaaaaacgtgcagaagcggctaaacacaatttgcaaaacaatgattctgaacttaaaattaaggagttagaccatagcattagcaaacataagcgggaagctgacgatgctgctgcgaaggtatccaaaatgttgaatgattatgactggattaatgctgagaaacacc

SEQ ID NO: 3103 - DNA, 550 bp, Cricetulus griseus
tagtggtggatgcccagcaccttctgccacccggagatggtgtttcctcacaggacttttctccggaagcttccatcctcgtgaacctctctaaacacatgtgcagccccacagatgtgagtagcctgtctcagttcacagagtcctcctctcccagtcttcctgctgcaccctcaggtgctggagaagagaaaggtctgtatccacctggaggactgtggccttcccagccagtgtgcctgaccagtagcttcaactgcccagcagagaacagtgcaccgggtgtgtcccaggggcctgcctccatccctgacagcagtttcattgattggagtgcatcctgtgaaggccagtttcccagtgtgtactgcccgctggaactgaacgattacaacgcctttccggaagaaaacatgaattacgccaatggcttcccctgcccctccaaagttcagactgacttcattggccacagcgctcactctacctggaacactccagccagcactcccactacctgggaacatgccggttttgtcaactctccgtc

SEQ ID NO: 3104 - DNA, 431 bp, Cricetulus griseus
taggcaattcatagtatttcagttttgagatgcaacccgatgaatatctgctgccttcctgacattagtgtctttttgtggcggggggtgcataaataattgagttactgatctttgtattgaactctcaaccacagttatgtgacacataccttaatttcagtaattcagtacattttaaattctattaaacttaacattatgcatgcctcactcttttaaaagcactgctgttgatgttatttataatctctacaattgggagtttgaaaagtacaagtttgatggtggttatttttttcaaatcacttattttgataattctttgtacatgttttacctcctctggaaagcattctatatgtaaagtagattctaagacagttgaattttcatggcatttataggtctatgttattttaacttttgtt

SEQ ID NO: 3105 - DNA, 300 bp, Cricetulus griseus
aatgtcttccaagaattttatctaccttgagtctctggagtgagaaataagggagtgcaggtaaggattccagtaactccaagtggtgtatcagcgtatccaacgaacaaattaatgatttttaatcagtttctgggccttgagtgggtacccaagcatgtgtattcatcattactgctactgtggtggcacagtgtcatcccttaccatgccacctttctcactgacctggtgattctgtatttttgagtaattatgtggatgcgagcgatcctggagtcagggctttgggtcaaggag

SEQ ID NO: 3106 - DNA, 504 bp, Cricetulus griseus
gactatatctcttttggcatcttaactgcagtctcactgactaaagctgagggtacagagacagattaaccagagatgcagatcagccagcccccaacatgaacgcagcttttggttggctagatacacttgtcttttaataacaaaacaatgctgtttacacctggcatcattcaacctatgttcttgtcactgctcccgccatagatgaagatagcctacgttccactcctccatacatcataggtctccacatttacttcagactctttgagccagtgtatggtatcttccacgtgtctcaccttgctgccaggtaccagctccatgtattctcctgagcttaaaaaaaattgtatctgagcaatttctgttctctaggatgatctctgttgccagtcaggacctcagagtagagctctgtgaagtttccatggcatcaaaaaccagagggtctatgcttggtcctttgctaccaactgttcagtttttacttagctctag

SEQ ID NO: 3107 - DNA, 431 bp, Cricetulus griseus
  misc_feature (69)..(89): n is a, c, g, or t
ttgtttaggtagaaaagacaagtccaaagagtgtgtgggctttcctgttcctaaactttcactaccatnnnnnnnnnnnnnnnnnnnnnagaaaaaaaaagagaaaaaaaaggaaatagaggtttaactaacccagtgcccaaaggagggctggggaaggctggggggggagcaagggtgggaaagtatatgacataagcagtatttaatgtttccggaggggccctattgccaggagagcccaggtccccctccccagctccgctctctccacagcctcccgcacccttccttccctctgcttggtgaagtgcacagccccaggtggtccccggccttgctgaggcagggaagggaaggtgtgtgtggtccacgagggagaaaggcggatcaaaggttttacttgaaaacaagctccatcctttttctat

SEQ ID NO: 3108 - DNA, 446 bp, Cricetulus griseus
  misc_feature (49)..(72): n is a, c, g, or t
  misc_feature (137)..(170): n is a, c, g, or t
tctccagccccgccaaagcttgttcttattttttttttattttttggtnnnnnnnnnnnnnnnnnnnnnnnngctttggctgtcctggaactagctcttgtaaaccaggctggtctcgaattcacagacagagatcnnnnnnnnnnnnnnnnnnnnnnnnnnnnnnnnnnaggcatgagccaccaacacctggccccaggagagaatctttaactctgaatctcactaaagatgaccattttaaagataaggcatggcttcttcacctttggctaaaatcaggtgtggtagcagatggtcttaattttgctgtttccaacgtgttctagattaggaaactatgtataattcatcatcttaatttagaagcatctatttcaaatgacatgaccagtgagctagttttttcttttatagttgttttacagccagatccatcatttaca

SEQ ID NO: 3109 - DNA, 335 bp, Cricetulus griseus
tttctggagacagtgctggtgggaatttggcagctgcccttggacaacagtttacttacgttgccagcctgaaaaataagctcaaactgcaggctttaatctacccagtcctccaggctttggatttcaacacaccctcttaccagcagaacgtgaacactccaatcctgccacgccacgtcatggtgaagtactgggtggattacttcaaaggcaactatgacttcgtacaggccatgattgtgaacaatcacacttcccttgatgtggagaaggccgcagccctcatggcccgtctcaactggacatccctgttgccctcatccatcaaaaag

SEQ ID NO: 3110 - DNA, 197 bp, Cricetulus griseus
gtccgggagggggcgcgctagctgtctcggcggcccggcaagagacccgggcgtgaggcggcctctcagggccggaagggctggtcatcagacgcagcggcacgggaggctgagagtgcttggatcaggtttacaccatggccccgcagaacctaagcaccttctgcctgttgctgctgttcctcatcggggctgtg

SEQ ID NO: 3111 - DNA, 449 bp, Cricetulus griseus
  misc_feature (83)..(105): n is a, c, g, or t
aagatagatctgagtttgaagcctacagataaggagtttcagaagagccttggctacacagagaaacactgtctcagaaagannnnnnnnnnnnnnnnnnnnnnnaaaggaagagaagaaacccaagcttcttaggcttgattccctagtactgaaaaacaaaagtaaaactgtgacattgtaaacttgatatatgtaggacaaataaggtgtaaagccatctgatccatccatatcaacacaacttcatgtctgctttttagatgcacaaagtaagcatagttactccttcattgacttacttgccttttatgcattttcagtctgcagtgaaaaagcttattatccttccccagttcagggtttatgtaaatgtccaattggataaaaatatttttctatttaaactggcactctcccagatttttcttttccaattattcttttgg

SEQ ID NO: 3112 - DNA, 578 bp, Cricetulus griseus
ccggcgcgccgggttttgccggcgctgaaaactggaagcggcatgctggtcaaccggctcctgacaggggcgcgagcccgggcgcctctgcaaacgagtctcctcgagacgtggcgcctccgcggccggaccgcctcctcctactccgcttcctctgagccgtccaaggtgcgggcgctgatctatggcaaccacggggatccggccaaggttatccaattgaagaacctggaactcactgctgtgggaggatctgacgtccatgtgaggatgctggcagcccctgtcaatccagctgacataaatatgatccaagggaactatggcctccttcccaagctgcccactgttggagggaatgaaggcgttgggcaggtggtagcagtgggcagcagcgtgtctggattgaagccgggagactgggtgatcctagcaagtgctgggttaggaacctggcggactgaggcggtgttcagtgagaaagcactgatccaagtccctaaggacgtccctctccagagtgctgccaccctatctgtcaacccctgcacagcctacaggatgttgatggacttcga

SEQ ID NO: 3113 - DNA, 485 bp, Cricetulus griseus
tcccttgctgtgcttacacttaggcagaatggccttttctccttgtcctcccaggatctgctgcagcccctctgtgtttgaacttccctcgtgtatttccctcaacctgggatttatcatttctttcctttgtagcccagccagccacatggtgaaatgatttgaagaattccttatcagaaacatctctgacactgctttggaggcggactccagtctcagatttggcgggggaaaaaagacaaaaaacaaacgacttactaatgacatttcttttaaaccaaggattaaaatttcattagtggttctgtgggtcaagaatctggagtgtgtcttggcttttgggtgtgtcattgtggtgtggctaaagcttattcctcagaattccctcccagcatgtttccagaaacagtgggcgtctgaggagctgctgtgggagagagctggaggagaggaaaccccgtccttccacacccccatcattg

SEQ ID NO: 3114 - DNA, 366 bp, Cricetulus griseus
agatttgaagccttactccaaactggggaaaagccccacgtttgagctgctgttcgactggggcaccacaaactgcacagttggggaccttgtggatcttctgatccaaattgagctttgggggggtgctactctcctgctgcgagatgctgtgcccaaaactgtcagcagtataccttctagagaagctgcgacggtggcgcagacacctgggccctgccatgaaaaagtcaggacattggtaacgcctatgccaagggtggaacaaagctataggccacctgactcctcaagcccaaacaatgaaaacttagaaatcagtgatactgatactcgttttcacagtttttctttttatgaactgaa

SEQ ID NO: 3115 - DNA, 290 bp, Cricetulus griseus
ctgaatctgtcattatttaaaaaaggcactgagaccttttaaaaagggatattgctcttggtgataaagcaagaacaacagacttgtcaaggaactctgaagatggctcatttgtgtttatctttgccatgaaagtttaaagacctgagttagatttccagaacccaaagtgtagtggtacccactatccccaagttgcataaatggatacaggcagatccctggccagccagcctagcctacttgatgagttataggccaatgagataccctgccttagggtttttgtt

SEQ ID NO: 3116 - DNA, 259 bp, Cricetulus griseus
aagtgtgtcatcatttcccccaactgtgagaaatccatcaagggtggcctatatgaggccctctacaacgtcatagccatggcccgggaacaggagatccctttcgtatttgcccttggaaggaaagctctcggacgctgtgtgaaggagctggttcctgttagtgggggggggatcttcaactatttcggggctgagagcctatttaatagattagtggagctcaccgaggaagcccggaaggcgtataaagacatgg

SEQ ID NO: 3117 - DNA, 508 bp, Cricetulus griseus
  misc_feature (462)..(476): n is a, c, g, or t
cctctcagtcctacagctgaaccgtctgttagatctgctttatctgtgtgtatcttgctttgagtacaaaggaaaaagtgtttgaaagaatgaatagtttgacctttaagaaatcaaaagacatgagagccaaacttgaagaagccattctggggagcatcggtgccaggcaggaaatggtacggcggagcagagggcagcttgagaggagcccatctggaagtgcctttgggagccaagaaaacctgcggtggagaaaggacatgactcactggcgtcagaacacagagaagctcgataagtcaagagcagagatagagcatgaagcgctgattgatggaaacctggctactgaagcgaacctcatcatcttggacacattagagattgttgttcagactgtttctgtaacagaatccaaagagagcattctgggtggggtgctgaaagtgctactccagnnnnnnnnnnnnnnncaaagtgcagtgtatctgcagcactgctttgc

SEQ ID NO: 3118 - DNA, 448 bp, Cricetulus griseus
agacgaagagtacctgtggtgcattgagcagacgctgcacttcaaagatggacctctcaacatgattctggatgatggtggtgacttaactaacctcatccataccaagtacccacagcttctgtcaggcatccgaggcatctctgaggagaccacgactggggtccacaacctctacaagatgatggccaatgggatactgaaggtgcctgccatcaatgtcaacgactctgtcaccaagagcaagtttgacaacctctatggctgccgggagtccctcatagatggcatcaaacgagccacagatgtgatgattgcgggcaaggtggcggtggtggcaggctatggcgatgtgggcaagggctgtgcccaggccctgaggggttttggggcccgagtcatcatcaccgagattgaccccatcaatgcactacaagctgccatggag

SEQ ID NO: 3119 - DNA, 321 bp, Cricetulus griseus
atattaacaggaccatgcagcaggatgtggcttgtttctgtttctttactaaccagtgataactttatagaaatgtcatcggtccattgtttgtcagtggaacctcagcctcacatgggcatctctgttttgtctttttttgagtgggggggagatgaccctctgcagtgcactagctcatagtacggtcttcatctagttgaactaaactgggttctgcccacttctcttcatggatcctccatctgcaatccatggcaaaatgtccctgtgagaccctttcctcatgtactgaggacttactgtgtgcctgaactctgg

SEQ ID NO: 3120 - DNA, 365 bp, Cricetulus griseus
aaaagtaccattatcatgctggggtaaatactaagtaatatatacttccttttacgggcaaaatgtgtatccttttgtaaatgtattttttaccactgtgcaatggggcaaaatcatactttaggaaaaaattcctaggcgtggggcctaaaaccccaacctttgcttcatgtgaactgaatacaatcaaagaattgagagacaggtttaagaggaagaatttgcaatcatctcctgaggcagctacagcttgaaacaagagaccgggacttgctggtaagtaaaaaccaagcctcaacttcaaaaacaatataattgccattcccctaatagaccaccaagcaaacagtaataaaagttacagg

SEQ ID NO: 3121 - DNA, 456 bp, Cricetulus griseus
  misc_feature (41)..(58): n is a, c, g, or t
gccatcctaactgtacagcagcaaacacaggctacagcttnnnnnnnnnnnnnnnnnnagagtcatcctcagattgagccagcaaaccaagagttgtccccaaacatagttgaggtggtacaaagttcaccagttgagcggccatctgcgggcacagcagtatttggcactgtgtcagccaccccaagttcctctttgccaaagcgcactcgggaggaggaggaggacagcaccgcataagcagcagaccaggttcctgatgacactgtggaaatgcctctcccaaagaagctgaagacagtcacacccgtggcaactgaggaagaagttatggcagaagaaagtactgatggagaggtagaaactcaagtttataatcaggattctcaagattccattggagaaggagttacccagggagattatacacctatggaagacagtgaagagacttca

SEQ ID NO: 3122 - DNA, 341 bp, Cricetulus griseus
ttactaccggaagcaaaggaagaagcaagcacgtctggttctgcagccgcagtcgagtgtgcatgaaacagttgatggctatagaagatatttcactcaaattgtagggttctttgtgggggaagatcacatgggacatgtgacccaaggattagtaacccgggcgtacactgatgaactgtggaacatggccctctcaaagataattgctgtccttcgagctcactcatcttactgcactgaccccgaccttgttctggagttgaagaatctcattgtcatttttgcagacactttgcagggttatggttctcaagtcaaccgactttttgaccttttat

SEQ ID NO: 3123 - DNA, 93 bp, Cricetulus griseus
gtcgaaaccagtatgacaatgatgtcactgtttggagtcctcatggcaggattcatcaaattgaatatgcaatggaagctgttaaacaaggtg

SEQ ID NO: 3124 - DNA, 292 bp, Cricetulus griseus
ttaagttcaaatgccttatttggaaagtagctctggaaaaggctgttagtgtaaacgcagcaaattaaagtgcattattaggtagcacactccctgggagtggagctcattcctcctgggaacagcatagggcctatgagtgtatgtgggagatttgacaacatacatgtgtgtgtacaaaggtagtatacaaaggctcacattttcaaaagggaaatatgctcgtatgtgtaataactgttctgtgtgacatcagttcatgggcatacacagtttgccatgggcagtgcaa

SEQ ID NO: 3125 - DNA, 100 bp, Cricetulus griseus
ggagttctaacaccatggtgaaaagctctgtaaacatgaaatctaaatcaaatgtagatttttcacaatatgcttattaataaatgaaatctatgaaacg

SEQ ID NO: 3126 - DNA, 98 bp, Cricetulus griseus
  misc_feature (83)..(97): n is a, c, g, or t
ctttttcgctcttatatcaaaaccacgattcccaccactaattattataaacgagaacaacaaaatactcatgaacccaattnnnnnnnnnnnnnnng

SEQ ID NO: 3127 - DNA, 221 bp, Cricetulus griseus
ccacgcgtccgccgactttcaggagcacaactcttacggccgaaattctctggatgataattcttgggtattcccaagccctcctaagtcaagtgagacaacatttggggagaataaaaacaaaaccttccctttatccaacctgccaccgagtgcgctacttggaccagcataatcagaactgcctttacaaaagctaacttgatgggactcaccatttg

SEQ ID NO: 3128 - DNA, 431 bp, Cricetulus griseus
  misc_feature (263)..(280): n is a, c, g, or t
aatgcatctttgtattgcaagttggtgacagatttgaatatttaaaaccacaaacaagcataccaaggttttggaaactgatgaaaaattgatgtgatcagagtaagaagttaaagtttcatcacatgggtgggtagaaaataccataaacatggggtggacccaggaaacactcagccatataatgttaggactatgacacattggtagtattaacttgttgacatgttctaatttttacagaatattgaaaaaggtgagannnnnnnnnnnnnnnnnncagctagttagatttatcctgctcttgctctgctttttcctttcttttcaactttctgctgttggtacaatggcttactgaacctggaatctctaaagtatagtactgaaccccttatttgacacatgtgacttcaactgatctaaaatca

SEQ ID NO: 3129 - DNA, 442 bp, Cricetulus griseus
  misc_feature (89)..(108): n is a, c, g, or t
aaaccctgctcctggtggctctgggagtgtggctccagagtttgaccgcctcccaagaggggtggccgcagcatacgggggaagagatnnnnnnnnnnnnnnnnnnnnatttgccctaaggacccctgatgacacggctgaggaggggggccacctcattcccggaatagcagaatctgtgtctaactgccacttcaaccacagcagcaagaccttcgttgtgatccatggctggacggtgacaggaatgtatgagagttgggtgcccaaacttgtggctgccctgtacaagatagaacctgactccaacgtcattgtggtggactggctgtatcgggcccagcaacactatccattgtcggctggctacaccaagctggtgggaaatgatgtggccaggttcatcaactggatggaggaagagtttaactaccccctggac

SEQ ID NO: 3130 - DNA, 292 bp, Cricetulus griseus
  misc_feature (153)..(153): n is a, c, g, or t
gatcgccctgatactttaatgtctacctggggctccctgtctaagatgacagtggtcaggtaaagagcctggaacccctcatttgtcatcgtccatggccagggctaggaagtcacctagagggtggtctgtgtctgatgtgcgggggtgtcnagaggcatggggacagttcactgaccagtgaccctcttcctggcattttggacatggtttgggtggcactcggggattaggacaagcccaggcccaatgcccttcctgatcacatttgaagcatggacgctgcggtcct

SEQ ID NO: 3131 - DNA, 341 bp, Cricetulus griseus
tatacacgagcgcgcagctggttgagctggagaaggagtttcacttcaaccgctacctttgccggccacgccgagtggaaatggccaacctgctgaacctcacagagcgccagatcaagatctgggggcagaaccgccgaatgaagtacaagaaggaccagaagggcaagggcatgctgacctcgtctgggggccagtccccaagtcgcagtcccgtgcctcccggtgcaggaggctatctgaactctatgcattcgctggtcaacagtgtcccttatgagccccagtcaccccctcccttctccaagcccccccaaggcgcctacgggctgccttccgcc

SEQ ID NO: 3132 - DNA, 201 bp, Cricetulus griseus
tgtttctttttgcacatctgttttaatttaatatttgaacctggaattggggaagaatattttataggtggcatagggccaaagcctatggtttggacagaatcatgccagcatgaaaagaaaagaacattctccttatatggcggggggagattgcatcgggatccctagctgtcgatgtctctggacatgttcatgtca

SEQ ID NO: 3133 - DNA, 90 bp, Cricetulus griseus
agatgcagctcaatgtaaaaatttgcctcgtatgcttgcaactctgggtcctatccctaccattgccaaaactcaatggaaaactggtct

SEQ ID NO: 3134 - DNA, 516 bp, Cricetulus griseus
  misc_feature (192)..(211): n is a, c, g, or t
  misc_feature (221)..(238): n is a, c, g, or t
gttcaaggaaaatacatctgtcttaaactggaatcttttgatattcttcagaataatgaagttcaatttcattattgtcatctgttttgggcttttttctaagtaggtcttttggggggtctttgttttatttttgttattttggctgtgttttgctgtttatttttcttttgagggggattttttgagagnnnnnnnnnnnnnnnnnnnnctgtagctcnnnnnnnnnnnnnnnnnnttatgtagaccaggctgtcctcgaattcttaaagctctttgtgcttctgcctcctgagtgctgggactaaaggcttgcaccaccaccatcctgctttaagtagtatttttaaatcacaagcattttggtattagaaacttggtatattgtgcctgggcggagcaaaaagggcatccagcctctctggacttcgtatcactgtcctggctcttagttcatacagttgttctctggatgtatgtctctccatcgggctcccacttctgaaacccatttcc

SEQ ID NO: 3135 - DNA, 260 bp, Cricetulus griseus
  misc_feature (204)..(204): n is a, c, g, or t
caccatgatcatctaccgggacatcatcagccgtgacgagcggtgctccgacatctacaaaatccgggagatcgcggacgggctgtgcctggggggggggggcgagatggggagtagagcggagggggacatcgatgactcgctcatggggggaaatgcttccgccgaaggcgcatagggcgaaggagaccgaaagcacagtantcaccggtgtggatattgtgatgaaccaccacttacaagaaaccagcttcacaaaa

SEQ ID NO: 3136 - DNA, 105 bp, Cricetulus griseus
attgtttacttgactcagtactacaagctacctggggcatttatgacaaagactcggggcttcggaaagccctgcatgacagcctgcatgactgtgcacattggt

SEQ ID NO: 3137 - DNA, 207 bp, Cricetulus griseus
ccatggcgctgactgtgggagggaccatctactgcctgattgccctctactggcttcccagcccaaaataagtgaattagcctttgggagactcttcgtggcacaaaccctttgatttttcaaattcctgggtttttgttttggggggggtttgttttttttccacttgggatgggctactaacatttttgcaaacaaaggaaaaga

SEQ ID NO: 3138 - DNA, 220 bp, Cricetulus griseus
ttattttacaaaaattaactaaagatcttcttattctgaaatgaagaaaacaaaacttccactttccatttctaatctgaagaaacttgacagtataacatatatttacaatgtcgtgagcgggaggtgttacatatgttacttcaatgcaaattctactcaactcttacacagcttaaaaataatatcgcccatatgacagtcttgctgatttttatat

SEQ ID NO: 3139 - DNA, 229 bp, Cricetulus griseus
  misc_feature (149)..(149): n is a, c, g, or t
tttaaatcaccacagtccttataaatggcacagctgccttgtcatcaacaatgtctcagatttgataaaagaagcccaagacatgggtgacatccacaagacagcattaaggagaacagatcccaaatgcaaggtgatggacatctcanaacttgtgactggcattccgtcactagtaaaggaagcaaaagatgcctgtgctaccatgacctgaaattaaaggcgggct

SEQ ID NO: 3140 - DNA, 406 bp, Cricetulus griseus
cttaagtggcccgcagcgtgctgccactgtcggtagtcttcattggcatgataagtttcaataacctctgcctcaagtacgtaggggtggccttctacaacgtggggcgctcgctcaccaccgtgttcaatgtgcttctgtgctgacgggctgctcaaacagaccacttccttctatgccctgctcacatgtggcatcatcattggtggtttctggctgggtatagaccaagagggagctgagggcaccctgtccctcataggcaccatcttcggggtgctggccagcctctgcgtctccctcaatgccatctataccaagaaggtgctcccatcagtggacaacagcatctggcgcctaaccttctataacaatgtcaatgcctgtgtgctcttcttgcccctga

SEQ ID NO: 3141 - DNA, 343 bp, Cricetulus griseus
  misc_feature (195)..(195): n is a, c, g, or t
cacagtttctctggaatgcactttatcggtaccgggcctgtgaccactgtcttcgggcactggagaaggcagaggagaatgcacagaggctgactgggaaaccaggccaggttctcccacacccatagctgtgcattgtgcgcaaggggcggcaccataactgcccgcattgccaggtgatgtactgcagtgcanaatgccggctggcagctgcggagcaataccaccgagtcctgtgcccaggcccatcgcagggggacccccggcaccccctcaatatgctgcaggaggcatggaggagtgttcactatcctccggagactgcaagtataatgctgatggc

SEQ ID NO: 3142 - DNA, 457 bp, Cricetulus griseus
  misc_feature (78)..(95): n is a, c, g, or t
  misc_feature (160)..(160): n is a, c, g, or t
ctctcattagtggtttccgttccattattaagcctgagtggatccgaatgttctccacccctgagcttcatcgtctcnnnnnnnnnnnnnnnnnngagatggatctggaagatttaaagaagcacaccgtgtactatggaggctttcatgggagccacanagtcatcatctggctctgggatattctggcttccgacttcacacccgatgaaagagcaatgttcctgaagtttgtgaccagctgctccagacccccactcctaggattcgcctacctcaagcctcccttctccatccgctgtgtggaagtgtcggatgaccatgacactggggacaccctgggcagtgtcctcaggggcttctttactatccgcaagcgggagccaggtgggcgtctgcctacttcttccacctgcttcaacctgctcaagctgcccaactacagcaagaaaagtgg

SEQ ID NO: 3143 - DNA, 455 bp, Cricetulus griseus
  misc_feature (386)..(400): n is a, c, g, or t
gggaggagaagcagcttgaggcatccttagatgcactgctgaatcaagtggccgatctgaagaattcactggggagtttcatttacaagttggaaaacgagtatgaccggctgacttggccctctgtcctggatagctttgcattgcgcggtggacagttgaacactctgaacaaggtcttaaagcatgagaagacaccactgttccgtaaccaggtcatcatccctttggtgctgtccccagatcgagatgaagacctcatgcgtcagactgaaggacgagtgcctgttttcagccatgaggtcgtccctgaccatttgagaaccaagcctgaccctgaagttgaagagcaggagaagcagctgacaacagatgctgccagaatnnnnnnnnnnnnnnntcacaagcagatccagagcttgaataaaatgtgctcaaaccttttggagaaaatt

SEQ ID NO: 3144 - DNA, 371 bp, Cricetulus griseus
cctggcaatgctggagcaacctcttggaaatgagcagaatgattttttcccctctgtcactgtgttggtccggggaatgtctggaagacttgcctgggctcatcaactttgccttttacccagaggagcaaaagcaaatcagaagctttttgtgccagaacctcgcccagttcctaaaaatgatgttggatttaaatattctgtgaaacatcgaccatttcctgaagaggtggacaagattccttttgtaaaagcagatttaagcattccagatttacatgaaattgtcactgaagaattagaagacaggcatgaaaaactaaggagtggtatggcccagcagattgcatatgaaatacacctggaacagc

SEQ ID NO: 3145 - DNA, 107 bp, Cricetulus griseus
tcggggcaatgaacatcatgccattaactgtgtgaatccactgacattgttggctttcctactggcttcacctgacctttctttgctccatattcagtcttatattc

SEQ ID NO: 3146 - DNA, 343 bp, Cricetulus griseus
attcttcagaaaggactgcagtatgtggaggcggagatcagcatcaatgaggatggcacggtatttgatgggcgtcccattgagtcgctatcgttgatcgatgctgtgatgcccgatgtggtacagacaagacagcaagcctttcgggagaagctcgctcagcagcaagccaatgcatcggctgcagcggcggcggctgccgcagccacagccacaaccacagcagctacaacaccagcagctgctgctcagcaaaacccaccaaagaatggagaagccaccgcgaatggggaagagaatggagcccatgcaataaataatcactcaaaaccaatggaaatag

SEQ ID NO: 3147 - DNA, 552 bp, Cricetulus griseus
agagcgagaggaggagggcgctcccggccaccgcgctgcagacgccattatcctctgtttccccgctgcacggacgtcgccgaccgtcgtgctcgtctcgcgcccgggtgcggcctgcagattggtgtatccatttaattcaagaaaatggagaccgaacagccagaagaaaccttccccaacaccgaaaccaatggtgaatttggaaaacgccctgcagaagacatggaggaggagcaagcctttaaaagatctagaaatacagatgagatggttgaactgcgcattttgcttcagagcaagaatgctggggctgtgattggaaaaggaggcaagaatattaaggctctccgtacagacgtaagtattaaactactaaacaagtgaattccttgtatgtttctagacttaaaggttcacatcttagaaatccctgaatgtagctacaaaccatttctaataattaatggttatatagatggttcctgctttttttaagccctgattaaggtggaacatatataattaaatcttttcattttccgataaggc

SEQ ID NO: 3148 - DNA, 302 bp, Cricetulus griseus
aactgtgaacgctcaggccgacagggccttccaacatctggaacagaagtttgggcggatgcggcgacactacctggaacggaggaactacatcattcagaacatcccaggcttctggatgactgccttccggaaccacccgcagctgtcctccatgattaggggtcaggatgcagagatgctaaggtacgtcaccaacctagaggtgaaggaactcagacacccgaagactggctgcaaattcaagttcttctttcgaaggaacccctacttccgaaacaagccgatcgtcaaggaatatg

SEQ ID NO: 3149 - DNA, 285 bp, Cricetulus griseus
  misc_feature (222)..(276): n is a, c, g, or t
gataacaaaaaatgttgttttaactcttacctgagctgacttgctcaggttttatcttatttctaaatagataaaattaaaaaggtaagtaaactaagctaagcattaagcatactgttttaatagctatatactaggtagctaattgctcttgggtttctttagaataaagcatgaagggaaacaatggcttctcatggcattgctcaatgttttgtgttnnnnnnnnnnnnnnnnnnnnnnnnnnnnnnnnnnnnnnnnnnnnnnnnnnnnnnnaatgatgtt

SEQ ID NO: 3150 - DNA, 358 bp, Cricetulus griseus
cttccgagatgttctgggcacgggtgccttctcagaaggtatcctggcagaggacaagaggactcacaagctggtggccatcaaatgcattgccaaaaaagccctggagggcaaagaaggcagcatggagaatgagatagccgtcttgcacaaaattaaacatcccaacattgtagccctggatgacatctatgagagagggggccacctctacctcatcatgcatctggtttcaggtggggagctatttgaccgcattgtggagaaaggattctacacagaacgggatgccagccgcctcatcttccaagtgctggatgctgtcaagtacttgcacgacctgggtattcgtgcatcg

SEQ ID NO: 3151 - DNA, 522 bp, Cricetulus griseus
tgccacggctagggtaggttccgggcacagagagtacggctcaggccggcggtagccgggagggcagccgcctccagctcccggctgggggccttggaaaggaccgctctgaactgtctctcaaccatggatcacgacgaccctgccgaggctttgactgcgctgcgcgagaggcggccgggcttggtggagatattgcaagcggcggcaggctccgggttggccgcctacgctgtgtgggcgctgcttctgcaacccgggttccgccgcgtgcctctgaggctgcaggtaccctacgttggcgcgagtgcccggcaggttgagcacgtgctatcgttgttgcgaggccgccctggaaaaatggtggatctaggctctggtgatggcaggatcgtgctggcggcccaccaatgtggtctccgtccatctgtgggttatgagctgaacccgtggcttgtgggacttgcacgactgcatgcctggagggctggttgttctgggagtgtctgcctaccatcgaaa

SEQ ID NO: 3152 - DNA, 510 bp, Cricetulus griseus
gctgcgcatctcggggcgcaatatgaaggtgcttttcgccgccgccctcatcgtgggctccgtcgtcttccttttgttgccgggaccctccgtggccaacgataagaagaagggacccaaagtcacagtcaaggtattctttgatcttcacattggagatgagcctgtaggcagagtgacctttggactctttggaaagactgttccaaaaacagtggataattttgtagccttagctactggagagaaaggatttggctacaaaaacagcaagttccatcgtgtcatcaaggacttcatgatccaaggtggagacttcaccagaggagatggcacaggaggaaagagcatttatggtgagcgcttcccagatgagaacttcaagctgaagcactatgggcctggatgggtgagcatggccaatgcaggcaaagacaccaatggctcccaattcttcataactacagtcaagacatcttggctagatggcaaacatgtggtttttggcaa

SEQ ID NO: 3153 - DNA, 259 bp, Cricetulus griseus
aagcttgttaagtaactataaagcagaaaattgagaaactaattctcccatatatcattgcttatattttaaaaataagttaataactaatttaagcgcaaggaaaacacaataattatataaaatgtaaggacattttgtagtatatatacaaacaaaaggttaatttttaatcaatactttattttgttcattttttgagattttaacaattacatcatcaccccatctttttttttttaccccaaacccccttgct

SEQ ID NO: 3154 - DNA, 141 bp, Cricetulus griseus
gtcttatgaatgacacaatggctacagactctcctagaagacccagccgttgtacgggtggagttgtggttcgccctcaggctgtcacggagcagtcttacatggagagtgtggtgacctttctgcaggatgttgtgccgc

SEQ ID NO: 3155 - DNA, 472 bp, Cricetulus griseus
tcaacatcgcactggcccttgagagaaaatgcaaggccaatccagtggactagtggcactgtgattctttctcttgcttggaagacactaacatttaatgagcgccagctgtgggccagaacatgagaaagaaggaagcagcacctgggacgccaagaaccaggcctgccagcacaggagggctgaacctgctgccccctcctccagggagcaagacctccactcttatccctccccctggggagcagttgtcttttgggggctctgcagcccagccagcagttatttctgtttcaggaggtgccacagaaccctggccacagtctaagcctgctgccaccaccactgctgatatctggggcgacttcaccaaatccacagggtcgtcgtcctccaaccagtctcagccaggcaccggctgggtccagttttgatgcacaactttttcttcatgacttctgggaaggagctg

SEQ ID NO: 3156 - DNA, 579 bp, Cricetulus griseus
caatatatgcattttctcactggacagcccgatgccactttatattttaaagggtcacaaagatactgtttgtagtctttcgtctggaaaatttgggacattacttagtggctcatgggacaccactgctaaagtctggctgaatgacaaatgcatgatgacattacagggtcatacagctgcagtatgggcagtaaagattctaccggaacagggcttgatgttaactggatcagcagacaagactattaaactgtggaaagctggaaggtgtgagaggactttttcagggcatgaagactgtgtcagaggtttggcaattttgagtgaaacagaatttctttcatgtgcaaatgatgccagtattagaaggtggcaaattactggcgagtgtcttgaagtatactatggacatacaaattatatttatagcatatctgtctttccaaattgtagagattttgtgacaacagcagaagacagatctctgagaatatggaaacatggtgaatgtgcccaaacaatccgacttccagctcagtctatatggtgctgctgtgtgctggataatggtgacat

SEQ ID NO: 3157 - DNA, 385 bp, Cricetulus griseus
gtatagtggctcacaattgtaattcagctcataggcaaaggcaggaggaatttaaggtcatctttgggtacataacacttaaaggccaatgtgggctacatagagactctgttcgaaacaaacaagccaatagcacaaacaacaacaaaaagggaaaatatccacagattatcgctcctttcctcattttccttcagtggttatggcttgcctaagtgtagcacggtgccacaaatagggtattgagagtggtagggtaaagacatccttatgctgcccttttataattgaatacactttcctattaattaaaaactccacaacatcattaagcatttatttgctctattacgtatgataagattattaaatgtggacccatcct

SEQ ID NO: 3158 - DNA, 263 bp, Cricetulus griseus
cagtagccacagacaatcacaggcatcagtttagaccagttttgatggtcaagttcttggcttgcctttccaggtagggggtaaaagttccgtcggcctatggggtgacccataaaccgagtggaagagcccatcccatgtaggctcatgaaacctgggaactgccttttcctcacaaggcaccaccgatgcccattgcttgggaaactatcctatcaggtgagccatgtgccctgccaggggagtaacaggtgctgcctttt

SEQ ID NO: 3159 - DNA, 501 bp, Cricetulus griseus
  misc_feature (363)..(382): n is a, c, g, or t
gggaggggaggccgagtcctggaagtggagctccgcgctgggactggttccttcgcagccattttctgtccaaccaaacagccgattggagacgggagccaaccagggctgcattggaggttaaaattgggcaaggatccaacaccttttgacaggtgtttgagagcaccactagtacacagttctgacagtgtttcatgacaatggatggcgacagttccacaaccgacgcttctcaactagggatttccgcagactacattggaggaagtcattatgttatccagcctcatgatgatactgaggacagcatgaatgatcatgaagatacaaatggttcaaaagaaagtttcagagaacaannnnnnnnnnnnnnnnnnnnaaatgtggctaggataatgaaaaatgccatacctcaaacaggaaagattgccaaagatgccaaaaaatgtgttcaagagtgtgtgagtgagttcataagcttcattacgtctgaagcaa

SEQ ID NO: 3160 - DNA, 404 bp, Cricetulus griseus
aggcagccaccaaaccctgctccaggggtccagcagatggggccgccatattacactgaccctggaggacctgggatgaatcctgttggcaacaccatggcaatggctttccaggtccaacccagttcaccccacggagtcacagcctacccaccccctccttcctactgcaacacgcccccgcctccctatgaacaggtggtgaaggacaagtagcaagatgctacacagaaggcaaagaggctggacaggcccttctgtgtgtcctccccaccctcaccgatacttgctaacagggtggtccaagggcaaactgctctttgatgtcttcaaagcaagcccagctctctttcaagttttttgtggaggacatttgaatttcagtctcctctgtcgcttctgtc

SEQ ID NO: 3161 - DNA, 179 bp, Cricetulus griseus
  misc_feature (9)..(26): n is a, c, g, or t
tttctgctnnnnnnnnnnnnnnnnnntctcacccgcgccgctcctcgcctctcttgttagcccgagactcgcctctcagccgcccgccgcacagacgcacgagtagacagtgcagctccatcggctgatcctcgctgagctccgagggtaggcggtaccgggcggcccacgatgccgaa

SEQ ID NO: 3162 - DNA, 544 bp, Cricetulus griseus
cctggcctctcgggcctttccatgagttctctggccagtgcacatctgtgacaaccaggtatgttgagtcctggtctcaccctgggagcacaaggcacccctctcttcctcctatatgaccctagtgtgccacactctgcagacccttagaaaataagtgtttacatggctgggcgagggccctgcccctggggcacacccacccacactgctgaagccactgtagcctgggactactgctccccacggccccagggaggagtctgattttattaaggtaatttcttatagagcagtcaccaaaccttaccacacagtgaaggtggagtatccacggctactccctgtagtgaggtaatcgtcctcatagccacagtctctggatcctttgcctctgccttcataagctgccaggtctcccctcctagcagtggctgaggaagggctctgactccaacaggcctgcacctgactagagaccccctccatgttgtcccctgcatttcttgctggctcccagtaggtgtgcagcagccttctctcc

SEQ ID NO: 3163 - DNA, 471 bp, Cricetulus griseus
  misc_feature (330)..(330): n is a, c, g, or t
atattctccatactgtccaacccaagggcaagatcaccttctgcaccggcattcgagtggcccatctggctctgaagcaccggcagggcaagaatcacaagatgagaatcatcgccttcgtgggtagccctgtggaggacaacgagaaggaggtggtgaaactagccaaacgcctcaagaaagaaaaactcttcgtgtttctatggaagagcagcggcagcggcaggaggaggaggcacggcgggcagccgcagcctctgcagctgaggctggaattgccacatctgggactgaagacacggatgatgccctactgaagatgaccatcanccagcaggagtttggccgtgctgggcttcctgacctaagcagcatgactgaggaggagcagattgcctatgccatgcagatgtcactgcagggagcagagtttggccaagcagagtctgctgacattgacgccagctcagc

SEQ ID NO: 3164 - DNA, 493 bp, Cricetulus griseus
aaatatattgtagggtttattgaaaagaaatttgaaataaaaaaatgctttagttgcaagattaagcttggagcagtgtatcctttcaaagatacatgtcaaaggactgaatgagattcatccaaagatgcttagctgcttcattaaacattctggcttgttctcctgtacaccaagctccataagctcatagagagggaatcagagtgttgtggggtagaaaagaaagatcctgaatatgtcctggactccagttgagggcacaggaacccatatgactaaaaaccatacagatcttgacaggacagtgtggctgagaatatcctctccaccttggggaattaaagctttccatagtctagccttgatatagaacttattcttgggacacatgttacctgccagcttttggttaagctcattgctcttttgttgatgaatctttaagaacaattgctacaatataattttgtgaacttggagaactgaatat

SEQ ID NO: 3165 - DNA, 382 bp, Cricetulus griseus
tgatgcggccttgtttactatggaaccaacatcaggccttctgagactagtgaggcctcttgatgctgtctgttcagcaggtcaagagatgacacatcttgattctgtgagacattttttggttgtttacaagcggagcactggggactgtaagggcatggtgacacctgcagccggttagttcccagtctgctggtgtgaggtttttgcagacttttacacacattgctccaagagaccagagctcccataatgactttgttgaggaagaacaagaagcgtttgtcctcagtgtgaacttgctttgcctgccccgggctggtgaaggggtgatgggcgggttccctcctcctccttcctttccccactgggagtgggtgag

SEQ ID NO: 3166 - DNA, 335 bp, Cricetulus griseus
  misc_feature (143)..(143): n is a, c, g, or t
attcaggatattgtggtgcactacaccttcaacaaggtgctcatgctgcaggaacctctgctggtcgtggctgccttctacattctgttcttcaccgtcattgtctatgtccgtctgggacttttccatcaccaaggatccanctgcgggaagccaggatgaaagtggcctgtgtcacagagcatgtcttaaccctagtcaacaagaggtgaggcctctaccgtcactttgacgagaccatcaataggtgcaagcagtcccgggatgtctctactctcaatagtggcaaaaagagcctggagaccgagcacaaagctgtgaccagtgagattgct

SEQ ID NO: 3167 - DNA, 421 bp, Cricetulus griseus
aggccaggcaactactttccagatgactcttaatggcaaacctgcacctccacctcagagccagatccccgaatggagcagttagggagggttgtggaactggacagtgacatggtagatatcactcaggagccagttttggattctgtgttagaagagtgtgtgcctgaggatcaagagccagtgtctgcttcgacacacattgcatcttcgctgggaattaatccacatgtcttacagatcatgaaagcatcattgcttgtggatgaggaagatggagatgccatggatcaacacttcagtcacttcccctccaaaggagatactgttcaagaaatctgttctcctagacgccctatttcagcctcccactcatcaaaatcccgttcaatcgttggtgggttgctgcaatcaaaatttg

SEQ ID NO: 3168 - DNA, 391 bp, Cricetulus griseus
  misc_feature (85)..(109): n is a, c, g, or t
cacaccaagaggagaagaaaaaggtggaagacaagaagaaggatcttgaggaggaggtgagcaacttccagaagaagaaggcagnnnnnnnnnnnnnnnnnnnnnnnnnccatcagtccggggcccatcaaaccaagaaggacaagggtaggaaaaactgaccatctgcctcttgagagaaagaagtgggcatccttcctttaagttcaggagccattttttatttgactctgttacctgcaccccttacataagctgtttggacagttctgctcattctgggggcgggggattccaactagccagtcctgctttttgtatttgttatccagacttacttttggtatcaaaaattatgccagtcttgagctcacttcaagggaaaatgcat

SEQ ID NO: 3169 - DNA, 417 bp, Cricetulus griseus
tcttccaaagtgttgatgcataaagctacaaataaatgcactaaaattttgaagcaaatctaccttagaaacttttttgaaattgtacttttaaagatttaggattttgcttaaatattctgagttaaattctgtattaggaaagatgggggattctttccttaaatactaagtatgttcctcattttatttttaaccagatgttttatagaaatgagttgagaaaagtttaacatgcactatttatagtactttgccattaacaggcaatgttctaaaactaaatttatttttgttcagtgaacataagtttagatttttaaagttggtaatttatctccactaatatttttttaagaaactgtgaagagattaacggaataattttcagattttactaatgtaatgtgtagctac

SEQ ID NO: 3170 - DNA, 92 bp, Cricetulus griseus
agtctgtcgggctgcctgctctgggacgcaagcgctgcttcacatccgccgtacgccggccctgctgcggtcacccgccctgcggggtaccg

SEQ ID NO: 3171 - DNA, 491 bp, Cricetulus griseus
  misc_feature (158)..(172): n is a, c, g, or t
cattagaagatggtggctccagggctgttgagggacagaaaagcccccagaagagagaagttttgagtgtccgaagatctactcgaaacaccccagctagaaatgtgagtactctagaaaaatccattttagtgccaaatgaggaagttgctaaagtnnnnnnnnnnnnnnnaaaacctacaaagaagtctgcaaacgaaagccaaaaaagtccattaccagcaatatcagacttcaaggctgaaacaacccacaaagagccagctaaccaggaggaaagattgcttgctgctgcagcttcgactaaatcttcctggagcacaaggactaggtctagaaagaccatgttgttgacggacttttcagaacccaaaactgagcctttattttctcctccttcagtgaaggctccaaagaaagcaaaagctgaaaaaatggaggccactgcccagctgaaagagttggtatcagatttatcatctcagtttgtt

SEQ ID NO: 3172 - DNA, 339 bp, Cricetulus griseus
  misc_feature (5)..(20): n is a, c, g, or t
atatnnnnnnnnnnnnnnnnatttgattatgcctctataaatacctgtgaagaaagagtacagtccaaaatttattagccctgcctttctatggggaaagccaaggttgttggctgatacctctaatcccaaccactgagacccaagggccaggcgggggttatgggaaaatccatatcttcctgggctacagaatgaaaatctcaaaacaaaacaaaatgaattatcttttattccaaaaagagattcgcaatttgcaattcaaatatcttttttaaaaagttagtaatgtagagcagggtgtagtggtacatgcctttaatcccaccacttgggagg

SEQ ID NO: 3173 - DNA, 506 bp, Cricetulus griseus
ggaccttctggtgctccaccaatgcctggtggcccccattaccattaagttgacagtggatgaagagatggcgcatttctttttgaagtacatgtacatgcacatgaaggcatatatatacaaatggctattggtaaagggcgtgcctgaaagaacaactttcgtacctcagagagctcctggcctgcttcatgtgtttggatatgtagagcatcatgtgggtacaatcagataaaaatgtaaaagcaaattattcaagtgtggttaatgtggttatgtatactgaatagcttttgataataattgtttaaagtatagctgtgtcctcagactctaagactacatggattattgttagaatctgtaacttaattggcaaagtaattcaagtatttttttataatcacccccaacctcatatcactgaaaacagtcacgtaattggaacatgactcctcaacatcttgagagcctcttgtgaaattttagctacataaatatattgt

SEQ ID NO: 3174 - DNA, 347 bp, Cricetulus griseus
accaatggccaacatgcattctaccagcttattcaccaaggcaccaagatgataccctgtgatttcctcatccctgtgcagacccagcaccccatacggaaaggtctgcaccacaagatccttctggccaacttcttggcccgggcggaggccctgatgaaggggaagtcaaacgaataggctaagaaggaactccaagctgccggaaagagcccggaggacctggagaaactcctgccacacaaggtctttgaaggaaatcgcccaaccaactccatcgtgtgcaccaagctcacaccattcattctgggagccttgattgccttgtatgaacacaagatcttcgt

SEQ ID NO: 3175 - DNA, 489 bp, Cricetulus griseus
gcgcgtgggctgagacacaggaggaactgctcttcatacacaagcatacaaggatatacatatctatatgcacaaagtgtccatcctatacccaatgtgtctggttttggcactaaattcatatagttataccagacagcaataataactgagcatggagctaatggtgttaaaacagctcagtggtgagggtgggtagctgtatatagatatgcatgtatgtatataattttataaatcccacataagttaatacaggcctgtgtataaacacacatgtggaatatttgtgtatatatatgtacagataataaacatccttaagatttgtgtctggtcctacacctaggcatcaagttaaaaaccatcagacctcaattgtacaataataagggttttgtttaaaataattaaaagttctacagcacttagatatgaagtttgtcacacttgagtagccttgacaaccatgctgtaatactgaaccta

SEQ ID NO: 3176 - DNA, 182 bp, Cricetulus griseus
acaacatttggtgccctggacgtgggaaggctctgcccttggtacccccctccacatcccgctggcgggtacgtgtggggtgaaggacatccttatcacgcgaataaacaatccacattcctgacaccggtttgctggattctgcgtacaacaccggacccaattcggtaaggctacccctt

SEQ ID NO: 3177 - DNA, 437 bp, Cricetulus griseus
aaattaactattatgtttgcactaagatttactgggagtgatagatggacatatctatatatcattaaggactgacttgtctttctgtacataggaagttaacaatactgtatttgttttaaccccacagtgttttactccacttttcaaaaaggtccatttggcacttttatcttttttccttcctttcctctctccctccttccctttctttcttttattttcttttgtaaggaaatcagatttttgtctctccttttagatgaaatgactagaaaggtcaaacttgacagatagtttaggtggagtatatttttaaaattaagaacatgtatatttatcctgtgttaccaagtttttatgtggcagttggggagggggagccctctgaaatgatcatgaggtgaatttttcttcattaggagatgtggagaatc

SEQ ID NO: 3178 - DNA, 362 bp, Cricetulus griseus
aaaatgtgaaacctctcccccctcctccccgaggcccctgcgcttatacaggctgcacaagggcgcactgcacacagtcagccatgaggacatcagggacctgaggaactccacaggctcccagggtggtgcagtgagtaatcctagcagcagtaatagtagccaggactccctccacaaagccccaaagaagaagggcatcaagtcctccattggccgcttgtttggcaagaaggaaaagggccggcctgggccactgggcaaggagtcaccaggacaagttggcgtttcacagacagaaaatccatctcaagatgccttgggactcagcaaactaggaggacaagctgaaaaaaaaccgt

SEQ ID NO: 3179 - DNA, 329 bp, Cricetulus griseus
  misc_feature (194)..(214): n is a, c, g, or t
ctccgcagcaggccggaatccgtgtccatcggtcctcctgaacccgcgcagacgtcgtcaaagttgccatgccggagaacgtagctcccaaaagcggggcgcccgccgcggggccgggcagccgcgggaaaggcgcctaccaggggggggacaagccggcccagatccgcttcagcaacatttccgcggccaannnnnnnnnnnnnnnnnnnnngacaagccttggacctaaaggaatggacaaaatgatccaagatggaaaaggtgatgtgaccattacaaatgatggtgccaccattctgaaacaaatgcaagtattgcacccatca

SEQ ID NO: 3180 - DNA, 578 bp, Cricetulus griseus
  misc_feature (198)..(198): n is a, c, g, or t
  misc_feature (543)..(543): n is a, c, g, or t
tggtatgttattgccaggtagttggatagacttaagcccacaatttgaattgctgctaggagttacaaataatttctctgttccagggccaccaagttatgggttttagagagtggggatgagaattctgatcttggcttctaagtgagaaaccaggtatttgagtttccaagacttcaggcaggcatcacatcctanggctggtggatattgcagtgtaacatgggccctctggcatctcaaagggggtgcttaggaatgtgagaaggttctcgtatttattcagtagtgttttcttggtcattgttgtccttcctttagcttcagatctccagctgcagctggggacccaggaaggagtccattgtaaaacctgggaagaacttatgagtgtttggttgtggataaggtcactgccctaggtagaccaaacagaagactctgggtgaacagcattatgccaggcagagtcaagaacagtgttaatttaattcctcaagcagtttaacaggacaatgtccatctggaaggaagctcacctangtttgtggtaacaacagcacatatcagaagccaga

SEQ ID NO: 3181 - DNA, 553 bp, Cricetulus griseus
  misc_feature (273)..(273): n is a, c, g, or t
gcagcaagccatgcaatctctgaaggagactggcttcattaattactatggcatgcaaagatttggaaccactgctgtccctacataccaagtgggaagagctattctacagaattcctggacagaagtcatggatttaatactgaaaccgcgtgctggagctgaaaaggggtgcttggtgaaatgcagagaagaatgggccaagaccaaagatccagcctctgctctccgaaaactacctgtcaaaaggtgtgtggaagggcagctgcttcnaggactttcaaaatatggaatgaagaatatagtctctgcatttggcataatcccaagaaataatcgattaatgtatatccatagttatcaaagctatgtgtggaataccatggtgagcaaaaggatagaagactatgggctgaaacctgtgcctggggaccttgttctcaaaggagccacagctacctatattgaggaggaagatgttaataattactccattcatgatgtggtgatgcccctgcctgggtttgatgttatctaccccaaacataaaatt

SEQ ID NO: 3182 - DNA, 374 bp, Cricetulus griseus
agaacatcccaaactgtcccgctccgtgcccactcctctggtgattgctcataaaatttctgagaagttagcaggaaacgaagccctgtcccccacctccccatcgaaggagggcaggcctggggaatggaggacaccgacttctataacctgtcgaaatggggaccaggttggcgtatggcaccgacacacagcccagccggcacccaagatccaccgcttccccagcaacatatgcgtgaccaacagcgccggcaaggacttcaacaaaactatctccaaggcggccgtcaacgtgcaggagcggaaggcccatgtcctggccaacatcaatggcatgtccttcatcgccgcgggcgacacgtcatcggaag

SEQ ID NO: 3183 - DNA, 436 bp, Cricetulus griseus
  misc_feature (269)..(321): n is a, c, g, or t
gagtgtttttcaaaacacgctcattatgcctccaaacaggcacaatgagagtccacgtgatccatggaaagcatgtttttcatcattcatatccctgtttttattttacagaacccaataatgagccaacagtgaacttaggtcccccatgttgaaaagactgttattttggcctcaaggcagttttacaaggcaaagatgtttcctctctgagcagaatgttatagttttgccatgagaattttggtgcctggagtatcgaagtgcannnnnnnnnnnnnnnnnnnnnnnnnnnnnnnnnnnnnnnnnnnnnnnnnnnnngaccataaagcagtgacagaaccttgtctagcctccatcagagcagccagctcgcctgtgcttcaagcacaccaggcccatgtctatcctttgaagacttcaactcatttacctc

SEQ ID NO: 3184 - DNA, 481 bp, Cricetulus griseus
  misc_feature (403)..(403): n is a, c, g, or t
  misc_feature (445)..(445): n is a, c, g, or t
gtttggaaagagtgctagcaggggtgcatgggctccatcggaagttctgacaccattctctctaatgctgttatctatggcctgtaacagcaatgaacaattaagttctagggttgtggtactatgcccaagagatgtctgaggagctgttgagttatggataataggcctaaagttacactatgtttaaaagtcgatacaccttcttcgttaggactttgggtcaatgtgtcctctgtggttcatagttaatactacatctggcacactggcatcagcctacatagaacagccatctgctgtcttgcagctttgtctccctgtagtctgtgtctgttttctgtttgtaagtttcagcactgtgcagtaaatgccctgacttccatggtaaggcctaatttanctgcctgtgtctcccttgcaaaaaatgctgggagaggcaggngagcgggaagccacattgaagtgtcccggaagcacg

SEQ ID NO: 3185 - DNA, 507 bp, Cricetulus griseus
gaactagaatacttcggtctatctgctgcaattctggacaaaaatttcagaaaggcatatgactatatcagggtgatggtaatggaaaatgtcaataagccccagctgtggaatattttcaatcaagttaccatgcattggggagatgtgagacatcatcgcttctgtctccgcctgatgctgaaaaaccccgaaaatcatgcactgtgcgttctaaatggacacaatgcttttgtatctgggagcttcaaacacgcacttggacagtatgtgcaagccttccgtgcctatcccagtgagcctctctacaacctctgcataggcctgacctttattcacatggcatctcagaagtatgtgctcaagagacatgccctgactgtacagggcttttccttccctaatcgatacctcagcatacgtggaccttgccaggaatcgttctacaatttgggccgcggccttcatcaactgggactgactcaccttgcaatccactactaccag

SEQ ID NO: 3186 - DNA, 484 bp, Cricetulus griseus
tgatatgagaatatatttattctcagatagctagaggcttgcttggtaagtcagaccatgaggctgtgggagacgaagagaaggcagcaccttgctaatgcagatggggctggagtatcctcaggggtttcgacatgttaactcaggggggagatcgaaaccatcttgaaaggatgtgtgttagtgtcacgtaggggaaagggaggagagaatccttgtgcctttttgaggcttacgctgagataaagggacttttcttttaatagtgtaggacaaagagcctagggataaattactgtttgctcagacacaatgttctggagcttggtaaagttgctacacttagattttgatttatactttggttttcattgcctttttatttatttgtgtttagtaaaacctgagtgtgacttgtttgccagttatacaatgctgtgtgtcttggaatctaagttcacctactcattttgctttgctttca

SEQ ID NO: 3187 - DNA, 306 bp, Cricetulus griseus
gctcctgctccagcggcaagatgtgatccaccagctaggagggacgccaataaggcgtccgataagataagtcttataaaatatatagatgtatgatgattgatactgagctaacagatgagaatcctagtcattggccaagcagcactgggactaatacaagtctctctgggtattcatttgggcctaacttgggcaggcggctgccataaagcttacacgtggcggtggggctcatcggcttttggcagaaagatttatcgtaacagaatggtgtcagaagtgggatgaccccatgccccaagg

SEQ ID NO: 3188 - DNA, 482 bp, Cricetulus griseus
aaagaaaaacaagcatcattgtgggtccaaggagacatttttcgttccaaactgaaaaatagaccttccagtgaaggaagtattaataaaattatttctagcttggatgatatgtctattggtggaaacttatctaaattacaaagcatggaaaggtttggagagagtaacttataagatgaagatgtggaaatgaaaagcagcataacacagggagacaaactacgtgccttaaaaagccagaggcagccccgttcctcgccatcctgtgcatttaggtcagatgatatgaaaggacaccaaagggcagtgtcccagactttcagattaaattcttccccacaaccatctgtatctactgtgaagacccccaaagtgtgtttgtccccttcagcaacagccaaaaggataagcagaggttctttgtcttcgggcgcaaatataagaagcttctccataaactcccggctagccagttctct

SEQ ID NO: 3189 - DNA, 430 bp, Cricetulus griseus
gccaagcgcgaggctctcaggcgggaatgggtactaggtgccccgaggaccaggccccgttggcaccgagcttggatctactctgcggacgtgcccaagaagagccgcaggtcagagtcgccccttccggcctctagctcgccttgctatgggtcacgttggctctcgcaagcgctcgaggagtcgcagtcggtcccggggtcggcgggggtcagaaaagcgaagtaagaagagtagcaaggacgcctcgaagaactgctcagcctccaagtccccaggtcacaaggcctgcagcacctctgaggagagaagcaagcacaaggcccggaggacagcgaggtccagctcttcctcctcctcttccagttcttccagctccgcatcgtcctcatcctccagtgatggccggaagaagcgggggaagaacaag

SEQ ID NO: 3190 - DNA, 446 bp, Cricetulus griseus
  misc_feature (323)..(359): n is a, c, g, or t
gctggggtggacacctgcctacatgtggtgcttagcagcaaggtctgccgtggctacttgatcaagatgggtggcaagattaagtcatggaagaagcgctggtttgtctttgatcggctcaagcgcaccctttcctattatgtggacaaacgtgaaacaaagctgaagggggtcatctacttccaggccatcgaggaagtgtactatgaccatctgcgcagtgcagccaagagtccgaatccagccctcaccttctgcgtgaagacccatgaccggctgtactacatggtggccccgtctgcagaggccatgcgcatctggannnnnnnnnnnnnnnnnnnnnnnnnnnnnnnnnnnnngttcatgaactaactaccacgcacctcctgggtacaggtcagcaccaggacctatgccctgccactcactgctcggcttgtccttgg

SEQ ID NO: 3191 - DNA, 369 bp, Cricetulus griseus
  misc_feature (123)..(137): n is a, c, g, or t
ccaatacagaatagcaacaaaagacagaaaaacagtattaggtgtccctgaagtgttgctgggactcttaccaggagctggaggtactcagagactgcccaaaatggtgggtgtgccggctgnnnnnnnnnnnnnnntgactggtagaaacattcgtgcagacagagccaagaaaatgggattggttgaccagttggtggaacccctgggaccaggagtaaaacctccagaggaaaggacaattgaatacctggaagaagttgcaattacttttgccaaaggcctggctgatcggaaggtctctaccaagccaagcaaaggcctgatagacaagctgacgtcatatgccatgactattccatttgtcag

SEQ ID NO: 3192 - DNA, 84 bp, Cricetulus griseus
ccatctgtcaacggttcaccatccaccaattctgaaagtgatggatctagtacaggctctttgccaccaacaaatacaaatgtg

SEQ ID NO: 3193 - DNA, 515 bp, Cricetulus griseus
ttccgtcgctcttcatccccttgtcatcctcaacatctccgaccactggatccgcatgcgctcccaggaggggcggcctatgcaggtgattggggctttaatcgggaagcaggaggggcgaaatatcgaagtgatgaactcttttgagcggctgtcccacaccgtggaagagaagattatcattgacaaggaatattactacaccaaggaggagcagtttaaacaggtgttcaaggagctggagtttctgggttggtataccacaggggggccgcctgacccctccgacatccacgtccataagcaggtgtgcgagataattgagagccccctctttctgaagttgaaccccatgaccaagcacacagatcttcctgtcagcgtttttgagtctgtcatcgatataatcaatggagaggctacaatgctgtttgctgagctcacgtacacactggccactgaggaagctgaacgtatcggtgtagaccatgtggcacggatgacagcaacaggca

SEQ ID NO: 3194 - DNA, 366 bp, Cricetulus griseus
gtctttctggggtttcactttgataccaaattctcattattttcaatgggaatttttatacattgagccaagcttggatagcaaaacttcaagaaggacaggtggactgaaataagcagttagagggggcttttgagacaatcaccaagtgcaattccatggtgggtgcctccaggtgaggtatactgggacctcggcgttctgtctggcatctggggaccttcggattagctttatcaacctcagccttggccctaatgagaaactctttgtaagtgggctctgggttgttttcaccctgattgaacacagagatgagggataattaacactccacacatacttttatagaaatggaccaacttc

SEQ ID NO: 3195 - DNA, 332 bp, Cricetulus griseus
catcgagatagagaccgagatcgtgttcttgactatgagcgggatcgatttgacagagaacgcagatctcgagatgacaggaatcagtcatatcgagacaagaaagaccattcctcatccagagggaggaggatttgataggccatcctatgaccggaagtctgatagaccaccctatgaaggcccatccatgtttggaggagaaagaagaacttacccagaggatcgaatgcccctgccagctccttccctgggccaccaaccacctccaggtccacgggttgagaagaagcctgagtctaagaacgtggatgatattctgaaacccccag

SEQ ID NO: 3196 - DNA, 436 bp, Cricetulus griseus
aactctgcattctagctgcctcttcagaggcacggggttgcgggattggagaggtgggatggagccttttgagtcagatctggagacttgcctccaggccagcagcaccctctaatctgccagggtccctcttaacatctgatggtgagggtggggtgttgggtctgacttgaccccagtaccttagccatgggtggccaagtggaggggagttgacatccctagctaaagcacaagcaccttagtcataccccctccctccacccttgcccgggcctgttgtcccatctcccccagcaaagatcccaaagcacaatgtcctggtaacttggcaagcagctgagcctggccatggtgaggacaggctgtgctccctgcccagacttagtaagggggcagctccacgggactgaaaggtcttgtggtagagtgggca

SEQ ID NO: 3197 - DNA, 650 bp, Cricetulus griseus
  misc_feature (20)..(40): n is a, c, g, or t
  misc_feature (49)..(80): n is a, c, g, or t
  misc_feature (83)..(100): n is a, c, g, or t
  misc_feature (151)..(166): n is a, c, g, or t
taacccttctgtgtgcactnnnnnnnnnnnnnnnnnnnnngactatacnnnnnnnnnnnnnnnnnnnnnnnnnnnnnnnncannnnnnnnnnnnnnnnnngcccaggagaaagaggatgacgttgtgaagctcaagaatcacgaccctcannnnnnnnnnnnnnnnccacctgacactccggaaatcccagataaccactttttggataatctttgcatcttttgtggggagaggaatgagtccttcacagaagagggcctggacctccactactggaagcactgcctcatgctgacgagatgcgaccactgcaggcaggtggttgagatatccagcctgacagaacacctgctgacagaatgtgacaaaagggatgggtttgggaagtgccaccgctgcaaggaggctgatgacaaggaggagcttcccaagctcctcaaaaccaaggagtgcaaccctgccaaatcggagaaggtggcaaaccgatgtcctctatgtcatgagaactttgcccctggagaagaggcatggaaggttcatctgatggactctactggctgcacaatgaacctgcgaaagacacatgttctttacaaagccaccgccccacagcaagggaagggcccagcagcattgaagtcaagcacct

SEQ ID NO: 3198 - DNA, 650 bp, Cricetulus griseus
  misc_feature (1)..(21): n is a, c, g, or t
nnnnnnnnnnnnnnnnnnnnngtccgagtctttactgtatcatttgagtgaacttaaaggaatggcttcgtggaaacaaaaatatgaacctctaggactggatgctacaggcattgaagacgccattactgctgtgggctctttcatcctcaaggcaaacgaacttctccaagttatagatagtagtatgaaaaacttcaaggcattttttcggtggctatatgtagcaatgctgagaatgacagaagaccatgtgcttcctgagctgaacaagatgactcagaaggatataacatttgttgctgaatttctcactgaacatttcaatgaggctccagacctttataatcggaaaggaaaatactttaatgttgaaagagttggtcagtatttggaagaagaagaccaccaccttgtgtgacccccttaccccaaaaggaacccagtggttgacttcttccaaaacagcagccacctgaaagaaaggcctttgctgtttccttattaccctcgaaaatcattgcattttgtgaaaaggcgaatggagaacattattgatcagtgttggcaaaagccgggcaatgtatttggaagatcgatgaatcaggcaatttgcatttcattatatagagatgctaggagtatggact

SEQ ID NO: 3199 - DNA, 568 bp, Cricetulus griseus
  misc_feature (1)..(21): n is a, c, g, or t
  misc_feature (108)..(127): n is a, c, g, or t
nnnnnnnnnnnnnnnnnnnnnggtacgtgaataatagccacctagaagtgaattttaaccttaaaatacctattccagaaagtaaattaatgtattcaaactcagggnnnnnnnnnnnnnnnnnnnntgaggctttaaaaaccttagtcaaacaaagaaaaaactcggggttccaggagatctggcttgtgcaggcaccaggcatgcactaaatgcacagttctcatagaaaagtaaatcaaagagaccagtgagtatgagcatccatagtggattctttttaactctttgtaggactgttataattaaaagttgtttaagccagccatggtggcacaaatttttaattaacacattcaggcatcagatacaggttgacttctgagtttgaggccagcctgctacagagtaagttccagaatagccagggctatccagagaaaccctatcaaaaaatgaagaaaaataaaacctgtttaaactacttgatagtttagaaacaaaagccctccttagttaattctataaagccagagcaaacttttccacaccctgcaaaatccatcag

SEQ ID NO: 3200 - DNA, 568 bp, Cricetulus griseus; identical to SEQ ID NO: 3199
  misc_feature (1)..(21): n is a, c, g, or t
  misc_feature (108)..(127): n is a, c, g, or t

SEQ ID NO: 3201 - DNA, 650 bp, Cricetulus griseus
  misc_feature (1)..(35): n is a, c, g, or t
nnnnnnnnnnnnnnnnnnnnnnnnnnnnnnnnnnnaaattaatgaagaccctcaaaataaaaaagagatctgaggatgaggttcagtggtcgttactatgcacaaggccataggttcaagccccagtactttttaaaagcaacatctgacatttagaatagcatattataagacatagtcctaaccgagatagttgtatttgaattaaccctggagaccactctagtggttatttttcctttattttggctcacaatttcagagcggtttcaatacatcatggcaggaaaggcaaaacaactccaactctggctgtgagatgggagcctgaagaagagcagctgctcacaacacaggaagcaatgagaagagtgagcctgtccctggtagtctgcttctcaccagccagccccttccataggccggacagccttcacaatagggcacagactggggaccaagtattcaccacataatcctgtagtggacatttcagattcaaaccctaacagtaactgtagaagagaaagttaaaaagctgttcgttcacaagaagtgatctgtaaccctttactgtgtcctcatgctgtgagctgagagttggagtttattgcctgaaggagactgaataaaaacttgatgagagaaga

SEQ ID NO: 3202 - DNA, 650 bp, Cricetulus griseus
  misc_feature (1)..(22): n is a, c, g, or t
  misc_feature (81)..(109): n is a, c, g, or t
  misc_feature (250)..(280): n is a, c, g, or t
  misc_feature (499)..(535): n is a, c, g, or t
nnnnnnnnnnnnnnnnnnnnnncggccgccctttctttttttgtttcctttattgagggttaattgctcgctagacgcccnnnnnnnnnnnnnnnnnnnnnnnnnnnnncgggtatccgctcaattttcccccccaaataaaaaaaaaaccccccattttaaaaacccccttttaaatttttttaaaaaaacccccccctttaaaaaaggggggaaaaaccaaaaaaccctttttaaaaaaccccccccnnnnnnnnnnnnnnnnnnnnnnnnnnnnnnnccaaaaaggcccaaatgttcccccaaccgggttaaggaaaaaaaacctcctaaaaaagggggttttttaaaaaaaaaccccttggggggggacacctggtttttatttggaaagggaaccccctttccttggtgggggtttaaaaggggcccaccccccgggggggaaaaaacccccctttttttttttggggcgcctttttaaaaaaaagggggcccnnnnnnnnnnnnnnnnnnnnnnnnnnnnnnnnnnnnnttctgcacccccccttttttaaaaaaagggggaaaggggttttccccccgggtttttttatatattttttttgggcccccgggaaaaaaattatattggggcccgttgtttataa

SEQ ID NO: 3203 - DNA, 650 bp, Cricetulus griseus
  misc_feature (1)..(38): n is a, c, g, or t
nnnnnnnnnnnnnnnnnnnnnnnnnnnnnnnnnnnnnntaggacccagactcgtaaactgggatttgtggtattgtgtggtagactgccacctcagctaatctatggagttagtgcttgcttaacagcataacccaaaggaaggtcccaacaggatcccacaccagacctgtctctggctgattttcaggatacttcacacttgtcccttcggtagctccagcctagagatcatcaacttgtgagccaccagatggctggctctattcagtgtgcccttctcaacattcctagggatattctggatggttagacgattctctctgactgattggtctgtgatatattttgaatatgaaacattccctgcaggctcatgtgtttgaacttaggacccagctagtgaccctgctttgggaggctgcggaacctttatgacatgacgtctacctgatgtgcagacttacgagttgttacacgccatcctaagcttccagcaatctttacgctcatgatagccacaggggtggaatctacagtcttgtgcctccactaccacactcttgacctgcttgcactactgaggcctccctgtcatgactggttgaattccctgacccctgggccagagtgagtacttacccatagttg

SEQ ID NO: 3204 - DNA, 650 bp, Cricetulus griseus
  misc_feature (1)..(26): n is a, c, g, or t
nnnnnnnnnnnnnnnnnnnnnnnnnnctttgtttttaactaaatactatatattaagggactgatgaatacatagggtgtgaatactcagtaaaggatgattcaataatgaggctatttttccttttctttgataattaaatttttttggatagtaagagaataaatacttgctcaaaatggccccaaaattctgaggagacagagctctggattattttgtttcatatcaattcattaaaacacttatttctagcactgaaatcaggctaggaaacccacatttgggatcagtcccctatctgacacttaaggaaactagtgacattatttctcacaccccaaagatgtatttctgatggataggagacattggcggtaacttaataaacaacttttctgatgcctattgtaacatttcaaccatcactatcactctaaaagcccttaaattattttcttaggtagcaactgatggatttcactaactagcacaagtcactaaacatacataggaaatgggcaagccacaagttaatggcaggtcccataacttatataaagagagctagattcagagaaaaggatcttacttagactacttataattgtcctattggtccacagcactataaaagttcagtgatttga

SEQ ID NO: 3205 - DNA, 650 bp, Cricetulus griseus
  misc_feature (1)..(21): n is a, c, g, or t
  misc_feature (179)..(215): n is a, c, g, or t
nnnnnnnnnnnnnnnnnnnnngatagcaacacagagagcatgtggcaagactgctcataccatggtggtggtacagaaagggaagaggaaagcacagtgggggagacagatgataggtgatagataataaataggtatatatggatgatagatgatagatgatggatagatatagatgnnnnnnnnnnnnnnnnnnnnnnnnnnnnnnnnnnnnngtaggaagatactgattaagtaagagcaagttgcctggccagggattgttttatgtggcagcatatcgatgattcagaggacttacttgggaatgttgtaattatggcagcttgggaaggaggcgccacatctcagggcatgccgtatttactcttggtgaatgattattgcgttatcaattgatgtttctagataagagtgcttgattctactgaattaaaatacttctaggcactaaatcagagatttaagatttgaatgtttaatctccctctgacattatataacagaataaagtttatatcttaattgtgagacatgcctatgttggcatataattactgtcctaaattgtgtgcttactaaaggattcctaatattctatgctggacaatatacattattataatgaggtatgggagcagaatgggaag

SEQ ID NO: 3206 - DNA, 650 bp, Cricetulus griseus
  misc_feature (1)..(21): n is a, c, g, or t
nnnnnnnnnnnnnnnnnnnnntaccatcggcctcctcgctgcatccacgtctataacaagagtggggtgggtaaagtcggcgaccagatcctgctggccatcaggggacagaagaagaaagcgctcattgtgggacatcgcatgcctggctcccgaatgaccccaaggtttgactccaacaatgtggtcctcattgaggacaatgggaaccctgtggggactcgaattaaaacacctatcccaaccagccttcgcaagaaggaaggcgagtattccaaggtgttggccatagctcagaactttgtgtgagcagagcggctctgagccatgcaaccattcccttcacactggtaacagaataaatgttttaatgtgtgttttcttcctatgctgtctgagctgcggttgtgaggagggtaacagcagttgaatactggcttcctccctcgacccccggagtggcctgggctttctttacagctcacaatcatgggtcattcagtgattcaacaaccgttgctcttctcttcttcacttgttggtctccttggggggagtaaggactcccttagtttctttaatagaatctcgtcaacacacataatattttgttaaagatactgtggggttaaagagatggctactcttct

SEQ ID NO: 3207 - DNA, 569 bp, Cricetulus griseus
  misc_feature (1)..(20): n is a, c, g, or t
nnnnnnnnnnnnnnnnnnnngaaacctatgattatggtggttttacaatgatgtttgatgaccgccgtggacgtcctgtgggatttcccatgagaggaagaggtggttttgacagaatgcctcctggtcgggctgggcgtcccatgcctcctgctagaagagattatgatgatatgagccctcgtcgaggaccaccaccaccacctcctggccggggtggccggggtggcagcagagctaggaatcttcctcttcctccaccgccaccacctagagggggagatctaatggcttacgatagaagaggaagacctggggaccgctatgatggcatggttgggttcagtgctgatgaaacttgggactcggcaattgacacatggagcccatcagaatggcagatggcttatgaaccacagggtggttctggatatgattattcctatgcagggggtcgtggctcatacggtgatcttggtggacctattattactacacaagtaactatccccaaagatttggctggatccattattggcaaaggtggtcagaggatcaaacaaatccgt

SEQ ID NO: 3208 - DNA, 650 bp, Cricetulus griseus
  misc_feature (1)..(20): n is a, c, g, or t
nnnnnnnnnnnnnnnnnnnnagaattagcagaagccattcaaaaatcagcagaggatgcagagcgtcagaagccatgatgcatgtagtgtgtgtgctgcagctgcagtgggccccagaccagagaaaagcagtaaagaatctacctcactgggaatatcatcattgctgacttcagatggattcaatcatccagtcccttcttcagggcaaagtcctgaggttggtagccctacgagtcttgctcgctctgtctctgcttcagtctgcgccatcaagcccagtgaccccaatagcattgaacctatagctatggaggctatgaaggcttcggctgaattgcagacgaactctaaggaaacagagcctcctgctctgcaggctcttcctcatctcgcttccccagcaggccaggatccagctatgcctttgcgtctttcatctgaagaagcatttgttacagataatccagagaaatctgtggaaagaagagcccagggcctcagagtttatctccacacaagacaggacactagtttatctctcacaactactgggatgcatgggctacaggggtttgtagaagaaaagagttggcatccagaaaatccgaaccccagtcaaatgaatggccttcagcaacacagagaac

SEQ ID NO: 3209 - DNA, 650 bp, Cricetulus griseus
  misc_feature (1)..(21): n is a, c, g, or t
  misc_feature (438)..(456): n is a, c, g, or t
  misc_feature (621)..(642): n is a, c, g, or t
nnnnnnnnnnnnnnnnnnnnnaaagataattgttcatttgaagcatgtacaatgtaaacaatttcagatggccaggaaaagagtaagcacagtggaaataagatctttgaaaccagacttgtctgtgttttaattctacttgtgctttactgttgctttagaaatggggaagtgacccaacctatcctatgaaaccttggtgtttacatgtttgaaatgaggctaggaactggagacaaggttcagcaggaaatagtgcctgcttttcaaaaaggactcaagttttagttcctggtgcccatgctgggttgctcacaactgtctgtaattccatcttggcagacacacacacacacaccaatctccccaaaacttaaaaattagctggacatggtaccacacacttttaatctcagcattagggaggtagagtcagannnnnnnnnnnnnnnnnnntgccagcctgttatatatagaaagttccatgatggccagggttacatagagaaagcttgtctcaaaaaataaaaattaaataaaataagatggctaatggcaccaattcatgctttatctgttcaaacatgtttcccaaaattcaccccttttctcttcttgagnnnnnnnnnnnnnnnnnnnnnnttctcctg

SEQ ID NO: 3210 - DNA, 650 bp, Cricetulus griseus
  misc_feature (1)..(34): n is a, c, g, or t
  misc_feature (193)..(215): n is a, c, g, or t
nnnnnnnnnnnnnnnnnnnnnnnnnnnnnnnnnncgcgtcctcggggacacccgcactgctatggctaccggtggcggcgtggcctccagagaggggctgcgctacgccgaatacctgcccccctccacccaaaggccggacgccgacatcgaccacgccgcgggaagaaggctgatagctgtaggactaggnnnnnnnnnnnnnnnnnnnnnnngtcgctatgcatttcaaatgtggaaacctctagaacaagtaatcacagaaacagcaaggaagatttcatcaccgagcttttcgtcctactataaaggaggatttgagcaaaaaatgagtaggcgagaagctagtcttattttaggtgtaagcccatctgctggcaaggccaagattagaacagcacacaagagaattatgattttgaaccatccagacaaaggtggatctccttacttagcatccaaaataaatgaagcaaaggacttgctagaatcgtccaccaaacttaaatgatgctgaaagatcctaccaaaggaaaaggtgcaaggctctagaagtcttcctacagaagactatggaacatggacttgcttcatattaaccaactctgttcttctgtcattaagtgtgcagcaataaaagatatgcacct

SEQ ID NO: 3211 - DNA, 305 bp, Cricetulus griseus
  misc_feature (1)..(32): n is a, c, g, or t
  misc_feature (274)..(305): n is a, c, g, or t
nnnnnnnnnnnnnnnnnnnnnnnnnnnnnnnnctgtagtccatatggttaagatatctttatttagataaacatcagccaaacacaagccagagcatgccaggggcagcaaggcagccaggccagagagaaggggtccccatgtgcctgcagacccttaagaacctaacatcctgacctccccttgaccacgctctgacaggagtagtcaggcacacctgtagccaacccttaggaggcgtagttacagtgtctccctacacaaatgggtgaannnnnnnnnnnnnnnnnnnnnnnnnnnnnnnn

SEQ ID NO: 3212 - DNA, 650 bp, Cricetulus griseus
  misc_feature (1)..(20): n is a, c, g, or t
nnnnnnnnnnnnnnnnnnnntttatgtcagggtcagtttcaggtgcatagaactggtcctcaagagctcatatccttcctgtgacatttcacatctgatgactgcaatgggaactttgatcccaactgtgggtcacattgatggaaacggactctgaagttcctagctaaaccaaaaccttgttggatttgctttcagtttgcttctcatatggcttggcttatgctctctctatctccagttctagcaatgtaactttagagggttttttcctccctaaaaataccttgcatcacacatggcttttcaacatctgtttccacagaatctgacctggagacaggaacttgagcagaatgtaaaagagaactagccaaggggaaatccttggtatagaggaatgtttcacagtctatgctttattcatttgaaaaccgtatttccaaatggaaacaaaacaggctgaacaaggaaagttcagtcactattgggtgtgtggtaggacacggcatctctggcagtcgaggttgttagtcctgttagtgttggtcgtaagccttcactctccttcttaatctctacatcaacctttcaccttgtttcagagaagtttttccgtctttggaaagaagcatcatacattctccatc

SEQ ID NO: 3213 - DNA, 650 bp, Cricetulus griseus
  misc_feature (1)..(21): n is a, c, g, or t
nnnnnnnnnnnnnnnnnnnnnttaggaagtgacacacatttatgttaggagaatgttcagtatgaaaacttgggaggcagacaagccaaccatttctttgccttcattcgggatatagatgaggaaggtctgtaatgttaggacctggtagcagtcctcagaacctcatagtaatggcttagtttaggtttatgtcagtttaatgaaaatatttgtatatgtcatctggaagcatgcctagtgttaaatcacttgcctggcttcagcaggtttccagataagttgagagaatacagtgaaactaaagccacagaattgacactcggttatggtcaggttagggcacaggttttatgaggaagattttaataggaggagagcaacttttatgaatataaaggaaagaatgcagcacaaatctgaatgagaaagtgtctgccctcctaatctagtcatgtgtggaaagggtgactggggtattttgtgggaacctgtaaggattaggattctagtgttggtggtggtggtgggggggggacatatgggtttactagagaaactaatgggggcctggagactgatatacctgggagcctagcatagcgtgcgtaccttaatcccggcctgatgacagggctggggcagggacc

SEQ ID NO: 3214 - DNA, 650 bp, Cricetulus griseus
  misc_feature (1)..(21): n is a, c, g, or t
nnnnnnnnnnnnnnnnnnnnnaattcaaccaggtacatggcagcatcagtgactgtaagttgtctgatatctctccaattggaagggatccctctgtgtccagttttagcagttctaccctcactccctcctccacatgcccctctctggtggactcaaggagcaactcaatggatcagaagaccccagaagccaactctcgtgcctctagtccctgccaagaatttgaacagtttcagatcatcccaactgtggagacaccctatttggcccgagcaggaaaacatgaatttctcaatcttgtcccagacattgaagaagtgagagcagggtcagtggtatctaagaagggatacctgcatttcaaggagccactttccagcaactgggctaagcatttcgttgtggttcgtcgcccttatgtcttcatctataacagtgacaaagacccagtagagcgtggcgtcattaacctgtctacagcccaggtggagtacagtgaggaccagcaggccatggtgaagacacctaacacctttgctgtgtgcacaaagcaccgcggggtccttttgcaagctctcaacgacaaggacatgagtgactgggtatatgcctttaacccacttttggctggcacaataagtcaaaac

SEQ ID NO: 3215 - DNA, 633 bp, Cricetulus griseus
  misc_feature (17)..(59): n is a, c, g, or t
  misc_feature (72)..(139): n is a, c, g, or t
  misc_feature (152)..(220): n is a, c, g, or t
  misc_feature (232)..(300): n is a, c, g, or t
  misc_feature (313)..(367): n is a, c, g, or t
  misc_feature (369)..(381): n is a, c, g, or t
  misc_feature (392)..(539): n is a, c, g, or t
  misc_feature (556)..(577): n is a, c, g, or t
aatattgtattagcttnnnnnnnnnnnnnnnnnnnnnnnnnnnnnnnnnnnnnnnnnnnaatgtctacgctnnnnnnnnnnnnnnnnnnnnnnnnnnnnnnnnnnnnnnnnnnnnnnnnnnnnnnnnnnnnnnnnnnnncgataggtatgtnnnnnnnnnnnnnnnnnnnnnnnnnnnnnnnnnnnnnnnnnnnnnnnnnnnnnnnnnnnnnnnnnnnnngtagtgtcaaannnnnnnnnnnnnnnnnnnnnnnnnnnnnnnnnnnnnnnnnnnnnnnnnnnnnnnnnnnnnnnnnnnnnatactcctacctnnnnnnnnnnnnnnnnnnnnnnnnnnnnnnnnnnnnnnnnnnnnnnnnnnnnnnntnnnnnnnnnnnnntttagctatannnnnnnnnnnnnnnnnnnnnnnnnnnnnnnnnnnnnnnnnnnnnnnnnnnnnnnnnnnnnnnnnnnnnnnnnnnnnnnnnnnnnnnnnnnnnnnnnnnnnnnnnnnnnnnnnnnnnnnnnnnnnnnnnnnnnnnnnnnnnnnnnnnncgactacaacaaaaaannnnnnnnnnnnnnnnnnnnnnttctacaaactcttctaatcccaacattttcagcaaacgagcttatactattttat

SEQ ID NO: 3216 - DNA, 650 bp, Cricetulus griseus
  misc_feature (1)..(22): n is a, c, g, or t
  misc_feature (70)..(90): n is a, c, g, or t
nnnnnnnnnnnnnnnnnnnnnnaactggtagcactgcatggctgtgcatagagtcagcacttataacacnnnnnnnnnnnnnnnnnnnnngggctcactgactgaaaataagcaaggctttctgctttgtctacctttcagccttggagtagttaggttcatttgtgactccggagagcaataagccattttccaagagtaaataaaaatcatgatctctgatatactgtgccaggtcctttgaacaaactaccattacagcagcagcatccaccagctgcattggtgggatgttctaaatatgttcagtagccatatgtcctgttaagggctttcagtgtgtctaattccatggaagaactaaggccagaagaagggcatcagagggttatctcagcatggagaggcattatagctcaaggccaacccaaattttgtttagtttttggtttttggtattgtgtggttttgtgatcagggtctcactatgtagctactgctagcctggacggaactctatatgtagctcaaagtggcctcaagctcatagaaatgtacctacttgtgcctccagagtgttgggattaaggtatatgccaccacacccagatcaaaaactaatgttttttatttaagtggacacgtgtggt

SEQ ID NO: 3217 - DNA, 651 bp, Cricetulus griseus
  misc_feature (1)..(21): n is a, c, g, or t
  misc_feature (61)..(106): n is a, c, g, or t
nnnnnnnnnnnnnnnnnnnnnatttagagaaggccctaggccctaacctgtgtatctaggnnnnnnnnnnnnnnnnnnnnnnnnnnnnnnnnnnnnnnnnnnnnnntatccctccatggggagtgggctctagtgaagccacattatgcagcagagcacccttctgccatttttgacctctaaccaggacagaactagggtcattgacagattctggtcagggataagaaccagaacatcttgctttcagggttcctctccctcattgtgcctgaccaattattctattctcatcagcatcaccacagtgtccccatccatcatggatgacaacctcatggaagctgcatcagtagtccagtttcagtcaccctctgcttgctcatatactctaatatcttagaagattatgcgcagttggtggggtatagaaaggagtaaaggctcgaatcctacgttaaagtcctgttaacccctgtcatccctttactatggcgtgtcaacagttctatcacagtcactattgaccttgctagctctgtatcattctgcttatatatggctgtggctgcagagacagagatatctctgctctgataatagatgtttaaggtgcgcccaaagaaaaagtcattctaccgcccctgaaat

SEQ ID NO: 3218 - DNA, 650 bp, Cricetulus griseus
  misc_feature (1)..(21): n is a, c, g, or t
nnnnnnnnnnnnnnnnnnnnnacaggaaggaacaggaggcaagaatgcaaaattcaccatggagtaactactggttgaagttgatgcagagaattctggaccttgaggacaaagactaaaatgacttctataatgaggaaggagcatgtcttttgggcatttgtatgtctgttgctcagcattgtcccggagcttcttagtgctctgcctgaggaagttgatggacatgcaaaaaccacagattcagaacagccaccaatgaaaccgaagcatacattttgcgcaatgaaggtagatgatggaccgtgcaaagccatgataaggagttattttttcaatatttttacttaccaatgtgaagaatttatatatgggggatgcagaggaaacgaaaatcgatttgaaaccctggaagaatgtaaggagacatgcatcagaggttataaaaagaagactgtaaagacaccatctggagcagaaaagccagatttctgcttcttggaagaggaccctgggatctgccgaggcctcattactagatatttttataataaccagtcaaagcagtgtgagcaattcaagtatggtgggtgcctaggcaaccgcaacaactttgagactttggatgaatgcaagagcatctgtgagga

SEQ ID NO: 3219 - DNA, 650 bp, Cricetulus griseus
  misc_feature (1)..(21): n is a, c, g, or t
  misc_feature (24)..(43): n is a, c, g, or t
  misc_feature (171)..(192): n is a, c, g, or t
nnnnnnnnnnnnnnnnnnnnnctnnnnnnnnnnnnnnnnnnnntctctgggggcatgtggcctgtggttcacattcagaaaaagaacacaaaaactcgagccaattttggctcccgcccatttgcgtatgcggaaggacaggcccatcgtaatgctgcggacttgtgcacnnnnnnnnnnnnnnnnnnnnnngctaactttgaggccctgccatttgctatggcatctgatagtgacaacgatgctggcaccagtattgcatcagatccaggcactcatgggccaccatgccgaattgctgcagtggccacagcccagcaacaatatgacagtgacacctcctgccattataaagtggagctcagctatgagaatttcatcacctctggcccagacccccatccccctcccattgcggatgatgaaagtgatgacgatgacgatgatgacatcccacaggaagaccactatgccctgttggtgaaagcttgggagaccaaggttttccctaccatccgaagacgctttcgaaatgaagctgagcggaagtcaggcctggaccagatcaagggtgctttacaactaggcatggtggatatcgcccggcagacagttgaatttctctatgaggagaatggcggcatcccaag

SEQ ID NO: 3220 - DNA, 650 bp, Cricetulus griseus
  misc_feature (1)..(76): n is a, c, g, or t
nnnnnnnnnnnnnnnnnnnnnnnnnnnnnnnnnnnnnnnnnnnnnnnnnnnnnnnnnnnnnnnnnnnnnnnnnnnngtatacaccccaaccgggcgcccccggggggggggacccccatgaggaaggggaggaggggggggacccgccccgagggaaaaaaacccctaccgggggcaaagagaaaaaaaatgccaccccaaagaaaatattcccccacgccaacaggaagcatgcctagcggaaaatcactggactggcttaaacaaggaaccagataaactgagagaatacagtgaaactaaagccacagaattgacactcggttatggtcaggataaggcacaggatgtatgaggaagaactgaataagaggagagcaactttaatgaatataaaggaaagaatgcaacacacatctgaatgagaaagcggatgacctcctaatcgacacatgagaggaaagggcgaccggggcattcagggggaaccaagaaagaataagagcctagcgctgaagaaggtggcggcagggggccaaaggggcaccggagaaaatagcgagcccctgagactaaacacctgcgacccaaccagccatcggaaccttacaccaggccaagacgacagaacaggggccagggccacacgc

SEQ ID NO: 3221 - DNA, 650 bp, Cricetulus griseus
  misc_feature (1)..(21): n is a, c, g, or t
nnnnnnnnnnnnnnnnnnnnngtcctcggggacgtgatgactgctgaagcacataggactctcctgctgacggaggacatgcacacaggcgctgcgtgatgaatagcatcatgtgtgttgctttcccagccagaggagaggacatcttgcctcactccccaggagaggccccgtctcaggtgtgacttcagccaacatccaaacccatatacaggtccaaggtcacagggacagacaactttgccatcccctgaacgaacaggcagcgttggaatcttccagaaaagaccttcaggagtaaagcagagagaaagcaagtctgtccctgggcctgagggggcacaaacaactccttttctctgtagaaacaaaggaaaggcggtatagacttgaatcctcctcctcggtggatctggggaacgtatgattaggcacaataatgttctttttaaaattaacagcagaccttatgtagaaaagcaatcactggtactgaggtacaaagaagccatttgtgggattggaacagcagggaaccaggggatgaggtaggagagatgtcttgtgggaactaaagtcaaacaagaccttagagcagctgcccaggtcactgacagaagtgtgcggtatttgcactaaatcttcagtgt

SEQ ID NO: 3222 - DNA, 650 bp, Cricetulus griseus
  misc_feature (1)..(20): n is a, c, g, or t
  misc_feature (346)..(377): n is a, c, g, or t
nnnnnnnnnnnnnnnnnnnntttcagtgtactgggaatcgcttttaactgagaagcacttctcttgtagatgtttttgtaattaagatatcgatttcagtgtatagggatgctaagcaagagtcacagatatacagatacaaatctagatcattacagaagagtcagtatgctgcttgtttagcactactgactgccattgtaagcatgcagaaaaggagcattgcagctagtgcaggcagattgcaaaggtgctgccatttgaaggcctcagacttgccgacagctgaagattcagcaagtaaaagctctgagatggagcaagagccatttgttgaaataggtgnnnnnnnnnnnnnnnnnnnnnnnnnnnnnnnnattttaggcaattgttcaactcatctctaataaagttctcattttcatcagtttttcaacattgccgttcagagctccacacagtttaaaatggtgaatgttttaaataagatctgataaaattctgaatgataacagtttatgtgtgatctacattaataaatattttggaagcctgaaaggtattactattggccctgtttgattagttagtaaggtaactaagatttaaaaggggtcccttctaaagcgtcccccacagcattaaaataa

SEQ ID NO: 3223 - DNA, 650 bp, Cricetulus griseus
  misc_feature (1)..(20): n is a, c, g, or t
nnnnnnnnnnnnnnnnnnnnggaacccgcctggtgtatgagagtctacctagaagcgaagctcaggctactactataccagaactggagatgcccagcttgcctgctatttcagtgctgcagtggcctctgctaagtaaaaagtcttcatagagatctccctgtcagctccccagcatgacactgcagtacctcatgctcctgactgccctcctgatgggaggctccagcaagtccacagagagcaaggcccagcaacctgagtgttgtatgaatgcagtagacttcaatgctacctgcccaggcacaggcctatgtggcccaggttgctacaggcattggaatgcagatgggagtgttagctgtgtccggtgctggaatgggaccttcccgacatacaatggctctgagtgcagaattctcactggccggggcatgcagtttcccatgaacagaagcacagggactcctggacagccacattttgggggtcctgatgtggcagcttacctcttcctggggacactcttcatcagcacaggcctcatgctctctgtggctgggttcttctacctcaagcgctccagtaaacttcctgaggctttctacaggagagacagagcccctgtcctgcagcctggggaaacagct

SEQ ID NO: 3224 - DNA, 651 bp, Cricetulus griseus
  misc_feature (1)..(30): n is a, c, g, or t
  misc_feature (32)..(80): n is a, c, g, or t
  misc_feature (127)..(159): n is a, c, g, or t
  misc_feature (173)..(186): n is a, c, g, or t
  misc_feature (188)..(218): n is a, c, g, or t
  misc_feature (227)..(259): n is a, c, g, or t
  misc_feature (261)..(311): n is a, c, g, or t
  misc_feature (356)..(376): n is a, c, g, or t
  misc_feature (402)..(415): n is a, c, g, or t
  misc_feature (417)..(439): n is a, c, g, or t
  misc_feature (455)..(481): n is a, c, g, or t
  misc_feature (483)..(537): n is a, c, g, or t
nnnnnnnnnnnnnnnnnnnnnnnnnnnnnnannnnnnnnnnnnnnnnnnnnnnnnnnnnnnnnnnnnnnnnnnnnnnnnncagagatccaggacacggagggcattccccctgaccagcagaggctnnnnnnnnnnnnnnnnnnnnnnnnnnnnnnnnngaccctgtccgacnnnnnnnnnnnnnngnnnnnnnnnnnnnnnnnnnnnnnnnnnnnnntgggtggtnnnnnnnnnnnnnnnnnnnnnnnnnnnnnnnnnannnnnnnnnnnnnnnnnnnnnnnnnnnnnnnnnnnnnnnnnnnnnnnnnnntagatccaagacacggatggcattccccctgaccaaaagaggttnnnnnnnnnnnnnnnnnnnnntgaagatggccggaccctgtccgacnnnnnnnnnnnnnngnnnnnnnnnnnnnnnnnnnnnnnacgactcaggggtggnnnnnnnnnnnnnnnnnnnnnnnnnnnannnnnnnnnnnnnnnnnnnnnnnnnnnnnnnnnnnnnnnnnnnnnnnnnnnnnnngcaagattcatgacacggatggcattcctcctgaccaaaagaagttgaactttgccggtaagcagctggaagatgggcggaccctgtccgactacaacttccagaaggaagcca

SEQ ID NO: 3225 - DNA, 633 bp, Cricetulus griseus
  misc_feature (17)..(59): n is a, c, g, or t
  misc_feature (72)..(139): n is a, c, g, or t
  misc_feature (152)..(220): n is a, c, g, or t
  misc_feature (232)..(300): n is a, c, g, or t
  misc_feature (313)..(367): n is a, c, g, or t
  misc_feature (369)..(381): n is a, c, g, or t
  misc_feature (392)..(539): n is a, c, g, or t
  misc_feature (551)..(551): n is a, c, g, or t
  misc_feature (553)..(553): n is a, c, g, or t
  misc_feature (558)..(577): n is a, c, g, or t
aatattgtattagcttnnnnnnnnnnnnnnnnnnnnnnnnnnnnnnnnnnnnnnnnnnnaatgtctacgctnnnnnnnnnnnnnnnnnnnnnnnnnnnnnnnnnnnnnnnnnnnnnnnnnnnnnnnnnnnnnnnnnnnncgataggtatgtnnnnnnnnnnnnnnnnnnnnnnnnnnnnnnnnnnnnnnnnnnnnnnnnnnnnnnnnnnnnnnnnnnnnngtagtgtcaaannnnnnnnnnnnnnnnnnnnnnnnnnnnnnnnnnnnnnnnnnnnnnnnnnnnnnnnnnnnnnnnnnnnnatactcctacctnnnnnnnnnnnnnnnnnnnnnnnnnnnnnnnnnnnnnnnnnnnnnnnnnnnnnnntnnnnnnnnnnnnntttagctatannnnnnnnnnnnnnnnnnnnnnnnnnnnnnnnnnnnnnnnnnnnnnnnnnnnnnnnnnnnnnnnnnnnnnnnnnnnnnnnnnnnnnnnnnnnnnnnnnnnnnnnnnnnnnnnnnnnnnnnnnnnnnnnnnnnnnnnnnnnnnnnnnnncgactacaacananaactnnnnnnnnnnnnnnnnnnnnttctacaaactcttctaatcccaacattttcagcaaacgaagctatacctatttat

SEQ ID NO: 3226 - DNA, 650 bp, Cricetulus griseus
  misc_feature (1)..(22): n is a, c, g, or t
nnnnnnnnnnnnnnnnnnnnnngcaaaggacacagtcagtaagacaaaatgacagcccacagaattggaaaagatcttcaccaaccccacatctgacagagggctgatttccaaaatatacaataaactcaagaatctagccaccaaaacaccaatcaatgaaattaaaaagtggggcacagagcaattttttcttatgtttctcatttttcatttcactcattagattttgtatggaagaatgccaagtagggaagactgggggatctaccttgagggtgtcttttattgactcacaagcatgatgttttagggtttctgttgtgatgatgaaatactatgaccaaaggcatcttgggaaggaaatggcttattttaattacatttccacatcacacttcatcactgaaggaagtcaggacaggaactcaaacagcacaggaacctggaggcaggagctgatgcagaggccatggagagatgttgcttactgacttgttcctcattgcttgctcagcctgctttcttatagaacccaggaccactgaccctgatgtgttccctactcacaatgggctaggacctttccaaacaatcactaattaagaaaatgctctatgggcttgtctccatgtgtcccaatcttatgg

SEQ ID NO: 3227 - DNA, 650 bp, Cricetulus griseus
  misc_feature (1)..(20): n is a, c, g, or t
nnnnnnnnnnnnnnnnnnnnttgtgtctccaaacgctcgtcaaaatgaagattgaggaggtgaagagcaccacgaagacgcagcgcatcgcttcccacagccacgtgaaggggctggggctggacgagagcggcctggccaagcaagcggcttcagggctcgtgggccaggagaacgcgagagaggcatgtggagtcatagtagaattaatcaaaagcaagaaaatggctggaagagctgtcttgttggcagggcctcctggaactggcaagacggccttggctctggctattgctcaggagctgggcagtaaagtccctttctgcccgatggtgggtagtgaagtatactcaactgagatcaagaagacagaggtgctgatggagaacttccgcagggccattgggctacggataaaggagaccaaggaagtttatgaaggggaggtgacagagcttactccgtgtgagacagataaccccatgggtggttatggcaaaactatcagccatgtgatcatagggctcaaaactgccaaaggaaccaaacagctgaagctggaccccagtatttttgaaagtttgcagaaagagcgagtataggctggagatgtgatttacattgaagcaaacagaggagctgtggaaagg

SEQ ID NO: 3228 - DNA, 650 bp, Cricetulus griseus
  misc_feature (1)..(21): n is a, c, g, or t
nnnnnnnnnnnnnnnnnnnnnttcgtgagcgggctgatggggcttcgcggatgcctagggtggctctagagaaggagctagaagcgatcaaagcccgagtcagggagatggaggaagaggctgagaagctaaaggagctacaaaacgaggtagagaagcagatgaatatgagtccacccccaggcaatgctggcccagtgatcatgtctcttgaggagaagatggaggctgatgcccgttctatctacgttggcaatgtggactatggtgcaacagcagaagagctggaagctcactttcatggttgtggttcagtcaaccgtgtcactatactctgtgacaaatttagtggccatcctaaagggtttgcgtatatagagttctcagacaaagagtcagtgaggacttccctggccttagatgagtccctgtttagaggaagacaaatcaaggtgattcccaaacgaaccaacagaccaggcatcagtacaacagaccggggtttcccgcgtgcccgataccgtgcccggactaccaattacaacagctcccgatcgagattctacagcggttttaacagcaggccccggggtcgagtctacaggggccgggctagagcgacatcatggtattccccttactaaaaaaag

SEQ ID NO: 3229 - DNA, 650 bp, Cricetulus griseus
  misc_feature (1)..(22): n is a, c, g, or t
nnnnnnnnnnnnnnnnnnnnnnaaaaacggggagatgaatttctttggacatgacatttttctcattttcagattgctacacagtgagtgaaattacccagtcaaagccagccacctcttatctgatgcactggctggctcctagaaacttaatcatctccagcgtcacctttttaataataaaatatataatgccaatccatcttccagtcctgaaaacaggtgccctctacttgcaaaggactttcatgttatgcatggcatgggttagctgaagcgatcaccctgttaaccctcatgcaggcaacttgaacataaacgtttcatctcttcccccaaggagccttgcttgacagcagcaacatgagtagatttctacccagacatttcctggcagtctcttcactagcagagattgtaaaagcagtcgtgcataacgggaaagaaaaaatgactctataatctgaatcccttttaaaaactagtatataacaattttacacaatagtggggctccttatgacattttaagacatgtacataatgtatttcaattcttatattctgataagtatattggttgatgtttcataccatgtattttttcaaacaaacccttttatatttaatataaacgcgagtgcgtgtgt

SEQ ID NO: 3230 - DNA, 650 bp, Cricetulus griseus
  misc_feature (1)..(19): n is a, c, g, or t
nnnnnnnnnnnnnnnnnnngggaccagcaggagcttctaggaggcggattaagtcacaccctctatcactaagaataaagatgaaaacttagtactggaaccttgggagatacactgaaaccagaggaatcatactttgtaatctcttgtgaaagagcgtatgttgccaagactcacctaaagctctgagtaaacactatttgcactatagcacaacatgacgctaattctatattgtgcccatgattgtgttaagggttagactgtatctctagtgctgaccagggcagatcaattacttacctcttatggtaggaggacgtcatgagaaggctgcatgctgtcccagaacagatgttttaatctcctggtaaaatcaataacatcctgaggattcagctcgtggaacatgaaattgtgttaaaaacagacgaactgtggagctggggttaagagcactgactgttcttaccgaggactagtgttcaatacgtaacccccgatggcaatctataactccaattccaataatctgactcccttttctgacttctgggggaactgctgctcagggtgtaagaaaaacatctatgcacacgaaataaaaccaaggggaaaataggtaaataattaggggataaaatggctaa

SEQ ID NO: 3231 - DNA, 650 bp, Cricetulus griseus
  misc_feature (1)..(34): n is a, c, g, or t
nnnnnnnnnnnnnnnnnnnnnnnnnnnnnnnnnngttgcttcccgcctaccgcggtttcgtctcaaacctctccctgcgaggaggagggcctgccgacggccggtccctttgcaggtgaaggaagaaactcttaattctggaagtagcgactcaataccatggccagcctcctaaatgaagatccagaaagaagtcgaatcacatacgtgaaaggggatcttttcgcatgttccaaaacagactctctagcccattgtatcagtgaggactgtcgaatgggtgctgggatcgctgttcttttcaagaagaaatttggaggggtgcaggaactgttaaatcaacaaaagaagtctggagaagtggctgttctgaagagagatggacgatatatatattacttgattacaaagaaacgggcttcacacaagccaacatatgagaaccttcggaagagcttagaggctatgaagtcccattgtttgaagaatggagtcactgacctctccatgcccaggattggatgtggtctggatcgtctgcagtgggagaatgtgtctgtgatcattgaagaggtgtttgaggcaacagacatcaaaattaccgtgtatacactctgaacagatgaagaatttggatgagcccgtggctt

SEQ ID NO: 3232 - DNA, 650 bp, Cricetulus griseus
  misc_feature (1)..(21): n is a, c, g, or t
  misc_feature (368)..(387): n is a, c, g, or t
nnnnnnnnnnnnnnnnnnnnnttgttttcatatcagcatatctgtgctatgttagggtttttaaaaaaaaaacaaagctattcccctgctggtttttatggcagtaccttattttgacactagggggcaggagctctcctgctccaatcactcatgggaacatttttccaattgcagtgttatgttgtggtttcagtgtttatcagtagattgacctgtagtaagtggcagaataaaagcagaaatgtcccttttcagtgtgtgttaataatgttgcttgatagtagtcttcaaaaaatgccttcaacttttattatttctgaaaataatttgaaacttgatcatgaagctccagctaaaatccagannnnnnnnnnnnnnnnnnnnatttgtttgtttgaggtgggtgtggtggcttcacaccaataattcctacactcgtggaagcgggagagtcaggcatttggacccagcctgggttacacatttttttgtcacatgatttgtgatttgaccttggcagtttccttgatcttttaatgtaaaggtcttaaaacatcaaaatattttattggagtagtcctgttgactaagaaaataaaattcagccaggcatggaggcttgtttccataattttgtacctgggaag

SEQ ID NO: 3233 - DNA, 168 bp, Cricetulus griseus
  misc_feature (1)..(21): n is a, c, g, or t
nnnnnnnnnnnnnnnnnnnnnggggttggcgatctctggtcataacgacgaagcgctatgtgaacatgacttcgcagacgcagaagctggcttgccctgcactcattaaggtgctgcggcttgaggtgagacagccttgcgagccaccagcccaggaactctgtggcc

SEQ ID NO: 3234 - DNA, 650 bp, Cricetulus griseus
  misc_feature (1)..(20): n is a, c, g, or t
nnnnnnnnnnnnnnnnnnnnaaattttaattctgaagaaatcaaagataaaaaacatatttgaaagccacctattgattgctccttgccacccctttttctgcagcagcaaatacttgctatgctttttgtacctggaaagatgtttaaaataaggagttttgatgctagtggtatatatatgcttttgttgaaaacatgaaattctgtcttaagtgtatcaataacatctctaactttatttcatcatattacagtatatttttggatagatactaggtaataaggaatattgcaaggaaattatctacatgctaaaataaccacatttgccatttggtaacaataaatttgtttcaaatgccactttaaaaacaaatataattcttcctacacatttgtttatattcaatataatataatgtctgaccccagcactgtatgagccaagcacatgtttttgtcctgcctgcctttacacagcttgcccacctgtatataatagtagtacactattaaattagagcacatgcaggttcaaagagacacacagtgaactttaaagttcatcacgtcaggaccaataatcagtcatctaaaataatcctgccatatcatattttcaacatgatactacatacacctaataag

SEQ ID NO: 3235 - DNA, 650 bp, Cricetulus griseus
  misc_feature (1)..(41): n is a, c, g, or t
nnnnnnnnnnnnnnnnnnnnnnnnnnnnnnnnnnnnnnnnnagcaaatcttgaagactatacaccattgtagaacaaaggattgtgtgactctgttgaggtttacattcctcctttggtagcatgcagagtgccttcctgtatcaaaaatgctaacacatgatgtgaaggctctatgtagataccagttcaacatccacatgttcaatgagttgtataggtattgttttaagcaatggggccttggcatcagtttgtggagagcaaaacgtaggttatttgtgggttcctatgtggtccctttggccaataacttaatttagatgtaattcaatctttgtactggaagcttcatttgataactagagatggccaattgaggctctgtctctccattatttggtgatttcatttagatcatctttaggtatgtatatattttaggaagctactactatattacccattaaatggctctttattttagctctctcttcctatattcccttcattgttctctgtagcacaaattctaattgatcttaataataaaaaccctgagtcaaatataggggtaaatgctgaaagatcagagaagcagagcagccagagcagttgttacctctactgaatccttagacaaaagggcca

SEQ ID NO: 3236 - DNA, 650 bp, Cricetulus griseus
  misc_feature (1)..(21): n is a, c, g, or t
nnnnnnnnnnnnnnnnnnnnnaataaaaactgtcaaattcaatgtgcacttgctactgttacctttatcaactatttcatttttcctttttaaaagatgatattacttgtcctgcagtggacaatactgtacaaagaaaacatctgaggagagagattgtgtctgtaacattcctcatggcataattttctgaacttctggctgcaattaaagtactaatgggatgggcctttaggtttttgtttcacagtagagaaaatgcttgcattagataaagcagctaggatacaggtaagtcctacttgtatttgggttcaaagacagaagtgtgtgcatgctaggtacatctgacaacagaaatacagaataaaggacagtagatggttgtgcttcatttctgaactcttcagtgactgaaatttattagtatttacattatagctggctttccctagtgatcaaattcacttctcaagtttcttttgagtacaaacttgtttaaataacaggctattttattggtatatttctctgttctacctgttagccatgttctactaaataccagctttggcatcatcacttgaagaatcaggtgcctgtggtgcagagtacttttgcatgtttaatacccctaatttgttctgctg

SEQ ID NO: 3237 - DNA, 650 bp, Cricetulus griseus
  misc_feature (1)..(21): n is a, c, g, or t
  misc_feature (560)..(575): n is a, c, g, or t
nnnnnnnnnnnnnnnnnnnnnaagatgagctgtatttaaacctggtgctggagtatgtgcccgagacggtgtaccgggtggcccggcactttaccaaggccaagctgattatccctatcatctatgtcaaggtgtacatgtaccagctcttccggagcctggcctacatccactcccaaggtgtgtgtcaccgtgacatcaagccccagaatctgcttgtggaccccgacactgccgtcctcaagctctgcgatttcggcagtgcaaagcagttggttcggggggagcccaatgtttcctacatctgttctcggtactaccgtgccccagagctcatcttcggagccacagattacacctcatccatcgatgtgtggtcagctggctgtgtgctggctgagctgcttctcggccagcccatcttccctggggacagtggtgtggaccagcttgtggagatcatcaaggtactaggaacaccaacccgggaacagatccgagagatgaaccccaactacacagagttcaagttcccacagatcaaagctcatccctggacnnnnnnnnnnnnnnnncggacgccacctgaggccattgcgctgtgctcgagcctgctggagtacactccgtcctcaaggctctcccccctg

SEQ ID NO: 3238 - DNA, 650 bp, Cricetulus griseus
  misc_feature (1)..(29): n is a, c, g, or t
  misc_feature (531)..(555): n is a, c, g, or t
nnnnnnnnnnnnnnnnnnnnnnnnnnnnnagcgtctagattcggagtataaggaaggaggccagaggaattgggtccaagtgttctgtaacggggccgtgcccacggagctggccctgctatacatgatagaaaacggccccggggaaatgcccatagactttgccaagcagcccactgcttcctggatgtgtttgtctctcttggctgcactggcctgttctgctggtgatacctgggcttctgaggttggcccagtgctgagcaaaagctcaccttggctaataacaacctgggagaaagttccagttgggaccaatggaggagtcacagtggtgggactcgcctccagtctcctcggtggtacctttgtgggcctggcctacttcctcacacagttggtgtttgtgagtgacttagacatctctgctccgcagtggcccattattgcctttggaggtctggctgggttactaggatcagttgtggactcatacttaggggcaacaatgcagttttctggcctggatgnnnnnnnnnnnnnnnnnnnnnnnnncccagcccgagagaccaagcacatagcagggaagcccatcttggataacaatgccgtgaacctgttctcctctgttttggtcgccctcttgctcc

SEQ ID NO: 3239 - DNA, 650 bp, Cricetulus griseus
  misc_feature (1)..(21): n is a, c, g, or t
  misc_feature (433)..(453): n is a, c, g, or t
nnnnnnnnnnnnnnnnnnnnntggaaggatgctctatttctgagatgcgggaaggtcagctagttgcttctcaatctctctgagctaataggttttcaccccagcctctgactcatgaatcttattgataaatagaatgatagagatttaattaaaaactacttttggtggcaacagaggcaggagaattcatcaggacataaaaatcccaccaggccactgcctgaaaaaaacaggtcagaaactgtagagccacagttactggctgaaacagcagtagattcaggtgtagctgttgtgccattgtgctggtagaaaaacaacattttggtacccagtgtgaggtatcaaatgtaagaagtctttctttggcccaccagttcccgaataatgacacagagacttttttttttgttattggttggtttttgtnnnnnnnnnnnnnnnnnnnnnacagtcctggctgtcctggaattcactctgtagaacagtctcgccttgaactcacagaaatccacctgactatgcctccagaatgctgggactaaaggcatgtaccaccatcacctggtgagactttattatgaaagcttaggcttattcccaactagctattaaaacttaaattaacctgtgtatattaatctaca

SEQ ID NO: 3240 - DNA, 627 bp, Cricetulus griseus
  misc_feature (25)..(67): n is a, c, g, or t
agagagggaaagggaggggagggannnnnnnnnnnnnnnnnnnnnnnnnnnnnnnnnnnnnnnnnnnactgggagagatgacagaactggaaggcatggcgggggaaagatgtagaaacttagtgcagtggaaactccctggaatctatgagagggacaccaactgaaatctcctagtaatgggggatacagagcccaaactggcggcaattttacaactaggcaaggctcccagcagttggacagggacatcaacccagacagaaaaccttcgacttacaatctgtccctcctgcaagacatgctggggcaatggtgacagagaactgactaaacattaggcagagtcaggggaactgaagaggggaaggaaggattgtaggagccagagggtttaagaacactatgagaatgtgggccacagaatcaactaagctgggctgatatcatctcacaaggactgaagcaataaacagggaccctgtatgtatctgagctaggtcctccgcatacatgttatggttgtgtagactggtgttcttgtgggactcctaacaatgggagtggggggagcactatctctgactcctttgcctgcacatgaaaccctttttctcctactgggtt

SEQ ID NO: 3241 - DNA, 650 bp, Cricetulus griseus
  misc_feature (1)..(21): n is a, c, g, or t
  misc_feature (34)..(56): n is a, c, g, or t
  misc_feature (127)..(155): n is a, c, g, or t
  misc_feature (190)..(208): n is a, c, g, or t
  misc_feature (277)..(300): n is a, c, g, or t
  misc_feature (498)..(520): n is a, c, g, or t
nnnnnnnnnnnnnnnnnnnnngctgacattttgnnnnnnnnnnnnnnnnnnnnnnnccgatctcacctaatgtctacgcttctatgttgacaacgcttaatagtctatatagttatcataacagtgnnnnnnnnnnnnnnnnnnnnnnnnnnnnntatgcattcaaatcctatcggaattctggtgctannnnnnnnnnnnnnnnnnnaacgcgcgaccctacttgtagtagggtcatacacttacggatcagactatgtaaaagacctgaccctgnnnnnnnnnnnnnnnnnnnnnnnngatctctcatactactacctctaacctgattataatctaacaaagatgtatgaattactgtcacagcgcacagattgttagtcaatactgtagctatagcaactctatgacaaatgaacgaaacaggcataggactctaccagacattggatattgatccactatctacatcattaatcatattagatatctgactannnnnnnnnnnnnnnnnnnnnnngcaaaactatatttaaaaagaaaccgtctacaacaagaaacggtatacttctatactaattattgtacaaactcttgtaatccccacattttcagcatacgagcttatactatgttatatgctattcgaa

SEQ ID NO: 3242 - DNA, 389 bp, Cricetulus griseus
  misc_feature (1)..(21): n is a, c, g, or t
nnnnnnnnnnnnnnnnnnnnnaagatgagcggtatttaaacctggtgctggagtatgtgcccgagacggtgtacctggtgggccgacgctttaccaagggcaagctgattatccctatcatgtatgtcaaggtgaacatgtaccaactgtttcagagcctgggctacattcactcccaaggagtgtgtcacagtgacatccagccccataatatgcttgtggaccccaagactgacgtcctcaagctttgcgatttgtagcagtgcaaaactagtcggttgggtgggagcccaatggttcctacatatagtactaggtactaccgtggcccgaacaggtcatatttccgagccgaaggattacacactcatccagtctatgtgtggaca

SEQ ID NO: 3243 - DNA, 650 bp, Cricetulus griseus
  misc_feature (1)..(21): n is a, c, g, or t
  misc_feature (468)..(487): n is a, c, g, or t
nnnnnnnnnnnnnnnnnnnnnaccgggcgcggacggcgaaggcagccgggatgatggtccctcttcttcaatctcagcgctcaagcgtctggaacggagccagtggacagataagatggactttaggtttggttttgagaggctgaaagagcctggagaaaggactggctggctcatcaacatgcaccctactgagattttagatgaagacaaacgcttagtcagtgcagtggattactactttattcaagatgatggaagcagatttaaggtaagccctcgaccaagaaaactaaatcctacccatgaccagtaattgctctaaaatagggggtattcattcactttgtgtcagggaggaaatgggagggtgtaatgtgcaattgcttgcaacccatcaagagcatggctactatgaacttcatcagtcacatttaaaatatcccgagggaaggtggctcaggaggnnnnnnnnnnnnnnnnnnnntgttcttgcctgtgagagatgtgcagatctaaatttcatgtatgcagtatctttaaagagctgtcaaaggggctggagaaatggcccagtggctggtcttccaggggatgcaggttcaattcccagccacctacaaggcagctaacagctgtctgtaactgtt

SEQ ID NO: 3244 - DNA, 651 bp, Cricetulus griseus
  misc_feature (22)..(102): n is a, c, g, or t
ttgaacccatctgtgcgaaatnnnnnnnnnnnnnnnnnnnnnnnnnnnnnnnnnnnnnnnnnnnnnnnnnnnnnnnnnnnnnnnnnnnnnnnnnnnnnnnnngccaaaaagaagcaggctgcaccactggagaatggtgcgacagaggaggaggaacccatcccgcccatgtccagttactgccttctggctgagaattcctacgttaaagtgacatacgacatccaagccagcctacagaaggacagccaagtgactgtgtcagtcatcctggagaacaagagcaacagcttcctgaaaaacatggagctgaacgtgctggactcgctcaacaccaagatggccaggccagagggctcatcagtgcatgacggtgtgcctgtgcctttccagctaccccctggtgtctccaatgaggcccagtttgtgttcaccattcagagcattgtcatggcccagaagctcaaaggcacactgtccttcattgccaaggacgacgatggggccacccacgagaagttggacttccggctgcactttagctgtagttcctacctgatcaccactccctgctacagtgatgcctttgccaagttgctggagtcaggagacctgagcatgaactctatcaaagtcgacggcattagtatt

SEQ ID NO: 3245 - DNA, 261 bp, Cricetulus griseus
  misc_feature (1)..(21): n is a, c, g, or t
  misc_feature (28)..(46): n is a, c, g, or t
  misc_feature (133)..(150): n is a, c, g, or t
nnnnnnnnnnnnnnnnnnnnntaacttnnnnnnnnnnnnnnnnnnnaactgtgctatctttgatctcacctaatgtctacgcttctatgtttaaaaagtataatactctctatatttattatagcagcaatcnnnnnnnnnnnnnnnnnnattattagtatgtattcaaatactatatacattctcgtgtttgcaacatgcgacgccgaattaggcttagccctactagtagtaacgacaaacactcacagaacatactat

SEQ ID NO: 3246 - DNA, 650 bp, Cricetulus griseus
  misc_feature (1)..(20): n is a, c, g, or t
nnnnnnnnnnnnnnnnnnnntcacactgtgctgtattgctgctgaactaaatgcactttccccatatgtggggcactggcttcaaacaattcagttcagtaccattatttttcaatctcatgtttccttcgttagtaggtggtatagtacagttatgggaaaatggcgcattgcattgacacattggtagttccatggaagttatgtaggatgtgcatgtactatttgataatattttcttttgctttactgcctttacaaacagcaaaagtgtaaatttgtgccccttacatagtactcttatttttggtagtgttggtctaggtcacttacttattgaggagaccccacagagcaagtgcatcctagatatcaccctaaaacataccttccacatgatgaacaactattatatataattaaatattgctgcttatttttctgttggcctccccccagtttttgggcattttgttctaaacaactattttttacaattaaaagtgtaatatcaagataaaaatctggacttttgcttttcctggcactcaaactcaagactgggtttgaggagcaaatctgggttcataactgacaaatttgaaggagcacgtaagaaatggaaggcaggtaaagatttaaaccctaca

SEQ ID NO: 3247 - DNA, 650 bp, Cricetulus griseus
  misc_feature (1)..(21): n is a, c, g, or t
nnnnnnnnnnnnnnnnnnnnncattgtgtctgtgtcacagcttcccttcaggccactagagatgtatatttggatgccggtgagctgaggaggagacccccaagaaagggcggtcctcgagccttgtatgtacccatggaggggagtgactttgtgagggtcagcaatgtttactcatgcacaccctcctttcttgtgatattgacagccatcttccttgagtgaggtgtaaagccctcttaagatttttcagtaccccactcccaaagaatgtttaatatgtaaaaacattgcttgaaaagttgtctaccagtgaatttggggatgatctagggccagtaccacagctcctgcacagacaaccaagtcctctggcttaggagagtacaagagagtagccaaaagagtatagtacccaaggctcttacccttatcttggccagtgtctgggcagagcccagtcagtgcatactttcccctataattcttaggttacaaacttgagtttcagggaatttcagtcagcaaccggtagagtgaataaatacttggttaccagcctaataatgtgaactgctacacttatttttattctttaagaacacaaagactttatgcagatactttaactataaattaatgtaaaatgg

SEQ ID NO: 3248 - DNA, 650 bp, Cricetulus griseus
  misc_feature (1)..(22): n is a, c, g, or t
nnnnnnnnnnnnnnnnnnnnnngggcacctgaccgcccgctcacttgcagcccttcggcaacataggggcagcccatgcatgtcagcctgtatcacagaaggaaaagcgccaggtgcctgtgtctgcgccgatctgaagagctgtgcatgcagtatagcaggccaaggtctgagccacagcagcatttttatttgagattttgataactgtttatatgtgttgaaaaccaaaatgacatctttttaaagcttgtccataagtaaacatagatgtcttttatagtggaaaaaacacgtggggaaaaaaatcatctattttgatgcagcgtttgataaatgataaaacacccgacacctcactctttatactgcacagaatgaatgaggaggtctgggctggggagacgaaggtcaatgctgtttttgttttcttttaggatcattcccttttaccagcttttaaccgtctgatacccatagcaggcaaactctcctagttaacatagttaagttcagcacttgtctcgtttaatgtcaaggtttgcattttctacgggcagtctccttcctcacaaacccactgtgcaggtgctattgttgctcttagaaatattttcagaaatgttatcttctaagtgaaatttctagcc

SEQ ID NO: 3249 - DNA, 559 bp, Cricetulus griseus
  misc_feature (1)..(21): n is a, c, g, or t
nnnnnnnnnnnnnnnnnnnnntagcagacctaagctctcacagaggagtcagccctcagatcttgtttttgctcaactgagaggaatccatgaggtgctatctggcaggattaagtggattctattgctttggttctcctttccctgaggacctgatatttttttatgtcctcctagattttcttggtttgggtatgttgaggtttgttgagaaggaggttgaagcaaagttccaggagcgaaattacagtgtgttaagagtgtggggaaaattagttttatttttccctacatgggatacaacactgtgaaattcagtcttcaacagaaaggccctgcagttctcctaaaacatagttcttatttctttctttaacaaagtttaagctagtgttaataaattaaaagagaaattgcttgtctctccacctcagctttgttttatgcccgtttcatatcgttgtctgtgctgtaattcatacttttgataccatttctgatgtgtaaagtcggctgtcttgtaaatatcttataaagagttcaattgtaaataaactat

SEQ ID NO: 3250 - DNA, 650 bp, Cricetulus griseus
  misc_feature (1)..(21): n is a, c, g, or t
  misc_feature (421)..(440): n is a, c, g, or t
nnnnnnnnnnnnnnnnnnnnntcactaggtagaacaggctgttatattcttaacaacttatatgcttttattggttacaaaaatagagggaaagggcctgatgcattagacttaccggacggtatgaatggttcccaaggcagttgtctaagatgaaagtacaagtgaacccaagtcttgtcgttacccctgttaattttgtgtgtgtcatttgctgtatgaaagggatataatgtgtacttaggagtagttcctactttgtagtattttttatttgggtcaaaataagcttcagtgttcataaatatctgctcaaaattgttactttaatttcaggtttttttgtatgtaaattgccttaaattgatgctccctttcaagtgtactcatttgttctatttagacaatttagttgaacttnnnnnnnnnnnnnnnnnnnnaagggtcgaacccttgatataagaaagtggccaaaggacaagttttatggcttgtgggaaatggttgaaactttaactctttctcttacggattatatgccattattaggacatgtcccatatacgcggatgtttaagtttaactcatactcacaagcgatcacaaaaagcatattaaaataacgtggatggagctcttcgtggggaggg

SEQ ID NO: 3251 - DNA, 651 bp, Cricetulus griseus
  misc_feature (25)..(84): n is a, c, g, or t
tactgtgtgaaactgtatccgctcnnnnnnnnnnnnnnnnnnnnnnnnnnnnnnnnnnnnnnnnnnnnnnnnnnnnnnnnnnnntccgaagaaacatgaggggtttttaaacctggtgctggagtatgtgccctaaaccgtgtacctggcggcccgagactctaccaacggcaagctgattatccctatcatgtatgacaaggtgaacatgtaccaactctttcggagccttgcctacattcactaccaaggagtgagaaacagttacattaagacccacaaactgctagagtaccccaacactcccgacctactagctatgcccattgtatcagtgaaaaacagcttggactcggggcggagccccaacggtttccttacatacaattaatctggaactaaccgtgcacgccacattgttatactttaggaaacaccaagacttagcacaatcatgcctatccattgtagacgagacaacgtgggcatgactgttctaggtaagcagcatgccctaattgaaccaggccctaatatctcacctggcaccactatggacgaaggtctcagcattgatccgcaatagggtcatggttgtcccgcatgctccaacccacaggtaacacgatcgcgattgtataaatccccacc

SEQ ID NO: 3252 - DNA, 440 bp, Cricetulus griseus
  misc_feature (1)..(18): n is a, c, g, or t
nnnnnnnnnnnnnnnnnntatgcttctgtggtctttgatagagttgaagacagatagttatggttataattttcttcacttattataaaaaataagttacccttctttttatttagacaaaaaagagagatgatgggggaaatacttctgtgtatgtttataaataaagtgcttgcttggccaatgagacagcaggttaggctggactaggagtcaaagaggattctgggaaatgtagtagagaagtgatgttccagacaggaagtgacatagcaaggagactcatatttaagaagaggaaaaaggaaatgttgctctctttcccctcggctcctgctccagcgggaagatgtgatccaccagctaggagggacgccaataaggcgtgcgataagataaggcttataaaatatatagatgtatgatgatggatactgagc

SEQ ID NO: 3253 - DNA, 307 bp, Cricetulus griseus
tcccaaccatctacaatgacatcttctggcctgcaggggtacatgtacgcgaaacaccatacacataattcataaatctttttaaaaaatttagtctgggaatagagacctgtaatcccaaatacatggaaggctgaggggggggggggtcaattttaagggcatcctgaacaactcacttggggttctgtgtcacaaattaaaaaggagtactcacagggctggagatgtgatgtaactctgggagggcagtggcttaacatttgaggagcgctaatcacgcccttagtaagccctaaaacacttg

SEQ ID NO: 3254 - DNA, 261 bp, Cricetulus griseus
  misc_feature (120)..(120): n is a, c, g, or t
  misc_feature (207)..(248): n is a, c, g, or t
aagctgaagcagttccatgcctatcccaagactctggaggacttccgggttaaaacctgcgggggcgccaccgtgaccatagtcagtgggcttctcatgctcctgctgttcctttcccanttgcagtattatctcaccacccagggcatcctgagctctacctggacaactctcggggagataaactgaagatcaacatcgatgttnnnnnnnnnnnnnnnnnnnnnnnnnnnnnnnnnnnnnnnnnnatggatgggggcc

SEQ ID NO: 3255 - DNA, 131 bp, Cricetulus griseus
  misc_feature (17)..(17): n is a, c, g, or t
gtactccaattattcantcaaatcggaccctgtaaaagctgtaaaatgataacagagcaacccgatagcagaaggggcaactcttctgttggattttctgtgttgcagcatacaagcaatgatccatattg

SEQ ID NO: 3256 - DNA, 241 bp, Cricetulus griseus
  misc_feature (16)..(16): n is a, c, g, or t
  misc_feature (28)..(28): n is a, c, g, or t
  misc_feature (204)..(204): n is a, c, g, or t
tcaactgtgctccaanccagccccccanccctatacctttccaacatccctcagcaccatcaactttgatgaggttccccccatggggtgaccatcggggcagatctcaaaccagccttgggctcgcaccatcctggcccaaaccttgggccctccttgcctggggccagctctgggtcaacccccaacccctgtgctcattgnctagcgcccaggggccctcccccaagcgcctggggcc

SEQ ID NO: 3257 - DNA, 240 bp, Cricetulus griseus
  misc_feature (4)..(4): n is a, c, g, or t
ggantgaatattgagtttgaagcttattccatctcagataataattatggcggaatcaagaagttactgcgacagcttttcctaaaagctcctgtgaacacctgggagaggtaacagatctcttgattcaacagatccctatttgggagtggtgattaagccaacggatatttcataagaccgcgatgatgaagtatatgaacatgagatcttccgcttcataagcctcttaaatttaac

SEQ ID NO: 3258 - DNA, 218 bp, Cricetulus griseus
  misc_feature (140)..(140): n is a, c, g, or t
  misc_feature (174)..(191): n is a, c, g, or t
tgtaatctcacatacctgcacagctacctgacctacatcaagctgtcaacagccatcaggcggaatgagagcatggctaaaggcctgcacagggccctgctgcagcaacaaccagaagatgacatcaaacgttctcccangcctgagggcctgatccggctctatgatatcatnnnnnnnnnnnnnnnnnnactgctgcagcttcctggcttagaaga

SEQ ID NO: 3259 - DNA, 442 bp, Cricetulus griseus
  misc_feature (115)..(115): n is a, c, g, or t
  misc_feature (118)..(118): n is a, c, g, or t
  misc_feature (161)..(161): n is a, c, g, or t
  misc_feature (173)..(173): n is a, c, g, or t
  misc_feature (431)..(431): n is a, c, g, or t
tggggtgcaagcatatattataaaataatcacctcaaaggatatttaagatatccatcattttatacatttaccaacccccacctgtagggagacactgtacccccccctcctantancttggacaggggtgctgggacatgcccgtgagggcgtgggcanggaaagtctaanctgacatgggaaccattcttaagggaccacacacacacacgtgaatagcccttctttctggcccctctctctgggctggctgccttgctgcccctggcatgctctggcttgcgtttgggatgatgtttatctgaataaagaaaccttacccttacggactgcagatcgatctcatcacccaccccatgccttcttcgtctcaacctaatgaatacataaagtaacttaagttactgacaatatggggtcaatccctanagctcatataa

SEQ ID NO: 3260 - DNA, 104 bp, Cricetulus griseus
ccatgttcccatggccagtctccacatggacacaggaaggcttgcacaggtgtttctaagggtgctggggggcatcctggagaaccaatgagccatgtgcctgt

SEQ ID NO: 3261 - DNA, 479 bp, Cricetulus griseus
  misc_feature (18)..(34): n is a, c, g, or t
  misc_feature (36)..(60): n is a, c, g, or t
  misc_feature (97)..(143): n is a, c, g, or t
  misc_feature (171)..(195): n is a, c, g, or t
  misc_feature (199)..(223): n is a, c, g, or t
  misc_feature (255)..(278): n is a, c, g, or t
  misc_feature (281)..(299): n is a, c, g, or t
  misc_feature (321)..(368): n is a, c, g, or t
  misc_feature (370)..(386): n is a, c, g, or t
  misc_feature (401)..(421): n is a, c, g, or t
  misc_feature (423)..(435): n is a, c, g, or t
tacaattgtattaacttnnnnnnnnnnnnnnnnnannnnnnnnnnnnnnnnnnnnnnnnnaatgtctacgcttctatgtgtgagaagggataatacnnnnnnnnnnnnnnnnnnnnnnnnnnnnnnnnnnnnnnnnnnnnnnnaataggtatgtattcaaatcctatcggnnnnnnnnnnnnnnnnnnnnnnnnnaccnnnnnnnnnnnnnnnnnnnnnnnnntagtgtcaaacacttacgggacagactatggnnnnnnnnnnnnnnnnnnnnnnnnggnnnnnnnnnnnnnnnnnnngtcatactcctacctctaaccnnnnnnnnnnnnnnnnnnnnnnnnnnnnnnnnnnnnnnnnnnnnnnnntnnnnnnnnnnnnnnnnnactatagccactttnnnnnnnnnnnnnnnnnnnnngnnnnnnnnnnnnncgacattttatatgggtccactatcttcatgatgaattatatta

SEQ ID NO: 3262 - DNA, 443 bp, Cricetulus griseus
  misc_feature (36)..(36): n is a, c, g, or t
  misc_feature (39)..(57): n is a, c, g, or t
  misc_feature (203)..(203): n is a, c, g, or t
  misc_feature (228)..(228): n is a, c, g, or t
cgcgcgtgataccactcactataggggcgaattggnggnnnnnnnnnnnnnnnnnnntccaccccacgcgtcccgggggtgtctcttaaacgtgggtgggaccctgactgccccgcgggagaaaattacaaaagaaatggatgactttctacaaaaattgaggcggaagaccaaaattggagtggtaggtgggtcaaattttnaaaaattgcaaaggaacggggaatngatgtggttcataaataccattatctatttccaataatggcttggtggcatacaaagatgggaagcttttgtgtaagcagattattcaaggtcatctggggaggcagtgatccaagacctgatcaactactgtctgagctacattggcaaaaattaaactccctaagaaaaggggaactttcattgaattccgaaatgggatggtgaatgtgtcc

SEQ ID NO: 3263 - DNA, 235 bp, Cricetulus griseus
  misc_feature (6)..(78): n is a, c, g, or t
atactnnnnnnnnnnnnnnnnnnnnnnnnnnnnnnnnnnnnnnnnnnnnnnnnnnnnnnnnnnnnnnnnnnnnnnnnnacccctccgcggggtgtctataaaacgtggatgggaccctgactgccccgcggcgataaaattacaaaagaaatggatgactttctacaaaaattgaggcgacggaccaaaattggagtggtacgggggtcatattttcaaaaattacaatatcggc

SEQ ID NO: 3264 - DNA, 419 bp, Cricetulus griseus
  misc_feature (34)..(34): n is a, c, g, or t
  misc_feature (42)..(42): n is a, c, g, or t
  misc_feature (65)..(104): n is a, c, g, or t
  misc_feature (211)..(211): n is a, c, g, or t
  misc_feature (237)..(237): n is a, c, g, or t
  misc_feature (243)..(243): n is a, c, g, or t
caacatactggcacagtgttagtcgcgcgtcatnacgcactncactataggggcgaattgggctnnnnnnnnnnnnnnnnnnnnnnnnnnnnnnnnnnnnnnnngatgtcacaaaggatgaattcaaaagactgtttgctaaataccgagagcccggagaagtttttatcaacaaaggcaaagggttcgggttcattaaacttgaatctanggccttggctgaaatagcgaaagccnaccttnatgacgcccgcatgagagtatacagcttcgggttcgctttgccacacatgctgcaaccctttctgttcggaatctgtcaccctatgtttctaacgaactgttggaagatgcctttagccaatttggtcctattgaaagggctgttgtaattgtgggatgatcgtggcaaatctaca

SEQ ID NO: 3265 - DNA, 160 bp, Cricetulus griseus
  misc_feature (97)..(97): n is a, c, g, or t
  misc_feature (145)..(145): n is a, c, g, or t
aaaatcactcatagaatgatggaaaaggcatgccattgggaggattggggtataagatcagagaactgaacacctgacattgctgtgcaaggtccantttcaaatttcaacaatatataagaaacaataaagataaatgccatanggaagaatcttattt

SEQ ID NO: 3266 - DNA, 406 bp, Cricetulus griseus
  misc_feature (83)..(123): n is a, c, g, or t
  misc_feature (220)..(254): n is a, c, g, or t
  misc_feature (256)..(282): n is a, c, g, or t
  misc_feature (295)..(347): n is a, c, g, or t
  misc_feature (350)..(366): n is a, c, g, or t
  misc_feature (373)..(385): n is a, c, g, or t
  misc_feature (387)..(401): n is a, c, g, or t
actttaatcacttctcgggactgggctatttcaatctcacctaatgtctacccttctatgttttagaagggtaatactctccnnnnnnnnnnnnnnnnnnnnnnnnnnnnnnnnnnnnnnnnncataggggtgtattcaaatcctatccgattctggtgtgtgcagcatgcgaagccccactaagcttggccctacttgtattagtgtgaaacacttacnnnnnnnnnnnnnnnnnnnnnnnnnnnnnnnnnnncnnnnnnnnnnnnnnnnnnnnnnnnnnnatactcctacctnnnnnnnnnnnnnnnnnnnnnnnnnnnnnnnnnnnnnnnnnnnnnnnnnnnnnctnnnnnnnnnnnnnnnnngctatannnnnnnnnnnnncnnnnnnnnnnnnnnnggata

SEQ ID NO: 3267 - DNA, 303 bp, Cricetulus griseus
  misc_feature (268)..(268): n is a, c, g, or t
cgcatgacttatataaaccttatttctgggatatgcaaattcattcttttctgattcttgagggactgtgcaagactgtgatttcactatggggagtttaaagtacagtgtaagaatcaaaactaagccatgggaagaagatagggttgtgcttcaggaagataattgccccactctttaagaatgtggacttgaactcaattctgctttcagatatttaaatatgaaataaaaatccatacatttactctgtggatttctgggctanataacatgggaaggaaggatggaacataaacaaaa

SEQ ID NO: 3268 - DNA, 215 bp, Cricetulus griseus
ccaattcattgctcaacaatgtgctgaaaagactccagctcctgcccttctcatggggtttgcttagtgtacacttttattttaaaaaacattctatttctaatgggtgtgcacgcatgcactcacgtcattgcgtgataaggccaaatgtgttcgatcaacagctggagttacattctccatccacctgacatgggtgcggggaacagaactca

SEQ ID NO: 3269 - DNA, 365 bp, Cricetulus griseus
  misc_feature (6)..(40): n is a, c, g, or t
  misc_feature (68)..(127): n is a, c, g, or t
  misc_feature (187)..(206): n is a, c, g, or t
  misc_feature (208)..(228): n is a, c, g, or t
  misc_feature (242)..(299): n is a, c, g, or t
  misc_feature (344)..(365): n is a, c, g, or t
tcccannnnnnnnnnnnnnnnnnnnnnnnnnnnnnnnnnngcgagatgggaattacgggtgactaatnnnnnnnnnnnnnnnnnnnnnnnnnnnnnnnnnnnnnnnnnnnnnnnnnnnnnnnnnnnngaccaagagttgattaccgttcatacactataggagaaacttgaaacgtgggtattgtgnnnnnnnnnnnnnnnnnnnngnnnnnnnnnnnnnnnnnnnnnctaccatgaggggnnnnnnnnnnnnnnnnnnnnnnnnnnnnnnnnnnnnnnnnnnnnnnnnnnnnnnnnnnggggaccactctagtagaatgaatctgacgcggattctctgtaannnnnnnnnnnnnnnnnnnnnn

SEQ ID NO: 3270 - DNA, 365 bp, Cricetulus griseus
  misc_feature (14)..(14): n is a, c, g, or t
  misc_feature (122)..(122): n is a, c, g, or t
taaaactgggctanctgggactgtgttctaaaaccctgtcctcacaaaaagagataatttcaaatgactcgggtcacattctattcacattactcattaaatggacaggattcctgatagancatacttttcaagaaacattatgactcaagcatattaaaaattagggttcacttaaatataatactgagctataatggaagagtgaacaattcatggaaatattgatcttactaagttagtttcaagtaccagaatttagcaaatttatatcttttcacataccaaggatttatgaaagagcaaaggcctaacaattataaaaagagttgagggacaggaactctttgaatttcttctctctg

SEQ ID NO: 3271 - DNA, 342 bp, Cricetulus griseus
  misc_feature (7)..(46): n is a, c, g, or t
  misc_feature (81)..(133): n is a, c, g, or t
  misc_feature (140)..(160): n is a, c, g, or t
  misc_feature (219)..(240): n is a, c, g, or t
  misc_feature (250)..(271): n is a, c, g, or t
  misc_feature (273)..(287): n is a, c, g, or t
cttaccnnnnnnnnnnnnnnnnnnnnnnnnnnnnnnnnnnnnnnnnaatgtctacccttctatgtttaaaacggataatannnnnnnnnnnnnnnnnnnnnnnnnnnnnnnnnnnnnnnnnnnnnnnnnnnnngtatgtnnnnnnnnnnnnnnnnnnnnntggggcttgcagcatgcgaagccacactgagcttggccctacttgtactactggcaaannnnnnnnnnnnnnnnnnnnnnaaaaacccgnnnnnnnnnnnnnnnnnnnnnncnnnnnnnnnnnnnnnatactcctacctgtaacctgagtatcatccaacaaaaatgcgtgaattaatggca

SEQ ID NO: 3272 - DNA, 439 bp, Cricetulus griseus
  misc_feature (15)..(15): n is a, c, g, or t
  misc_feature (126)..(126): n is a, c, g, or t
aaattttcttttaancctgtgaggggaatattgcacagtatcccttctaattccattgctgagcatttagtatccttgccttaccgagttcaaaggggatgggaaagtaaagtgtctttttcttantgcattttcagttatggggatgtgaatatagacagagggctctgcaccaactaatggagacttgacttccgtggagaggtagctgtaatattgggtttcactagataaactacaacatttctttggtacagtttgtaaagtagttttgcacacattcaactcttgattggggtgaaaatcctttcagtcaagtaattagatacataggcaggcgtattcttacagcacatgagagaactgagactcaaacatgaaatggggcaaactagctgggaagttgcagagctaaagcaatccacacatctttcatgcc

SEQ ID NO: 3273 - DNA, 227 bp, Cricetulus griseus
gccaagaaatgagactggcttatgaagaaatgactttgttaagatggaagtggccctatagctgatctgtccgtctggatgaatgggggtcatcctgttgggagtgcagataatggggtttgtcaagccaagtgtcagttggtttagatggggaaagggggatcagaaaagggacttgccttttggatccaggataaaacaacagaggagtgaaacaaatcctgtgt

SEQ ID NO: 3274 - DNA, 343 bp, Cricetulus griseus
  misc_feature (122)..(122): n is a, c, g, or t
  misc_feature (297)..(297): n is a, c, g, or t
atcactttttcaaagggggaagatacaagttttaaccacagtggaacagtttcctaaaaaaaaagaaaaaacaagaacgtaaacctgggagctatagaatacactatgggcatttataatanctattttatatattgtagtgttggaacagttttaaattaaatgtgttacattcacaagtggtggggcgtgttgtgattaaggtgtgtgtgatttactccaaggggggcgtcttgacgggactgggtttgtgtaacaacggaaaaaaatgcgatgcgtatgtgtgaaaccttgcanaagggctcattctaccacatggtaaccctctagctgatgacacata

SEQ ID NO: 3275 - DNA, 344 bp, Cricetulus griseus
  misc_feature (16)..(57): n is a, c, g, or t
  misc_feature (86)..(144): n is a, c, g, or t
  misc_feature (161)..(173): n is a, c, g, or t
  misc_feature (175)..(190): n is a, c, g, or t
  misc_feature (228)..(264): n is a, c, g, or t
  misc_feature (266)..(297): n is a, c, g, or t
atattgtataaacttnnnnnnnnnnnnnnnnnnnnnnnnnnnnnnnnnnnnnnnnnnaatgtctacccttctatgtttaaaagggnnnnnnnnnnnnnnnnnnnnnnnnnnnnnnnnnnnnnnnnnnnnnnnnnnnnnnnnnnntatgtattcaaatcctnnnnnnnnnnnnngnnnnnnnnnnnnnnnnaccacaatagcttggccctacttgtactactgtcaaannnnnnnnnnnnnnnnnnnnnnnnnnnnnnnnnnnnngnnnnnnnnnnnnnnnnnnnnnnnnnnnnnnnnatactcctacctctaacctgattatcatctaacaaaaatctatgaat

SEQ ID NO: 3276 - DNA, 344 bp, Cricetulus griseus
gtcccctaatgcgcatcttcatggcacagttaattagacccaaccccagctgcactgaatggatcaggtcctctggcttcctgtagttaaatcttaccatggggtgatagcaaacctgtactctaaagcctgtcacttttgtagatggtggggggtttatactggcttttgtagctacaaaaagcatcaaagactttatatatttaagccaaaagcaatgggtatttcctgatgagatcctaaatgtatggaaaacatgggggctgtaaagggataatgcatttgctgtgtgtttataactcgagggctataatatatatttcaatatcacatattctgtacta

SEQ ID NO: 3277 - DNA, 288 bp, Cricetulus griseus
  misc_feature (27)..(27): n is a, c, g, or t
  misc_feature (164)..(164): n is a, c, g, or t
  misc_feature (185)..(185): n is a, c, g, or t
cgacccagggcggggcggccgcgcgtncgtggttaagggacatgaagatcaagtccctggaggagatctacctgttctccctgcccattaagggaatccgagattattgatttcttcctgggcgcatccctaagggtgaggggctaaagatcatgccactgcanaagggggcgggggctggccancggaccaggggcaagggttttgtcgctattggggactacaacgggcatgtggggcttggggtgaagggctccaaggaggtggccactgcgcatccgagggggc

SEQ ID NO: 3278 - DNA, 410 bp, Cricetulus griseus
  misc_feature (106)..(132): n is a, c, g, or t
  misc_feature (173)..(196): n is a, c, g, or t
taagctaacaaaatggtacgtcacctattataggaagaatggggaaattgccacgatcatactctaataatcgggtttcttattagctcattgagtctatatatgnnnnnnnnnnnnnnnnnnnnnnnnnnnacctctgcaagtacaatagatgctcaagaagtagaaaccannnnnnnnnnnnnnnnnnnnnnnnttgcttattggaatggggcttccatctctacgaattgtatatataataggtgaagtcagtaacccaattatgacaggtaaaactatggggccatcaatgatactgggggtatgagtacacagactacgaagacctatgcgtgggctgatatatgattccaaccaatgaccttaaaccgggaggtgtacgatgactcgaagtggagaatcggata

SEQ ID NO: 3279 - DNA, 382 bp, Cricetulus griseus
  misc_feature (86)..(86): n is a, c, g, or t
aaattttaatactagtgtgcaggctttaatgctacttttccaagtcatgaattctcaacagacaatatctgatcggtattatacancactatacagaaaagtgttggatccacgggtgatggcatgttccaagcaagccatgtttcttaaccttgggtacgagggtctgaaaacagacgtcctgttgctcccggtgaacgcctttgtgaagaggggacttcacggtacttgcacacagatgccggcattcatgtggggagcgttgtatcttgtgtgggaaatccttaaagcaaaaccagatttaagaagccaactagatgatcatgccggaatctgatgaagaaaactgtggtgacgtcagagatgacagtgacgtagaaga

SEQ ID NO: 3280 - DNA, 121 bp, Cricetulus griseus
aagaatcaaagcgttttaatttaagggcccattcggcaaggcgaaattcctttaaaaagcgaaataaagaaagacaaagtgccaaatcaaatactcctgcaagtgatagactaactgatga

SEQ ID NO: 3281 - DNA, 302 bp, Cricetulus griseus
  misc_feature (34)..(65): n is a, c, g, or t
  misc_feature (67)..(80): n is a, c, g, or t
  misc_feature (109)..(152): n is a, c, g, or t
  misc_feature (241)..(264): n is a, c, g, or t
  misc_feature (267)..(302): n is a, c, g, or t
gggggtccgggctccttcaagtatgcctggggcnnnnnnnnnnnnnnnnnnnnnnnnnnnnnnnngnnnnnnnnnnnnnnctccctggggaaatttgagaccagcaaannnnnnnnnnnnnnnnnnnnnnnnnnnnnnnnnnnnnnnnnnnngggaacatgattactgggacttctcaagctgactgtgctgtcctaattgttgctgctggggttggggaatttgaggctgggatctccannnnnnnnnnnnnnnnnnnnnnnnccnnnnnnnnnnnnnnnnnnnnnnnnnnnnnnnnnnnn

SEQ ID NO: 3282 - DNA, 401 bp, Cricetulus griseus
  misc_feature (116)..(116): n is a, c, g, or t
tctgttgttaaactcagtagggttacttgcatttgtagttcattccttccaccagtctctcgtggttctagtttttaactaaactgcattctatcaagttgaatttcctcvcttancatttatttctggtgggtcttacttaaggaaaatttttagtgtgaacactgaggagcagctcagatgggtaccagactctcttttgaacctttaaagcaaagggtgcagaggtgaggctagaaaaatacttattctccaactctgatgagcccctcgtgtttccagcccatagtttattatagcatcagcgaactggggccataagcaaaatttcttagctgtgcctcatgcagattatgctgacgggcgatggcttgaggcattgctcacggtaaaacactgag

SEQ ID NO: 3283 - DNA, 2580 bp, Mesocricetus auratus
  misc_feature (857)..(877): n is a, c, g, or t
ccaggaggatccctcaggagaacatgtgaagaagcagggctgtcccaggcctggggtgataagacactctacagaccttctcggggacatctagactgtgagctggcccctgctgcccggtgtgtgtggctggggctgtgtggcgggtgagcatcctggctgctgacggtgcagcctccctcctgagctgagcgtaggcattttgggaaatcccttaatacctctattctgtgcaggcgtatataaggaggaccagaacactagctctccactgcactgcccagaggcccttgcctgactcactgccagccttcggtccctgcgttgccaagaagaacatggacgtcaccatccagcacccttggttcaagcgtgccctggggcccttctaccccagccgactgttcgaccagtttttcggcgagggcctttttgaatacgacctgctgcccttcctgtcttccaccatcagtccctactaccgccagtccctcttccgaacggtgctggactctggaatctctgaggtaagatggcttgtctagaggacagctagggatccactgctgccctgtgctctcctctagaaacgtccctgactctcccagcctcgcagcctgcagaggctgggtgggagcccacgtgcttagctgcccaaacctccacatggctgggaacggggtcggagggggcgacctgccgagcccgaccgctgccttttcctcccatcagctcatgacccatatgtggtttgtaatgcaccaaccacatgctggaaaccccaagaacaaccccatcaaggcaagttacatggcaaaggcaagcgtcctgagctggccgctccctggactttctcnnnnnnnnnnnnnnnnnnnnntgtgggggtgggatgttctgccctgatgcacagagaggaggtcctttcttatagcagagcaggtgctttctgtagctggcaaagctgcggatggggctcccttctagcttccccaatggtcaaagaaaggccacaaggctatgtctctctctacccaagggacccacagttctggaagagttaagcctccctttactttaaaagaaggcttccagagcaggtccagccgcaggcctaggaagccaaatgcccaaatgcaggctctagttatggtagagggaggagagcgcaaaggactttgtgctagcagccaggggtgctgtgactgcttttgtagtgtcacatggccggtgaggtgggctcctgggactgtggctatatcgcatactttagtcctaccagctagccagttcccaactagtcaggcaaaaaaatccccaatggacccactagcccatgatcaaccataaccaaccggctatttaacaaaataatcaaccagttacttaacatgctgagacccacccaacttctcaccggccaccaggctataacgaaacaactggtcaacctgttaactagctacccgatgatgatcaaccagccagctaactcataaccaattacttgaactctaatcagccaagccattcatttatcaaccagtcatcctactataactagtcctccaacctataaccaattagccagccaccctataatcggttggctgacccagcattgcccagtctttgggtttggaggtcaggggtgatcttacctgaggggcccggtgagcagtcccagctccagggttacttggcctgtggaagtagagctgtgacaagattgattgttggttctgacggctgggcgcttccctgtctggtctcatccacccagtaaggtcacacggctgtttccccatcctttgcccctggagctggtggtcctttgggaagctccacatgtaggtttgggtttcaggtccgatctgaccgggacaagtttgtcatcttcttggacgtgaagcacttctctcccgaggacctcactgtgaaggtcctggaggactttgtggagatccatggcaagcacaatgagaggcaggtgagtttgggatgcacctccatctgtgtgggtcctgcacgcccagagaagcctggggagcctctcgtgctaggctggctcctcccaggaccatggaggtcactgtcctcagccctggcgggcccaggcagcagcatgagcggggctcagggatgcaggatgaggaccttagtattgggcacaactccagctgtcctcctggatcttctgggtgatgggattagagagagcctcagggaatgaaggctgaaggtagccccctctgagccatattttcacatgaagcctgactggggagagagaaccccgaggataggagaattggagtttatgcacgccaaaagttgcacagcccccgtggtatttcagttagtgagtgacagtcctgaggcataaggaggtcccttgccaggcgggaaagacttcttccccagtagtcacccaccctgcccatggctcctgatcaggtggagaaccctcaggtgtttgggttgagggagcccaggccctggctggaagtagcatctcccgatggagctgggatgatgcaggaagctcagaggctggctaggtgtgtcacacctatgtgggcc

SEQ ID NO: 3284 - DNA, 906 bp, Mesocricetus auratus
  misc_feature (323)..(389): n is a, c, g, or t
cccatcacccctgaccattctcctccctgatggtgcccaggatgaccatggctacatttcccgtgagttccaccgtcgctaccgtctgccttccaatgtggaccagtctgccctctcctgctccctgtctgcggatggcatgctgaccttctctggcccaaaggtccagtccggcttggatgctggccacagtgagagggccattcctgtgtcacgggaggagaagcccagctctgcaccctcgtcctaagcgggcctcgccttggttgtcccctgaggcccctgacccactgagcccagggaccacagcagagtctgcctgnnnnnnnnnnnnnnnnnnnnnnnnnnnnnnnnnnnnnnnnnnnnnnnnnnnnnnnnnnnnnnnnnnnctttgttcccttcccattttctcagagggttgagggtttgagagagtggcttagagagcttggggtcttggcctgaggggctgcaggttcggggtgacggaggctcaacaccagccagctggaaggaatgatggcattgaactcttgagatatgacctgtcctcctggaacgtgacagagtgggtggcggctaaccagccgagagccctctgccgagcccctggacagcagcttcccttgctgcccactcttacgcaggctcatgtgccgcgctccgacggctcacttctcccagcccctcctcctgagactttctctatgaccctggccacccatgaaaatggagcccctggcagacaataaagagcaggtgacagaagcaacttgcagtctggtgtcctgttgtctcctttggggtgggggtggggcactgggagggtatagcggtcatctcccacctgcctgagagggtttctggcaccctacgtcatctcttaagcccatggcccctctgcag

SEQ ID NO: 3285 - DNA, 346 bp, Cricetulus longicaudatus
agatcttctgctcccaggagagagagcaatgtctagagtagggaaaaggaccatcttagccctctactataggcagctgtctgctacccgtcactcaccaatgggagaggaggcatgggtattgtgttcagatggggcccagtgttatttatttgagactggatcagggtgagaacttgaggggaagggttggagtagaaggttatgatctttctagacagtgctgcattggtggcttgactgaagtccttaagtttacctgaacaccaggggcattgtcttcaagccccatgaggacagccaggcattcttgttggctagaactggaagagtcgtcaagcgggtc

SEQ ID NO: 3286 - DNA, 269 bp, Cricetulus longicaudatus
agatctcagtgggtactattctgtggagacagacacaagttgaggggagataactgacggtgctcatgttggtgtttctctaaggaatggacatgattagctatgcacatagaaaaatggggaaatgggggtcaagaatgtagcctttcatatgagggaagaggaagcttgagttgggtgaagaatagaggagagtaagctaagagataccatgatagagggaaccattgtaggtttaaagagaaatctggcactagggaaatgtccag

SEQ ID NO: 3287 - DNA, 204 bp, Cricetulus longicaudatus
agatctccagagaaaattgggagcaagggaggagaaaggagggagctaggagaatgagaaggggagaagaggagggataaggaggatatgagggagcaaaaaggtgagttgggggaagaaaagaagaaaacaagaaaggagataccataatagagggagacatttaagggttacagagaaatcaggcactagggaaaggtctgg

SEQ ID NO: 3288 - DNA, 354 bp, Cricetulus longicaudatus
  misc_feature (41)..(75): n is a, c, g, or t
agatctcctctgtgagtctaagcacaagagaaaccccgccnnnnnnnnnnnnnnnnnnnnnnnnnnnnnnnnnnncataagtatagaccttttagagtaacacctaacttttcaaaggagaccataaagtccaatgagcgggaacagatgtttaaagcccagagaccagagatccaggcagctagtatacctattaacttcaattcacagtggagaacaacaacaacagacaacaaaacaagacaggctgttcaccctctccatgcctcgtcaatacagtactgttgtctttctcagagcactgagacctttaaatccccaagcaccttaccaaggtcagaggagtcaggtctc

SEQ ID NO: 3289 - DNA, 354 bp, Cricetulus longicaudatus
  misc_feature (241)..(272): n is a, c, g, or t
agatctgcctgcctctgactcccaagtgctaggattaaaggcgtgcgcagtttcacagcgtcatgaggcaaaaagacatggaagtatgatagggacttgatgggaggaagacgggggaaagaggtgatgaaggtgggagggggtaagagaaggcagaggcattagtgtaaactgtttctgcgtgtacgaaactgacaagggaataaagtttttaaactctctctctctatctctctctctnnnnnnnnnnnnnnnnnnnnnnnnnnnnnnnnttggtttttcgagacagggtttctctgcgcttggagctgtcctggaactagctcttgtagaccagctgtcttgaactcacag

SEQ ID NO: 3290 - DNA, 599 bp, Cricetulus longicaudatus
cttgagatgctcatctctgcagccatagctacaacagacttagcacacacactactagcacatcacctcctctgggtattgctatgaggtgtggtcctcttcagtgcctggatgtcagcccctaccagaaggaaggcttggctttgaggatccgtgagggttggggagaacagcagttagttccattgtgacaatgggagactggcatgtctccagcttcctgttgcagctttgcagacagccttacggactaggacagatgactcccagatctgctcctgcagatcatcttcatattccttcccaagggcatcctcggtgactttcatccagtaccaggccctgtgctatgggcccggtcaactgcagcccagaacttcctgcctcttactgtctagatagggagagccgataggttgagccctggggcaccgacaatgcagactttaagcctcgaccccacctgtccctggaagagtccaaacttgcctgagtccctacacagctcactcagaaccacaggttctgggtctgcacgctgtcttcttaagatgcccggtgcacggaaaggccacaggtagctgctctgaacatcttgg

SEQ ID NO: 3291 - DNA, 765 bp, Cricetulus longicaudatus
  misc_feature (714)..(742): n is a, c, g, or t
aatccctccttttatttagaagccatgctttgaatcctcactcaggggaaatggtttggtccccactgaggtaccattgggatgctcatctctccagcctattgcaagagacttagaacactgctagcatcacttcttccagggatggctctgaggtgctgtcttcttcagtgcctgcatgtcagcctctaccctaggaaaggcttggctttgagaatccatgtgagatggggagaacagcacttcgttccattgtaagtaacaataggagacagatgtgtctccagcctcctgttgcagctttgcagacagccttatggactaggacagatgactcccagatctactcctgcagatcaccttcatattccttcccaagagcaccatcggcaactttcatccagtacaggacctgtgcaagggctcagtcaactgcagtacttcctgcctcttgactgtctagctagggagggccgaaatgctgagaggcctggggcactgactatgctgactttaagccttgactccacctgtcactggaaatgtgcaaacttgcctgagtctttacccaactgcctcagaactacagggttctgggtctccatgccgtctatgtaagatgccaggggcatgggaagctcacaggcagctgctctgaacatcttaggagaattgcttgaggaccacccccctgctgtgcacaatgtctggatnnnnnnnnnnnnnnnnnnnnnnnnnnnnntccctttgagcacagggcttgct

SEQ ID NO: 3292 - DNA, 537 bp, Cricetulus longicaudatus
catttatttcagtccagtcaatatacctatattaggtacaaagccctctacctacatacctccaaccccaacccccacccaaaaatgacagaagttcctaactagaaggactttggctgggtaaaccctcggattgctacctggtaaataagcagaaaggtgggtttctgtttagcaaaaagtagatcttcccaaaataggttcccttttctcaagatccatctttaatctggcaggcatctcccttcctctttccttaaaggtcaagtagattgggcaagggtgcctagtccctggtcagcctggacaccgtatctcagctgaaatcccaactgtgctgatagtcataaattcgtcttgttttaccaccagcctccttttgtctatgacctactccctggttggccttggcagtttagttcccaataaacctttctttctacttgtgtagtggtctaggtagttgtgacttttacaaagtcacaagaaacaagtgaatttgagaacttactctcagctaagcagttagacagccta

SEQ ID NO: 3293 - DNA, 940 bp, Cricetulus longicaudatus
  misc_feature (324)..(342): n is a, c, g, or t
  misc_feature (377)..(393): n is a, c, g, or t
cagaggcgtagtcttcaccatggcgtatcccgggcaccctggcgccggcggcgggtactacccaggcgggtatggaggagctcctggagggccttcgttccccggacaaactcaggatccgctctatggttacttcgcgtctgtggctggacaggatggacaaattgatgctgatgagttgcagagatgtctaacacagtctggcattgctgggggatacaaaccttttaatctggagacttgtcgccttatggtttcaatgttggacagagatatgtctggcaccatgggattcaatgaatttaaagagctctgggctgtgcnnnnnnnnnnnnnnnnnnncttcatcagttttgacagtgacaggagtggaacgnnnnnnnnnnnnnnnnngcagaaggctctgacgacgatgggattcagattgaacccccaaactgtgaattcaattgcaaagcgatacagcaccagtgggaagatcacctttgatgactacatcgcctgctgtgtcaaactgagggctctcacagatagctttcgaagacgggattctgctcaacaaggaatggtgaatttctcatatgatgatttcattcagtgtgtcatgaccgtctaagtcaagaagaagttgtctgaatatactcaacattccaactgagcccaagcttgcttcctcctgccttcagtgctgtgtgcagatttccaacaacactccctgacaactgttgaacgggattgtgactttatatacaaccgaagcttcatttttaattttgataataaatccctgaggttcaattaatataagaacaagtgtgttgtaccagccagaacctaccttgagccactattaaccaggccttattttcctgctgtcttttatataaacttaagtatgcagagagtttaaagcatattgttatatttcttgtgacatgaa

SEQ ID NO: 3294 - DNA, 2009 bp, Mesocricetus auratus
  misc_feature (779)..(793): n is a, c, g, or t
  misc_feature (1421)..(1547): n is a, c, g, or t
  misc_feature (1636)..(1651): n is a, c, g, or t
  misc_feature (1733)..(1754): n is a, c, g, or t
  misc_feature (1777)..(1803): n is a, c, g, or t
agccggaagtcatccgaacgtaggctaggtctaccaaggcggggttagacagcaggctgttccgtttggcagccaggatggcatcgcctgcgctggaggagttggtgctgaactccaggcacagactggtcaggggcctcaaacagcagaaagcctccgctgaccagatcgaggaggaggtggccaaactcctaaaactgaaggcacagctgggccatgatgaaagcaaacagaaatttgtgctcaaaacccccaagggcacaagagactacagtccccggcagatggcagttcgggaaaaggtgtttgacgtcatcatctgctgcttcaaacgccatggggcagaagtgattgacactcctgtgttcgagctaaaggaaacactgatgggaaagtatgggcaagactgcaaactcatctatgacctgaaagatcaggggggggagctactgtcccttcgctatgacctcactgtcccttttggacggtatctggcaatgaataacttgaccaacattaaacgttaccacatagcaaaggtgtatcgccgggataaccctgctatgaccagaggccgttatctgaattctatcactgtggattttgacatcgctggccagtttgatcccatgattcctgatgcagagtgcctgaagatcatgtgtgagatcctgagttcacttcagataggcaagttcctggtcaaggtaaatgacaggcgcatcctagatggaatgtttgctgtctgtggtgttcctgatagcaagttccgtaccatnnnnnnnnnnnnnnncaaactagataaggtttcctgggaggaagtaaagaatgagatggtgggagagaagggccttgcaccagaagtggctgatcgcattggggactatgtccagcagcacggtgaggtgtgtctggtagagcagttgctccaggatcctaaactctctcaaaacaaacaggctgtggagggcttgggagacctaaagctgctgtttgaatatctaaccctgtttggcattgatgacaagatctcctttgacctgagccttgctcgagggctggactactatactggggtcatctatgtggcagtgctgctacagatgccaaccggagctggggaagaaccctggtgtgggcagtgtggctgctggaggcgctatgatgggctggtgggcatgtttgaccccaaaggacgcaaagtgccatgcgttgggctcagtattggagtagagcggatcttctccattgtagagcaacgattagaggctttagaggaaaaagttcggaccactgagacacaggtccttgtggcatctgcacagaaaaagctggctggaggagagactaaagcttgtctccagttgtgggatgctgggatcaaggccgagctgctctacaaaaagaacccaaagttactnnnnnnnnnnnnnnnnnnnnnnnnnnnnnnnnnnnnnnnnnnnnnnnnnnnnnnnnnnnnnnnnnnnnnnnnnnnnnnnnnnnnnnnnnnnnnnnnnnnnnnnnnnnnnnnnnnnnnnnnnnnnnnngaagaccttgtggaggagatcagaagaagaacaaatcagcccctctacgtctgctgaaggaagcagactagcagaggaagcaggattgnnnnnnnnnnnnnnnnaacaaaactgcatatgtacttaaatagtttgcacatttctgatccagcagaagactgaagggtggtcgggtacacgaggccnnnnnnnnnnnnnnnnnnnnnngttattatcggtaatcactggcnnnnnnnnnnnnnnnnnnnnnnnnnnngaacagaaaagaaaaaaaggccaggtgtacagtttcctagtcgggaatagggaggagcagtataggtcagtataggtggattaatcaagactgactcctaaactcctgtatgaacctgagatggcttcttgcagagccacataccagatgaatggatgcctccctacaacctgccgccaaaaagtccaataaatgtctcccccgct

SEQ ID NO: 3295 - DNA, 1933 bp, Cricetulus longicaudatus
  misc_feature (20)..(84): n is a, c, g, or t
  misc_feature (1533)..(1554): n is a, c, g, or t
  misc_feature (1768)..(1843): n is a, c, g, or t
  misc_feature (1872)..(1914): n is a, c, g, or t
gaattcacccactgaagtannnnnnnnnnnnnnnnnnnnnnnnnnnnnnnnnnnnnnnnnnnnnnnnnnnnnnnnnnnnnnnnntatgttctaaacattttccatctggctcttctttgttttacccatgtttgtgattgccctgaaaccctaatatgagggctgcaaataaatgcattgctttgtatacatcaggttcgattcccagcagtgcaaaacccaaaacaaaagccaaacttgctggacagttctggcatctaggccatctccatttaagttttggtaatcatcttgtcagcagcatcaaaaagattaaaccagcaacaacaccatccacccatacactttagggatctctaccagtagagcccagctcagagttcaaaattccccaggaaccttattctgggagaggaaaaaactctggcaccagctacagggggaacatgcctgccaggaagccatgtccacacagtttctgagaactcaggaccactttgcaggcaaaactggagcaaagacaagggcaggtcagtggtggacatgagcaccccggcccaggactgcacggtaatgcatagctcttggccctgtttaaaactaaacctcaagccagcacctgaagatggatcccctttgtttattcccctttcccgtatggccacactggataaaactctcttcacttctcttttagctagcatattgagttcatgggccaagcctagcttggcctgcctgcacccaggccagtaccctagaaactctggtaacagtctcatcctatggctttctaagtgacattgttcaatggatgtaatttataacaagatttaaagattaagcaaaacctagatttgaagtagagtttcaaagtaaagtagcagcatgagtcagttggcttatctttcggaagctccttctgcaaatgaggtaagggtggttttatgagacccattgtttaggttttggggatgaaagagggtggactctgctcaagtcccaacaacaaacattgtggccaaataaacttagattcttgtcttaactttcttgtttacaatgactttaggaaaagtatctctgcaggcaatttccattgtatcaatataatgtttgggtccttttatatactatatctaaaataggcaatccttagaaaaaagaagcatattttgtgtttggggggggcatgttacttaatgattacaagagtatttttctcaaatgatgatattttgaaactaagatggtagtagttgtataatgaatgtcatgaatatactaaatgttctagagtaacatacttaaaaatggttaaatatatatttggtgaaatttccttataattatggggggcactgattgctcaatggtaaagatcactttttacagaggatgcagacttggttcctagtacccatatggtgagctataatcacctgtaactcaagttgtaggggatccaatgccctcttctggtttctgtaggtacctacacatgaaattaaagaaaaaaaaaaaaactttacnnnnnnnnnnnnnnnnnnnnnntttacaattttacaaatgtttatatgggggcattgtttccctcctcctggccccatttctgagggtgcgagcactggcctcaccattagagcctttggtttccttttcagcatagaaagtacctcttagaccagagaagagatactggaggggtagttgaaaccttttgactttaggagtgttaaaaatgtcatctgagccaggcattggtggnnnnnnnnnnnnnnnnnnnnnnnnnnnnnnnnnnnnnnnnnnnnnnnnnnnnnnnnnnnnnnnnnnnnnnnnnnnnagagcgagtgccaggataggcaccaaagnnnnnnnnnnnnnnnnnnnnnnnnnnnnnnnnnnnnnnnnnnnaaaacaaaaatgtcatctg

SEQ ID NO: 3296 - DNA, 549 bp, Cricetulus longicaudatus
tatacgtgaatagtttttcttccctctgtgtgttttaaaatagttactaatgctttcttggatctgcatttaggagttatcctttccattaaaaatataagctgtttcttccaaggcgactcctgggcgtggagcctaccctggggtatggttgataaacacagtgtcactgtacattgttagttataaattatataactaattttaattataaaattaacactaattataatagcattattaatgaaattaacattgattataataaaacaacattaataataaaattaacattgtagacactggcttggagtgctattaaccaaaacaggctgagtgccattattagcaacaagaggcaagatgatttccctgcttacagagaaatgggggcatttttaggtaatgacagagtaataggtgtactgatggggtaggagacatggctcaacagttaagctcttgctacacagttattaggaccgattcagatcctagcacccacataaaagcaaaaagggcatcctgtgaacttctcagttccaactc

SEQ ID NO: 3297 - DNA, 3030 bp, Mesocricetus auratus
  misc_feature (791)..(810): n is a, c, g, or t
  misc_feature (1950)..(1968): n is a, c, g, or t
aaggtggagaaggagaagcacgcgacggagaacaaggtgaaaaacctgacagaggaggagatggctgggctggaccagatcatcgccaagctgaccaaagagaagaaagctctgcaagaggcccaccagcaggctctggatgcccttgaggctaggaagactaaggtcaacactctgaccaagtccaaggtcaagctggagcagcaggtggacgacctggagggctccctggagcaggagaagaaggtgcgcatggacctggagcgagccaagcgcaagctggagggttaccttaaggtgacgcaggagagcatcatggacctggagaacgacaagcagcagctggacgagaaacttaaaaagaaggactttgagttaaatgcactcaatgccaggattgagaatgagcaggccctgggcagccagctgcagaagaagctcaaagagcttcaggcacgcatcgaggagctggaggaggagctcgaggccgagcgcacagccagggccaaggtggagaagctgcgctcagacctgtcccgtgagctggaggagatcagcgagcggctggaggaggccggcggggccacatcggtgcagatagagatgaacaagaagcgcgaggccgagttccagaagatgcggcgggacctggaggaggccacgctgcagcacgaggccacagccgcagccctgcgcaagaagcacgccgacagtgtggccgagctgggtgagcagatagacaacctgcagcgtgtgaagcagaagctggataaggagaagagcgagttcannnnnnnnnnnnnnnnnnnnacctccaacatggagcagatcatcaaggccaaggctaacctcgagaagatgtgccgcaccttggaagaccaaatgaatgagcaccggagcaaggccgaggagactcagcggtctgtcaataacctcaccagccagcgggccaaactgcagacagagaacggggagctgtcccggcagctggacgagaaggaggcactgatttcccagctgacgcgaggcaagctcacctacacccagcagctggaggacctcaagaggcagctggaggaggaagtcaaggccaagaatgccctggcccacgccctgcagtcagcccggcacgactgcgacctgctgcgggaacagtatgaggaggagacggaggccaaggcggagctgcagcgtgtcctatccaaggccaactcagaggtggcccagtggaggaccaagtatgagacggacgccatacagaggaccgaggagctggaggaggccaagaagaagctggcccagaggctccaggacgcagaggaggctgtggaggccgtcaacgccaagtgctcctcactggagaagaccaaacacaggctgcagaatgagatcgaggacctcatggtggacgtggagcgctccaatgctgccgctgcagccctggacaagaagcagaggaacttcgacaagatcctggcagagtggaagcagaagtatgaggagtcccagtcagagctggagtcttcccagaaggaggcacgctccctgagcacagagctcttcaagctcaagaatgcctatgaggagtcattggagcacctggagaccttcaagcgggagaacaagaacgtgcaggaggagatctcagatctgactgagcagctgggctccactgggaagagcatccatgagctggagaagatccgaaagcaactggaggctgagaagctggagctgcagtcagccctggaagaggctgaggcctccctggagcatgaggagggcaagatcctccgagcccagctggagttcaaccagatcaaggcagagatcgaaaggaagctggcagagaaggacgaggagatggagcaggccaagcgcaaccacctgcgggtggtggactccctgcagacctccctggatgccgagacgcgcagccgcaacgaggcnnnnnnnnnnnnnnnnnnnatggagggcgacctcaacgagatggagatccagctcagtcatgccaaccgcatggctgctgaggcccagaaacaagtgaagagcctccagagtttgctgaaggacactcaaatccagctggatgacgcagtccgtgccaatgacgacctgaaggagaacatcgccatcgtggagcggcgcaacaacctgctgcaggcggagctggaggagctgcgggccgtggtggagcagacggagcggtctcggaagctggcagagcaggagctgatcgagaccagcgagcgggtgcagctgctgcactcccagaacaccagcctcatcaaccagaagaagaagatggacgcagacctctcccagctccagacagaggtggaggaggcggtgcaggagtgtaggaacgcagaggagaaggccaagaaggccatcacagatgccgccatgatggccgaggagctgaagaaggagcaggacaccagcgcccacctggagcgcatgaagaagaacatggagcagaccatcaaggacctgcagcaccggctggacgaggcagagcagatcgccctcaagggtggcaagaagcagctgcagaagctggaggcccgggtccgggagctggagaatgagctggaggctgagcagaagcgcaatgcggagtcggtgaagggcatgaggaagagcgagcggcgcatcaaggagctcacctaccagacagaggaagacaggaagaacctactgcgactgcaggacctggtggacaagctgcagttaaaggtgaaggcctacaagcgccaggctgaggaggcggaggaacaggccaacaccaacctgtccaagttccgcaaggtgcagcacgagctggatgaggcagaggagagggcggacattgccgagtcccaggtcaacaagctgcgggccaagagccgtgacattggcgccaagggcctgaatgaagagtagatcttgtgctacccaaccctaaggatgcctgtgaagccctgagacctagagcctttgaaacagcaccttaggcagaaacacaataaagcaattttccttcaagcc

SEQ ID NO: 3298 - DNA, 1138 bp, Cricetulus longicaudatus
ggatccggacaacacccacaccggcccctccaggtccagaaagctggccctgcgagaagcgggactgaaaaggcgtgcgggagccagaaatccaaaagggtgccaaggcatgcgtcctttttccacccagaaataaccccaggctttcaatttgaggttatttcaatatccagcaaatgcgttacttcctgccaaaagccagcctccccgcaacccactctcccagaggccccgccccgtcccgccccctcccggcctctcctcgtgctggatcgctccctaaggacgccccgctccagaagccccacctaccaaggacgccccacccttgttcccggactggtatgaccccagcctgctgacatccctccgccctttctcgtgcacgcggctatggcggaatctgagttgcagctggtggcgcagcgatccgcagtttccccgacttccccatccccggcgtgctgtttaggtgagatcacgagccagcaaggcgttggagccctgttcctgggctcccggcgaggcgcatgggcagtctcggggatcttgtggggtctccgcccccctttccccggccaccagcctctccttgttcccagggatatctcgcccctcctgaaggaccccgcctccttccgagcttccatccgtaaagcagagaaatcttgacacatacacacactcatacagccctgttatcacaataagacatgtattggtcactcccaaaggtccttgtgcccgctgaggtcccctccctcaccctgtctgctcccccagacccaggaaaccataatgtgctttctattcctagagatatattttgggctttctagaagtttctacaaactcagagacactgttgtggattaacaaagtcctctgttgaagcccaagcccctgggatctcagaaggtaactgaatttggagatattcaccttaagtccacgcatggcggcaagatcgactacatcgcaggcgagtggccatgccaggccgtgctggtcccccactgtgcaggctcccctcccttcccttatgtcaccctcagtccatcccacacccatcccttctttcttcaacccctaatcctcttttagcactctgtttctcttgccttggtccctcgttgac

SEQ ID NO: 3299 - DNA, 2016 bp, Cricetulus griseus
aggatccgagtgtctgcatgtatttcttgccggcgagaacatatagcacgcgggacatctggtgccgaaacccgggaactcttcaacatctccggcattgcggagacccctctaacggggtggattcagaactgcagggtggtaaattcggagaggtatgctttattctcccaccttctttttagactttgctttcaatttgtcaccactatgggatggaaaagccttattctatctttattctattttgttcacattggtcttatattatgcccaccgtggctggtgttcagttcgagaccaagcttacccaggatgcctccagaattaatgggctcttcaaaacagagagacctaattaaaaactgtctagagattggaggcttgcgtcccatggtagcagatttgagtcaaaaaacgcttaaagaggtacaggataatatatcagaaaccgaacgagatcagagaatacgagctcgaaaaaggaaggacgttgctcaaggaaaaaggccctccctaggatataaaaaaagggggagagaaaatagggaaaaccggtcatcatcccggttaatttatgagaaattaagactcaaaacctaccctctgccctacaacgaaactaccggccttggagctgagcagctcagactctcagattttagactctaccaaggaagcagagctagaggaggaggcagcacgatattaagaggacagataccaccccgatatatatcggctgccaaaagtgaaagcctaatatcaaggccagtcgcctatcaatccagcgggtgtacttcatcagcacccccattatttggtaactcactcttttttaccattagaggagcgaaggaaattgcagatggctttcccagtctttcaaaatccgggcgcaagagtacatgctcccgtagactattatcagattcaagaattggctcaatcagtccggaagtctggggtcaatgccaattttacaacaatacaagtagaaagactaccaaactatgctatgacacccactgtttgggaaacaacagtaaaggcagtgctccccaatatggctatatggagtggaaggctcttttttatgatgcagcccaggcacaggcaaaggcaatgtcacagcagaaaatgaaaatcagagacaatggacctttgaaatgctcacaggacaggggccacatgcctcaatcaaacttattacatttggggcgtatatgccagatatcagctgccgccattaaagcatggaaggcattgacaaaaagggatgaatcaggtggacatctacaaagatactccaggggccccaggagccattctcagactttgtggccagaatcacagaggccgctacacgatattcggtcatgcagaacaagccatgcctctgattcaacacttagatctttgaacaagcaactcaaggaatgccgagcagccatagccccccggaaaagtaaaggtttacaggactggttaaagatctgcagagaactcggagggccacttactaatgcaggcttggcacagccatctcacaaacccaaaggcgccgaaatatgtctgcctgctttaactgtggaaaaacagggcaccttaaaaaggactgtaaagcccctgaaaggactagagaagtggagttgtgcaggcgctgtggaaaaggttatcatagggccagtggaatgcaaatccgtgggacataaaggtacgcttttaccccctacgagaaccttaactcccaaccaaaaaacggccgcgggcccatgtcccagggccctcagaaatatgggaaccagttccggaaaagcaactcagagaaggaagggactcccgaggacactccggagtggacctgtgtgccgcctccgacttcttattaaatgccccaaatcgaaatctgttcagcctgtctcaatccaatctccggggcctttaccccccccctcccccactaccattgggcttattttgggccgaggttccttgaccttacaaggactcatt

SEQ ID NO: 3300 - DNA, 117 bp, Mesocricetus auratus
aactgcaaaggccaacgttggtgctggcaaaaatccaaaggagtagatctgctgcggtgacttgatctgctgtggtgtgcagatttccgagaggacaaataaactaaacatttatgt

SEQ ID NO: 3301 - DNA, 265 bp, Cricetulus longicaudatus
  misc_feature (30)..(42): n is a, c, g, or t
  misc_feature (44)..(57): n is a, c, g, or t
  misc_feature (87)..(138): n is a, c, g, or t
  misc_feature (202)..(265): n is a, c, g, or t
gaattctaatagggcagcaatgaaaacttnnnnnnnnnnnnnannnnnnnnnnnnnngattttagaggacaagtattgcttgtgcannnnnnnnnnnnnnnnnnnnnnnnnnnnnnnnnnnnnnnnnnnnnnnnnnnncagccagagggtaacttacaggagtcagatctctctttccatcatgtgcattattcacactgtnnnnnnnnnnnnnnnnnnnnnnnnnnnnnnnnnnnnnnnnnnnnnnnnnnnnnnnnnnnnnnnn

SEQ ID NO: 3302 - DNA, 485 bp, Cricetulus longicaudatus
  misc_feature (175)..(485): n is a, c, g, or t
ctgcaggccctacccagaaccccaggcattccctgtgcaggcaccaggtgataatagcagctgcagggcaggcagaatatggggcatgtccctggtagtgggggacactgtgggaaggcttcaaagaaaacagtccaggtgacctgagaaattggaacagtagtgcccagagcannnnnnnnnnnnnnnnnnnnnnnnnnnnnnnnnnnnnnnnnnnnnnnnnnnnnnnnnnnnnnnnnnnnnnnnnnnnnnnnnnnnnnnnnnnnnnnnnnnnnnnnnnnnnnnnnnnnnnnnnnnnnnnnnnnnnnnnnnnnnnnnnnnnnnnnnnnnnnnnnnnnnnnnnnnnnnnnnnnnnnnnnnnnnnnnnnnnnnnnnnnnnnnnnnnnnnnnnnnnnnnnnnnnnnnnnnnnnnnnnnnnnnnnnnnnnnnnnnnnnnnnnnnnnnnnnnnnnnnnnnnnnnnnnnnnnnnnnnnnnnnnnnnnnnn

SEQ ID NO: 3303 - DNA, 3906 bp, Cricetulus longicaudatus
  misc_feature (313)..(327): n is a, c, g, or t
  misc_feature (2097)..(2143): n is a, c, g, or t
  misc_feature (2563)..(2599): n is a, c, g, or t
gaattcattagcttattacttcgttgactgatggacatgaggttgtcaccactttcaggctatcccatgaataatgtcgctgtgaacacttgttacacagtttccttcaggcgtctgttgtctttcccttggatgcatgcctgggagtgccattctggaatgctaactctgtgtttaacttttagaggaactgccaggctattggtgctgtcttcgagtcttccagagccctaagaaaaggttggtcatgttgaacaaatagcattattaccagatctttccaggaaggatctaagcagccctggtaaaatannnnnnnnnnnnnnnggcagcagacaggctacacaaaggctttgatgtcaccagagagcagctggaggaaaactctgaggtgccgtcacacccatgagtcccactccaagcaagggtatcagttttggctactataaagcaaactagacccagccatttaaagcaatgccccagtaaaggcctggcttagggtacacaaggatcagagtttgatccccaggaatgaaaatttttaaaaaataaaaaaatcattaacactcagcattcaggaggctgaggcaggagggtgaacggtgaggccagcctgagctatatattgacatcttgtctccaggtaaaactcaacactgtggtgacgaatcttggcgtgtcaacttgaccacatctggaatcaactaaaacccgagcagctggatgcacctgtgagtggttttcttaattggatcctttgaggtgggaagactcattttaagtcttgaccacacctctggttgctgcccacatggaaggacatggaagaaggaagcttttgctttttgcctgcttgcccccactcttgctggcaagtccatctgccctgctgctgaggtagtctcttgctggcattagaacctacttctcagggttccaccatatcctgaagagcagatgagacaccaggctttttacctttccatcaggagacaaccatgattggactagccagaccgcagcctgtgagccgttctaatcaatcccctacaaatagaacatttttcttccatcagttctgttccgttggagaacccagactaatacaatctcccatgttccagtttcatgtgtcactaccatgtgacaggccagtagggtgagtgggctcagctgggctctgcgccaggtcgcgatcaaacagaggagtctgttgggcaaagctctcatcctgaggttgtgtgagaacccacctctatccgaatatgcatagaccccacttgcagctgtaggactggggtcccctttccagctggatgtcagcgagggtcaccttagcaactgacagacttctcattccttcatcttcaaggcagcaagatcacctcaaatcctcctcctgagtcaaacctccctggcttcctcttctgcacccagccagtgacagctctctgctctgacaggttcagacccacaggatggtctgttctcattacctccacccttcacggatcacacaggaagtgagggagggacaactccagattcccgtccagcacagggacagggaggtgcaccagctgaagacagagtagagttgaatgctgaccaagtcaggacactttgaggagatggctgttcagaactgagccccaaattgcgcctgtgaagaactgattcagatactacatgagtgtgattgacaagcaggaaacagcatgggctaagatgtaaagcagagaaatcttgacacatacacacactcatacagccctgttatcacaataagacatgtattggtcactcccaaaggtccttgtgcccgctgaggtcccctccctcaccctgtctgctcccccagacccaggaaaccataatgtgctttctattcctagagatatattttgggctttctagaagtttctacaaactcagagacactgttgtggattaacaaagtcctctgttaaagcccaagcccctgggatctcagaaggtaactgtatttggagtattatctgaagttaaaatgaagttgttacagtgaggcctgaatccgtgtttattctatttatatttaccttataatttacnnnnnnnnnnnnnnnnnnnnnnnnnnnnnnnnnnnnnnnnnnnnnnncctgcatacatgtgtgtgtgctatgtgcatacccacagaggccagagagggcatcagaccctgaagctggagctagagatggctgtgaactgccatgtgggttctgggaaccaaacagggttctctgaaagagcaactggtgttcttaattcctgagccatccttcagccccctagacctgtttttatatggcctcagggtatagaccaaagcccttttgttttgcatacatatacaaatgttccttgccctcaaggaattatgcttccttaaaaataagtcaaaatacatcaaatacacagacatacacagctaacaaaccaagcagccgagcttggcactccagagcactgtatgatgccaggagattctcacttgtgaacttagggttcatgaagccccagccatggagggaaagannnnnnnnnnnnnnnnnnnnnnnnnnnnnnnnnnnnngggggatgaaggaaaaactctcctggaatttttgattaccattgcatagtcttagaccaatctgagaatcaatactctaatttgtaaacattttaacttaattataatttatatactgtaaaaatcactttaggatccatgagaaggttgaaccctgtctcaaacaatacaaaaacttaaaaaaaaagagttaaaaagctatgtatgctaagatactcaaatcagtattgtatgcgtaagttgataaaccaaaaaacaaaaaccataacaaaggacagaaagatggcctcagctggtaaaggtgtgtgtcacggccttgatcgtgagttccatccccggaacctatctggtggaaggagaggatggactctcttgctctgtcccctactttcacaggcacaggcttcctgcacacagacgcatacacataaatgtaacttaaattgtgttaagtttccactgtcaagtgtaacaacccagcgagtttctgtatagtcatagcctgtagccatcaccattaccaagtgcagaagatttttatcacacaagaaaggagccccatgccatcgcatcaccccgaccctgcagctgctcatctgccgtccatctctgaatttgccttctacagactcttcatataaagagtcaatcaacctccagcctttgcgtctggcgtatttccctgagcgcagtaggtcagagcagacatcctgacagctttgagactacagtgacagtgacatttcacatgcagacagacaaaccagggtggggccgtcctgcagaagcggctttcccaccggatgctctgaagtctgcctttcgtcagatccgagttaatcttctcccaaataaaccatgaggttaaagtccaggtttctgtgcctagagctggctggagtctggggggacagacagcaaccacagagtctgtgatgctgagagattttgtcctggctgcccaggggccaagctggccatcagaagtgttggtatggcctccactgtggagggggcagcagtacccagttggagagctttcaccaaaagttcctttacaaaccaggtgatggaaatttcctgtctctcacccagcacccatgagctgggccaaccaaagaaggccgttctctgggactgtttggtgactgctacccacacaggagctctgtgtcctagtcctgatcccttcaactggctgactggctgactcctacccctctcccccgttctgtcccatgtagataaatcccagagatatttcctggtttttcttgggacaagcaatgaatgctgaccatgaattc

SEQ ID NO: 3304 - DNA, 372 bp, Cricetulus longicaudatus
tttgtaaatacctctgtaacatgtttttcccattttccttttttaaaattaattttcaattaaagtaaaaacaattttattttatataccaatcccagttccctctccctcctgtgctccaattctcccccaccacccccctatcccacccaccatctactcctcagggaggatgaggcctcctatgggggatcatcaaagtctgtcacatcattttggggcaggacctaacacccccccccccatgtgtatctaggctaagagagtatccctccataggaaatgggctcccaaagcctattggcacactagggataaatactggttctaacaccagaggccccgtacactgtccaagccccccccccacca

SEQ ID NO: 3305 - DNA, 390 bp, Cricetulus longicaudatus
aatgccagcactcatgggataggaggttcccaggtttctattattttcctctagattttttatttaaattagaaacaatcttattttacatatcaataccagttccttcttcttctcatcctcccatgcccccccccccacatcaaccccctcatcccattccccttctgctccccagggagggttaagccttccatgggttatcatcaaagtctgtcacatcatttggggcaaggcccaggaccttccccacgtgtctaggctgagggagtatccctctatagggaatgggctcccaaaatctattaatacactagagataaatactgttccactaccagaggccccgtagactgtagactgcccaaccaccttacctgacccccacat

SEQ ID NO: 3306 - DNA, 368 bp, Cricetulus longicaudatus
  misc_feature (1)..(124): n is a, c, g, or t
nnnnnnnnnnnnnnnnnnnnnnnnnnnnnnnnnnnnnnnnnnnnnnnnnnnnnnnnnnnnnnnnnnnnnnnnnnnnnnnnnnnnnnnnnnnnnnnnnnnnnnnnnnnnnnnnnnnnnnnnnnnntcctatgctccccacctaccctccaaccacctgccagctcactccccagagatactgaggccctccacagggtcatcaaagtctgtcacatgatttgggggaggaccaggccctctttcctttatctgggctgaaatagtatccctcatagggaatggactcccaaaggccatttgtgctctagggataaacactggctccaaggttagaggtcccatagaatatcctggcctcctagctaaca

SEQ ID NO: 3307 - DNA, 388 bp, Cricetulus longicaudatus
taggcagcgtcatcaaaacggctaaatggaaatttatttttttctggctattctttctttaaatttttttattttactaatttttatttttaaaacatctttattttacataacaatccctgttccttctccctcccatccctccgctcctctcaccacttccccattccatacccatccattcctcagagagggtgaggcctcctataggcaatcatcaaagtctgtcacatcatttggatagaccaaggccctgaccctgtatctaggctgagcaaggtatccctccatagggaatggattccaaaaaaaccagttcatgcactagagatacatactgcttctactgccatggccccataaattctcaaggccccctgggccccca

SEQ ID NO: 3308 - DNA, 363 bp, Cricetulus longicaudatus
tgctgaagtgcatccccctttcccccctttttttaaaaatttaaattagcaacaatcttgttttacttatcaatcccagttccctctccctcccctgcaccccacagaccccctatcccatcccctttctgctccccatggagggtgagtccttccaagggagatcttcaaagtctgtcatatcatttggagcagggtctaggcccttacccttgtgtctaggctgagagagtatccctctatgtgggatgagctcccaaagtccatttgtatgctagggataaatactgagtcgcctaaagaagaggggatagctattgccttctgacatgaaaggtgagtgactggtgctttgactgtacc

SEQ ID NO: 3309 - DNA, 1071 bp, Cricetulus longicaudatus
gtgagcctcgcctttaacggctgagcatctctccagcccatcttgatttaactttggtaagtgatatctatccagaaaattgtccatttcctttagattttcaaatttggtggagtacaggttttttcaatgtatgacctgatgattctctggattctcaaaaaaatcagaagtcctactatatgcagaagataactgcactgagaaagaaaccagagaaagatcactcattacaatatcaactaacaacataaaatatcttaaggcaacactaaccaaatgagaaagacctgtatagtaagaactttgaatctttaaagaaagaaattaaagaagataccagaaaatggaaagatctcccatgctctgggataggtaggatcatcatagtaaaaatggcaatcttgccaaaggaatctacagattcagtgcaatccccatcaaaatcacaacacagttcttcacagaccttgagaaagaacagtactcagtttcatatggaaaaacaaaaaacccaggatagccaaaacaaccctgtacaataaagaaacttctggaggcatcatcattccttacttccagactccattatagaacccatagtcctgaaaacagcttggtattggcaaaaaaaaaaattgacagatagaccaatggaatctagttgaaaaccctgatatattaacccacaaacctatgaacaccttgttttttgtcaaagaagctaaagttatacaacgtaaaaatgaaatcatcctcaataaattttgttggcataactagattcggacatgtagaagattgaagattgatccatatgtataaccatgcactaaacttaactccaaatggatcaaagacctcaacataaattcagcttcctgaacctcctagaagagaaggtagatggaacaggagactgctttctgaacataaccccagtagcaccaaacattgggatgatctggccctgggtttttttggttggtagattttttgatgatggcttctatttcattaggggttataggtctgtttaaattgcttttctttcttgatttaattttggtt

SEQ ID NO: 3310 - DNA, 1071 bp, Cricetulus longicaudatus; identical to SEQ ID NO: 3309

SEQ ID NO: 3311 - DNA, 2259 bp, Cricetulus longicaudatus
  misc_feature (385)..(406): n is a, c, g, or t
tcggaaccggacgtgtccgcgaagatggcgggccggagtatgcaagctgcgaggtgccctaccgatgaattgtccttaagcaactgtgcagttgtgagcgagaaggattaccagtctggacagcatgtgattgtgaggacctcccccaatcacaaatacatatttacactgaggacccatccgtcggtggttcccggaagcgttgcattcagcttacctcagcgaaaatgggctggactttctattgggcaggaaatagaagtcgccttgtattcatttgacaaagccaagcaatgcatcggcaccatgaccatcgagattgactttctgcagaaaaaaaacatcgactccaacccatatgataccgacaagatggcagcagaannnnnnnnnnnnnnnnnnnnnnaggccttctcagtgggacagcagcttgtctttagctttaatgataagctcttcggattactggtgaaggacattgaagccatggaccctagcatcctgaagggagagcctgcatcaggcaaaaggcagaagattgaagtcggactggttgttggaaatagtcaagttgcatttgaaaaagcagaaaattcatcgctcaatcttattggcaaagctaaaaccaaggaaaatcgccagtcaatcatcaatcctgactggaactttgagaaaatgggaatcggcggtctggataaggagttttcagatattttccgacgagcatttgcctctcgggtgttccctccggagattgtggagcagatgggttgtaaacatgttaaaggcatcctgttgtacggcccccctggttgtggtaagactctcttggctcgacagattggcaagatgctgaatgcgagagaacccaaggtggtcaatgggccagaaatccttaacaaatatgtgggagaatcggaggcgaacattcgtaaactttttgctgatgccgaagaggagcaaaggaggcttggtgctaacagtggcttacacatcatcatctttgatgaaatcgatgccatctgcaagcagagagggagcatggctggcagcaccggagttcacgacaccgttgtcaaccagctgctgtccaagattgatggcgttgagcagctgaacaacatcctggttattgggatgaccaatagaccagatttgatagatgaggctctccttcgacctggaagactggaagttaaaatggagataggcttgccagatgagaagggtcgactgcagatccttcatatccacacagcaaggatgagaggacatcagttactgtctgcagatgtggacattaaggaactggccgtggagactaagaatttcagtggcgctgagctggaaggtctggtgcgagcagcacagtcgacggccatgaaccgacacataaaggccagtacgaaagtggaagtagacatggagaaagcagagagtctgcaggtgacaagaggagacttcctggcttctttggagaatgacatcaaaccagcttttggcacaaaccaagaggattatgccagttacattatgaatggaatcatcaagtggggtgaccctgtgacccgtgtcctggatgacggagagctgctggtccagcagactaaaaacagtgaccgtacgcctctggttagcgtccttctggaagggccccctcacagcgggaagactgccctagctgcaaagatcgcagaggaatccaactttcccttcatcaagatctgctcccccgataagatgattggcttttctgagacagccaagtgtcaggccatgaagaagatctttgatgatgcttacaaatctcaactcagttgtgtggtggtggatgacatcgaaaggctacttgattatgtccccattggcccccggttctccaacctggtgttgcaagctcttcttgtgttactaaagaaggcacctcctcagggccgcaagcttctcatcatcgggaccaccagccgcaaagatgtccttcaggaaatggagatgctgaatgccttcagcaccaccatccacgtgcccaacattgccacaggagagcagctgctggaagctttggagcttctgggcaacttcaaagataaggaacgcaccacaattgctcagcaagtcaaagggaagaaggtctggataggaatcaagaagttactaatgttgattgagatgtccctgcagatggaccctgagtatcgggtgaggaaattcttggccctcttgagagaagaaggcgctagccccctggactttgattga

SEQ ID NO: 3312 - DNA, 2711 bp, Mesocricetus auratus
  misc_feature (208)..(234): n is a, c, g, or t
  misc_feature (1821)..(1850): n is a, c, g, or t
atgtgaagcaggggggtagggaatcttaggagccgtcaggacagggaggtcgggcggaggttcctgcagaggctgactcctctgcagtggcagggtcttcccagcatgaccagtggcgggagaggagactgacccgcttgttcccatcagctcctgaaggtgacactgagccctgggtggcccctcaccaccaaaacaggtgcctgtnnnnnnnnnnnnnnnnnnnnnnnnnnngccgccctttagttccaaggtcagaggtcctgagagccagagagccatgggcaaatcatcagaggcatggtgcattgtcttgttttctgttttcgcatcattttctgctgagcctaccatgcatggggagatcctgtcccctaactatcctcaggcataccccaatgagatggagaaaacgtgggacatagaagtcccagaagggtttggggttcgcctctacttcacccatctggacatggagctgtcagagaactgcgaatatgactcagtgcagataatctcaggaggcgtcgaggaagggagactctgtgggcagaggaccagcaagaatgccaactcccccattgtggaagagtttcaaatcccatacaataaactccaggtcatctttaggtcagacttctccaacgaagagcggtttactggctttgctgcatattacgctgccattgatgtaaatgaatgcacagattttacagatgtcccttgcagccacttctgcaacaatttcattggtggttatttctgttcctgccccccagaatacttcctccatgatgatatgaggaattgcggagtcaattgcagtgggaatgtattcactgccctgattggggagatttcaagccccaattaccccaatccataccccgagaactcaaggtgtgagtaccagattttgttggaggaggggttccaagtggtggtgaccatccagagagaagattttgatgtggaaccagctgattcgcaggggaactgccaggacagcttactgtttgctgcaaaaaatcgacaatttggtcctttctgtggcaatggattccctgggccactaactatcgaaacccacagtaacactcttgatattgtctttcaaaccgacctaacagagcaaaaaaagggctggaagcttcgttaccatggagacccaatcccttgtcccaaggaaatcaccgccaactctgtttgggcgcctgaaaaggcaaaatacgtgtttaaagatgtggtgaagatatcctgtgtggacgggtttgaggctgtagagggaaatgttggctcaacattcttctattctacttgtcaaagcaatggacagtggagcaattccaggctacggtgtcagcctgtggactgtggcattccggaacccattcagaacggtaaagttgatgatccagaaaatactctgtttggctctgtcattcactactcgtgtgaggagccgtattactacatggaacatgcagaacacggcggggagtatcgctgtgctgctaatgggagctgggtgaatgacgagctgggcatagagctcccaaaatgtgttccagtctgtggggtacccactgagccctttagaatacagcagaggatattcggaggatttcctgcgaagatccagagttttccttggcaagtcttctttgagttcccgagggccggtggggctcttattggcgagcactgggtgctgacggcagctcacgttgtggaagggaactccgacccatcgatgtatgtggggtccacgtctgtgagaatggaaaacctggcaaacgttcagaagctcaccaccgaccnnnnnnnnnnnnnnnnnnnnnnnnnnnnnngggatgacctaagcacacggacaaattttgacaatgacatcgcactggtgcggctgaaagaccctgtgaaaatggggcccactgtttcccccatctgcctgccaggcacctcctcagagtacgaaccctcagagggtgatctgggactgatctcagggtggggccgaacagagaggagaaatattgttatccagctcagaggggcaaagttacccgtgacctctttagagaagtgccgacaggtgaaagaggagaaccccaaagcgagggcggatgactacgttttcaccagcaacatgatctgtgctggagagaagggcgttgacagctgtcagggggacagcggtggggctttcgctttgccggtccccaatgtaagggaccccaaattctacgtggcaggcctagtgtcctgggggaaaaagtgtgggacctatggaatctacacgaaggtaaagaactacaaggactggatactgcaaactatgcaggagaatagtgtccccagtcaggactaacccattcataccgccagcccctccccccaggacacagcaacgcattgctctcagaccctgtggtagtcccattatctcgcagtgatggagagaagatgcaggagtgccgttaacactgaacttgattgtcaagacacctgaatggatggagggtctgatcacaggcctgtgttgattactcaggtgtgaattccctcctgttattggtaacaacatggcagagactcctctgtcttgcaccattctgcagggtatcttaacctccgtttctttcacctgcttgattccatttataatccttggagtcctttatttacttacaataaagcatatttctaacctg

SEQ ID NO: 3313 - DNA, 1004 bp, Cricetulus longicaudatus
  misc_feature (794)..(832): n is a, c, g, or t
gagatggctatcgaggtctctgtgaactgagtcaggcagatgcttcctcccaactgtaccaccatcctcaggaggccgtgaggcagggtgcgagccagctgtcctgtggagttgactccctgtgcacaggctgctgagagccaggtaaacatgcctgggttccatgctgcccatggttggatgcactcactcctcttacctattacaggctccacctgctgtcctgagtgtgaggactaagtgagcacgcatgcaaggaggggcctcggcaacccagctagggtgctgtacacatcccttgataccaccttattcttttcttaactttttctccatccctggtgggaacgaagataggaagaaataggtgcccactggtgtcctggtgtagtggccagatggctcatgcaggaccatcccctcagggttcttactggccatgcgaggcatctcagaactcctgccttttgttcccctgagcatcaaatgtcctccagaagacttggagcatttgctgagggccaaacacagacagatggtacccggggctggtctagaaagaacagtacagcatctgggacaatacagtacttgttttgtcacttaaacacagcctccctgagctgcctggtggagtcctgatacttcggccacatcagaatgccagctagactaaagagacagtagaggaagggcacagtgagggttggccatgaggaggtggttgagaacaccgactgaaggaatactcaagaggagagccctgacaaagcaggaggaatgtccagcccagnnnnnnnnnnnnnnnnnnnnnnnnnnnnnnnnnnnnnnncctgagtccttaagagcagacagtaagtgagatcagggtgagatcagaggaggtctgagaccctcagttagaaagatccccaagtccttcccccatacacacacctgcaagctgctaaaaacccactggagttggtgcctgggacttaatgaggtgcctgctgacatagcat

SEQ ID NO: 3314 - DNA, 350 bp, Cricetulus longicaudatus
cggatcttctgtcctctccaaaccaagaggttaacatcttgaaggcgtggcgttgatgcgcatgcctttaattccagcactcaggaggcaaaggcagaggatttctgagttcgagaccagcctggtctacaagagctagttccagggcagcctccaaagccgcagagaaaaaagagggtacatcttgttgcacaggagggtctgtggcctcaaggtaggcacccctaccccaacgtgctaccctgctttcccctccattccaggcaatacgcattgtacttgtacttgtatctctggacttgaaactatccaccagtttcttgaaagcaggggtgaatctcaatcctagc

SEQ ID NO: 3315 - DNA, 1306 bp, Cricetulus longicaudatus
ctagcgctcattaaattgagaggtcaggtagctgtgtgtgtgggctcatgcactatgtgacttccgcagcagctagactgcagggaaggaaagaaagcaagaaggcggggtttaaggcaagttccttgttcccttaaaggaaaaggaagcccactgtcttggccagtgacaccaacccctcacacattagagggtgtgattttcttttctgtaataacaatgacacaaataaaaatatttatatagaaagcatccatatatagattccgtaaacactgtaggtgaacaagtgcaacttcaaaagtaaatacaaagtaagaggcaaaacctacaagcattttgcctttaggagaaaatgtaattttccagaaatgatcccatccagacacaaaagtggctctgtctcctggggaggcggcagcatcctgccgtgctccctgcacccacctcagtaactgcagacggcaacaagtggcagcaagggtgccactaaaacaaactgagtcatacactgaagctgaagcctgtgctctgagcattccttctccctaagacacaccctctgaccctgagaggatgtcccttctgtgaagctcctacagccacctctccagccctggaccctctcctgaggtgctgagtaaagtaaccaccaccactgtacccacccagtctcttccatcttcctaattttgccattacctttttctgccatggagagccatgtaatttttgacgttctaatactgtgtccctgtctccaccgcctcactggcaggtgtttctcatcagctacacaggctacaaagactttacactgaacagtcaagcctcaggttcaagttatcttctatcttgctaagatgctgagactttgagtaaagtcacttttctcatgagactgtctctgttcacacagcccgacttacttatcaggcacttacaaaagatacatcagctccaaatccctctttattagagaagtcttctccctcatacagccagtaaccaactcgaaagacgactgtacccagcccttgatcctgtaaggagcactaaagaacatcccaactctgggaacagcaggcaagactgaggtggggcaccagactacaagactgaaacgtagggaggggttagggctctccacactgcctgtgttgtgtccaggccttctttagtcctcaccacccaatgccactgatgagcctttagactgcctcctctcaatgccatgggctggagcacagcacgtgacttatttgggtatgggtaagactagttcatagagcagtgacactcaacg

SEQ ID NO: 3316 - DNA, 271 bp, Cricetulus longicaudatus
  misc_feature (45)..(64): n is a, c, g, or t
aggccagcctggtctccagagcgagtgccaggataggctccaaannnnnnnnnnnnnnnnnnnnatcaaaaaaaacaaacaaccccaaaaagcctagtgtctaacatccctctcagggaaattgctcctctgttggaattccatcctctcttcagtcagacaatggtcccaagttcatctctcagatcccccaaatgctatctacagctctcaaaaccccttggcattttcatatcgcatatcacccccagtcctcagggaaggtagaatg

SEQ ID NO: 3317 - DNA, 770 bp, Cricetulus longicaudatus
  misc_feature (542)..(543): n is a, c, g, or t
  misc_feature (736)..(753): n is a, c, g, or t
agcactacctttgctgacagctctgacaggacactggaacgttgaaaggggaagtctatcagcttcttcaatggccaatccatgacttccctgttcagagctgctgtgtgggatccttggtctctgctcatgtgtgacctgactggacctggtgaccacatacatgcctatcagctgactggctacatggccacacatgtgcgaattctcagcagatgcacctggaagactaagttgtggcctttggtaacctgaatcctctcaccttggagggggaaactagctgcctgccctgcacagagaaggattcagatactaagctaagacccaccatccccagactattgatgccttccctggactcagaggtgacagtatgcatctaagggctgtcacggaggaaaaggcagaggctaggattcccagccctgttcccaccactggaagaagcagtaggccccagcctacccctcctctgatgtttgctgttttgttgttgttgttaattcctcaccaggtggaaccagcactgtggggcttanntaagctcagccagctgttgctgaacacgggaatgcagtgcgtggcagagtcagcctggagcagtggaatggggagggctagggccacggaatcccaggcctagatggagcgtggtctgagtttggggcatagaaagctggggcttcaaaggggactctgtgggaaggtccaaggatgttcaactgctgctttnnnnnnnnnnnnnnnnnncatgcattgaaagagct

SEQ ID NO: 3318 - DNA, 478 bp, Mesocricetus auratus
  misc_feature (220)..(266): n is a, c, g, or t
gatggacaaagtggagctgtcagatctgtccttcaacaaggactggtctttctatctcttggctcacagggagtttgtacccactgcgactgataaatacgcctgcagagtttcacacataactctgaaggagcccaaggtggtcacctgggaacgagacatgtaatcaagcgtcatggagatgcttcatttggatcagaagtatttctcagcttttaannnnnnnnnnnnnnnnnnnnnnnnnnnnnnnnnnnnnnnnnnnnnnngaattaattcggactaggatgagagagaatgagagagaatgagagagaatgagagagagtgagagagttccttgtgcctgagattttagtcacagttcactctgttcctttgtaagtgcctgagttccttgctgtcaccatgctccctatagctagaaagatcgattgtcttttgtacatcctaataaactcttgttaaaaccacgtagtcc

SEQ ID NO: 3319 - DNA, 787 bp, Cricetulus longicaudatus
  misc_feature (76)..(90): n is a, c, g, or t
gggggcccgcacagccaagaacatgaccgagcgccgcgtgcccttctcgctgctgcggagccccagctgggaaccnnnnnnnnnnnnnnncccggcccacagccgcctcttcgaccaagccttcggggtgccccgcttgccggatgagtggtcgcagtggttcagcgccgctggttggcccggctacgtgcgcccactgcccgccgcgaccgccgagggacccgcggcggtggccctggccgcgcccctggccgcgcccgccttccaccgtgcgctcaaccggcagctgagcagcggagtctcggagatccggcagacggccgatcgctggcgcgtgtccctggacgtcaaccacttcgctccggaggagctcacggtcaagaccaaggaaggcgtggtggagatcaccggcaagcacgaagaaaggcaggacgaacatggctacatctcccggtgctttacccggaaatacacgctgcctcccggtgtggaccccaccctggtgtcctcttccctgtcccctgagggcacacttaccgtggaggctccgctgcccaaaacagccacacaatccgcggagatcaccattccggtcactttcgaggcccgcgcccaaattgggggccaggaagctgggaagtcggaacagtctggagccaagtagaagccatcagcctgctgcatccccaacagccatcactcgccacccctctctatcagtctttatgctcttttgatacatgtactttctgtttttctcaaataaaagttggaagctactgccccc

SEQ ID NO: 3320 - DNA, 2106 bp, Mesocricetus auratus
cctataaggtaagaagcagtcctcccccccttctgtaatcgctgtgccgcctcagcttccccctcctctggccctaaccactcgctgcgcagattctcaactggagaatgctgatattgggatcccttcctagcttggagccagccaagccagtcatcgaccttgggagcaatcctgagctgcaggacacaatgtgatctggctgttgttgagtctagctcccacaaaatcctaagagtgcctgaagctctcctgcagcatgtgtggcatttgggccctcttcggcagcgatgactgcctttccgtgcagtgcctgagtgctatgaagattgcacacagagggccagatgcatttcgctttgagaatgtcaatggatacaccaactgctgctttggatttcaccgcttggccgtggttgaccccctctttggaatgcagccaataagagtgaagaaatacccttatctgtggctctgttacaacggggaaatctacaaccacaaggcgctacaacaacgctttgagttcgagtatcagaccaatgtggatggtgagattatactgcatctctatgacaaaggaggtatcgagcaaaccatttgtatgttggatggggtgtttgcattcatcttgctggacactgccaacaagaaagtgtttctgggcagagatacctatggagtcaggcccttgtttaaagccatgacagaagatggatttctggctgtatgttcagaagctaaagggctcgtttccttgaagcactccacaactcccttcttaaaagtggagcccttccttcctggacactatgaagttttggatttaaaaccaaacggcaaagttgcatctgtggaaatggtgaagtaccatcattgtcgggatgaacccctgcatgccctctacgacagcgtggagaaactcttcccaggcttcgagttagaaacggtgaagagcaaccttcgtatcctgtttgacaatgctgtcaggaaacgcttgatgacggacaggaggatcgtctgccttttatcagggggcctggactcgagcttggttgcctcctccttgctgaagcaactcaaggaggctcaagtacagtatccactccagacatttgcgattggcatggaagacagccccgatctactggctgctagaaaggtggcaaattatattggaagcgagcatcatgaagtcctttttaattctgaagaaggcattcaggccctggatgaagtcatattttccttggaaacttatgacattacgacagttcgagcatctgtaggtatgtatctaatttccaagtatattcggaagaacacagacagcgtggtgatcttctcaggagaagggtcagatgaacttacacagggctacatatatttccacaaggccccttctcccgagaaggcagaggaggagagtgagaggctgctgaaggaactctacctgtttgatgttctccgcgccgaccgcactactgctgcccacggtcttgagctgagagtcccgtttctggatcatcggttttcctcctattatttgtccctgccaccagaaatgagagttccaaaaaatgggatagaaaaacatctcctgcgagagacgtttgaggactccaacctgctccccaaagagatcctctggagaccaaaagaagccttcagtgatgggatcacctcagttaagaactcctggttcaagattctacaggattatgttgaacaccaggttgacgacgcaatgatggcaacggcagcccagaagtttcccttcaatactcccaaaactaaagaaggctatttctaccgccagatctttgaacaccattacccaggccgggctgattggctgacccattattggatgcccaagtggatcaacgccaccgacccttctgcccgtactctcacccattataagtcagctgccaaagcttagatgctctctaaactctagtgtaaaagttaagtgtttcttctcactctgaaggagtagacatcgagacaaacacagaagtaatgcaaatcaaccatcaaccactcaggctaacataggcatggaaagaaataaaaatattacatctaaaatgaaaaaaaaaa

SEQ ID NO: 3321 - DNA, 747 bp, Cricetulus longicaudatus
gtacctggccccaggagccacccagtagcggctctcccgcagaggagcgcgggagaacgcccaccctcgccgccaggggcggggcctgggcggtccgaggggcggtccgagggcgggggcctcggcagcggcgtctgtgacccgttgccgaggcggcggcgaagctagttgggtttacctcaccgctttctcgtgcctcggcgcctcctctgcgggcttcctcctcacaccgctcttcgctcccgccagccgaccgattccgtcatggcgacccgcagccccagcgtcgtggtgagccccgggactcttcagcagagcggacagccaggcctaggcggctggctgctcagtggcgccgctcggggcccgttggcgggccttgggtgttggggcccgcggaagtccggggcgggggcggtcaccgcttcccggaatccggctgcgcgtccccagagggcggcgggcagcaggatggaatggcggggttcagggctgggtctcccctgggagccccgagacggttgactgcttgtgaggcaggcaggtggaaatggcgttgccttgacatgtgcggccaccgggagcccggctgggagaggcggagggcgacttggagaaagatacctcacggagaggggagaggggagagggcgggggagctttctcggggagacccttgctcttgaagttcggggcttggcggccagggagagcttcggggggcgcctctggaaggagctccagtac

SEQ ID NO: 3322 - DNA, 275 bp, Cricetulus longicaudatus
  misc_feature (172)..(192): n is a, c, g, or t
tagcttatgctctgatttgaaatcagctgtctttctttttcagattagtgatgatgaaccaggctatgacctagatttattttgtattcctaatcactatgtcgaggatttggaaaaggtgtttattcctcatggagtgattatggacaggtaagtaagatcttaattgaannnnnnnnnnnnnnnnnnnnncggttaagagcactgactgctcttccagaggttctgagttcaattcccagcaaccacatgatggctcacaaccatccctaatg

SEQ ID NO: 3323 - DNA, 221 bp, Cricetulus longicaudatus
ctaacttcttacatctaataattttttgtgtgtattcaagaatatgcatgtaaatgatgtttttttttaactagaatgatcagtcaacaggggacataaaagttattggtggggatgatctctcaactttaactggaaaggtaagtaccttaaagggaaagcaaagaatcatttttataccaagaatcaattagtaactgtgctttcaatcactcacttgg

SEQ ID NO: 3324 - DNA, 285 bp, Cricetulus longicaudatus
gcattcaggattaaaagcttataaaaaatgaacatatgggtcaaatattctttctaatagtatacttgtttcaagcaggatacagtataatcaaatacaagcaagaatttcccagagttatatgattttactgataattggaaatatatctcacttcattttctgattttcatttctcttttttcttctagaatgtcttgattgttgaggtaagtgctgcatttatttctaaaatactgttaaattttctcagcttagtgtatactataggtaagccagggaaaa

SEQ ID NO: 3325 - DNA, 193 bp, Cricetulus longicaudatus
acttaccacttaccattaaatacctcttttctttttaaaaggacataattgacactggtaaaacaatgcaaactctgctttccctggtcaagcggtacaacctcaaaatggttaaggttgcaaggtatgtatgccattttaaagtagaatgtttttttttcattgggagcaataagcaattgcttctttgtaa

SEQ ID NO: 3326 - DNA, 459 bp, Cricetulus longicaudatus
ataatgttctattgtctttcccatatgtcacatgtaatattttgtaattaacagcttgctggtgaaaaggacctctcgaagtgttggatataggccagactgtaagtagatgccctttggtgatcattttatctatcatagctgaaaggtgactaaaattgcttagagttattttagagaacgtttgtaaagaaggcacatttgcaaatattagatttgaaagtactgttttctctgtctaaataataaactgtgattctttacagttgttggatttgaaattccagacaagtttgttgttggatatgcccttgactataatgagtacttcagggatttgaatgtaagtaatgtttctttttttctcgctctcatttttcaaaaaacccacataaaaatttaggaaaggaaagaattgttttctccttctagcacctcgtcatttgaccagactgatgg

SEQ ID NO: 3327 - DNA, 3554 bp, Cricetulus griseus
  misc_feature (879)..(956): n is a, c, g, or t
  misc_feature (1008)..(1046): n is a, c, g, or t
  misc_feature (1318)..(1359): n is a, c, g, or t
  misc_feature (2726)..(2880): n is a, c, g, or t
  misc_feature (3171)..(3215): n is a, c, g, or t
  misc_feature (3530)..(3547): n is a, c, g, or t
gaattccggaaagaagaatgggggagggggactggtccgcccttcctggctgtcgccaccttgcaggttttgacacagtgacagagggagatctgagaaaggagacagactggagggagctacttgttctcctggaaacccgggagccacttggtgcagacagcccttcctactttccctgcggctcttttgtgtgactttgagaggggctcccggcgactgattgctactgagcgcctgctgaggcagcagctgggctccggaaggaggacccgagcagagtaagtggccagagcgagccagcacagacctcaactgatggaactggcatgcagtttttgaagtcagcagaaacagaaatcaaattactatcattttatgctgctggaacgtcaaggaaggggattccacaccagctcagtcaccaccgtgcgacaggcgagtcacaggatagcggaccctggcgacaatgaatgtaagttcttaggctgctgtcttttactgctgtgggattttctttctggttgaagtcacgcttggccacgatgccgtcattgccatgagaatttctggagtggaaagttctctgctgctcttcgggatgcgtttttctttcactaaccaagccacagacatgagctgcaattcctgatcgccgctgcggcgattctgcctgagactaagaagcatacccagttactatgggattagcactgcatgggtttttaacggacttccttagcacagagggcacacagccttcctacggatttcggatgctgttttaactttgtgatggctgaactcgtgaaatccgcacatttatcccgagaattggctgaaacagattcccagcggttccaaaacttttcttccttnnnnnnnnnnnnnnnnnnnnnnnnnnnnnnnnnnnnnnnnnnnnnnnnnnnnnnnnnnnnnnnnnnnnnnnnnnnnnncctcggactcttcctagcactgtgaagggaggcagtatcaagaggcgtcacnnnnnnnnnnnnnnnnnnnnnnnnnnnnnnnnnnnnnnnagaggagccacacatggtctccgcttcaacacgtcctagcaccgggacatgaagatgaatggtgagccaaggctatgacttgctagtctttccacacttgatccgctacaacttccggcttagacatggaaattctttgtgaagacaatacttctctgagctcaattccaaactctttaatgcaagtagatggtgactccgggctctaccgtaacgacttcaactccagagatgctaacagctctgatgcatcaaactggacaattgatggnnnnnnnnnnnnnnnnnnnnnnnnnnnnnnnnnnnnnnnnnngacatgcctctccattcttcatctccaggaaaaaaactggtctgctttattgacagctgtagtgattatcctaaccattgctggaaacatactggtcatcatggcagtgtccctagagaaaaagctacagaatgccaccaactatttcctgatgtcacttgccatagctgatatgctgctgggcttccttgtcatgcctgtgtccatgttaaccatcttgtatgggtaccggtggcctttgcccagcaagctctgcgcagtctggatctacctggatgtcctcttctctaccgcctccatcatgcacctctgcgccatctcactggaccgctatgtcgctatccagaaccccatccaccatagccgcttcaactccagaaccaaggccttcctgaaaatcattgctgtatggaccatatctgtaggtgtttccatgccgatcccagtctttggattgcaggatgactccaaggtctttaagcaggggagctgcctgctggccgacgacaattttgtcctcataggttcttttgtggcatttttcatccccttaaccatcatggtgatcacctacttcctcactatcaagtcccttcagaaagaagccaccctgtgtgtgagtgacctcagcactcgggccaaattagcctccttcagcttcctgcctcagagttctctgtcatccgaaaagctcttccagcggtccatccacagggagccaggctcctacaccggcagaaggacgatgcagtccatcagcaatgagcaaaaagcgtgcaaggtgctgggcatcgtgttctttctgtttgtcgtaatgtggtgcccattcttcatcaccaacatcatggccgtcatctgcaaagagtcctgcaacgaacatgtcatcggagccctgctcaatgtgtttgtctggattggttacctctcctcggctgtcaatccactggtctatacactgttcaataagacttacaggtctgccttctcacggtacattcagtgtcagtacaaggaaaacagaaagccactgcagttaattttagtgaacactataccggcattggcctacaagtctagtcagctccaggcgggacaaaataaggactctaaggaagacgctgagccgacagataatgactgctctatggttacactaggaaaacaacaatcagaagagacttgtacagacaatatcaacaccgtgaatgaaaaggttagctgtgtgtgacggactggttgctgtgacgctggcacttgaacaagtttttagccttgtgtgtgggggtgggaataaggaggctgggacaaattagactactccagtgactcaacagaatctatatgcctcattgtattctgtgtatgannnnnnnnnnnnnnnnnnnnnnnnnnnnnnnnnnnnnnnnnnnnnnnnnnnnnnnnnnnnnnnnnnnnnnnnnnnnnnnnnnnnnnnnnnnnnnnnnnnnnnnnnnnnnnnnnnnnnnnnnnnnnnnnnnnnnnnnnnnnnnnnnnnnnnnnnnngcataaaatcaatctaattaatttctattattcaaattgaaaccttgctgccatgttgttgatgggtggcgcaggagtgagttggtgaactattattgtatataaaaatagctagaaatactaaaataatgaatagcctcttttaaaaaagtgtttaaaattcaccatgacacatattttgaaaataaaaaaatagtattatgaaacttgtattgctaatataaattaattgaaatacttgacaatattttttcattcttgccttttcatagatgccattttgaatgttcnnnnnnnnnnnnnnnnnnnnnnnnnnnnnnnnnnnnnnnnnnnnntgggaagggtttaaatgttactcaataacgtgctgcttctcttctacttcttggcttaacctgaatttgcaatgtgatcttgtttcgtatattttcctctctgtaaactatcaaaggataattttgcttttcgaaatacagttctagaacgcgcttcaaagaaacagcaccctggaggtatttggtcacgcactgtgggaccactgcattgtgcatgcgccctttgagctgtgaccagtacattgatttgactgccacagctaaacaataaactcaggtttctcgctgttagcagtagcttcttaggctgtttcnnnnnnnnnnnnnnnnnnggaattc

SEQ ID NO: 3328 - DNA, 1369 bp, Cricetus cricetus
gcatgcaactggtgcctatgctgtggttggaagatgcccccataactgctagtcgtgcggggccgggaagcagggtcagtctgcgcgccacgttgtctacgtggctgcaccatactcatggcccgcctgtcccgctagagagcaccacgtgcagaatgcaaagccgggaataaactttgctagtctcccaagcctgggtcgcgccattggggaagtgtgcaggggtgagggggacagcgagcaggtgcgtgcaggagtcggagtcccgcccgctcccatagggccctgcggcgtgctggcaggccggcctcggtggcttgctgccgtgcgcgtgcctgccgcagggcgtgtcggcacgaggccgggcgggacggggcgcgcgcgcgggggcgagcggaggcccccccgggggcgggcacgcgcgctgcggccccccgccgcactgacgcgcgtggcccgcgcccctcccgcccctcggcgcccggcccggggttggccgccgcggatcccccgcccctcccccgcgcctcccggccggaaccgatcgcggctggtttgagctggtgcgtctccatgacgacgtgctcagcgtataagtagtgcgtcgcgccgtcgggctttgtcagtccctgcagcggccgccgccgtccgcccgccctcagccagctgctcggtgccacctcgggccagcgtctgcggcgggctcgacgaggcggctgacggggcggcggcggacggcccggagctcctcggggttcttcggcggcgactagttctcatggggctggccgagattgcgtccgtgcgctgtgaggtgagcggggcgcgggagggatgtgcggccacgtgtcgcgaggccccggctcgtgccgcccgcaagggacacgtgccccggggccgtgaccttgcgagcccgtgccgcccggaaggaaggcagcggttcctgacccgtggctgcaaacccttgcgacgcccacgggagctctcttggcgtcagcccggctctgcgctccaccggcgaggatggaggcaacccgcggcaggtgcaccccagcgcggccgccggagcagtcctccctgcagctccctgccgctttctttggtttcgctacgtgtacagagcagagccgacgtagaagttgctagacctaaatttagtccgggagtcactgctgatggatgcccaccggctgtgacttggaattagcactcctgggatgacttagtggtttaggagaagcccggctgtccggcgtgcatgtttagaagcccggctcggaatcctcagtaactgtaaaagtgagggggccagagcctgtcaaggatgtctgggagaggacaaagaatgcagtggctcattttattcaaa

SEQ ID NO: 3329 - DNA, 1161 bp, Mesocricetus auratus
  misc_feature (319)..(336): n is a, c, g, or t
ccaggaagaaggaacatcctgagacgtctgaattaaacctcacaatcagcctactttgagcacaccaggacaagggatcatggacatcgaagcctatttcgaaaggatcggttataacaacccagtctatacattggatttggccacactaaccgaagttcttcagcaccagatgcgaacaattccttttgagaatctcaacatgcactgtggagaagccatggacctgggcttagaggctacttttgatcaaattgtgcggaagaagcggggcgggtggtgtctccaggttaatcatctcctgtactgggctctgacnnnnnnnnnnnnnnnnnncaccatgttgggaggatatgtttacatagtgcctgtcagtaagtacagcagtgagatgattcaccttctagtgcaggtgaccatcagtgacaggaactacattgttgatgctgcctatggaggctcctaccagatgtgggagcctgtagaattagcatcagggaaggaccagcctcaggtgcctgccatcttccgtttgacagaagagaacgaaacctggtacttggaccaaatcagaagagagcagcatgttccaaaccaagaatttgtcaactcggacctccttgagaagaacacatatcgaaagatctattcttttactctccaaccccgcactatcgaggattttgaatatgcgaatacctaccttcagatatctccagtatctgtgtttgtaaacacatcattttgttccttgcaaacctcagaaggggtttgctgcttaataggctccactattgcgaggaggaaattcagttataaggaaaatgtagatctggtggagtttaagaatgtgagtgaggaagaaatagaagatgtgctgaaaactgcgtttggtgtttctttagagagaaagtttgtgcccaaaaatggtaacctatcttttagtatttagggtaaagcgcaaaactgcttttcattattatttcatgttcttaaacatttgagacatatgcaaatatattcataggagtccttaaagagtcatcacccagctcgatgttgatcagctgatgacttgtatcttctacttcctacattttatgaaaaagcaattgtagctgtcctgttatttcaccaataaaaatataatcagttataatt

SEQ ID NO: 3330 - DNA, 709 bp, Mesocricetus auratus
  misc_feature (615)..(634): n is a, c, g, or t
  misc_feature (683)..(709): n is a, c, g, or t
tgcatgcagaattgggctgtggttcccgaagcttctggctgtcaaaggcatttctgatattgctgacactgatcactgaaagggaactcgagaagcgatgcacatctcaaagctgccagctgctctcctcatcttctctgtggcactaaaccacttgaaggctacacctgtcagaagtggcaccaaccatcagatggacaaacggaagtgcaacacggccacgtgtgccacacagcgcctggccaactttttggtccattcgaacaacaaccttggtcccgtcctctcaccaaccaacgtgggatcgaacacgtacggcaagaggagtgctgcggagattccagacggggattctttggatctcttcctcctttagagtcggcatacttcttcatctcttgttattttgtgtgtaaatactctggcactttcacgaattatttaacagtgcctttttcatttctacttgtgagtgcactgcaacgtgttccatgctttctggctctgtgtgtgtaaaatcctcatcctaagaatggtttttaaactgagggctgaatcaagatcaggctgaagaccatgtctcttgacacaacatgttcttgaaatactgaaaannnnnnnnnnnnnnnnnnnncttataactttgtgattcaagtctaacaataaaggagactcctggagcnnnnnnnnnnnnnnnnnnnnnnnnnnn

SEQ ID NO: 3331 - DNA, 336 bp, Mesocricetus sp.
ctgcagctgacgccatgagtagcgattctgagatggaagtgttcggcatagccgctcctttcctccgcaagtcggaaaaggagcggatcgaagcccagaaccacccctttgacgccaaaacctactgctttgtggttgactcaaaggaagaatatgccaaggggaaaattaagagtagccaggatgggaaggtcaccgtggagaccgaagacaacagggtaaggcgtttgctctttttcttcctcagcactgaccactcctcacatggctttgtggaggcatctgaccctctccaccatgccagaccaagctggcctggagtcagcatctgaacag

SEQ ID NO: 3332 - DNA, 3627 bp, Mesocricetus sp.
  misc_feature (1122)..(1152): n is a, c, g, or t
  misc_feature (1235)..(1325): n is a, c, g, or t
  misc_feature (1503)..(1524): n is a, c, g, or t
  misc_feature (1576)..(1603): n is a, c, g, or t
  misc_feature (1856)..(1870): n is a, c, g, or t
  misc_feature (2084)..(2101): n is a, c, g, or t
  misc_feature (2120)..(2211): n is a, c, g, or t
  misc_feature (2557)..(2597): n is a, c, g, or t
  misc_feature (3117)..(3117): n is a, c, g, or t
  misc_feature (3124)..(3125): n is a, c, g, or t
  misc_feature (3141)..(3142): n is a, c, g, or t
gaattcagttagaatatctcactgacgctgtgcaagcatcgtcgctcattaagcagtgcaaatgtcttctgtctcacagcaacctcgtgagcacgaagaagccagatcctccgaattcagtcgaatgaccaggtgaagtcagagatgacaggaagattgcagagaaggtagaagagcttgagcaataagagaacatcaaggacagtagagccatgcaaggcctgacgtaggtcgcagaggaataggccatccgactcaagaagaagatgaggtgacctcaatgagatcgagatccagtgagccatgccaacgcaggctgcagagaacctcaaacacctccgaactgtccaggacagctacgagtcgggaagtcatggtgggactccatgtcagatatgcaaagcatgctagtcatcgtcttgcccgacttcagcctctctgctatttctggctaggacactcagctgcacctggctgacgctctccggggccaggaggacctgaaggagcagctggccatcgtggagcgcagagccaacctgctgcaggccgaggtggaggagctgcgggccacgctggagcagacggagcgggcccggaagctggcagagcaggagctgctggattccaacgagagggtgcagctgttgcacacccaggtgagggcaggagcagggtcaagggtcaccaggcacactgtctgacgtcgtcctccccacccagaacaccagcctcatccacaccaagaagaagctggagacagacctcacacagctccagaatgaggtggaggatgccagcagggatgcaaggaacgcagaggagaaggccaaaaaggccatcactgatgtgaggctccccgtcccgttttggccacggagatatgtgcctattaagcctcttccttaacctgaatagtgatgaagttacttgtggacaatctgatgattaaatgtggcccgaacttactgttcctaaatcatgtcttctgtcatgtcaagctttctctccttagagggtgtgttcttcattgttgcctgagtgagaccttaggcacattctcatcacatcttaccttctggctcagcttcttctggtcaatgctcatgcgcactgctgccnnnnnnnnnnnnnnnnnnnnnnnnnnnnnnnagagatacattcctactctaggtctcatcccgtgtaggttagactcattcacctagagtgaattctctagtctcattctgatnnnnnnnnnnnnnnnnnnnnnnnnnnnnnnnnnnnnnnnnnnnnnnnnnnnnnnnnnnnnnnnnnnnnnnnnnnnnnnnnnnnnnnnnnnntctctaccttatcagtacagtatctctcagctacgatccttgaacttgtgtgaaatgaactctggttgagtctagagacagtccagatactctccgcaccggtcctgtagagtatcttatgtatcttctgtccagtgtagcttttgtccagttccaagtggaacactcactcggtctnnnnnnnnnnnnnnnnnnnnnntctgtccagtgtagcttttgtccagttccaagtggaacactcactcggtctnnnnnnnnnnnnnnnnnnnnnnnnnnnngcctgcaatgccaattccacagctgcaagactttgagccttccacacacgtgatttcaggccgccatgatggcggaggagttgaagaaggagcaggacaccagcgcccacctggagcggatgaagaagaacctggagcagacggtgaaggacctgcagcaccgtctagacgaggctgagcagctggcgctgaagggcggcaagaagcagatccagaaactggagacacgggtaccatgcaaggggaagcccannnnnnnnnnnnnnnccagcccatgctgcccaaggaccgctcgtctagaagtaatgtgtcccaaagcagtcagttctccccagatcagagagctggagtttgagctggaaggggagcagaaaaggaacacagagtctgtaaagggcctgaggaagtatgagcgtcgggtcaaggagctcacgtaccaggtaggtagaaagagcacctaatgagggtttctctccaaggnnnnnnnnnnnnnnnnnnctgcgaacaacgtggaacnnnnnnnnnnnnnnnnnnnnnnnnnnnnnnnnnnnnnnnnnnnnnnnnnnnnnnnnnnnnnnnnnnnnnnnnnnnnnnnnnnnnnnnnnnnngctgagattgcaggatctggtggataaacttcaagtgaaagtcaagtcctacaagaggcaggctgaggaggctgtagcgaaggttaaagatagttgtgtggctggcccagcccgttagcccgcaagggaggccctgaagagaaggggacaattgccgatttcacctcggctgggctctttgcctgtaggatgaacaagccaatgttcatctcaccaagttccggaaagcccagcatgagctggaggaggccgaggaacgtgctgatatagcagaatcgcaagtcaataaactgcgggctaagacccgagacttcacctccagcagggtaagtccacctagggaagnnnnnnnnnnnnnnnnnnnnnnnnnnnnnnnnnnnnnnnnncttgtaggggatcctctacctcccagatgacaatcttaaactcggagacagaacttgcttatagtcactagcctgggtggagctccactagaatcgggtctgtagcattaaataaaacaccctccagaaagctgcctgaatcatagtccactgagcttgttttttagtagtgccctctgccggtatgagagaggcttgttcaggagcaccctctagaggtgtctgaaggtgttctgcagttactgtaaccacagacccattgtggcctgggagaagggacttattctctctggggacagtttctcaggctatcgagggatctcatgtgggccaccatacatcctcccaaagacccccaaattccttgcatcccactgaaatatacaacactctttcatgcttgcgggaacgtgtgtgctgctttggcttgactgagagcatccacattctctctagatggtggtccatgaaagtgaggagtaatcgagccctcccgatgcagggtggaagatatgcagantgtgtannttccatggctccttgnncatcatacttaagttccatgtgactctttgccacatgcaataaaatttgccttgtttcaagttgtttcgtcttgtgcctttcctcttctccgcatgagatgatcctcttttgatgattttttttctccgatactgaatatcataagcagatggttaggcagaattaattggtaattgtgtgatgtgtaagtgggcttctggttatatgagattaagcattgcttcatgggtcaggagagagagcttgcaactctactttatatcagtagagacaaaggtgttcagacactgttcaatgctggatacactctcacatttctaggaatatattcttgatttagttaataatggctggttcacatacatgaatatagatgaatgtcatagtgttggtcttcagatctcagagcacggtgtagctcatggtgacatactcccaaatctcagctctggtccacctgcactgtaaagcacattttataagc

SEQ ID NO: 3333 - DNA, 2733 bp, Mesocricetus sp.
  misc_feature (18)..(48): n is a, c, g, or t
  misc_feature (730)..(750): n is a, c, g, or t
  misc_feature (1616)..(1633): n is a, c, g, or t
  misc_feature (2138)..(2138): n is a, c, g, or t
  misc_feature (2153)..(2154): n is a, c, g, or t
tttgacgtaaggaacatnnnnnnnnnnnnnnnnnnnnnnnnnnnnnnnacagagtagcaagtctcgcatactctccagcactcctctcgcctggcctcactggatacacaatttgctgcttgatctgaaatgcctaatcctggaatgaatctctgaagtctctctgattcatcacccataaggtggtttctgtggggaaagactatgttccaattccagtgtctcatctgaagcatccatagatggaaagtgcatacagagggtgtttaataaatacttcttatgaaaactttgtcctgttttctccactcctcacctagcttctgtttctcagcttgtgtgtgtgtgtaggcgtgggcagggacggtcctcattctcaagtgggatatatgggtactggctctctattaatgactgtgggtgccatcctccctgcagccacgcaccctcttaagaacagggtaggaaacaaacagccgcatggaaatggacaaaacctttcaaaattaatacctttcattcttgtcttaatattccagtcctgatttagaatgacagcatctgttagataataccaccctccctttctttgcaggccaccatcattccccccctcgttcccccatcctggctggcagctggtctttcctaattcggtaatatgtctgattaaccacaggccctatgcagctgtcacctcttgaacatgggctggtgtgcattaactccnnnnnnnnnnnnnnnnnnnnncctactagtgcttaagaaggattaagttaataatgacagtaagagacagaaagcaaggaggaaggagagagaagggaaaggaaaaaaacctataattcatggcacaagttttacagtggaactgtcctgccataaccttggcttgtgatgacgctggctcataatcccaaggggatttcaacaggttcaatctgatttttattcatttttctcatgtgatgagatttcctaagcaaatagcacaataggcaaaataccctgctcccaagtggtcgttgctcccactggtttccagggtgggaggaactgcaggagtcaaggcagggctcctaagcaaaggcaacccattgtgtcaggtgaagaagcaccgacccagagagagagataaggcatctcaaattcccagctttctgcagttggaaaaaatggtttcggaccctgctcatttctatatatactttccccttggcaacaacaaaaaaaatacgtggaaggggccagttctcagcttgtggtgtcactcattctctttccaaatatagagaaagaatgagcccagggggttagtggtggcctataaaagcccagggggtggctgctcctctgtggctcactctgccgtggtcagaggtaagtggcagtctttccttgtctctcttgtggcctttgatgctttcacaccggttcagtcactgctctggctgtggctgctggctttgtctatctctgaggtggtccttgtttctctctcaagacttgcctcctgctttgtcacacgagtgcctgttctctcctagacacgtgtcaagagagatgcgagctcagtgcctagctgccatgcctggcagctagagcgtactcctgcnnnnnnnnnnnnnnnnnnctagtcattgacttgccattcaatgatgactgcatgagaactgtcaagtggcgagacatgcagcagttgcagctctgccgagctgagctagctgtctgcctatgctgctcagctagactcttctacgcatgcttgtgtgtgagtgtcatcagatcgtcacacaggcattgcacgtctatgtatcttatgcatgtgtgtgcagtcgatgtcagcgtgtgttgctgatcttgtactagtagatgcagtctgtagctagacgatcgactacctggttgcatctgcaatggagaagtgtacatggccggagaaccagtgccagacgttgagccgtctgccagcgtgaggccatggccttgtctgccctcatgctgcttacggctaagactctctatacgcatgcctttttagtcctttttcaccttaagatccggtcaacacagaagcagatgtgcaacgtctctaagtatctctatgccatgtgtgcaggtcccgtagctccacagcngctgctgctcctctnngcttgtccttgtggtgtgactcaggttaggatcgggccaagtccctgggcttcaggaaaccttcaggtaaacccaggtcacccagcactcctttaccatgaggactagcttaggaccgagagaaaggtctccttctcgggttgcacgcagaggctcccatctcttcccttgtggtttgttgtttttaaagatagaatctcatatgtagccccggatggcctagaactcactagatagaccaggtgactcaaactcagagacactgactctgccttctgttgttcttagcatggaagaagaagccgtctcaaactgcctcttccattctgttcagtgttcttgttgaggaatgtcttattgtttattatttttccatgctattatttttcaatgctctgtctgccgtatgtgcttctcagaagaggaaaatggagtgtcaagagtggcattagaagccccttcaccaaatgaagggattgagacacttggattaaatacactctaagtccacagcgtacagtgacaagtgaacaactatgagccgattatatttccagggtgacaccttgtgtggagctc

SEQ ID NO: 3334 - DNA, 418 bp, Mesocricetus auratus
  misc_feature (323)..(324): n is a, c, g, or t
accaccaagacctacttccctcactttgatgtgagccacggctctgcccaggtcaagggccacggcaagaaggtcgcagacgccctgaccaatgccgttggccacctcgatgacctgcccggtgccctgtccgctctgagcgacctgcacgcccacaagctgcgtgtggaccctgtcaacttcaagctcctgagccactgcctgctggtgaccctggccaaccaccaccccgccgacttcacccccgctgtgcacgcctctctggacaaattctttgcgtccgtgagcaccgtgctgacctccaagtaccgttaaactggagnnccggggctgcgtcctgcgggcttgccttctggccaggccctcctccctccctcgcacctgtacctcttggtcaaagaataaagcctaagtaggg

SEQ ID NO: 3335 - DNA, 748 bp, Cricetulus griseus
ggcacggagcagcgcccacgatggctcgctccgtggccgtggtctttctgatgctcctctcagtggtctgcttggatgccatccagcgtcccccacaagtgcaagtctacacacgccacccaccagaggatggtaaaacaaacttcctgaactgctatgtgtctcaatttcatcccccccaaattgaaatcgagctgttgaagaatggaaagaagatggacaaagtcgagctgtcagatctgtccttcaacaaggactggtctttctatcttttggctcacacggagtttacacccactgcgaccgataaatatgcctgcagagttacacacaccactctgaaggagcccaaggtcgtcacctgggaacgagacatgtaatcaagcatcatggaggtctgaagatgcttcatttggatcagtttaattctaaagtatttctcagtttttaatatgctgtttaatctatgcacacggaaggaatagtaatggcacatcatcttctatataacctaccttgaattctgcatgttttccaaaaacagatggaagagtaacatcctagatatctgaaataataaagcatcaatgagtattttgatcagaaacaaaccgttttgataatttgaatgaaaaaaacttgctattaaatataattaagaacagtagttgatcatatatcaaaccctttgtacatcttattagttggatgtagttattcatctttggtctatcacaacataaatgtt

SEQ ID NO: 3336 - DNA, 80 bp, Cricetulus longicaudatus
atggcggaatctgagttgcagctggtggcgcagcgcatccgcagtttccccgacttccccatccccggcgtgctgtttag

SEQ ID NO: 3337 - DNA, 79 bp, Cricetulus longicaudatus
gctgaactagaaatccagaaagacgccttagaacctggccagaaagtggttgttgtagatgatctcctggccactggag

SEQ ID NO: 3338 - DNA, 6296 bp, Mesocricetus auratus
  misc_feature (1237)..(1549): n is a, c, g, or t
  misc_feature (2395)..(2432): n is a, c, g, or t
  misc_feature (2605)..(2641): n is a, c, g, or t
  misc_feature (2795)..(2809): n is a, c, g, or t
  misc_feature (3933)..(3973): n is a, c, g, or t
  misc_feature (4388)..(4411): n is a, c, g, or t
  misc_feature (5012)..(5055): n is a, c, g, or t
  misc_feature (5453)..(5468): n is a, c, g, or t
  misc_feature (5781)..(5832): n is a, c, g, or t
ggatccactcagagtcagatcgagcagctgatggtgaagtgtaaacaatgccaggaagataatgaacagtgtcgcactttcactgtcaagagcatcttcagctgcacatctgtgcctccagggagagacacagttgcacatctgtgtttccagggatgcagcacacctgagcccagcagggagctgctggcacagctactagcctaggcctgccttttgcttccttagtcactctgagatgaggccgggattatttcgccctgcccctgactccctggctccttcctccagcactccctgcacaggaatgtctgaaatttgagactctgtaggccaatagtccaataggagagcagaatcaagtcccacctcctccctcctagcctaggacattgtcataaagctcaaaccagcaaggtccaggtcggcccgctctgcaccagcaccatgcctgtgacactgggttactgggacatccgtggggtgagtgagagagctgctgctgggtgtgacagagacagagcaggaagtagctagggctgatctcttggagacagatagagttcagaacttgatggaaagctttgcctatcaggggaagttcaacaggagagcttgtgcttatgtggtctgggtgttgagcttgtggggagactgtaggtgtaagttggaggctcaccaagaggcggctaaggaagactgtcagtttccccatctgtgacctgtcctatgtcatctttacagctggctcatgccatccgcctgctcttggagtacacagacacaagctatgaggaaaagaaatacaccatgggggacggtgattatgtcctgttggtcagacctgggctcccctgctcattggtgcccagcaacacttgtctgttgctcaactctacagggctgttccttctagaaatttccttgaatttggtcttccagtggagggctgagttacctcctacaggaattggatgatgttttcctctagggcttgttttagtattttgcaaacttcagtgatggagggtccatgcacttacaagcattctatacccttgggtgtgcaaaagtgggtcaggtgcagatctccttctttgggggggtctcatgcttgactccttgaaggattcctagagaaggaatctggggcattagggtgctttctttcatgtcatcttgtccacagctcccaactttgaccgaagccagtggctcaatgagaagttcaagctgnnnnnnnnnnnnnnnnnnnnnnnnnnnnnnnnnnnnnnnnnnnnnnnnnnnnnnnnnnnnnnnnnnnnnnnnnnnnnnnnnnnnnnnnnnnnnnnnnnnnnnnnnnnnnnnnnnnnnnnnnnnnnnnnnnnnnnnnnnnnnnnnnnnnnnnnnnnnnnnnnnnnnnnnnnnnnnnnnnnnnnnnnnnnnnnnnnnnnnnnnnnnnnnnnnnnnnnnnnnnnnnnnnnnnnnnnnnnnnnnnnnnnnnnnnnnnnnnnnnnnnnnnnnnnnnnnnnnnnnnnnnnnnnnnnnnnnnnnnnnnnnnnnnnnnnnnctacttaattgatggatcacacaagatcacccagagcaacgccatcctgcgctacatcgcccgcaagcacgacctgtgtgagtggggctggctgcagggaggacagaagccatcatcttggcttttttgggctatgctgagagtgactccatgctgtgtgcgctgcaggtggggagacagaggaggagaggattcagctggacattctggagaaccaggctatggacacccgcatgcagttggccatggtttgctacagccctgactttgtgagtcccaccaccgctgagctggacctcaccctgtactcttgcccctagaatccactaaggcccagtttgctactggagtctcttggtgctactcattgcacagtgtttgaaactgagacagggtaaccctggcacccagtatgccaaatggaaattcccagtcatggctcctaagtcttaagatccagtccagacttcacagtggaactccagccctgatagtatagacagagttcagaatgctccagttccaactgctggttctgtcccgagccgtgtcacctgcagtgtcttaaagcaatgccacatctgccacacacgccctcacacgtgaggagaagaaactgggctgggggacactgtcctcccaaaaggcttcccagagctgtgtcctgaccccacagagataagcaggtgttcccaaaagcagttcagttgctgaaggcctttgatcctctcttcctgcttcccttgtgctctcaaattcatctcatctctttggaaactgtaccaaagtcctcagcctcacccccagaaggtagaacactgttctctgggtgtttgcttgtttgcnnnnnnnnnnnnnnnnnnnnnnnnnnnnnnnnnnnnnnccacagctgtcttgggtctgatgcaccactgttcagacaacagtgggagagacctgggctgtgggagtgggagcgtggcggggagatccccacccctcctctgcctgctgggactgcagagtcctgtgaggacagcctcttccagggtgcctgtgtctgaggatggtgacagnnnnnnnnnnnnnnnnnnnnnnnnnnnnnnnnnnnnntgcttcaggagaaacgaaagccagaatacttggagggtcttcccgagaagatgaagctgtactcggagttcctgggcaagagatcatggtttgcaggggacaaggtaaagggctgttggtggggaggaggaattgccattcttcccaggcatcnnnnnnnnnnnnnnncaccctggcttcctgcagatcacctatgtggatttcctcatctatgatgtccttgaccagcaccgtatatttgcgccaaagtgcctggatgcatttccaaacctgaaggacttcttggctcgctttgaggtgatgccctgaacctgcttcctactggatgtcctatttcccttgccccttgccagaatgccttttgtcttagttagggtttctaatgctttgaagagacaccatgaccatggcaactcctgtaaggaaaacatttaattgagggcttatagtttttagagttcaatccattatcatcatgggggggcatggcggctgggagtgtggcagcattcaggcagacacagtgctggagaagtaagttgagaattctacttgtgaaggcaaatggaagtgatctgacacactgggcagtgttttgagcaaaggaaacctcagagcccacctccacagtgatcactgcctccaacaacaccacatctactccaacaaggccacgcctcttaatagtgccactcccttttgggccatttttttttttcaaaccaccactttcactccctggacctccaaaggctagtagtcatacataatgcacaaatgcattcagtccaacttcaaagtctccatagtctatcacagtctcaaacttacttaaaggtttaaatttcaaagtctcttctgagattcatacaatctcttaactgtaatcacctgtaaaaatcaaaatcagaaagtaaaccacaggatatatattaccattccaaaacaccgggaagggacatagtcaggaaatacgggatcaaacctgaaagccagctgggcagactccaaactctgcatgtctgatgacaaagcgcccttcagatctccaacaatactaaacctcctaatagggccactccctttggagggcattttctttcaaaccagcatacctttctacttggaatggaaatgaggaataattagcatttgttgaacagggaactgtgttcagttcttagatctattgcatgaaatttatcatcacaaccttcatgttacatagaaatatcaatgccattggactgttaaggaagctgactgtagagatcgtcagtttctcagggaannnnnnnnnnnnnnnnnnnnnnnnnnnnnnnnnnnnnnnnnttctagcttccaagaatagaggacagaggatctcactgatgccaaagaataaaagccatggtttgccatggagcctggattttccatccctgaggcgtatcaggatgtgtcaggagtgtgtagcaagtgctgttcagagggggaattctggcaggactgatacacagtgacaagatgcagtgtgcatatttggcctgtccaattctttgctcagtcatgtccctgactggggaagcactgagacccagggctacagctggtgctgggctgagtggacaggtcagtgctgtttgggggaggtaatcctgacttgttcaatgtttaggtatcctgtttccttcctttcatctttcctcctcagcaatagcttgatgttgagatggggttttgtttcattcaccttctctggtgtctnnnnnnnnnnnnnnnnnnnnnnnncagaaggacttggaaagctgcatctccattcaggatgcagagtggcaggcatgcctgactatgaggcacatgtgatgccacaaaacctactttattagagatttgggggatcgagccagtatccagtgggaatcttagcatgggatcttctgttctgccctcaacaggcgatgtgctttgctaggttcatcagctcggattctggtccaggctgctcagctctggagatgcgtacgagctgacccacagcatagtggcagagtgtgggaggcttcagtcaaggccagctaagcctgcccatatgagtccaggcagccccagaactctgagttctttacagctcatctaggcatctacggggaagacggcacacagcagcgtcattgtggagcccttctctagcagggctggggacaataggatgaatatatgagtatggattcagctgccgggttttaacgtttagatcttctgcttcaagagaatggcaaagatcactcccttatctccttgctggttcaactatcctctcctccttaagtcagaatttgctgaggtactgggtgagagctttgctgtcttcaaagtacactggcatatnnnnnnnnnnnnnnnnnnnnnnnnnnnnnnnnnnnnnnnnnnnnacaggcaggagggagtctgctaggagaaaaaaagcgagtgtttgtgtgaacagagtgacaagggatttcttgcttggtgagtgagccaaaagagccggaatggaagatgcagggatcctcccgtatagacgggtatagactgtagtcgttctagtggtgtgagtaggaggggcacatttagtctctgggtgtgtcggcctccctcctgttgaacgcagagccaacactgttctgcaggatgttgtggagcgatccatagatacacgtactgcaactgcagatgggacacacggctgaaggcagggtttctccttcattctcttacagccttgggcacccgagcagctcatgctgtgttcgggttcttagagtgaaacctgtgcaccccgtggccacannnnnnnnnnnnnnnntctctcctctcccttgcagggcctgaagaagatatctgactacatgaaaagcagccgctttagctgcaaacaaatctttgcaaagatggccgtttggaactcaaaataggacttcgaagcccagacctgggtgaatactcctgatcaccatgatggctccggcccttaggcatggttctgtgaccccaccaaacgttgatttcttcttctttcagctccccactcctctatttcttctcacaagcccttccttcagtcaagcctctggatcctactcctgttcctttgccctgccctgagtcctgccatcccnnnnnnnnnnnnnnnnnnnnnnnnnnnnnnnnnnnnnnnnnnnnnnnnnnnnagatcagatctgcctgtgtgctggctctggtccccagagtgagcaacggggccctgtttgatctccagtaaagtctgaatgacatttttcctgtgtcttgttttgctgctgtgactctccgtgttggctttttgggtggtctctgttttgttgcctgaaggaggggctggagaaagaattttagggactctggggttacttaaagtccttgatgtccctgtgtcctcaatcaggtattcccctggaagagatctccttcatttcccaactattcttcagagtgcagtgcctcagttgtccgtgtgtagtttgactcatgtttcagagacatcctgtgccgaagggaagtgttgagcaggctggccttggctggtccatcttctcatcagcttttctggctgcacacaccacccttgtttgtgttgccaacatctctcttcataaacattccccactgtctgcag

SEQ ID NO: 3339 - DNA, 11932 bp, Cricetulus griseus
  misc_feature (134)..(157): n is a, c, g, or t
  misc_feature (319)..(333): n is a, c, g, or t
  misc_feature (892)..(906): n is a, c, g, or t
  misc_feature (4045)..(4095): n is a, c, g, or t
  misc_feature (7309)..(7332): n is a, c, g, or t
  misc_feature (11408)..(11463): n is a, c, g, or t
ttatgcaaaagtgcacctgtttctaatttgatctgaaaggaacattgctttttcgtgctcttaaaatgtaatctaatcaaatggcagcatgggcaggggcaggggcccgggtggtgtttgttgttgtttatttnnnnnnnnnnnnnnnnnnnnnnnnttgacaagaaagtaagatacctggcttgttcttggagctgccctgtacaccaatcatggggtcccttccacaggtactcagccttgtggctccttcctttccttccagagcacaaagcctggggttccagttgggatccatagaatgtttcaggaagagttnnnnnnnnnnnnnnnaaggagaactcacactgggcacctctgtgcagccacaccccctgtgcggttatgactagaagagcagcaggtgtcagggccttggcttccagccatgagtgggcacctagagcataacctctgaagtcctcccacctgccacctgcccagggacaggcagcaacatcccccaccgcacacacactgtgcgttaagtatcttaacggtgggagcagggagactgagcaggtgggaaccatgctgaagaccccttgtgaggctggctgtaggcagcatgtccacttcatggacagagatgagagtagagtgcgcaacagaggtcagacatggtccaggcccttccagcctccctctgactctgtggagatgaggagggagccaggcgaggtccaggccctccccaccccctctgcctctgtggagatgatggaggggaatgaaggagggagccagacagttgtgccaacacaactcctccgtcgagtgtctaattgcttatgatcatgcatgctctctctgcactaacatttattaatgtgtagatttccattagcgagtnnnnnnnnnnnnnnncatttgcatatggctggaaaaaagtggggcgagagagaaacagcgccagctacccaacaggcgtcaatcacagtgacagatcagatggtctaaggctgggggtggggtgggggaggatgtctgagatgccggcatgcatcctctcagcccataacacagaaattcgggagagtcctcctgctgggaaccacgcccctgaggctggggctggccacctctccagttcctgccgatgcatggtcatgtctggtctgagcagcttctggggtgcccacacacagatggtgaaactggggcccagaggctctccctgtgatgaacaaatgtacctgctgaaccacaggtggacccactgccatatgcagcctttcaccgagccccacattctgctctcttccctgcctggatcccattctcacctctgtacacaaggcccttcttcagcttgaatatggggttttcagctgtagccagcacctgtgagtagagctctactgactgaaggaagttagggtaggcaccagttttgtcaggaagatgatgagatcagggaggggtgactgctggagccccgcagtttggtaagactgtcatggtttgtgtcctgatgctgtgtgtcttgtccacagtgaggacaggaaagatggcaactcactaactgggccctaaccagcagggtgtctgtggttctccattccttatcctctccctctacatggccgctgaagctaggagtcccccttggttctgcctcacaggtttgactacctctgatgtgcctctcccctggcctggggcttacccaggaatggcagaggtgattggagcatggaggccaccaccaggcaaggctcctacactcagccaggcccccacctgttgttggctgttttttactctgaactcttttgggggcctgccacccagctcccaaataaatcacatacacacagagacttattcttatgaatgctcagccttagcttggcttgtttctagccagctttccttaaattatcccatctaccttttgcctctgggctctttcctttacttctgtaatattactttcacttttactcattggctgggtgggtggctggcccctggagtcatcatcctcctagatctcttttttctcctatctattctctctgcctgccagcccagcctatcctttctcctaccttgctattggccattcaactctttattagaccaatcaggtgttttagaaaggcaaggtaacacagcttctcagagttaaaagcaatgtaaaagaatgcaacacatctttgcatcattacacaaatgttccacagcataaacaaatgtatcacagcttaaaataatgttccacaacacctgccctgggactgctcacccatccttcacccagactccaaacattttccgagagcacaagagcaattgtgctccttccctgcttgtgaccaacagtggcttctcagagccagccagcaggcccccaggctcgtgggcctgtcccaaggctctgaggctaccctctgaggtctgcaggacccctcctggccacctgtgctcctgtgggacttacatttctatagattctgtctgaaaggcagaagtcccctcccctgccccttccatggctctgctcagagttatgctatgtctcctggctgacttccggtttacacagcgaagacagagctaagcaggacaggtcgggctaggagcaaatggctacttctccctgttagttcatctgtctgctccctgagatggcacagcactcaacaccatagagtgtgtagcagacatcaggagtgtaaggaaggaaaggagaacgcctgtctctttccaggttctcctgatgccctcagcaaggcctaggtgacacagccggcagaactaagccacaggtgagaaggaagggaggggcctgctgacccagcagcactttttccttctgaggcttaggagctattagcactggtggctaaatccctaatcctccattcagtgccctgagacttcccagctgcccctacgtctgagcagccaacatggctgtagctagcctcagagatagcttcccagagccctggcaaccaagcacctcacagttcttcgcagcccaacccctgtaacgcacactcttttgtagcactgatcttttcaatacccctcacctgagagggcgagaacccaggctgcaggaggggccagactgcctacttcacctctactgagggttcctagcctacagggatggtgtcttagacactgctgtgggccaagagctgaatgcacagaagcaggcgcacgtgacctgcattccagatatactaataagtttggttcagtagcacagcaagactgtctaggtcagtggttctcaactttccaaatcctgtgaccctttaatacagttcctcatgctgtggtgactctcaaccataaagttattttgttgctacttcacaaatgtaattttgctactgttatgaattggaatgtaaatatctgacatgtgacccccccaaagagttcgtgaaccacaggttgggaatcactggtctaggcggtgtcaatgcagacagtagacaaggcgcacagtggggccgggccctggtgtggagcgtggtggtgttggctctccttggagacctgagggaggagcagaaggatcgaggtgacaagttccatcagcctgcagaggcaggtgatcaggaagggtgccactgtgctggttcagggcccgagtggtcattaagtgggtgcaaaggagccagggcacatcagttgtgctggtgcggacagcaggccagcctcagtctggatatggttgttgtgccccaggtttcccagacccagcaaacagaggcccaaaagggggatgtgggattttccagggtatcctgctgactcagagacacagggcagaatctggtcctcctcttgggtgcccattgctccgtctgagtctgtgtgactccagtgccaggcgctttcctctagtgactgttgctttgatgaggcagagaggcacagcctcccctacgaactatgttttcatgtgggaaggagaatggcaatggaaacccacagaattctgtagactgtgtggttgtagctctggccgtggctggcnnnnnnnnnnnnnnnnnnnnnnnnnnnnnnnnnnnnnnnnnnnnnnnnnnnaagtgaagatgcatagccaatcagagctaaggacttctaatgaccgtctcaacagactctgaacttgcctcgctgaatgaacacactgtactgactgccgtgtcccccctcatctcagtgacagcttttgacctgtgaggcagcgttccttacctcaacttagagacagacagtgcttccagaggaggccttgctgcccacttactcactgggtcagcaggtgtttactaagctcctactgtgtgcccactccaccctgcaggttcacataagagcctaggggatgggcaaagcagctgtccccagcatggtggctgccaaggctgctgaggtgctgttgagctggttgggggtcagggtagatcaggggggtgaccaccagggtcatgtctccaccttgacctcattaatcgttggtcttaatcaccaagccaagctccttaaactgctagaggccaactctcacccccgacacataccagtcctgtgttctttttctcagggaacctgcagggaaggggttgattttctgagcagacagacctaggaatcccaggtgtgaagagatgagcaagagagagcttaagggctcagaggctcagaggagaacacttccctggccaggttcctaccagggcttcagggcctgggtacctgtgtggcaagtggcatggcgttttctcccgtcatctgcttcttaactcaaccctcaccttgtcagagaggtcttcataagtggtataacttcggcgttgagggacctttcctcctgttctttgactagctcttgtaactgccactcaccaccatctctcacagggtgttggcttcttgcaaccagtgctttcttgtctcctgtgggcccccagaatcaaatcccttgcctgggacttagtgggtgctccaggcatatgtcatctggacagtagtcctagaacaacttacacatgggggtctccagggacctcagctatatggcagatatgctggcccccatatcctcagacactaggctggtccaggaccagcctctccctcagactggcatcccagcaggccagtgccagcatctctcagcctacacagggttctgacaccctgaagccccaggtgtctgattatcctctctgcccctgagttcacccagttttatgtccattgccttctatataaggcaaaacttcttaggccctcaccatggcctctaggtccacgcactcacctgaataacctggcagcctgcttcctcatggggggggcccttgttcttccccaccctagcaggccaccctcatctctgtagcccgtggtcatccctccctggactggaatgtgtttcttcctctagctgagccttgctcaggccagaagcgctctaagcagggccatggcctcctcctttgtctcccaggtggctggctcataaatgtttaatgaacaagtgagtgagcaaattccaattgaatgcaacaaatagttatcgagctgctgagcctggggtggggtgggtggtaatggactgagctgactgtgctcagatctgtccaaagagctcgtgtcagggccaggggactgggaagggccggggtaggtgagttcagggagaggcattgtcggttgaagcattatggagaaatggacttagggtcctaagcccccagttgtagcctgaggccactggactgacatgggtagaaatttcctggggaggactctggggaagacaagatgagacacccttcctttactcaagggcctctacccggtgtcaccttggcccctttgcaagccaattaggccccagtggcagcagtgggattagtattcttagtatgatatctcccagatgctgaatcagcctctggcttagggagagaaggtcactttataagggtcttgggggggttgatgcctggagttgcgctgtgggagctgtaggtggctgagctcgctaggcagcctcggtctctattgacgaacagcccctggggcagcctcgagggccacagccatgaacggcacagagggccccaatttttatgtgcccttctccaacgccacaggcgtggtgcgcagcccctttgagtacccgcagtactacctggctgaaccatggcaattctccatgctggcagcttacatgttcctgctcatcgtgctgggcttccccatcaacttcctcacgctctacgtcaccgtccagcacaagaagctgcgcacaccactcaactacatcctgctcaacttggcggtggctgacctcttcatggtctttggaggattcaccaccacgctctacacctcactgcacggctacttcgtctttgggcccacaggatgcaacctcgagggcttcttcgccacactgggcggtatgagcagagggactggggtgtggcatgagggccaagggggcacggaagggcctagggagggactgcagcttgggagaagcagcttaatgggcctctctccactcctctttaatcggtatcacccaaaggctttgcttattcactgacaacactgatgctgagctgggcatcagttgtttagagcaagcgtctatctcatgagtaatacaagaatcgaggctccagagaggtcaagggctcactggggagtcacagtgtgagagggaaccctctgaggcagctaagctggggcagagtcagatgagcaccaggatgagctagaaaaggcacacaggtccaggtgacaattgggtcggtgtactgggcatctgtctgactgccttcccagccccgtgggcctccatcatgagtgcatgctccatacactgggaatctagaggagtcatttgtggtttttttctttttctttatatccttgggggaagacaacagtctcccattgtgcagactggccataaactaagtgaggatgcccttgaactcctgatcctcctgcctcagcttctcaagtgctgggatcacatggaccacctcgccacactaggggtttccaaacatttttctctcatttgcctggaagatcaaagaggctactacagggacaatgagcctgtttagctgaggcagggagcaggcaaaagactcatttagagatgtgacagggccggaaccagaatcagggtcccctggctgggacccaacattgttgtcagtggatgttagaggacacaggaaaagtgggcatgacaaagctcaaggccagagcaatgggtctagcnnnnnnnnnnnnnnnnnnnnnnnncttatctccccatgtataggatgctgccttggtggcactgttgggtatcttctgtgatcacagtcccccagtctttggacagaagctaggatgccatgctagtgagtttgtctctgtggggtcaggcttaggccacacctgtcatccagaaattcttgtcagtagcactcctattattcagcaatgtcccagggctggtttattttgtggctcttctccatactgagtttctgtgggtgacatgtggactggagtctggagtcccgttgcccctctcttcttcccctgccaaagcactagccagtgtgtggcccaaagccacagttccagccattccaaggctgtgtctctcctgaaccgaaagctctaaccaaacagagaggctcttggttctttggagttcctttgctctccccggcacatgggttcttcattctgccccctcttcctggccagtccaaacttgctgcatctataaggcttggctcaagtttcaaagcagagactcccatgctaccctgtcctctctgggggtgtttgttctttctggtctgaggtcagagctggaggactgatagctaccaactgccttacaggtgaaatcgccctgtggtctctggtggtcctggctattgagcgatacgtagtaatctgcaagcccatgagcaatttccgctttggggagaatcatgccattatgggtgtggtcttcacctggattatggcgttggcctgtgctgctcccccgctcgtcggctggtccaggtaatggcactgagcattgggtctggcaaggcttttgcccagttcccattcagaacacagagcctgtgggctggttccaagcattctataacatggccttccccctaaaaacatcctggtgactttcccaagccaaggtctaaggcaggggagaagggaggggcagtgatggtacaatgagtggattccatcgctgaaccccatggcaaggggaaccctggacactccaagccttcaccttggctgagctcctaatcctcagctaagccaaggccaaactacaatcctctttggttgagttctcctgggtatgggacagctctctctgaccttggacctcagccctatgggaagctgaactttcccaacatgcatggtgtcattgtaactccaggaactgctcccatccagctccaggctaccatctccaaatgtaggcaggacaagagagggtagggacagtggtttggtacccagagcatcagaatctcctttcttgtcttacatcccttccccacctccaggagtccatctagtgacccttgttgagtcagagcccatcacaccatgctggcctcttcccttatcttcatcttctgggcttgacaggcctctacagatacactcagtggacactctggggtttctgagtgcagcccagtctcactatcctcagacatcatcacaaaatccttgtttctaaaagccgcaccaagtcccggagatggctgcaagcccatccttagtgtagaccgcgttgctgttgctaggagacccacatctccaaactactgcattaacaggacagtcctcagccctcctccccagcaccttctgccaactgacttaaaccaccaaagggcagcaggctggtggcaaagagctgtgcggtcaggtggtaggaagcttgagaattgcctaagggcagagactgctgagtctcacctggcgatggggccaacaggtaatgacaccaggcttcccaaggccacagggactccagactccatgggccccacactatgcccagctgagcatctgttccccttcagctgtattgccccttgccccatcctcaggtacatccccgagggcatgcagtgctcgtgtggggttgactactatacactcaagccggaggtcaacaatgagtcattcgtcatctacatgttcgtggtccatttcaccatccctctgatcgtcatcttcttctgctatgggcagctggttttcacagtcaaggaggtatgagtgggggctctctaacgtgtgtccccaggccatgctgggtgtttagagctaggtgccagggtatgtatagaccccatgggctggacacaggtctgtacccctgtaggcggctgcccagcaacaggagtcagccaccacacagaaggcagaaaaagaagtcacccgtatggtcatcctcatggttgtattcttcttgatctgctggttcccttatgctggtgtggccttctacatcttcacccaccaaggctccaactttggccccatcttcatgaccctgccagctttctttgccaagagctcctccatttacaaccccgtcatctacatcatgatgaataaacaggtgcctgggatgaggccggggtgggggttgggggggagtgagagaaagaaggggaaggggaggggacggggcaggattgaggttccatccagactgctggcaggccatgagctctctggttgagcctcccagtctctaggtagcctgggagtaagccctccaggtgaccagatgacctgacacctgctccttggaaatacatctgacaaatcgttctggaagttttcttgataagtcagctggaagtcaggcacatgtacgatctaaaccctgaggcaggtagatcttgagctccaggtcagcctgggctacatggtgacgtgaaccccctccaaagcagggtgtggttgtacacctctttaccccagcattcaggaggctgaagcaggcaggtcagaagttcaaagctatcttagaccatacagtaatctggcggccaacctgggctacaagagagtctgtctcaaaacaaaaacaaaacaaaaacaaaaacaaaaaaccagaaaatgtcaagtagttccaaggccaggaatggaatgatctcactatttgtaaagctgaaaaagttgctgaaaatgctaggtctgggaggagggggaacaagctgctgttaaaagccatggtctctctgcagaaaaggtgtggtctctggacttagactccgggttcatgtcctggctctgttatgtccaggctgtgtgaccttgagagagtcagatgtctccctccctgggcttcggttttcctatttacaggaagggccaaatcctaaactcaatttgcaagagatctttcacagaaggtcctaagcattcacaggacaccgtggaatatcatttgatgaaaacccttgtgttgggttcctggcatctctgacggtggggaacatacacttagcaagctcccccagggagccagacttagtgaggggactggctgtgggtggtggggctgaggctgggcagggtggtggggcttggtcctgactggagccctctgccttccagttccggaactgcatgctcacgaccctctgctgtggcaagaatatactgggtgatgatgaggcctctgccactgcttccaagacggagaccagccaggtggccccagcctaagcctggccagagactgtggctgactataggagtctcctgtccccacccaccccagccacagaccccaccaggagcagcacccgttggaatgaggtcatgcagactcccgcagtgttctttgctttgtttttaattaatccatgaaagaaaaatgaggctccccactcaacagggacagcccaagaaaggacatccatccacccagactcccgacctggagtccccaattccccggggccagcgggatctgtatcccttccccgcagcttgtttctcaagaacatgacaagtgtcccagcttagggttaagtgtctaggacagaatggagcacacagtagctgattaataaaatctagctggatgaagggaggaatgattggctgaatgattggatatgtgaatgaggggattgatggaggggaacatgtacgtcctgaggtgcccaacctggcagatccagtcatatttggctggaatctataagcaattgtttttacatccctgccctggttgtcttccaccacccccagatggaaatcccaaatcccaggtcctgacatgtggctgcttcgaagacagagagatgggggaaggnnnnnnnnnnnnnnnnnnnnnnnnnnnnnnnnnnnnnnnnnnnnnnnnnnnnnnnnatgtttgtgtatgtatgtgagtgtgtgcaaatactttgtatataaacagcacagctagtagttgtgttacaaataatatcaattaatagaattaattaaccatccttattgtctctgattgttagtgactgcttgggaattggctggacccaggcactcagacagggtgtttcccccagctccagtagacttttaccaatgacccagcctttaggcctgtgcagggctggagcaggatcatagggatgacagtgacagcaatgtggctatagccattaggactgagaaagcattgtgaccaggggtctcagcaaggcctgggtcctgccttcagtgtggcatccttggtgcatgtcttccaatcctacttggcctgagacccagccctccttcttggcttctggaaacatttgttcttccacaccagcaaccaggtagcaatggttccaggccagcatggagttctaga

SEQ ID NO: 3340 - DNA, 1269 bp, Cricetus cricetus
ttccttcttgagcccagagccgccgccgccgcccccagctcccccgagtcgcggggagggcaccaggttactacttccagtggagtccagaagagggaggaggcactgcctccactccagcagctatacacacaatgcagagcatcaagtgtgtggtggtgggtgatggggctgtgggcaagacatgccttctcatctgctatacgactaatgccttccccaaggaatacatccccactgtgttcgacaattacagcgcccagagtgcagttgacggacgcacagtgaacctgaacctgtgggacactgcgggccaggaagaatatgaccgcctccgcaccctttcctaccctcagaccaatgtctttgtcatctgtttctccattgccagtccaccctcctatgaaaatgtgaggcacaagtggcatccagaggtgtgtcaccactgcccagatgtgcctatcctcctggtaggcaccaagaaggacctgagagctcagcctgataccctacgacgcctcaaggagcagggtcaagcgcccatcacaccgcagcagggccaggcactggccaagcagattcatgctgtgcgctacctcgagtgctcagcactgcagcaggacggcgtcaaggaggtgtttgctgaggctgtccgggcagtgctcaacccaacaccgataaagcgtgggcggtcctgcatcctcttgtgaccctggcactcagcttggagcctaccccttgttcccccaccagttgtgccttggcgccttgtctgctcccagctgtgccttaaggacaattctggcaccccatgccagggggactccctgaatgccttttattccttaaggaggtcacacagggaaaggggctttgggcccaccccactctggcttgaggaatatcccataggcacttccaagaggtcacctaagccaagtcgacctttccaagaggccaacccagtgctgccttccatttcctgctactgaccagttcatccagctttccacaaagttgttgctgcctattgtggtgcctcctctcaggttaagggctctaacctctctgcctttgctcttggagtaggctctccaagatattctctccctcccccaagggggagagccacaaaaccctgagaagaaaaatgccctaacctgccccatgtgcccaggcctgatacgtctgctgactgactcgagccccatgcttctgggggcctttcctaccccccatcagcatcaataaaacctcctgtctccagtg

SEQ ID NO: 3341 - DNA, 392 bp, Cricetulus longicaudatus
  misc_feature (56)..(56): n is a, c, g, or t
gggtccagccttccctgggcaaggaatctgctgccatgaagttcgagcgacagcanatggactctactgttgccaccagcagcagccccacctactgcaaccaaatgatgaagcgccggaatatgacacaggggcagtgcaagcctgtaaacacctttgtgcacgaatccctggcagacgtccacgctgtctgctcccaggaaaatgtcaaatgcaagaacgggaagtctaactgctacaagagccactctgccctgcacatcacagactgccgcctgaagggcaatgccaagtaccccaattgcgactaccagactagccagcatcagaagcacatcattgtggcctgtgaggggaaccccttcgttccagtccactttgatgctactgta

SEQ ID NO: 3342 - DNA, 437 bp, Cricetus cricetus
ctctttagagtcttggatctaagatgaccaagaaaagacggaacaacgggcgagccaaaaagggccgcggccatgtgcagccgatccgctgcacgaactgcgcccggtgcgtgcccaaggacaaggccatcaagaagttcgtcattcggaacatcgtagaggccgctgctgtcagggacatatccgaagccagcgtcttcgacgcctacgttcttcccaagctctatgtcgagctgcattactgtgtgagctgtgctattcatagcaaagtagtcaggaatcgatctcgggaagcacggaaggaccgaacacccccgccacgatttagacctgctggtgctgcaccacgaccgccgccaaagcccatgtaaagagatgtcttcaagaagacagaagaaagaaacgacttggaaaaataaaatgagtctttatattgc

SEQ ID NO: 3343 - DNA, 2131 bp, Cricetulus longicaudatus
ccacttggcgtgtgagtcgctgacgggaggatggacgggctggtggctcagtgctctgcaaggctgctgcagcaggaaaaggagattaaatctctgactgctgagatcgaccggctgaagaactgtggtcacttagaagattctccgagtttggaccagttacgagaagaaaatttaaaattgaagtatagactgaatatccttcaaaggagtcttcaggcagaaaagagaagacgaccaactaaaaatatgattaacatcaacagccgcctacaggatgtctttggctgtgctattaaggctgcatacccagacttggacaaccctcctctggtcgtaactccaagccagcagcccaagtttggagactatcaatgtaatagtgcaatgggtatttctcagatgctcaaagcaaaggaacagaaagttaatcctagaggaattgcagaaaacattaccaaacacctgccgaacaatgaatatattgacagagttgaaattgcgggtcctggtttcattaatgtccacttgagaaaggattttgtgtcagagcagttgaccaatctcctagtaaatggaattcaactacctgctcttggagaaaataaaaaggttatagttgacttttcctctcccaacatagctaaagagatgcatgttggccacctcaggtcaactatcataggagaaagtatgagccgactctttgaatttgcaggatatgatgtgctaaggttaaatcatgtaggagattgggggacccagtttggcatgctcatcgctcatctgcaagatcaatttccagattatctcacagtttcacctcctattggggatcttcaggccttttataaggaatctaaaaagaggtttgataccgaggaggaatttaagaagcgagcctatcagtgtgttgtttcactgcagagtaaagacccagatttcataaaggcctggaacctcatctgtgacgtctcccgtgcagagtttaataaaatctacgatgcattggacatcactttaatagaaagaggcgaatccttctatcaagataggatgaaggatatcgttaaagaatttgaagataaaggatatgtgcaagtggatgatggtagaaaaattgtcttcgtgcccgggtgttccataccattaaccatagtgaaatcagatgggggctttacttatgatacttctgacctagctgctatcaaacagagactatttgaggaaaaagcaaataagattatctatgtggtggacaatggacaagctgtacatttccagacaatttttgctgctgctcaaatgattggttggtatgaccctaaagtaactcaagtgacccatgttggatttggtgtggtgctaggggaagacaagaagaagtttaaaacccgttcaggtgaaactgtacgccttgtagacctgctgggagaaggactaaaacggtctatggacaagttaaaggagaaggagagagacaaggtcttaactgaagaggaattgacagctgctcagacatccattgcatacggctgcatcaaatatgctgacctatcccataaccggttgaatgactacatcttctcctttgacaagatgcttgatgacagaggaaacacagctgcctacttgctgtacgccttcactagaatcaggtctattgcacgtctggccaatgttgatgaagagatgcttcagaaagctgctcgggaaaccaagattgttttggaccatgagaaggaatggaaactaggccggtgcattttacgattccctgagattttacaaaagatgttagatgacttatttctccacactctctgcgattatatatatgagctggcaactactttcacagagttttacgatagctgctactgtgtggagaaagatcgacagacagggaaagtattgaaggtgaacatgtggcgaatgctcttgtgtgaagcagtagctgctgtcatggccaaggggtttgatatactgggaataaaacccgtccaaaggatgtaatccttagggttggagactgtttttaccaaagtggctattagtactgtttactttttaaacaatcaatgtggatacaaaagtagtaaaggaattttcacaactaaaaaaaaaaaaa

SEQ ID NO: 3344 - DNA, 615 bp, Mesocricetus auratus
  misc_feature (365)..(383): n is a, c, g, or t
acggcccggccggtccggcccctctttctgagccccgcggtgcgcgctacggagctcggccagcctgctccgtcctgactcaccgctgttcgctcctgctgaggaacaagtcggtcaggaagccgcgcctcagccatggtgaggtggggggcgtcgccacgcggcctggggcgtcggcggggctcgacttgctggggcgccgggagcgcagagcccgggagagggctcccgccgcggcgagggcccgggagagggtcctcatggcggttgtgtaggagtgggcctccacttacgggtcgctgtttgtttttcccgcctgggtgataacaggcatttaaagataccggaaagacgcccgtggagcnnnnnnnnnnnnnnnnnnnaattcgaatcacgctcaccagccgcaacgtgaagtcgctggagaagggtcagtacgatgctcggggtggcttggtgatcgggaccactcctcctcgggctcccggactgccacgccggctggcctggttctccatagactgggaacaggtatgtctgatgcataggctgggctctggagggtttggctcggtgtataaagccacttaccacggtgttcctgtggccatcaag

SEQ ID NO: 3345 - DNA, 1179 bp, Mesocricetus auratus
  misc_feature (1082)..(1109): n is a, c, g, or t
tcgagttttttttaaaaaaagttaatataaaattatagcaaaaaaaaaaaaggaacctgaactttagtaacacagctggaacaatccgcagcggcgcgggagggcgggagaagagatttaattttagttgattttctgtggttgttggttgttcgctagtctcacggtgatggaagctgcacattttttcgaagggaccgagaaactgctggaggtctggttctccaggcagcagtccgacgcaagccagggatctggggatcttcgcaccatcccgagatctgagtgggatgtccttttgaaggatgtgcaatgctcaatcataagtgtgacgaagactgacaagcaggaagcttatgtactcagtgagagtagcatgtttgtctccaagagacgtttcattttgaagacatgtggtaccaccctcttactgaaagcactggttcccctcttgaagcttgctagggattacagtgggtttgactcgattcaaagcttcttttattctcgtaagaatttcatgaagccttctcaccaagggtacccacaccggaatttccaggaagaaattgagtttcttaatgcaattttcccaaatggagcagcatattgtatgggacgtatgaattctgactgttggtacttgtatactttggatttcccagagagtcgagtaatcaatcagccagatcaaaccctggaaattctgatgagtgagcttgacccagcagttatggaccagttctacatgaaagatggtgttactgcaaaggatgtcactcgtgagagtggaattcgtgacctgataccaggttctgtcattgatgccacactgttcaatccctgtggctactcaatgaatggaatgaaatcagatggaacatattggactattcacatcactccagaaccagaattctcttatgttagctttgaaacaaacctaagtcagacctcgtatgatgaccttatcaggaaggttgtggaagtcttcaagccaggaaaatttgtgaccaccttgtttgttaatcagagttctaaatgtcgcacagtgctttcttcaccccagaagattgaaggtnnnnnnnnnnnnnnnnnnnnnnnnnnnntgttcaatgattacaattttgtttttaccagttttgctaaaaagcagcaacaacagcaaagttgattaag

SEQ ID NO: 3346 - DNA, 570 bp, Mesocricetus auratus
  misc_feature (2)..(456): n is a, c, g, or t
cnnnnnnnnnnnnnnnnnnnnnnnnnnnnnnnnnnnnnnnnnnnnnnnnnnnnnnnnnnnnnnnnnnnnnnnnnnnnnnnnnnnnnnnnnnnnnnnnnnnnnnnnnnnnnnnnnnnnnnnnnnnnnnnnnnnnnnnnnnnnnnnnnnnnnnnnnnnnnnnnnnnnnnnnnnnnnnnnnnnnnnnnnnnnnnnnnnnnnnnnnnnnnnnnnnnnnnnnnnnnnnnnnnnnnnnnnnnnnnnnnnnnnnnnnnnnnnnnnnnnnnnnnnnnnnnnnnnnnnnnnnnnnnnnnnnnnnnnnnnnnnnnnnnnnnnnnnnnnnnnnnnnnnnnnnnnnnnnnnnnnnnnnnnnnnnnnnnnnnnnnnnnnnnnnnnnnnnnnnnnnnnnnnnnnnnnnnnnnnnnnnnnnnnnnnnnnnnnnnnnnnnnnnnnnnnnnnnnnnnnnnnnnnnnnnnnnnntgatgaccagcactgctgtgtacccctcatccccatcctatacaagaccactgtgctcaaatttgaaaccagaatttctgtttaataaagtctattcttttcagtaaaaaaaaa

SEQ ID NO: 3347 - DNA, 833 bp, Cricetulus barabensis
  misc_feature (145)..(199): n is a, c, g, or t
  misc_feature (479)..(495): n is a, c, g, or t
  misc_feature (777)..(828): n is a, c, g, or t
gtgatcctctcaaggcacacctgttggggagggcctggtacaagggtgaaggctccagtctggcagatagaccttccacaggcaggtgaagcttccaaacactggatatgcaatccttgaaagagcgccagtgttcataaggaannnnnnnnnnnnnnnnnnnnnnnnnnnnnnnnnnnnnnnnnnnnnnnnnnnnnnntcctggtagagtgaggaagtagcagaggcaccaggtgctagggtaccagggcctcctgagaaggaacaggtgcaaagcagagcaattagcccagaggcatcagtggacagacaggctggatttgatagggagccaccaggattacatcacctgctggcgagcaggccccataagtctccccgtgcatgccgggcagcaaggaaacttggttcttcttcaaggagccagaggacacggtaattaaaatatttttttaaaaaaaatcaaaacatttcgaagnnnnnnnnnnnnnnnnngcctctcacatggtgttctggcactccacgttcgctctagaagggaagaagagggggtgtcacaggtgctgagagttggacaagcccagagtgaggcaggtgtgcactgtgtgagctggcagctgctaatgtctttggaaactgctaatttacccttctgcaccagccacaaaaggggaccactcaattatccccccaagaggctgatgtttagctcgagctcaatttctgtctctgtctctgtctctctctgtctctgtgactccctctgacccccttccnnnnnnnnnnnnnnnnnnnnnnnnnnnnnnnnnnnnnnnnnnnnnnnnnnnnatgaa

SEQ ID NO: 3348 - DNA, 630 bp, Cricetus cricetus
atggctgagacctgcaaaatgaaatacacagtgttccacagtcctttggggaagatcgagctgtgtggctgtgagagaggcctgcatgggatacggttcctcagcggaaagaccccaagctctgaccccaaagaggccccagccagtcctgagttgctcggtgggccagaggatctgccagagtccctggtgcagtgcacaacctggttggaagcctatttccaagaacctgcagccacggaagggctccccttgcctgctctccatcaccctgtgttccagcaagattcattcaccagacaggtgttatggaagctgctgaaggttgtgaaattcggagaaatggtttcttaccagcaattagcagccctggcaggcaaccccaaagcagctagagcagtaggaggagcaatgagaaacaatcctgtccccatcctcatcccctgccacagggtgatctgcagtaacggcagcattggtaattactctggaggagggcaggctgtgaaggagtggcttctggcccatgagggcatcccaactaggcagccagcctgcaaggacttgggtcttactgggacccggctcaagccatccggtggctccaccagctccaagctatctggctga

SEQ ID NO: 3349 - DNA, 732 bp, Cricetus cricetus
accatggtaaagattctgctgctggctttggtctttagtctggctcatgctcaggattttgcagagcttcaaggaaaatggtataccattgtcattgctgctgacaatcttgaaaagatagaagaaggaggaccactgagattctattttcgtcatattgattgttataaaaactgcagtgaaatggaaatcacattttatgtcattacaaacaaccagtgctccaagaccacagtcattgggtacttgaaaggaaatggaacctaccaaacccagtttgaaggtaacaatatatttcaacctttgtatataacatcagacaagattttctttaccaacaagaacatggatagagctggccaggaaacgaacatgattgttgttgctggaaaaggtaatgctttgacacctgaagaaaatgaaatacttgtgcaatttgctcatgaaaagaaaattccagtggaaaacattctcaatattcttgctacagatacttgtcctgaataaaggccttccgtaggtgagaacaggatggcaattaggcatcatatcctcttgatcatggaatcagcatcacaaataaatcaccatttcattctacatgaattgtcccatctcctgtagagccaggataccacatatcaaattcctggcttagctttcctttcccatcacatgatgtattacctgttcttatttttttgactgattaaataaattgtttcaagaagc

SEQ ID NO: 3350 - DNA, 495 bp, Cricetulus griseus
  misc_feature (1)..(18): n is a, c, g, or t
nnnnnnnnnnnnnnnnnnaagcagtgaaattttttaagtcctggttgatgggccgtgctactaggagcatggacaacagtggtgcctagggtgatttgaattgtggagacttggctcaaagaggttaatgagggaaagacttcttagtatgttgactagaggtttttcttgtgatatttgggggagagaatgtagttgtgttctgccatattgagattcttatcatgtattgagaaataaaactggggaataaatattaaggaataaacataagaaatcccagcatgactgagacaacattcgccctctctacttcctcaatctaagagtgcccacaaccccttgaccccatctcttcctctcatgtgtgctttcctctttcttttcttagtttctcagagaactcaatagtctattctggtcagctgaatgtggactttaccctctgaatccaggtaagctccaatgatgggttaaccctaaccctaaccctaa

SEQ ID NO: 3351 - DNA, 450 bp, Cricetulus griseus
  misc_feature (1)..(20): n is a, c, g, or t
nnnnnnnnnnnnnnnnnnnngctctcccacaggtgcttgttgtcatgggtggatcttctgctgtggtcttagtgtttccagtctccacccagcagcaacacagcctttgagggcaatgaccactcttctgccattcaaggacacctgaagaatgatcatcaaagacactcagagcaaagttttgttcctcatcagccacctcaggcactttgttagcttaccctgaccacaccagtgcagactaaaaggggcgtgtgtatctgcagattaaaagattcagggatacactttaacatgttaaacactaaattaaaaaaatacctctctttgtctgtagctcaggttgatcaggacttctgccaccatgcccaggaaaactttattttattagcacttatttttagtattacttttaaaatgcttcagtaatttccctaaccctaaccctaa

SEQ ID NO: 3352 - DNA, 556 bp, Cricetulus griseus
  misc_feature (1)..(18): n is a, c, g, or t
  misc_feature (419)..(437): n is a, c, g, or t
nnnnnnnnnnnnnnnnnncagaagtcaggctgtatttctgaaaatttttaatctttaaacttctttcctttggaaaaaaaaagttttgggcaacaattgcattgagcactaacctcttgagttgtgcacagagcaggtctttgtcaccgagtatgtatcgttataaaggattacctggggctgtgttgagaggcgagcagcttcttgagaggctgtcctgataattaagccaaaagtcaaggcctgaaggagggttaaggctctgccgcaagtggaaagggagaggagagactggaactttgacaaatttaattgtataatccaatagtattaaaggaaaaaaggaagcacctgaggcaacttgaggtttaggggtccaccagatgcctgtattgaacatggaggtgcttttctgagannnnnnnnnnnnnnnnnnncattgttttacttagtcctcaagtgaccctgagaggaaatgccattgtcatcccaggagcttgtatgcgactaatgaatctgagatcagacaccatccctaccctaaccctaaccctaa

SEQ ID NO: 3353 - DNA, 385 bp, Cricetulus griseus
  misc_feature (1)..(42): n is a, c, g, or t
nnnnnnnnnnnnnnnnnnnnnnnnnnnnnnnnnnnnnnnnnnggatgacagtctttccttcataagtccaatccccgtttggttcctttgcggctcccaattcctctagggtttggatgtctctttgttcatagtcccatgaggggaagggatggtcgttggtgggctctagagccaggaggttagtggtgtctgtggtcaggggccgcctctcgggcagccaagtctgcccttcgattgccccttgcttcgaaagaatcccctttttggtgccatgtagactgctcccaggttaacagtaataaaaaccccttctggatagaactttacagatgcaggagctggcccattgagttctctgaatgggccctaaccctaaccctaa

(The sequence listing continues in the following parts.)
